United States Patent Application Publication US 2026/0103690 A1 - sequence listing, part 8

SEQ ID NO: 14236 - protein, 343 aa, unidentified
  source 1..343: note = protein_28a85fd
  REGION 6..149: note = RuvC_domain
  SITE 9: note = RuvC_P1
  SITE 54: note = RuvC_P2
  SITE 89: note = RuvC_P3
  SITE 91: note = RuvC_P4
  SITE 94: note = RuvC_P5
  REGION 213..300: note = Tnp_domain
  SITE 221: note = Tnp_P1
  SITE 251: note = Tnp_P2
  SITE 259: note = Tnp_P3
  SITE 260: note = Tnp_P4
  SITE 272: note = Tnp_P5
MKINRVGVDLAKNVFQLHGADLQGKAVWKRRLSRDKWLKVLFKTVEPGCEIGMEACAGAHHWARLLAAKGYRVKVIPPQFVTPYVKSNKNDAIDAEAICEAMSRPNMRFVTPKTVDQQDIQATHRIRSELIGHRTAKGNQIRGLVAEYGLVAPQYMSSLRAAIPQWLEDDDNGLTNRFRSLLHGLWEDLLTLDKRVESLDREIAAIAQSDPVAQRLQQLRGVGPLIATALIAAVGNGEQFSKGRQMAASLGLTPKQHSSGGKEHLLSISKRGNSYLRSILIHGARSAVAHAKHKDDRLSRWVTDLATRRHLNIAAVALANKTVRMAWAMMRYEVDYDPEFVVG

SEQ ID NO: 14237 - protein, 338 aa, unidentified
  source 1..338: note = protein_5f263cb
  REGION 6..152: note = RuvC_domain
  SITE 9: note = RuvC_P1
  SITE 53: note = RuvC_P2
  SITE 91: note = RuvC_P3
  SITE 93: note = RuvC_P4
  SITE 96: note = RuvC_P5
  REGION 211..298: note = Tnp_domain
  SITE 219: note = Tnp_P1
  SITE 249: note = Tnp_P2
  SITE 257: note = Tnp_P3
  SITE 258: note = Tnp_P4
  SITE 270: note = Tnp_P5
MSIVTIGIDLAKNVFALHGVDATGQAVLVRPNVPRAKLLELIASLPPCLIGMEACSGAHHWAREFQAFGHTVRLMAPKFVIPYRLSGKRGKNDAADAAAICEAVTRPNMRFVPVKSIAQQGQLLVHRARQGFIEQRTATLNRIRGLLSELGIVLPLKAAVVRREALVRLEDLPGWANTVIGDLLSEVARLDERIAQYDLHIRAMARQSTEAQRLMQLSGIGETTATALLSTIGNGRDFKCGRQLCAWLGLVPGQYSSGGKQRLGRITKAGDPYLRSLLVLGARAVLAAAKNKTDPISRWAVALAQRRGYWKAVVAIAAKNARMCWAVLSRGEDFRLPA

SEQ ID NO: 14238 - protein, 327 aa, unidentified
  source 1..327: note = protein_0ecab58
  REGION 4..158: note = RuvC_domain
  SITE 7: note = RuvC_P1
  SITE 61: note = RuvC_P2
  SITE 101: note = RuvC_P3
  SITE 103: note = RuvC_P4
  SITE 106: note = RuvC_P5
  REGION 203..288: note = Tnp_domain
  SITE 211: note = Tnp_P1
  SITE 240: note = Tnp_P2
  SITE 248: note = Tnp_P3
  SITE 249: note = Tnp_P4
  SITE 261: note = Tnp_P5
MQFVGIDVSKKKFDTLWLRQTRPQKVKTRVFQNKRDQEKAVVQWLLKQTGANPSEIHVVLEATCVYHENLTYALHEAGMQVYVANPARTRDFAKSEGFLSKTDKLDSLCLALYAKEKHERLHQWQPEAPEIRQLRALSARLEALEKDQQREENRLEKAEFNQSSDRVIASIKDMIAALKEEIRKLKQDIDDHIDGHPQLNKDRALLDSIKGVGDVMSRELLSLIHSRQFKSAKQCAAFVGLTPMHNESGDARKPARIRKAGHSNVRGRLYMAAVTACTYNPDIRALRRRMEAKGKSGMAIVVAAMRKMVQIAYGVIKHQQEYTPQVA

SEQ ID NO: 14239 - protein, 354 aa, unidentified
  source 1..354: note = protein_5fffe37
  REGION 8..162: note = RuvC_domain
  SITE 11: note = RuvC_P1
  SITE 67: note = RuvC_P2
  SITE 107: note = RuvC_P3
  SITE 109: note = RuvC_P4
  SITE 112: note = RuvC_P5
  REGION 208..295: note = Tnp_domain
  SITE 216: note = Tnp_P1
  SITE 246: note = Tnp_P2
  SITE 254: note = Tnp_P3
  SITE 255: note = Tnp_P4
  SITE 268: note = Tnp_P5
METIKQCVGIDIAKDSFTACIASISVQSEIIYSEIRTFTNEKPGFNQLSRWVRKQREKNTPLVFLMEATGVYYEQLAHHLVSIKQTVHVVLPNTSKHFFASLNIKTKTDEVDAKILSRFGVERKHKSWEPPRKSILHLRNLTRYYVQLQEQKTALGNIKHSKEASHDIQNLILRSNRTLIRQIDKQIDQIKAQIELLITKDAELKRKVDFILTIKGVGLITVATIIAETLGFEHVKNVKQLVSYAGYDVVQRESGTSIKGKTRISKKGNRYIRNSLYFPAMVACRYNETLKANYIRIIQKKPSKMIGQVAIQRKLLILIYTLWKNQTVYQTNYKKVVPPKSETTQDRSPQGELL

SEQ ID NO: 14240 - protein, 334 aa, unidentified
  source 1..334: note = protein_5b07631
  REGION 4..156: note = RuvC_domain
  SITE 7: note = RuvC_P1
  SITE 56: note = RuvC_P2
  SITE 97: note = RuvC_P3
  SITE 99: note = RuvC_P4
  SITE 102: note = RuvC_P5
  REGION 199..285: note = Tnp_domain
  SITE 206: note = Tnp_P1
  SITE 236: note = Tnp_P2
  SITE 244: note = Tnp_P3
  SITE 245: note = Tnp_P4
  SITE 258: note = Tnp_P5
MNTIGIDVGCKELVVVVVMVNGKARKAKSFENTPSDHQSMIKSFTKLKGETKVCMEATGVYHFDLAVALSRSNDIEVMVINPKAAHNFAKALMTRSKTDAIDAENLAIYAERMPFKVWERPTDECISLRATARRVAALSKQKTQTKNQLHALKSTVETPALVIEQTEQLIDVLDTQIETLRESALSLISDNEELKQAYILIIGIKGIAHASAVQILSELMILPKDMTARQWVAHAGLDPRIFDSGSSVSKKPRISKVGNKYIRQALYMPALVASRLEPNIKGYYHHLINDNGLKKVQAICAVMRKLLHAIHGMLRSNKEFDGTRFYTLPIATDS

SEQ ID NO: 14241 - protein, 343 aa, unidentified
  source 1..343: note = protein_a5d0f4e
  REGION 6..149: note = RuvC_domain
  SITE 9: note = RuvC_P1
  SITE 54: note = RuvC_P2
  SITE 89: note = RuvC_P3
  SITE 91: note = RuvC_P4
  SITE 94: note = RuvC_P5
  REGION 213..300: note = Tnp_domain
  SITE 221: note = Tnp_P1
  SITE 251: note = Tnp_P2
  SITE 259: note = Tnp_P3
  SITE 260: note = Tnp_P4
  SITE 272: note = Tnp_P5
MKLSRVGVDLAKNVYQLHGVDRHGKTIWKRRLRRGQWLQALLDKTDPGCEIGMEACTGAHHWARQLQSRGYTVRLIAPQFVKPYVKSNKNDANDAEAICEAMSRPHMRFVSVKTVEQQDLQATHRVRSELKDHRNAKANQIRGLVAEYGLVAPPSLLALRRAIPEWLEDAENGLTDYFRSVLHGLWDDLLTLEGRFKELDKEIEKLACSNEVTKRLQQLRGVGPIVATALVATVGNGEQFSNGRQMAASLGLTPRQSSSGDKRRLLGISKRGDVYMRTQLIHGARSVVSQAKHRDDPLSRWATDIAKRRHPNVATVALANKTARMAWAMLRNDTDYDPNLAVG

SEQ ID NO: 14242 - protein, 376 aa, unidentified
  source 1..376: note = protein_b5c3e15
  REGION 1..146: note = RuvC_domain
  SITE 44: note = RuvC_P2
  SITE 85: note = RuvC_P3
  SITE 87: note = RuvC_P4
  SITE 90: note = RuvC_P5
  REGION 251..338: note = Tnp_domain
  SITE 259: note = Tnp_P1
  SITE 289: note = Tnp_P2
  SITE 297: note = Tnp_P3
  SITE 298: note = Tnp_P4
  SITE 311: note = Tnp_P5
MMDDTGKVVFKAFSFPNTSDGGNALFSKLASYSLNPSDFEIGMEATGHYWLSVYSFLFEKSFLLHVINPIQTDGWRRGTEIRKRKNDIIDSLLIADLIRYGQFVETRLADEALFSLRTLTRFRTYLVESISDLKRKVVCVLDQVFPEYQSIFSDIFGKTSKEILLQFSSPIDFESVSSETLAELLAQLSRQKVGAAKAEQLKAAASSSFGVTFAKNSFTFQLKSLIEQISFIEKQVTETEAEISSIMEKLESPITTITGIGTVTGATILSEIGDISKFDSPRKLVAFAGLDATVTQSGEFEAAHNVMSKRGSPYLRKAIFQSALIASFRDPVLSVYYQKKRAEGKHHLTCVGAVARKMCNIIYAVLKNNRPYVPKV

SEQ ID NO: 14243 - protein, 400 aa, unidentified
  source 1..400: note = protein_3bf6717
  REGION 12..167: note = RuvC_domain
  SITE 15: note = RuvC_P1
  SITE 65: note = RuvC_P2
  SITE 105: note = RuvC_P3
  SITE 107: note = RuvC_P4
  SITE 110: note = RuvC_P5
  REGION 273..360: note = Tnp_domain
  SITE 281: note = Tnp_P1
  SITE 312: note = Tnp_P2
  SITE 320: note = Tnp_P3
  SITE 321: note = Tnp_P4
  SITE 333: note = Tnp_P5
MSGLKGNFGCIVGIDVSKDKFDACGITGEEVKLFQLSVAMDRKGFEKLKKQLSSFSVSSVLIGMESTASYHVNLFSYLVAAGYKVILINPLQISNYVKMELRKTKTDKKDAVVIARFLLANGDTLMQRATPSLISDLRDLSRQRESLVDEMTSLKIEIKQLLNITFPELEHMVGIFTKSILKLLQQYPSAVALREADIDQLSQSLITDSYGHKREAFAKALIKAARSSIGTNSPAKEIIIKQKIRFLLHQEEALQEITDMLMEMARKLMEEDINIITSIKGIGDKTAANFLAEMGGDIHKFECSGKIIAMAGLDPAVYQSGKHEGKGRITKRGNRHLRRIIWMMTTSVIQYTDIFHTYYLKRRKEGLPYKKAVLATAHKLIRVIYAMLTQRETFCPQGNS

SEQ ID NO: 14244 - protein, 398 aa, unidentified
  source 1..398: note = protein_233ac0a
  REGION 4..157: note = RuvC_domain
  SITE 7: note = RuvC_P1
  SITE 57: note = RuvC_P2
  SITE 97: note = RuvC_P3
  SITE 99: note = RuvC_P4
  REGION 271..358: note = Tnp_domain
  SITE 279: note = Tnp_P1
  SITE 309: note = Tnp_P2
  SITE 317: note = Tnp_P3
  SITE 318: note = Tnp_P4
  SITE 331: note = Tnp_P5
MNAVGIDVSKGRSTVAVVKTFGDTVAKSFEVRHTKSGMNDLVNYLNALDGECRVVLEHTGRYYEPMVRWLSGAGLFFSAVNPKLIKDFDNNSLRRIKTDKAEIARYALDKWPELRQYTAMDKIRTQLKLMNRQMSFYQKQQTAYKNNLIALMDETYPGANKFFTSPKRPDGSEKWIDFIEKFWHVDCVCNISLSSFTGKYQKWCKKHGYNFQPDKPKEIRDASLELIAILPKDDITKMFIHQAVEQLNAISKAVEELRHTMDSLASQLPEYPVVMSMFGVGPTFGPQLIAEIGDVQKFSKRSQLTAFAGVDPGVNESGNYAQKSVHTTKHGSPYLRKTLFLIMNTLIQNQPEDDPVYRFMAKKRDEGKLYYVYMTAGANKFLRIYFGKVKQYLAEQNK

SEQ ID NO: 14245 - protein, 345 aa, unidentified
  source 1..345: note = protein_59b1605
  REGION 6..146: note = RuvC_domain
  SITE 9: note = RuvC_P1
  SITE 52: note = RuvC_P2
  SITE 87: note = RuvC_P3
  SITE 89: note = RuvC_P4
  SITE 92: note = RuvC_P5
  REGION 211..297: note = Tnp_domain
  SITE 219: note = Tnp_P1
  SITE 249: note = Tnp_P2
  SITE 257: note = Tnp_P3
  SITE 258: note = Tnp_P4
  SITE 270: note = Tnp_P5
MELHTIGIDLGKTSFHLVGLNPRGEVIVRKKFSRAQLLRFTANRRVHLIGMEACGGAHFLGRALREQGHEVRLIPAQYVKPFVKTNKSDFIDAEAIAEAVGRPTMRFVPIKSDDQLDLQSLHRVRERWVMRRTAVINQIRGLLLERGTTVPKGRRHLEAALPEILEDAAGKLSATLHLLLAQLKLELDQLATRLEEAEALIQLTAQESEACRRLDAIPGIGPVTATALIAAIGNGAAFSKGREFAAWLGLVPREHSTGGRQKLLGISKRGNAYLRRLFVQGARAVLQQRGKQSTGLSAWLGQLAVRAHRNVVCVALANKLARIAWAVLATGQAYRPPAITAVAAA

SEQ ID NO: 14246 - protein, 300 aa, unidentified
  source 1..300: note = protein_f6a1ea0
  REGION 6..151: note = RuvC_domain
  SITE 9: note = RuvC_P1
  SITE 53: note = RuvC_P2
  SITE 91: note = RuvC_P3
  SITE 93: note = RuvC_P4
  SITE 96: note = RuvC_P5
  REGION 171..258: note = Tnp_domain
  SITE 179: note = Tnp_P1
  SITE 209: note = Tnp_P2
  SITE 217: note = Tnp_P3
  SITE 218: note = Tnp_P4
  SITE 230: note = Tnp_P5
MTITTVGIDLAKNVFAVHCVDQNGKTVLVKPRVSRAALPELIAGLPPCVIGMEVCSGAHYWARLFRQYGHKPRLMATKFVSPYRMAGKSGKNDAADAQAICEAVRRPHMRFVPVKDESQQTMQWVAEQKNSLPLQVQQCVDDLLEHIDRIDDNITEYDRILSRMAKSDHRSQPLMELKGIGPTTACALVASIGNAHDFKNGRQLAAWLGLTPSQYSSGGKSKLGRITKAGDSYLRTLLVQGARSVLISAEKRTDSFSRWVCTLVERRGYWRAVVAIAAKNARLCWASLHYGDDFRLYSAS

SEQ ID NO: 14247 - protein, 349 aa, unidentified
  source 1..349: note = protein_22e612c
  REGION 7..148: note = RuvC_domain
  SITE 10: note = RuvC_P1
  SITE 53: note = RuvC_P2
  SITE 88: note = RuvC_P3
  SITE 90: note = RuvC_P4
  SITE 93: note = RuvC_P5
  REGION 212..300: note = Tnp_domain
  SITE 220: note = Tnp_P1
  SITE 250: note = Tnp_P2
  SITE 258: note = Tnp_P3
  SITE 259: note = Tnp_P4
  SITE 271: note = Tnp_P5
MPEIATIGLDIAKNVFQVHGVDRSGKIVLRRTLRRSQVPGFFKTLPPCLIGLEACATAHHWARTLMAFGHDVRLIPPAYVKPHLRRQKNDAADAAAICEAVTRPSMRFVPVKTPQQQSTLMLHGARDLLIGQRTALINALRGHFAELGIVVVQGARNTRQLIADLQDETNQDILPTARMALQPLAAMLLGIEAQIAKLDKAILAAHRSNPVSLRLATIPGIGPIVASCLSASVPDASLFQGSREFAAYLGLVPRQHSTGGKARLGSISKMGNRHLRKLLVVGAHAALYSMKSGKTRTAMADWARSLLAKKPFKVVAVALANKMARIAWAVMARSTAYEPGSKGVAAPAA

SEQ ID NO: 14248 - protein, 319 aa, unidentified
  source 1..319: note = protein_37d3272
  REGION 4..143: note = RuvC_domain
  SITE 48: note = RuvC_P2
  SITE 88: note = RuvC_P3
  SITE 90: note = RuvC_P4
  SITE 93: note = RuvC_P5
  REGION 194..277: note = Tnp_domain
  SITE 202: note = Tnp_P1
  SITE 229: note = Tnp_P2
  SITE 237: note = Tnp_P3
  SITE 238: note = Tnp_P4
  SITE 250: note = Tnp_P5
MFQKKTLDFAGLTAERTVQYQLNNTVESIEKLANKLVSVDYKGKIICESTGHYHLKLVSVFSKHKLNLYVINPLLSSKHSQANIRKTKTEPVDAKTLATMCLTERNLPKPTLTNDRNLLITLKVGQIKAMEKLIQKMRGSLRLYEETYQGLGFDRSEIQHGLSLKLAELKSFHKRMLKELEDLIIEENNSSNDTDILNSIPGISSTTVALLSQLDRNVQSCHSWVAFIGLDTSIRQSGTWKGKGKLSKRGNTYLRKRMFCAAWGAMLHDDKFRAYYDRLRAEGRDYKEALCILAKKQIRVAYHLLSIGEKYDPNKAFCV

SEQ ID NO: 14249 - protein, 404 aa, unidentified
  source 1..404: note = protein_501ff69
  REGION 11..165: note = RuvC_domain
  SITE 14: note = RuvC_P1
  SITE 62: note = RuvC_P2
  SITE 102: note = RuvC_P3
  SITE 104: note = RuvC_P4
  SITE 107: note = RuvC_P5
  REGION 272..358: note = Tnp_domain
  SITE 280: note = Tnp_P1
  SITE 310: note = Tnp_P2
  SITE 318: note = Tnp_P3
  SITE 319: note = Tnp_P4
  SITE 331: note = Tnp_P5
MDQNTGYDIWCGLDVGKQAHHACALDAAGRRVFDKPLPQDQKRLEELFTRLEGLGQMLVIVDQPNTIGALPIAVARSMGITVAYLPGLAMRRAADLYPGNVKTDARDAFVIAETARSMPHTLRRVDAGEDTLAELKVLVGFDEDLAAEATRLSNRIRGLLTQIHPALERVIGPRLATKQGLAVIEQLGGPQGMTAASKSRMLRVINKANPRGAADFANAITTALAEQTVVVAGTAAAEQVLPKLAASLRQVLDQRAELASQVEKVVDAHPLAEVLISMPGVGVRTAARILLDVGDASQFPTAGHLAAYAGLAPITRRSGTSIRGEFPARSGNKHLKRALFLSAFAALRADPVSRAYYDRKRAQGKKHNAALICLSRRRCDVLFAMIKNQETYQTPKPAPTPLAA

SEQ ID NO: 14250 - protein, 343 aa, unidentified
  source 1..343: note = protein_5942356
  REGION 7..149: note = RuvC_domain
  SITE 10: note = RuvC_P1
  SITE 53: note = RuvC_P2
  SITE 88: note = RuvC_P3
  SITE 90: note = RuvC_P4
  SITE 93: note = RuvC_P5
  REGION 211..297: note = Tnp_domain
  SITE 219: note = Tnp_P1
  SITE 249: note = Tnp_P2
  SITE 257: note = Tnp_P3
  SITE 258: note = Tnp_P4
  SITE 270: note = Tnp_P5
MSIDTMIGVDLAKSVFQIHGASMNGEILFQRKLSRQAFSVFMAQHSAAVVVMEACGSAHYWARLLSGFGHEVRLIAPRYVRPFVKRQKNDAADAEAIVVAAQRPEMRFVEPKSVAQQSAAILYRSRQRLVRQRTETVNALRAALYEFGHIVPQGIQHVSRIGAILEAPNSDLPTLMREECLAMLDQVAALSGWIDTKTAKIKELAATTPISKRLQTMPGVGPLVAMAVETFAPEMATFNNGRDFAAWLGLVPRQFSSGGKERLGRITKAGQSDIRQMLIIGAMSRLNWMGRKSIPESSWLARMMARKPRMLVAIALANKMARQIWAMLTKNEDYRNPTPVMAA

SEQ ID NO: 14251 - protein, 391 aa, unidentified
  source 1..391: note = protein_846de39
  REGION 4..163: note = RuvC_domain
  SITE 7: note = RuvC_P1
  SITE 60: note = RuvC_P2
  SITE 101: note = RuvC_P3
  SITE 103: note = RuvC_P4
  SITE 106: note = RuvC_P5
  REGION 266..353: note = Tnp_domain
  SITE 274: note = Tnp_P1
  SITE 304: note = Tnp_P2
  SITE 312: note = Tnp_P3
  SITE 313: note = Tnp_P4
  SITE 326: note = Tnp_P5
MIYAGIDVAKDKHDCFITNSEGEVLFKAFTIPNNRDGFDELYQKIASVTDDLTKVKVGLEATGHYSYNILGYLLDKGLTTFVINPLHTNLYRKSLSLRKTKTDKVDAHTIATMLMSDVNLKSYSDTSYHNEELKSLTRYRFDKVKERAKLKSSVSRLVTILFPELEKLVPTLHMTSVYALLAEFPSASAIADSHLTRLTNLLSTASKGRYGKDTAILFREAARSSIGSHMPAKSLELKHTLKLIQEISAEIDEIEAEIKSIMDSIHSPILTIPGISYRMGAMIIAEIGDFSRFDSPDKILAYAGMSPSTYQSGQLESSYSHMEKRGSRYLRYALYNATKYVCHWDPTFAIYLEKKRSEGKHYNVALSHATKKLVRVIYQLEKSGQLYLKAA

SEQ ID NO: 14252 - protein, 328 aa, unidentified
  source 1..328: note = protein_8d82173
  REGION 5..160: note = RuvC_domain
  SITE 8: note = RuvC_P1
  SITE 62: note = RuvC_P2
  SITE 102: note = RuvC_P3
  SITE 104: note = RuvC_P4
  SITE 107: note = RuvC_P5
  REGION 204..289: note = Tnp_domain
  SITE 212: note = Tnp_P1
  SITE 241: note = Tnp_P2
  SITE 249: note = Tnp_P3
  SITE 250: note = Tnp_P4
  SITE 262: note = Tnp_P5
MTKYVGIDIGKEQVDICWLKDPETGKTKTKTFKNKPEVFPSICLWLTSQTEENPSQITILLEATGVYYEALSYFLYDQGFQLIVSNPGRAKKFAQSIGLIHKTDKSDSIMLAKYGFAQHHGLTLWKPESIEVRGLKAMMRRLSSLEKDCQREKNRLEASAISDSSDRVLLSLKTMITVLESEITALKGDIDSHIDQHPELRKNRQLLLTIKGVGEVVAREMVYLFAAKSFSNAKQVAAYLGLIPKLNESGAFKGRTTLSKSGPSRIRAKLYLASVCASTHNSQIKAQRDRLIGAGKTKMQALCAAMRKLVQMCFGVIKNQTEYQVQAP

SEQ ID NO: 14253 - protein, 325 aa, unidentified
  source 1..325: note = protein_a85e42d
  REGION 6..154: note = RuvC_domain
  SITE 9: note = RuvC_P1
  SITE 55: note = RuvC_P2
  SITE 93: note = RuvC_P3
  SITE 95: note = RuvC_P4
  SITE 98: note = RuvC_P5
  REGION 197..284: note = Tnp_domain
  SITE 205: note = Tnp_P1
  SITE 235: note = Tnp_P2
  SITE 243: note = Tnp_P3
  SITE 244: note = Tnp_P4
  SITE 257: note = Tnp_P5
MEKIIIGIDVSKLTLDICIQETGVNRFDNIPNTEKAIKVFFKQFDKKQDILIGMENKGRFNAMLYSVLIHFSFTVYVINPLHLKRSMGLVRGKNDKIDSERIVQFLSKNYMDLQQWKPNSKVIEKIKLLNAERKHRVKIRAGLLAQTQDDQFLKPTMDKAVLRLNTKLIDILTKQINEIEDRIYQLICEDEQLYDHYKRIQSIPGVGKVLAFNMLIKTDGFTTINTPRQMACYAGVAPFDFQSGTSIKRRPKVSTMADKELKKLLHLAAMSAIRLENDLAIYYHRKVEQGKNKMAVLNAVRNKIIHRIYALIKNQTIYKNNLILS

SEQ ID NO: 14254 - protein, 346 aa, unidentified
  source 1..346: note = protein_07e5bc8
  REGION 10..164: note = RuvC_domain
  SITE 13: note = RuvC_P1
  SITE 63: note = RuvC_P2
  SITE 104: note = RuvC_P3
  SITE 106: note = RuvC_P4
  SITE 109: note = RuvC_P5
  REGION 205..292: note = Tnp_domain
  SITE 213: note = Tnp_P1
  SITE 243: note = Tnp_P2
  SITE 251: note = Tnp_P3
  SITE 252: note = Tnp_P4
  SITE 265: note = Tnp_P5
MPETEVDTFAGIDVSARELSVALRRGKGEDKPAMAKFSNHPSGHKALIAHLLRGGRRVRVCLEASGNYSLDLALTLQAHRQVEISVINPRRARRFAESLGQRSKTDPVDARVLCEYGARMPWVAWQPPSSVALHLRAVTRAIADLGAIHTQQNNRAHASAASQALPVLVVKEMQRHQKYLEQRMTRLRREALRLIAGDSELDRRFRLMLTTTGIAETSALQILGELAVLPDMLDARQWVAFSGLDPRLFKSGKSVEKRPRISRGGSRHLRRALYMPALVALRRDPYLRRFYQNLLARGKARLQAVVAVMRKLLHALFAMFRTDQPYDGSKLCCAVDMAGNAIAACA

SEQ ID NO: 14255 - protein, 322 aa, unidentified
  source 1..322: note = protein_f8e2197
  REGION 9..156: note = RuvC_domain
  SITE 12: note = RuvC_P1
  SITE 56: note = RuvC_P2
  SITE 96: note = RuvC_P3
  SITE 98: note = RuvC_P4
  SITE 101: note = RuvC_P5
  REGION 195..279: note = Tnp_domain
  SITE 203: note = Tnp_P1
  SITE 232: note = Tnp_P2
  SITE 240: note = Tnp_P3
  SITE 241: note = Tnp_P4
  SITE 252: note = Tnp_P5
MSGTNQHCAGIDVSKNTLDIAFSGMTNQSTMPNDLEGFTKVVSELKRNCTRLILMEATGGLESGATCYLQSEGFDVVIINPRQARDFARAMGYLAKTDRIDAKVLLQMAEVINQHPEREKYIRPLPNVHRQLLAAMVVRRRQLTVMLTAERNRLHLSHPMSHRSIRLIITALKDELARIEDEMADHISKNFRDLSELLSAVKGVGAATVAVLLAEVPELGSLSRREISALIGVAPVNRDSGTMRGRRTVFGGRASVRTALYMSALVGTRHNPVIKEFYERLVAAGKPKKVALTACIRKLLTILNAMLKKNEAWDPLYHHHAS

SEQ ID NO: 14256 - protein, 326 aa, unidentified
  source 1..326: note = protein_0d47596
  REGION 2..129: note = RuvC_domain
  SITE 35: note = RuvC_P2
  SITE 70: note = RuvC_P3
  SITE 72: note = RuvC_P4
  SITE 75: note = RuvC_P5
  REGION 194..279: note = Tnp_domain
  SITE 202: note = Tnp_P1
  SITE 232: note = Tnp_P2
  SITE 240: note = Tnp_P3
  SITE 241: note = Tnp_P4
  SITE 253: note = Tnp_P5
MALGAAGKVLVRKKFTQKQLLIFTANMQTSLIGMEACSGAHFLGRALRSQGHDVRLIAAKFVKPFVKSNKNDFIDAEAIAEAVERKNMRFVPIKTDDQLDLQAIHRVRDRLMSRRTAVINQLRAFLLERGLVFAKTPSKLRDAMPEVLENAGASLTPQMLHLIEILWGEWKMVEQQIEQLGDELERISAADAGCTRIRKIPGIGPVVATAIVAAIGNGAAFRKGRDFAAWLGLVPGQYSTGGKAKLLSISKRGNVYLRKILIHGARAAVLRIKRDRAPIGAWLDALDLRAHKNVVVVAMANKLARIAWAVLSSGEEYRPLPNKLPA

SEQ ID NO: 14257 - protein, 334 aa, unidentified
  source 1..334: note = protein_5be6fca
  REGION 7..149: note = RuvC_domain
  SITE 10: note = RuvC_P1
  SITE 53: note = RuvC_P2
  SITE 88: note = RuvC_P3
  SITE 90: note = RuvC_P4
  SITE 93: note = RuvC_P5
  REGION 208..296: note = Tnp_domain
  SITE 216: note = Tnp_P1
  SITE 246: note = Tnp_P2
  SITE 254: note = Tnp_P3
  SITE 255: note = Tnp_P4
  SITE 267: note = Tnp_P5
MEQITTVGIDLAKSVFSLHGVDGKGRMVLRRTVRRDRLVQTVAGLAPCLIGMEACSGAHEWGRRFQAHGHTVKLMAPKFVAPYRKSDKNDGNDAEAICEAVTRPSMRFVPVKSVEQQALLALHRVRQGFVVERTAIINRLRGLMTEFGVVLPLRSVTVRRQAAQAAEALPELARGAIDDLLEQLRGLDERIEAYDQQIQAQARLSEPARRLMQIRGIGPTTALAIVATVGNAREFKNGRQFAAWIGLVPGQYSTGGRTRLGHISKRGDAYLRNLLVQGARSVLQTAASHPDRLSRWAIELQARRGYYRTLVAIANKNARIAWALLARNQTLRQN

SEQ ID NO: 14258 - protein, 340 aa, unidentified
  source 1..340: note = protein_4d3145d
  REGION 6..148: note = RuvC_domain
  SITE 9: note = RuvC_P1
  SITE 52: note = RuvC_P2
  SITE 87: note = RuvC_P3
  SITE 89: note = RuvC_P4
  SITE 92: note = RuvC_P5
  REGION 212..297: note = Tnp_domain
  SITE 220: note = Tnp_P1
  SITE 250: note = Tnp_P2
  SITE 258: note = Tnp_P3
  SITE 259: note = Tnp_P4
  SITE 271: note = Tnp_P5
MKITTAGLDIAKNKFHFYGVNQVGKKVKKRVLTRSEVLPFFSTLEPTLVVIESCGSASHWGRKLKELGHEVKLIAPQYVVPYRRKNKNDFNDAEAIAEAAQRSNMTFVPIKTIEQQDVQMLLRVRDRHIQSRTQLSNQIRGLLAEYGLIISSVGRAALRKELPEFLEDAENDLTSTSRALFSELYEELIQLESVIKEYDKKVEGMVKLNDICLRAQTVVGIGPITAAALYAAIGNGHNFSNGRHFSAWCGLVPKQHSTGGKSVLLGITKRGNPYLRTLLNHGARTVLKYCEMKDDKLSLWAQRLKKEKHHNQASIAVANKLARIVWAVISKNESYQVDYV

SEQ ID NO: 14259 - protein, 404 aa, unidentified
  source 1..404: note = protein_ffd661d
  REGION 4..161: note = RuvC_domain
  SITE 7: note = RuvC_P1
  SITE 60: note = RuvC_P2
  SITE 100: note = RuvC_P3
  SITE 102: note = RuvC_P4
  SITE 105: note = RuvC_P5
  REGION 266..353: note = Tnp_domain
  SITE 274: note = Tnp_P1
  SITE 304: note = Tnp_P2
  SITE 312: note = Tnp_P3
  SITE 313: note = Tnp_P4
  SITE 326: note = Tnp_P5
MFYCGIDIAKYKHEASVIDATGVALLDSISFPNSKEGCEKLLALYRRQGISKDDLLIGMEATGHYWLSVYGYLLDQGFEVKVINPIQSEAFRRMYIRQTKNDRKDSFIIAQIMRFGQFSATELAEEAVVALRQLSRYRLALVDTCGDCKRRIISLLDQVFPEYNRLFSDTFGATSKEVLAKYPTPEDLLAVSPEKLANMLEKVSHGRFGKEKAKQLKAAASTSFGVSFAKQSFALQIRQLIEQLEFLEGQIEELEEQISLLLKQTESHITTIPGIGDTLGAIILGEIGDIHRFDAPNKLVAFAGLDVRVSQSGEFIGTRQKISKRGSPYLRRAIWLAASRAAFCDPILSEYYQSLRARGKHHLTAIGAVSRKLCNIIFAILSENRLYETVPPREIRQTSAPFTM

SEQ ID NO: 14260 - protein, 401 aa, unidentified
  source 1..401: note = protein_1ebdc39
  REGION 5..164: note = RuvC_domain
  SITE 8: note = RuvC_P1
  SITE 61: note = RuvC_P2
  SITE 102: note = RuvC_P3
  SITE 104: note = RuvC_P4
  SITE 107: note = RuvC_P5
  REGION 271..356: note = Tnp_domain
  SITE 279: note = Tnp_P1
  SITE 309: note = Tnp_P2
  SITE 317: note = Tnp_P3
  SITE 318: note = Tnp_P4
  SITE 329: note = Tnp_P5
MTLVAGIDIAKEFHWAAIVVAETGRELVSRRVDNAPDAIGEFIAELAQAAAEHGPATVGIDVLGGIAGLVTAMLLDTEHRLVHVPGLTVNRSRHGTRGGEHKSDPRDARVIADQLRLREDWRPVTGDDELTLDLRLLVSRRSDLVTEQTRRINRTRDMLTGIFPGLERALDLTNLGDLRLLTRYTTPAEIRRAGRARITAYLHRNGVRSDRADRLAAAALEAAGHQRVRVPGETRTAQFVRELANDALTTRARLSAVDSEIAEVLDQHPDAALVRSLPGMGATLTAEFLAEAGDLARFAGADALAAASGLAPVLQQSGKMHYLRRATGGGKNLKRVFYHSAFCAIQADPASKAFYARKRAEGKRHQQALIALARRRVTVLYAILRTRQPYQANHTTVTPAA

SEQ ID NO: 14261 - protein, 426 aa, unidentified
  source 1..426: note = protein_05956ee
  REGION 18..177: note = RuvC_domain
  SITE 21: note = RuvC_P1
  SITE 74: note = RuvC_P2
  SITE 114: note = RuvC_P3
  SITE 116: note = RuvC_P4
  SITE 119: note = RuvC_P5
  REGION 286..371: note = Tnp_domain
  SITE 293: note = Tnp_P1
  SITE 324: note = Tnp_P2
  SITE 332: note = Tnp_P3
  SITE 333: note = Tnp_P4
MVQTENQGGSVCGVVLFAGDDWASDHHDVEVQDQAGRRLGRARLPEGVEGIARLHGLLARFLPEDAGPDQVLIGIETDRGPWVAALVAAGYRVFAVNPRQSARARDRLGVSGAKSDAGDAHVLADLVRTDAHQLREVAGDSDLADGVQALARAHQALIRDRTRHVLRLRAALRDYFPAALEAFGDLTAPEALELLAKAPDPGRAARLSRTQIAAALRRARRRDAEGKTAGIQAALRAPALGRGPALTAAQAAVARSLIAVITALTGEIDTLETEVKAHFGRHPDAGIYASLPGLGQILAARVLAEFGDDPGRYASAKARKNYAGTSPLTIASGRKTTVRARFVHNERLLDALTRQAQSALRASPGARACYDALRARGTGHQAALRQLANRLVGILHGCLKTHTRYDEATAWPHHNTDHTRQNHTAA

SEQ ID NO: 14262 - protein, 342 aa, unidentified
  source 1..342: note = protein_6d3f3ec
  REGION 5..152: note = RuvC_domain
  SITE 8: note = RuvC_P1
  SITE 55: note = RuvC_P2
  SITE 92: note = RuvC_P3
  SITE 94: note = RuvC_P4
  SITE 97: note = RuvC_P5
  REGION 212..299: note = Tnp_domain
  SITE 220: note = Tnp_P1
  SITE 250: note = Tnp_P2
  SITE 258: note = Tnp_P3
  SITE 259: note = Tnp_P4
  SITE 271: note = Tnp_P5
MDHFAGLDVSVKETSVCIVDDTGKIVREVKVASEPEALLAVLNNPAYHFKRIGLEAGPLSQWLYSALAEAGLPVVCVETRHMQAVLKAQINKTDRNDARGIAQMMRVGLYRPVHVKTLRSQKLRMLLTHRKLLQSKAIAIENDLRGTLRNFGLKVGMVGTVKFEGRIKELVENLPDLALLVEPLLIVRRTLREQIVILHRRLLAIVRDDAVCRRLMTTPGVGPVVALTYRATVDVPARFRKSKSVGAVFGLTCSKYQSGEIDRSGRISRCGDEMMRVMLYEAAQSMLRSKKWSWLKAWAMQIARRRGMKKAIVALARRLAVIMHRIWVDGTEFRWTREAAAA

SEQ ID NO: 14263 - protein, 387 aa, unidentified
  source 1..387: note = protein_6d91bdd
  REGION 4..159: note = RuvC_domain
  SITE 7: note = RuvC_P1
  SITE 58: note = RuvC_P2
  SITE 98: note = RuvC_P3
  SITE 100: note = RuvC_P4
  SITE 103: note = RuvC_P5
  REGION 263..350: note = Tnp_domain
  SITE 271: note = Tnp_P1
  SITE 301: note = Tnp_P2
  SITE 309: note = Tnp_P3
  SITE 310: note = Tnp_P4
  SITE 323: note = Tnp_P5
MIYVGIDIAKFNHYASAMSSDGEVLLEPFKFTNDNDGFCFLVSRLSSFDMDQIIIGLESTAHYGNNLLSFLVPKGYKVCLINPIQTSTMRKNNIRKTKTDKVDTFIICKTLMMHPHRFVTLYDIGLMQLKNLGRFRQKIVKQRTRLKIQLTSYVDQVFPELQYFFKSGIHQKGCYALLKEAPSPDAVASMHLTHLTHLLRLASHGHFQKETAVELRVLAQKSVGSSDKSLSIQITQSIEQIELLDRQLEMIESEMKDIVSSLDSVIMTIPGIGYVNGGMILGEIGDIHRFSSPCKLLAFAGLDPSVYQSGNFEAKHTRMSKRGSRSLRYALINAAHNVVKNNATFRDYYNQKMSEGRSHYNALGHCAGKLVRIIYKMLSDDVPFNLA

SEQ ID NO: 14264 - protein, 409 aa, unidentified
  source 1..409: note = protein_984a25d
  REGION 6..159: note = RuvC_domain
  SITE 9: note = RuvC_P1
  SITE 57: note = RuvC_P2
  SITE 98: note = RuvC_P3
  SITE 100: note = RuvC_P4
  SITE 103: note = RuvC_P5
  REGION 221..307: note = Tnp_domain
  SITE 229: note = Tnp_P1
  SITE 259: note = Tnp_P2
  SITE 267: note = Tnp_P3
  SITE 268: note = Tnp_P4
  SITE 279: note = Tnp_P5
MSAVVIGMDPHKRSATIEIMDSDEAVLGTGRYGTDVPGYRAMRRAVRHWPQRTWAVEGCQGIGRHIARRLIADGERVVDVPPKLSARTRLFATGQGRKTDATDAHSVALAATRMKGLREVADDEQLAVLRILADRRRSLGEDHSRMISQLHQLLLELIPGGAKKNLSAAQAKALLATVRPRDAAGQARRRVAAELISDLERIYQRKKAADKELRNLLKETSTTLTSLNGIGPSGAARLLVEAGDITRFPSKAHFASWNGTAPIDASSGDQVRHRLSRAGNRQINRTLHIMAVVQLRHRTSEGRAYYDRKVAAGKTPMEAMRSLKRRLSDIVYHQMILDARAKAAGPGGHLGTATGSSAAGSHPAAGTSEKSLPGPATSDPTPPRPDRFSGLSAAPAPRRTAAAVKRPSA

SEQ ID NO: 14265 - protein, 344 aa, unidentified
  source 1..344: note = protein_a349804
  REGION 6..147: note = RuvC_domain
  SITE 9: note = RuvC_P1
  SITE 52: note = RuvC_P2
  SITE 87: note = RuvC_P3
  SITE 89: note = RuvC_P4
  SITE 92: note = RuvC_P5
  REGION 211..298: note = Tnp_domain
  SITE 219: note = Tnp_P1
  SITE 249: note = Tnp_P2
  SITE 257: note = Tnp_P3
  SITE 258: note = Tnp_P4
  SITE 270: note = Tnp_P5
MHIASVGIDLGKNTFHLVALGERSKILLRKKFSRAQLLAYTANLPSSLIGLEAGAGAHGLASVLREQGHQVRLIPAQFVKPYRKSNKNDFLDAEAIAEAVTKENMRFVPIKTEEQLDVQAMHRVRDRLVQRRTALINEIRGFLLERGITFAVRPIHLRKNLLAVIEDAEQNLSSRLRWLLERLWLEWKQLESDIKTITEEIERIANEHALCRRLQQIPGFGPLVSTATVAAIGNGAAFRRGRDFAAWVGVVPRQYSTGGKQKLLGISKRGNIYLRRMLIHGARAVLFRVKYDTGGFGQWVHRLMQRAPRNKVVVAIANKLARMAWAVLSSGKDYQHQGLQMNAA

SEQ ID NO: 14266 - protein, 341 aa, unidentified
  source 1..341: note = protein_c489cd1
  REGION 6..152: note = RuvC_domain
  SITE 9: note = RuvC_P1
  SITE 53: note = RuvC_P2
  SITE 91: note = RuvC_P3
  SITE 93: note = RuvC_P4
  SITE 96: note = RuvC_P5
  REGION 211..298: note = Tnp_domain
  SITE 219: note = Tnp_P1
  SITE 249: note = Tnp_P2
  SITE 257: note = Tnp_P3
  SITE 258: note = Tnp_P4
  SITE 270: note = Tnp_P5
MPIVTVGIDLAKNVFAVHGVDEAGKAVLIKPRVSRDQLVALIAQLPPCLIGMEACSGAHHWSRVFQQYGHTVKLMAPKLVAPYRMSGKRGKNDAADAAAICEAVTRPSMRFVPLKDEHQQATLCLHRTRQGFIEERTAIYNRIRGLLSEFGVVLPQSPERLRREIPTHLDALPGWARRCISDLLEHAGSIEDRLTEYDRAIREIAREDERSKRLMLLRGIGPTTASALLASIGAGHDFRNGRQVAAWLGLTPGQHSSGGKARLGSITKAGDAYLRSLLVLGARAVIASLGEKQDRFSRWVRSLMERRGYWRAAVAIAAKNARMAWAMLSYGDDFKHEPAAA

SEQ ID NO: 14267 - protein, 396 aa, unidentified
  source 1..396: note = protein_eb9acaa
  REGION 10..160: note = RuvC_domain
  SITE 13: note = RuvC_P1
  SITE 62: note = RuvC_P2
  SITE 102: note = RuvC_P3
  SITE 104: note = RuvC_P4
  SITE 107: note = RuvC_P5
  REGION 266..352: note = Tnp_domain
  SITE 274: note = Tnp_P1
  SITE 304: note = Tnp_P2
  SITE 312: note = Tnp_P3
  SITE 313: note = Tnp_P4
  SITE 325: note = Tnp_P5
MSEQRTRVWAGIDAGKAHHWAVVVDDTGATVWSRKIPNDEAAILDALADILGLSEPVSWAIDIAGTASALLLALLAAHGQHAVYVPGRTVNRMSGAYRGEAKTDARDASVIAETSRVRNDFQAIDVPADLALLTAHGTDLVADRVRLINRLRDVLTGISPTLERAFDYSACKGALLLLTGYQTPAALRRIGQTRLTAWLANRKVPSADTVAATALDAARSQQTTLPGEQVAAGIVAELARQILALDQRLTTIETQIRDTFHTHPQAEIIESLPGIGPILGAELVIAAGDLAAYADAGHLASAAGLVPVPRDSGRRTGNLHRPKRYSPRPRRVFYLSAQTSIIREGPNRDFYLKKRSQGLKHVQAITALARRRVDVLWALLRDNRVFTPVQPVTHPA

SEQ ID NO: 14268 - protein, 400 aa, unidentified
  source 1..400: note = protein_c7b6439
  REGION 4..160: note = RuvC_domain
  SITE 7: note = RuvC_P1
  SITE 57: note = RuvC_P2
  SITE 97: note = RuvC_P3
  SITE 99: note = RuvC_P4
  SITE 102: note = RuvC_P5
  REGION 271..358: note = Tnp_domain
  SITE 279: note = Tnp_P1
  SITE 309: note = Tnp_P2
  SITE 317: note = Tnp_P3
  SITE 318: note = Tnp_P4
  SITE 331: note = Tnp_P5
MISVGIDVSKGKSTVCMMKPGGEVLSAPFEVVHTKTELLNLVRIIKSQNEEVRVIMEDTGHYHLPVATLLVDNGIFVCSVNALRMKKYCSQSIRRAKTDKIDSIHIASYGITYWNELNLIPCTDDTYKELQLLARQYYQSVSLLVKAKVNFSNLLDRVTPDIQSVLKDNASNSKLTDFVQRYYHFSHILDMGEKRFTSDYCKWAKKKGYRLCERNAKEIFALAQNGIPVLPDTQSTKIVVTETVRVIHELELSRDTILAQMQSFAKTLPEYSVVREMPCIGDTLAPRIIAKIGDVRRFKNKHSLIAYAGIDAPPYQSGNFNASERHISKRGNPYLRKTGYEIMQSLIKHKPENDAVYDFIVKKRCEGKCGKEAMIAGLNKFLRVYFGKVTELYSNLNFMI

SEQ ID NO: 14269 - protein, 343 aa, unidentified
  source 1..343: note = protein_0b685e2
  REGION 6..148: note = RuvC_domain
  SITE 9: note = RuvC_P1
  SITE 52: note = RuvC_P2
  SITE 87: note = RuvC_P3
  SITE 89: note = RuvC_P4
  SITE 92: note = RuvC_P5
  REGION 211..296: note = Tnp_domain
  SITE 219: note = Tnp_P1
  SITE 249: note = Tnp_P2
  SITE 257: note = Tnp_P3
  SITE 258: note = Tnp_P4
  SITE 270: note = Tnp_P5
MKITTVGIDLAKNVFQIHAVDKHGKVVVKKQLKRNHVILFFTNLESCLVGMEACGGAHYWARKLEQLGHTAKLMAPQFVKPYVKTNKNDVADAEAICEAVTRPSMRFVSIKNGEQQALLSVHRARQGFVKARTAQANQIRGLLAEYGILIPQGIRHISRRLPEILEDAENDLPGVFRQLLQRLGEHLNELTRQVDELEVQIQVWHRENVASHKLAQIPGIGPITASALVATIGNAKCFKNGRQLAAWLGLVPRQHSSGGKPTLLGISKRGDAYLRTLLIHGARAVIRVAENKPDHEGSWLGQLMERRSKNVAAVALANKNARTVWALLAHDRNYESGYEPSIA

SEQ ID NO: 14270 - protein, 356 aa, unidentified
  source 1..356: note = protein_67ffb1c
  REGION 16..169: note = RuvC_domain
  SITE 19: note = RuvC_P1
  SITE 67: note = RuvC_P2
  SITE 108: note = RuvC_P3
  SITE 110: note = RuvC_P4
  SITE 113: note = RuvC_P5
  REGION 231..316: note = Tnp_domain
  SITE 239: note = Tnp_P1
  SITE 269: note = Tnp_P2
  SITE 277: note = Tnp_P3
  SITE 278: note = Tnp_P4
  SITE 289: note = Tnp_P5
MPASPERGLSPSGVVIAIDPHKASWTAVVVTADLASAGSVRVEANRAGYRQLRRFAAGWTDVRWAIEGAAGLGAPLSERLHEDGITVVDVPAKLARRVRLLSTGHGRKNDPADALSVGIAAWSATALRTVEIDQAIAALRALTEHRDDLVRARTQLINRLHVLLVKLIPSGVARGLSAESAAQALRGVRPRDTLGRTLRALAVDLVAELRRLDRRIAETTQTLSNAVTASGTRLTGLLGIGDVVAAKILAHTGPISRFPSASTFASFCGVAPIEVSSGDVVRHRLSRAGDRQLNYALHVMALAQIRYDGPGRNYYQRKRSAGKSHKEAMRCLKRRLSDVVYRTMINDSVSSLAPAA

SEQ ID NO: 14271 - protein, 333 aa, unidentified
  source 1..333: note = protein_e068131
  REGION 4..154: note = RuvC_domain
  SITE 7: note = RuvC_P1
  SITE 55: note = RuvC_P2
  SITE 96: note = RuvC_P3
  SITE 98: note = RuvC_P4
  SITE 101: note = RuvC_P5
  REGION 198..284: note = Tnp_domain
  SITE 205: note = Tnp_P1
  SITE 235: note = Tnp_P2
  SITE 243: note = Tnp_P3
  SITE 244: note = Tnp_P4
  SITE 257: note = Tnp_P5
MNHVGIDVSQKELVVVVSTKGKARPAKKFENTTTGHREIIQLLAKLKDKTRICLEATGVYHFDLAVALSRADDLEVMVINPKAAHNFAQALMKRSKTDTIDAATLAAYCERMPFEAWQRPADEVIALRAIGRRIAALNKLKTQTKNQRHALKATQDTPDIVIEQTEELVSVLEKQIQAHRDSALELIRQHESLISVFTLIIGIKGIAEASAIQLLAELLVLPQDMSAKQWVAYAGLDPRHNESGSSVAKKPRISKAGNKYLRHALYMPALVATRYEPNIKRYYHHLIENNGLKKLQALCAVMRKLLHAIHGMLKTNKEFDGARFYSMPADSAN

SEQ ID NO: 14272 - protein, 406 aa, unidentified
  source 1..406: note = protein_13f6c22
  REGION 6..164: note = RuvC_domain
  SITE 9: note = RuvC_P1
  SITE 59: note = RuvC_P2
  SITE 101: note = RuvC_P3
  SITE 103: note = RuvC_P4
  SITE 106: note = RuvC_P5
  REGION 278..364: note = Tnp_domain
  SITE 286: note = Tnp_P1
  SITE 316: note = Tnp_P2
  SITE 324: note = Tnp_P3
  SITE 325: note = Tnp_P4
  SITE 338: note = Tnp_P5
MNLNAVGIDVSKRKSTVSVLRPGGDVLMKPFDISHRTADFQTLADKLKALDGETRVVMECTGHYYEPVARELSQAGLFVSAVNPQIINKFQGQGNPLRKVKTDKADSVKIARYTLDNWANLKQYTLMDELRSQLKNMNRQFDFYMKHKTAMKNNLIALIDQTYPGANTYFNSLAREDGSQKWVDFLDTYWHVDCVRKMSLQAFTEHYQKWCSRKKYSFRKSKAEEIYGIAKELVPVLPKDNFTKCIIKQAVAQVNAASQTVEQLRSLMNETASKLPEYPVVMAMKGVGPSLGPQLMAEIGDVTRFTHKGAVTAFAGVDPGVNASGDYSQKSVHASKHGSPMLRKTLFQIMDVLIKTKPDDAVYLFMDKKRAEGKPYYVYMTAGANKFLRVYYGRVKEYLSALQESY

SEQ ID NO: 14273 - protein, 347 aa, unidentified
  source 1..347: note = protein_fca802f
  REGION 6..163: note = RuvC_domain
  SITE 9: note = RuvC_P1
  SITE 68: note = RuvC_P2
  SITE 106: note = RuvC_P3
  SITE 108: note = RuvC_P4
  SITE 111: note = RuvC_P5
  REGION 212..299: note = Tnp_domain
  SITE 220: note = Tnp_P1
  SITE 250: note = Tnp_P2
  SITE 258: note = Tnp_P3
  SITE 259: note = Tnp_P4
  SITE 272: note = Tnp_P5
MKKIIIGIDISKEKIDASAIDVRNSLLGVLKLDYQAFENRPMGFRRMLVWAKHLIKGVTLEEVMFCCETTGGYDRSLCDYLFAKGLDIWRESSLQIKKSSGLRKGKDDKADSLTIAEYAMRHMDKAVYYVSPNETVRELKALLLYRRKLEQEKTSKKVRVAELKATAAKSKSVSFILRDAQKSIRALEKSIKECEKQIMALYERDEELKRSYDHLTSIKGISIVNATAMIAYTNNFKNITTSRKLASYYGIAPFREKSGTSVDRKAQVKCYSSSMLRAYLTQAAQWTIKEHGIYRDYYLRMSAKGKCYGVILNNVKNKLLHLSVSLIANDMDYEENHEFLRVQRMAQ

SEQ ID NO: 14274 - protein, 401 aa, unidentified
  source 1..401: note = protein_cc8ef41
  REGION 4..157: note = RuvC_domain
  SITE 7: note = RuvC_P1
  SITE 56: note = RuvC_P2
  SITE 94: note = RuvC_P3
  SITE 96: note = RuvC_P4
  SITE 99: note = RuvC_P5
  REGION 265..351: note = Tnp_domain
  SITE 273: note = Tnp_P1
  SITE 304: note = Tnp_P2
  SITE 312: note = Tnp_P3
  SITE 313: note = Tnp_P4
MWYVGLDWADTHHDVEVLDEAGKRVGAQRFAHSHHGLTQLKQFLLSIAAQPEHLACIVETNHGLLITFLLEAGIPVYPVNPKTVQQLRKAAGAKTDQIDAHLLAKLGRFELAELRRLEPDSPTVAELKTLTRDQDALIQTQTRLVNQLTACLKEYYPAALHLFAKVQQHSTLVFLQAYPTPQAAQAAAVAEITATLRTGKHTHPRRAAPKIFEELHRPHLVASEVIVRAKSRLMLSLVKQLLVVIEEIASYDEAISSLFLTHKDHALWRSLPRAGKRLAPRMLAEWGDDRSRYADATSVQTLAGTAPVPFQSGNYAKAHKRFACVKPLRNALYQFAWQSTQQEAWARDYYQRKRAEGKTHSMAVRALANVWVRIIYRMWLNHTCYETAVFELAQRLHAQAA

SEQ ID NO: 14275 - protein, 265 aa, unidentified
  source 1..265: note = protein_14ce709
  REGION 2..68: note = RuvC_domain
  SITE 9: note = RuvC_P3
  SITE 11: note = RuvC_P4
  SITE 14: note = RuvC_P5
  REGION 133..218: note = Tnp_domain
  SITE 141: note = Tnp_P1
  SITE 171: note = Tnp_P2
  SITE 179: note = Tnp_P3
  SITE 180: note = Tnp_P4
  SITE 192: note = Tnp_P5
MKPFVKSNKNDFLDAEAIAEAVDRENMRFVPIKTDDQLDLQALHRVRDRLIARRTSVINQLRAFLLERGLVFAKSPARLRERMPEILENAEEDLTPRMRNLLAQLWNEWKDLEQRVVDLNQEVELIASSDAACTRLRQIPGVGPLVATAIVAAIGNGAAFHKGREFSSWLGLVPRQHSTGGKARLFGISKRGNNYLRKIFIHGARAVVLRSKRDRVAMGAWMTALEARAPRNVLIVATANKLARIAWAVLSSGQDYRAVQEPVAA

SEQ ID NO: 14276 - protein, 341 aa, unidentified
  source 1..341: note = protein_b23ba3d
  REGION 6..148: note = RuvC_domain
  SITE 9: note = RuvC_P1
  SITE 52: note = RuvC_P2
  SITE 87: note = RuvC_P3
  SITE 89: note = RuvC_P4
  SITE 92: note = RuvC_P5
  REGION 211..297: note = Tnp_domain
  SITE 219: note = Tnp_P1
  SITE 249: note = Tnp_P2
  SITE 257: note = Tnp_P3
  SITE 258: note = Tnp_P4
  SITE 270: note = Tnp_P5
MEPTVVGVDIAKRVFQLHWIAADTGEVFNKQLRRSDFLEHFANLEPCLIGMEACGGSQHWARRLTELGHQVKLMPGKLVKAFVTGNKNDVADARAIWAAARHPGVKAVPVKTEAQQAVLALHRIRQQLVIFRRSQSNCLRGLLGEYGEVMGVGRAAMNHAMPDLLLRLEPRLPQVLIDSLREQWQRLVDIDKQITLIEQRLRAWLHENQACKRIAEIPGVGFLTATAAVAAMGDPRAFRSGREFAAWLGLVPAQFGTGGKVRLLGISKRGDRYLRTLMIHGARSVMKHAKDPGSWAVQLSMRRPLNVVVVALANKIARTIWALLAHGRSYCDSYPPPVTVA

SEQ ID NO: 14277 - protein, 344 aa, unidentified
  source 1..344: note = protein_63d91da
  REGION 6..148: note = RuvC_domain
  SITE 9: note = RuvC_P1
  SITE 52: note = RuvC_P2
  SITE 87: note = RuvC_P3
  SITE 89: note = RuvC_P4
  SITE 92: note = RuvC_P5
  REGION 211..301: note = Tnp_domain
  SITE 219: note = Tnp_P1
  SITE 249: note = Tnp_P2
  SITE 257: note = Tnp_P3
  SITE 258: note = Tnp_P4
  SITE 270: note = Tnp_P5
MSKVTIGLYIAKSVFHLVFMNQSGRVLRKKKLRRHQMLSYFSQLEPCIVVMEACGSCHYWCRELTKAGHEVKAIAPQYVVAYRKGNKHDYNDAEAIAEASQREGMRFVPFKSQDQQDIQLMHRIRERMIAQQTALSNQIRGLLSEYGIVYARGVATLVKELPLTLEEADNGLSMLARRQFQGLLNDLRELREHIKEMDKELKAFSQSQPVCERLMSMTGIGPLIATALYAGIGQGQAFNSGRHLAAWLGVVPKQHTTGDNPRLLGISKRGNTYLRTQIINGARAALRHIGDKTDKVSEWCRACLARMSFNKACVALANKMVRMAWAMLHYQQDYQPGLINKAAA

SEQ ID NO: 14278 - protein, 343 aa, unidentified
  source 1..343: note = protein_f53479e
  REGION 6..147: note = RuvC_domain
  SITE 9: note = RuvC_P1
  SITE 52: note = RuvC_P2
  SITE 87: note = RuvC_P3
  SITE 89: note = RuvC_P4
  SITE 92: note = RuvC_P5
  REGION 211..295: note = Tnp_domain
  SITE 219: note = Tnp_P1
  SITE 249: note = Tnp_P2
  SITE 257: note = Tnp_P3
  SITE 258: note = Tnp_P4
  SITE 270: note = Tnp_P5
MSIAILGVDLGKNSCSIVGVDATGAVVTRRSMRRQTLIDYVLKLPACIVAMEACCGAHHLGRLFVARGHEVRLMSPEYVRPYVKAQKNDDRDAEGIAEAASRPTMRFVDLKSEEQLDIQTLHRLRSRLVAERTNLINQLRAILLERGVIFPAGRRKFELGLDEMLAEHGGTVSPRIRQLAADLRDEWRTLDTRIEALNGEFVDLVRGNDAARRLTSIPGVGVLNASALVAAVGNASGFDKARDLGSWLGLVPRQHTTGGKPRLLGISKRGNTYLRTLLIHGARAALPSLSKADTPLGRWLKAMLERGVHRNAVVVALANKLARIAWATLRNGTTFERSYPAAA

SEQ ID NO: 14279 - protein, 408 aa, unidentified
  source 1..408: note = protein_f7dd917
  REGION 6..170: note = RuvC_domain
  SITE 9: note = RuvC_P1
  SITE 63: note = RuvC_P2
  SITE 109: note = RuvC_P3
  SITE 111: note = RuvC_P4
  SITE 114: note = RuvC_P5
  REGION 282..368: note = Tnp_domain
  SITE 289: note = Tnp_P1
  SITE 319: note = Tnp_P2
  SITE 327: note = Tnp_P3
  SITE 328: note = Tnp_P4
  SITE 341: note = Tnp_P5
MNPLYVGIDVSSKTNVVYLMKPDGSKISNFSVANSLDGSKKLVKNILSALDKHSLGEVVIGLEATSVYGDNLVYFLREDGSLAAHQNRIHVLNPKQVKKFKEAYNDLPKNDFVDSFVIADCLRFGRINKAVYLDDYRYDALKALTRARFYAVQNLVKEKQRLINIIFKKYSSLTQDKIFSDTYGATACAIYTEFESADTLVNMDLNELTEFIKKKGKNRFDDPDAVAKAIQKAARSSYRLPKTVNDSVNQVLSISINSIRATEAQIKALEKAIAEQMALIPNTLQSIPGVGPVYAAGIIAEIGEINRFNSQAALAKYAGLAWKQKQSGDFESENTHLIHTGNRFLKYYLCEAAFSLVRCDTEYNRFYHLKYKEVNKYQHKRALALTARKFVRLVFRLLKDNRLYISKS

SEQ ID NO: 14280 - protein, 341 aa, unidentified
  source 1..341: note = protein_bf0b71e
  REGION 8..163: note = RuvC_domain
  SITE 11: note = RuvC_P1
  SITE 64: note = RuvC_P2
  SITE 102: note = RuvC_P3
  SITE 104: note = RuvC_P4
  SITE 107: note = RuvC_P5
  REGION 206..292: note = Tnp_domain
  SITE 213: note = Tnp_P1
  SITE 243: note = Tnp_P2
  SITE 251: note = Tnp_P3
  SITE 252: note = Tnp_P4
  SITE 265: note = Tnp_P5
MKKNFCFIGIDIAKDTFVASIYHKPNKPVLTKEALANNPEGYDQLLLWLQDHKIGKSNCRICMEATGVYSQGIAYYLLSQGYQVSVESPLKVKRAFHPAGHKTDPVDSRQIAEYAYRFSDQLIPWQPKEELLEKIRQLLSLREQFTKQKVAIKNAMGAYSQQKVQVKLINKAHQQTLTQLEKQISRIDKELDNLIKEDPDILSKFNKLDSIPGYGMLLSAHLLVMTNNFSQIQDYKPLAAFIGIAPYQYQSGSSVHKKAKIRHYGPMASRKFLRLAAQSVATHDKTFRQYYLRKLASGKDKALVLNNIANKLLKVACAMIRKNTRYIKEHRSVHPMYLKSA

SEQ ID NO: 14281 - protein, 318 aa, unidentified
  source 1..318: note = protein_2d121d6
  REGION 6..152: note = RuvC_domain
  SITE 9: note = RuvC_P1
  SITE 55: note = RuvC_P2
  SITE 95: note = RuvC_P3
  SITE 97: note = RuvC_P4
  SITE 100: note = RuvC_P5
  REGION 190..277: note = Tnp_domain
  SITE 198: note = Tnp_P1
  SITE 228: note = Tnp_P2
  SITE 236: note = Tnp_P3
  SITE 237: note = Tnp_P4
  SITE 250: note = Tnp_P5
MNSIIVGIDISKETFDAAVLINNKVQTRKFNNNSEGFNKLVTWLKSSRTGHVCMEATGIYWKNLAKYLYDYGYKVSVVNPARIKGFAMSKLSRTKTDKADSVLIADFCKAMKPEAWYPQPLYIQELQQLVNRLNVLIKHKTQETNRLEVASKAIANNIQMHIEFLETQIKEIEQLINDHIKNNKDLHNKAMLLESIPGIGAKTQAVVLAFLADIEKFSSAKQVVAFVGLNPKHRQSGSSVRGASRISRTGNSDLRKSFYMPAMSALRHNCIIKQFSQSDTGKPKMLILIAAMRKLLHIIYGVLKHNSPFNPNVSILQK

SEQ ID NO: 14282 - protein, 405 aa, unidentified
  source 1..405: note = protein_2f5f7d5
  REGION 7..160: note = RuvC_domain
  SITE 10: note = RuvC_P1
  SITE 59: note = RuvC_P2
  SITE 97: note = RuvC_P3
  SITE 99: note = RuvC_P4
  SITE 102: note = RuvC_P5
  REGION 268..354: note = Tnp_domain
  SITE 276: note = Tnp_P1
  SITE 307: note = Tnp_P2
  SITE 315: note = Tnp_P3
  SITE 316: note = Tnp_P4
  SITE 327: note = Tnp_P5
MSTDVFCGLDWASRTHAVCIIDPAGRVLERFEIDHDRDGLAELLRRLARYGARVRTAIERPSGLIVDALIEAGHQVFPIHPNAVKASRPRYRSHGAKSDASDAYLLADLLRTDGHRWAPLLPQSDSIRALRALVRARDDLVATRLGLANQLRATLDAFWPGAASIFAAVDSPIGLAFLRRYPSPTSAARLSEAALGRFCRAQHYSGHRTPAQLLARLRAAAQGHASKLAGAAMAEVVLALVAVLKPLVTQLGALTRRIEHFVASLPDGQIIMSFPRAGHVCAAQILAELGEVRERYATLDQLAGEAGVVPLTYQSGKSRCVAFRWACNHRLRRAITTLADNSRHANVWARGIYTAARARGCDHPHAVRILARAWLRVIWRAWTDRKAYDPALHLGALKASSDSGG

SEQ ID NO: 14283 - protein, 406 aa, unidentified
  source 1..406: note = protein_40b6a33
  REGION 31..183: note = RuvC_domain
  SITE 34: note = RuvC_P1
  SITE 80: note = RuvC_P2
  SITE 120: note = RuvC_P3
  SITE 122: note = RuvC_P4
  SITE 125: note = RuvC_P5
  REGION 285..370: note = Tnp_domain
  SITE 293: note = Tnp_P1
  SITE 322: note = Tnp_P2
  SITE 330: note = Tnp_P3
  SITE 331: note = Tnp_P4
  SITE 343: note = Tnp_P5
MWVSREAAFRSTDDWKDTIMLTEATACPAVIGLDVGKFSHWACHVTRQGEILASGPVANTEHDLDSLFARVDAGTLVVVDQVRNIGSLAISRARLAGLPVAYLPGIAAHGAAKLFAGDAKTDERDAAVIAKTALGIPDSLLPVPRRDERLEAARSMAAQRNHMVTCSTRDKNRLRSILLESCPAFEALADLADPHWLKMMESLGGPWGILDAGKPAVGAVTRGANRARIDAALAAISSSTRPSEYQVMAENPQVRMLARRIRESAEEAARLDTEITALLVEDGTYECLLTIPGIGPRTASELVISIDIDDFPDHDHLASYCGIAPRNRQSGKSISSVSASRQGNKRLKNLLIFSCNSLSRSRGRFGDYYRKCRDRGMCHGEALKAVARKRMKVIYAIMRDKVPYSA

SEQ ID NO: 14284 - protein, 344 aa, unidentified
  source 1..344: note = protein_5dab766
  REGION 6..147: note = RuvC_domain
  SITE 9: note = RuvC_P1
  SITE 52: note = RuvC_P2
  SITE 87: note = RuvC_P3
  SITE 89: note = RuvC_P4
  SITE 92: note = RuvC_P5
  REGION 211..295: note = Tnp_domain
  SITE 219: note = Tnp_P1
  SITE 249: note = Tnp_P2
  SITE 257: note = Tnp_P3
  SITE 258: note = Tnp_P4
  SITE 270: note = Tnp_P5
MQIRSVGIDLGKTTFHLVALGASGKVMVKKKFTQKQLLTFTANMQTSLIGLEACSGAHFLGRALKQQGHDVRLIAAQFVKPFVKSNKNDFVDAEAIAEAVERKNMRFVPIKTDDQLDLQAMHRIRDRLISRRTAVINQIRAFLLERGMVFAQKPAKLRAAMADVLENADNALTLMMRNLIGILWDEWKSVEQQIDELTDSLEQIAESDAGCCRIRQIPGIGPIVATAIVAAIGNGAAFRKGRDFAAWLGLVPRQYSTGGKTKLLGISKRGNIYLRKVLIHGARAAAMRIKRDRFPIGAWMNGLEARAPRNVLVVAMANKLARIAWAVLSTGEDYRPAVSAAAAV

SEQ ID NO: 14285 - protein, 409 aa, unidentified
  source 1..409: note = protein_597e712
  REGION 4..167: note = RuvC_domain
  SITE 7: note = RuvC_P1
  SITE 64: note = RuvC_P2
  SITE 104: note = RuvC_P3
  SITE 106: note = RuvC_P4
  SITE 109: note = RuvC_P5
  REGION 275..361: note = Tnp_domain
  SITE 283: note = Tnp_P1
  SITE 314: note = Tnp_P2
  SITE 322: note = Tnp_P3
  SITE 323: note = Tnp_P4
MLFVGDDWAEDHHDVEIVDETGRTLARRRFPEGLAGITRLHALIAEHLPEPAGPADPAPQVVVGIETERGPWAAALVAAGYRVFAINPMSTARYRERHSTSGAKSDAADAHLLAEIVRLDRAHHRQVAGDSALAEAVKLAARTHQSLIWDRTRQILRLRSALREFFPAALKAYNDLDAADTLQLLRLAPDPDQAARLTKRQVLAALARANRRNPEVVAEQIMAVLRAGELRQAPPVQAAFAAIVAAQVEVITTLNNQIDTLGEVVADHFGRHPDAELITSLPGLGVILAARVLGEFGDDPSRYVDAKARKAYAGTAPITRASGTKKVVMARYARNKRLGDALQQWAFCSMRGSSGAKAYYKELRTRKIGHQAALRQLANRWVGILHGCLKTGQPYNETLAWNHHTSAAA

SEQ ID NO: 14286 - protein, 295 aa, unidentified
  source 1..295: note = protein_def459e
  REGION 6..147: note = RuvC_domain
  SITE 9: note = RuvC_P1
  SITE 52: note = RuvC_P2
  SITE 87: note = RuvC_P3
  SITE 89: note = RuvC_P4
  SITE 92: note = RuvC_P5
  REGION 210..294: note = Tnp_domain
  SITE 218: note = Tnp_P1
  SITE 248: note = Tnp_P2
  SITE 256: note = Tnp_P3
  SITE 257: note = Tnp_P4
  SITE 269: note = Tnp_P5
MTITTIGLDLAKSVFQAHGVDENGATILVKRLHRKQMLLFFSKLPPCLIGVEACGTAHYWARTLTTMGHEVRLIPPSYVKAYVKRGKSDALDAEAICEAVQRPTMRFVPVKTVEQQSVLMTHRARALLVRQRTMIANALRAHLAELGLVANPGIANLAKLAEQALSDENTLPAYARTSLGILVRHIMVLNDEIAVLDQQLRAWHTESETSRRLAGIPGLGVITATALAATVTDPDQFRSGRQFAAWLGLTPQQHSTGGKTRLGGISKQGDRYLRRLLVVGATAVIPHKGQANAHG

SEQ ID NO: 14287 - protein, 341 aa, unidentified
  source 1..341: note = protein_ae1c314
  REGION 7..148: note = RuvC_domain
  SITE 10: note = RuvC_P1
  SITE 53: note = RuvC_P2
  SITE 88: note = RuvC_P3
  SITE 90: note = RuvC_P4
  SITE 93: note = RuvC_P5
  REGION 211..295: note = Tnp_domain
  SITE 219: note = Tnp_P1
  SITE 249: note = Tnp_P2
  SITE 257: note = Tnp_P3
  SITE 258: note = Tnp_P4
  SITE 270: note = Tnp_P5
MGKVSTIGLDVAKNVFQAHGADETGAVMFRKKLRRVQVLEFFSSQPPCTVAMEACAGAHYWGREIGKLGHTVRLIPPAYVKPFVKRQKNDAADAEAICEAVQRPTMRFVAVKSEAAQAATVVFRTRDVLVRQRTQIINALRGHLAEFGLVVAQGPAHVAKLVMAVQNPEHPLPEAARKILYVLIDMLALLSERVKLLDVEIARRAKEDKLARRLMSVPGVGPVIATAVAALAPPTETFKRGRDFAAWLGLTPLQHSTGGKQKLGATSKMGERTLRRLLIIGASAVVRWAARKGPPAGSWLAGMLARKPPMLVRVALANKMARVLWALMAKGGTYRAPVATA

SEQ ID NO: 14288 - protein, 343 aa, unidentified
  source 1..343: note = protein_3a7e514
  REGION 7..149: note = RuvC_domain
  SITE 10: note = RuvC_P1
  SITE 53: note = RuvC_P2
  SITE 88: note = RuvC_P3
  SITE 90: note = RuvC_P4
  SITE 93: note = RuvC_P5
  REGION 212..304: note = Tnp_domain
  SITE 220: note = Tnp_P1
  SITE 250: note = Tnp_P2
  SITE 258: note = Tnp_P3
  SITE 259: note = Tnp_P4
  SITE 271: note = Tnp_P5
MQRVTTIGLDIAKSVFQVHGIDAIGKVVIRRQLKRRYVLAFFQKLPPCLVGIEACASSHHWSRELKALGHTVRLMPPAYVKPYVKRQKNDAADAEAICEAVTRANMRFVETKTPEQQSCLMLHRTRHLLIRQQTAVINAIRAHLAEFGVVAPVGRRGVDELLDVVAASSEERVPEVARGCVAALGVQLRMLKAQILEFDRQIMAWHRSNETSRRLDEIPGVGPALATALVASVADPKAFRSGRNFSAWIGLVPKQHSSGGKHRLGSISKQGDRYLRSLFTAGALAVIRYAKIHGTRHRPWLAALLARRPTKVAAIALANKIARMAWAMMVKGERYKEPAALAA

SEQ ID NO: 14289 - protein, 312 aa, unidentified
  source 1..312: note = protein_5439ffe
  REGION 7..153: note = RuvC_domain
  SITE 10: note = RuvC_P1
  SITE 54: note = RuvC_P2
  SITE 94: note = RuvC_P3
  SITE 96: note = RuvC_P4
  SITE 99: note = RuvC_P5
  REGION 189..273: note = Tnp_domain
  SITE 197: note = Tnp_P1
  SITE 226: note = Tnp_P2
  SITE 234: note = Tnp_P3
  SITE 235: note = Tnp_P4
  SITE 246: note = Tnp_P5
MVDHCYGGIDVSKDRLDVQVLPQGRCFSVDNTAAGWKQLVDRLRGLSIAALGIEPSGGYERGVIRALLAAGLSVRRINPNKLRQFARARGVLAKNDRLDARLIAEYVAIMPTRVVHRDPAAEQLAAVVTMRRQLSDEHVTVENQTAHIEDAMLRRLNKRRLARLKADILLLDKRMAEIVASNANLARRYDLLTSMRGVGPTLAFTLIALLPELGQMSRKQIAALVGLAPYDFDSGRLKGHRCIYGGRMPVRNVLYMAALSAARYNPVLKTLHNRLAATNKKPKVVIVAVMRKMITTLNAMLRDNLAWQPKSA

SEQ ID NO: 14290 - protein, 340 aa, unidentified
  source 1..340: note = protein_e5408f9
  REGION 6..148: note = RuvC_domain
  SITE 9: note = RuvC_P1
  SITE 52: note = RuvC_P2
  SITE 87: note = RuvC_P3
  SITE 89: note = RuvC_P4
  SITE 92: note = RuvC_P5
  REGION 211..297: note = Tnp_domain
  SITE 219: note = Tnp_P1
  SITE 249: note = Tnp_P2
  SITE 257: note = Tnp_P3
  SITE 258: note = Tnp_P4
  SITE 270: note = Tnp_P5
MKHTVVGVDIAKSVFQIHSVDLETGEIISKQLKRARLLEYFANRKPCLIGMEACGGSQHWARCLTAMGHQVKLMPGNAVKAFVTGNKNDVGDAKAIWTAVQQPGVRAVAIKTEEQQAVLAMHRMRQQLVKFRTMQSNGLRGLMMEYGEVMAVGRAALNRAMPDALARLNKRLPAMLIASLRQQWEMLSKLDEQIAHIEQRLLDWMKQDKACKTIAAIPGVGMLTATAVVASMGDAKAFRCAREFAAWLGLVPRQCGTGGRVRLLGISKRGDTYLRTLLIHGARAVLTHAKEPGAWIAQLAKRRPPNVVTVALANKMARTIWALLAHGREYSNTHVSVGPA

SEQ ID NO: 14291 - protein, 350 aa, unidentified
  source 1..350: note = protein_1b84263
  REGION 6..148: note = RuvC_domain
  SITE 9: note = RuvC_P1
  SITE 52: note = RuvC_P2
  SITE 87: note = RuvC_P3
  SITE 89: note = RuvC_P4
  SITE 92: note = RuvC_P5
  REGION 211..298: note = Tnp_domain
  SITE 219: note = Tnp_P1
  SITE 249: note = Tnp_P2
  SITE 257: note = Tnp_P3
  SITE 258: note = Tnp_P4
  SITE 270: note = Tnp_P5
MKIMRIGLDLAKNVFQVYGVDTQGKKVLSRQLKRHQMREFFQKLSPCLIGMEACASAHYWARTLAALGYEVKLIAPQFVKPYVKGNKNDANDAEAICEAVSRPNMRFVPVKTIEQQDIQALHRIRSELVRQRTAKVNQIRGLLGEYGITVEQRVPALRKKLPEILEDAENGLSAEFRVLLDGLREDLVNLDTRIASMDQALQKLAQEHAGAKRLQQLRGIGPVTATALIAAIGDGSMFKRGRDAAAWCGLTPAQHSSGGKDRLLGISKRGDAYLRTLLIHGARAVLKTATGKEDRLSQWLQSLCSRRNKNIAAVALANKTMRMAWALLTSEQDYDPEFGMETESACAEPA

SEQ ID NO: 14292 - protein, 397 aa, unidentified
  source 1..397: note = protein_2c50236
  REGION 4..160: note = RuvC_domain
  SITE 7: note = RuvC_P1
  SITE 57: note = RuvC_P2
  SITE 97: note = RuvC_P3
  SITE 99: note = RuvC_P4
  SITE 102: note = RuvC_P5
  REGION 274..361: note = Tnp_domain
  SITE 282: note = Tnp_P1
  SITE 312: note = Tnp_P2
  SITE 320: note = Tnp_P3
  SITE 321: note = Tnp_P4
  SITE 334: note = Tnp_P5
MIAVGVDVSKSKSMVAILSSDGEILAEPFEVYHVNDSLDNLINNLNALNDDIKIVMEATGHYHLPILKKFLDANLFVSVMNPYLMKKYGDNQIRKAKTDRKDAMRMATYALEKSYSLIPYTSLDQKYLDLKFLSRQYNQRVSTKVKNRVYLGNLLDEAMPGIETILMSKATKPENNMLYNFINKYHNFDTIKKMGEKKFLNSYTKLAEKNGCRNYQMKALKIYELATNSIITRGTDAYTNIAMQQCLNVLIQAEIAANEILVQMQSLAQTLPEYPIVRGMYGVGDRLAPRLIAEIGDVRRFTSGKALNAFAGNDAPPFQSGQFESQNRHISKRGAPALRKACYEVMQCLKMHKPQDDPVYLFMIKKEEEGKPLNVAKMAAINKFLRIYYARVMELYK

SEQ ID NO: 14293 - protein, 382 aa, unidentified
  source 1..382: note = protein_759c0f6
  REGION 12..161: note = RuvC_domain
  SITE 15: note = RuvC_P1
  SITE 66: note = RuvC_P2
  SITE 100: note = RuvC_P3
  SITE 102: note = RuvC_P4
  SITE 105: note = RuvC_P5
  REGION 256..343: note = Tnp_domain
  SITE 264: note = Tnp_P1
  SITE 295: note = Tnp_P2
  SITE 303: note = Tnp_P3
  SITE 304: note = Tnp_P4
  SITE 315: note = Tnp_P5
MISLEVFIEKCAGLDVHSETIVACVIKGKRENDVYTETETFPTLTKDLFRLLKWLESHEITHIAMESTGVYWKPVFNILEDFFDITLANAQRIKNVPGRKTDVSDAEWIAKLLRHGLIEKSFVPPQDIRELRDLTRLRKKWIGHLTSEKNRIQKVLESSNIKLSTVISDVFGVSGRRLLNRLIEQGYVDEADVEKDIHGKLVSKKQRITDSLFGTINEHQIFLIRQSWHHIEYLEKLISEIEERVDQLLRKYEEEVQLLITIPGIKKDTAAVIIAEIGVDMGQFPTSQHLASWAGVSPGNHESAGKRKSTRTVKGNPHIKSAMCEAAWAVSRSRNRWLATKYWSLAARRGKKKALVAISHRMLRVIYSMLLNKEPYKEPLIA

SEQ ID NO: 14294 - protein, 392 aa, unidentified
  source 1..392: note = protein_bcb4508
  REGION 4..161: note = RuvC_domain
  SITE 7: note = RuvC_P1
  SITE 60: note = RuvC_P2
  SITE 100: note = RuvC_P3
  SITE 102: note = RuvC_P4
  SITE 105: note = RuvC_P5
  REGION 266..353: note = Tnp_domain
  SITE 274: note = Tnp_P1
  SITE 304: note = Tnp_P2
  SITE 312: note = Tnp_P3
  SITE 313: note = Tnp_P4
  SITE 326: note = Tnp_P5
MFYVGIDIAKKNHEASIIDSNGKLLDKSISFSNSQAGCAKLVSMLDKFETDSSNVIIGMEATGHYWVSLYSYLIDLGFTVYVINPIQSDAFRKMYIRQTKNDSKDSFVIAQIMRFGQFSSTSLADEDIMALRQLSRYRLALVDECSDWKRKCIALLDQVFPEYSKLFSDTFGVTSRELLSKYPTPEDMLSIDTNTLAELLSKASKGRFGVSKASEIQEYASNTFGVNFAKDAFAFQIKQIIAQINFIEEQLKELETEISTLLHQTNSVITTITGIGDVLGAIIIGEIGDISRFESASQLVAYAGLDVAVKQSGDFIGTQTKISKRGSPYLRRAIWLAATVAAFKDPALSVYYQSLRARGKHHLTAVGAVARKMCNIIFAVLRDNKPYVPDIK

SEQ ID NO: 14295 - protein, 354 aa, unidentified
  source 1..354: note = protein_c160a51
  REGION 12..152: note = RuvC_domain
  SITE 15: note = RuvC_P1
  SITE 58: note = RuvC_P2
  SITE 93: note = RuvC_P3
  SITE 95: note = RuvC_P4
  SITE 98: note = RuvC_P5
  REGION 217..319: note = Tnp_domain
  SITE 225: note = Tnp_P1
  SITE 255: note = Tnp_P2
  SITE 263: note = Tnp_P3
  SITE 264: note = Tnp_P4
  SITE 276: note = Tnp_P5
MSNKSTSIVATMGIDIGKNSFHVVGLDEHGAIVLRQKWSRSQIEVRLANMPPCLVGMEACVGAHHLSRKLQSQGHDARLMPAKYVRPYSKGQKNDFRDAEAIAEAVQRPTMKFVATKTAEQLDLQALHRVRERLVSQRTGIINQIRAFLLERGLAVRQGLRFLRTELPIILAKRTDVLSPRMMRIIEDLAGDWRRLDERIEGLSAEITALARQDAACARLMTVPGIGPIISSAMVAAIGNGGAFSKGRDFGAWLGLVPKQISTGDRTILGKTSRQGNRYLRVLFVQAAWVVLVKITDWDRYGLKTWIEAAKKRMHHNVLAIALANKLARIAWAVLNKERNFECVRTAATSSRPA

SEQ ID NO: 14296 - protein, 416 aa, unidentified
  source 1..416: note = protein_3123ee5
  REGION 18..170: note = RuvC_domain
  SITE 21: note = RuvC_P1
  SITE 69: note = RuvC_P2
  SITE 107: note = RuvC_P3
  SITE 109: note = RuvC_P4
  SITE 112: note = RuvC_P5
  REGION 277..363: note = Tnp_domain
  SITE 285: note = Tnp_P1
  SITE 316: note = Tnp_P2
  SITE 324: note = Tnp_P3
  SITE 325: note = Tnp_P4
MKSARVTLPEEPPGDVTCGIDWARDDHAVSVADTRGREIFRCSVEHSTAGPRELLAVLARYSAREAAIERPDGPVVDALLGAGITVVVISPNQIKNLRGRYGSAGNKDDRFDAYVLADTLRTDRARLAPLTPDGPATVTLRRACRARKDLVSHRVAVANQLRAHLRNAFPGAVGLFAGIDSPISLRFLARFATQDRADWLSPRRLAAWLASAGYCGRADPAVMHARLAAAPRGATGDDGAAQAHVTAALLAVLTTLADQIKVLSEQIGEQLALHADAHIFTSLPRSGTVRAARLLAETGDCRARFPTPGALACLAGAAPSTRQSGKIRTVSFRWSCDKQLRDAVTDFAGDSRRASPWATDLYNRARARGHDHPHAVRILARAWLFVIWHCWQDGAAYDPAKHRALQTLLNQDQQAA

SEQ ID NO: 14297 - protein, 385 aa, unidentified
  source 1..385: note = protein_6746738
  REGION 41..185: note = RuvC_domain
  SITE 81: note = RuvC_P2
  SITE 118: note = RuvC_P3
  SITE 120: note = RuvC_P4
  SITE 123: note = RuvC_P5
  REGION 255..342: note = Tnp_domain
  SITE 263: note = Tnp_P1
  SITE 292: note = Tnp_P2
  SITE 300: note = Tnp_P3
  SITE 301: note = Tnp_P4
  SITE 313: note = Tnp_P5
MQKLNDLSRSLTALEPNGTLIAVIEMSLSSWLVAGIVPGVERQPLKKLAVDESALLKLLHRWREEAEKAGRRIERIAVAFEAGRDGFWLARWLKARGIEAYVIHASSVAVSREHRRAKTDRLDTELLKRSFLGWLRGERDHCKMVEIPTMQDEDAKRPNREHDSLIGERSRIVNRMKAALVRLGIRGFNPKLKRASTRLDGLRTPEGEPIPPNALAELRRDMERRRLVNNQIRQIEEERLKRIEQAPCDGPHVMVRLLARVMGVGIETADMLVHEVLSRNMRDRRAVARYAGLTGSPDESGRKRREKGLARSGNTRVRRGMIQLAWRFLLHQKNSALTKWFRSRTENARGTRKPMIVALARKLLIALWRLVREGVVPDGVVLRPA

SEQ ID NO: 14298 - protein, 331 aa, unidentified
  source 1..331: note = protein_b630de7
  REGION 7..161: note = RuvC_domain
  SITE 10: note = RuvC_P1
  SITE 60: note = RuvC_P2
  SITE 98: note = RuvC_P3
  SITE 100: note = RuvC_P4
  SITE 103: note = RuvC_P5
  REGION 203..289: note = Tnp_domain
  SITE 211: note = Tnp_P1
  SITE 241: note = Tnp_P2
  SITE 249: note = Tnp_P3
  SITE 250: note = Tnp_P4
  SITE 262: note = Tnp_P5
MKFRAFIGIDVSKSTIDIYLRNAGRHAVFVNDLKGFEAMVEWLMDILGQVCPEEMMFGMEHTGLYSELLISFLDDHNFPFTVLPGLEVKKSMGIRRGKSDKADSKVIAEYIYEKREKIKLFRKPSRNLESIRKIASYRERLVKERTAFKTRLGEHQKVYGKESYEIYTQSHKQIIACLDNQIKGMEAEMERLIKDDQEMLRQYQLVKSVKGIGPQTAIMMIVLTKAFTAFPDWRKFASYAGIAPFPNQSGTYMGKTRTSKLANKRIKALLTMCAGVAVQYNPEMRLYYEQRVNKGKNKMSTMNIIRNKLVSRIFAVIERGTPYVETMKYAA

SEQ ID NO: 14299 - protein, 345 aa, unidentified
  source 1..345: note = protein_e57367d
  REGION 7..150: note = RuvC_domain
  SITE 10: note = RuvC_P1
  SITE 53: note = RuvC_P2
  SITE 88: note = RuvC_P3
  SITE 90: note = RuvC_P4
  SITE 93: note = RuvC_P5
  REGION 212..301: note = Tnp_domain
  SITE 220: note = Tnp_P1
  SITE 250: note = Tnp_P2
  SITE 258: note = Tnp_P3
  SITE 259: note = Tnp_P4
  SITE 272: note = Tnp_P5
MTHSTVLAIDLAKNVFQVCKMDRHGRIIFNKEVSRKKLTELLIKEKASLISMESCATAHHWGRLAIKLGHKVKAIAPKRVSAFRQGQKTDANDALAIAIAAMQPNVKACRILNIEDQCQQSIVHIRELLVRQKVSSANQLRALLLEFGFPINKGDFAFRTEIPLILEDAENSLTCTFRETLAMMYDRFVDLIHQIDNITQKLKVITSQDLLCKRLQALEGVGPICAALLKIALNQKDHFSKGRQASACLGLTPVQHSSGGKQKIGAIAKRCGNNTLRNALYNGAIGVVCKLEKREARTSKEQWLKAMTVRRGKKVAAIALANKTVRTAFAMIESGEDYQPQFLVA

SEQ ID NO: 14300 - protein, 334 aa, unidentified
  source 1..334: note = protein_197e3f0
  REGION 9..161: note = RuvC_domain
  SITE 12: note = RuvC_P1
  SITE 65: note = RuvC_P2
  SITE 105: note = RuvC_P3
  SITE 107: note = RuvC_P4
  SITE 110: note = RuvC_P5
  REGION 206..293: note = Tnp_domain
  SITE 214: note = Tnp_P1
  SITE 244: note = Tnp_P2
  SITE 252: note = Tnp_P3
  SITE 253: note = Tnp_P4
  SITE 266: note = Tnp_P5
MRNLYTFYVGVDVAKSFYVVAILSIEGNEEKLRSFRVEANPRAFEKRLISIIGSCKRTDLLIIMESTGPYHVGLAEYLSRQGYHVVVANPFAVKRFIEANMSKAKTDKIDAEFLAKFGMHVSDHKLYELRSEEEKKVERYIKLIEDLKEKLVALENQREAARIILGKEDKDILGSYDRIIKELKKEIEAKERELKEYLKRNFAREYRLLLSIPGIREKAIGVILGVMRGFRGFKSVKEVVSYAGICPRVVESGSSVRQRGRMNRRGNRLVRRVFFMCALSAVRANRYCRELYERLLSRGKSKKAALVAVAAKLLRQAFGVLKSGMPFNAELATP

SEQ ID NO: 14301 - protein, 337 aa, unidentified
  source 1..337: note = protein_e0efdac
  REGION 7..149: note = RuvC_domain
  SITE 10: note = RuvC_P1
  SITE 53: note = RuvC_P2
  SITE 88: note = RuvC_P3
  SITE 90: note = RuvC_P4
  SITE 93: note = RuvC_P5
  REGION 209..293: note = Tnp_domain
  SITE 217: note = Tnp_P1
  SITE 247: note = Tnp_P2
  SITE 255: note = Tnp_P3
  SITE 256: note = Tnp_P4
  SITE 268: note = Tnp_P5
MNEAITIEVDLAKSVFQLHGVDHNGKSVLRRQLRRSQMLEFFQKQPGSLIGLEACASAHYWARELGKFGHDVRLMQPSYVKGYVKRGKTDAADAEAICEAVSRPSMRFVPVKSEETQGQLVTHKTREFLVRQQTQIVNAIRAHLGEFGIVIPKGIQNVGRVIEACDSAKLPTAARKALNLLADQLIDTQKKIAELTTDIRADVTSNEAAQRLQTIPGVGPITASAFVATLPDIADFKSARDLSAWLGLTPKPHSTGGKERLGRISKMGNKYLRRLLYLGAMAQVSARRRGEPGDDWLWKIIQRTKPKQAAIALANRMARRIYALLKHGTEYQANYAR

SEQ ID NO: 14302 - protein, 344 aa, unidentified
  source 1..344: note = protein_e40caf6
  REGION 6..148: note = RuvC_domain
  SITE 9: note = RuvC_P1
  SITE 52: note = RuvC_P2
  SITE 87: note = RuvC_P3
  SITE 89: note = RuvC_P4
  SITE 92: note = RuvC_P5
  REGION 211..295: note = Tnp_domain
  SITE 219: note = Tnp_P1
  SITE 249: note = Tnp_P2
  SITE 257: note = Tnp_P3
  SITE 258: note = Tnp_P4
  SITE 270: note = Tnp_P5
MTVITIGIDLAKNVFQIHGVDENGKCQLKKRLKRSQMTTFFANMKPCLIGMEACAGAHHWARILIAQGHSVKLMPPQFVKPYVKTNKNDMADAEAICEAVSRPNMRFVSIKTSEQQSLLSVHRARTGFVKARTAQINQIRGLLAEFGIVLPQGAVAINRHVPELLEDADNGLPMSFRHLLSSLYKNIKQLSEHIETLEAAINEQFRQDELCKKIAAIPGVGVLTATAIVSTVGDGKGFKNGRQLAAWLGLVPLQHSSGGKNVLGRISKRGDVYIRTLLIHGARSVIVARKHKLLPGSWLSRLLTRRNKNVAAVALANKNARMLWVLLTTDKEFSPDQTIGAVYM

SEQ ID NO: 14303 - protein, 399 aa, unidentified
  source 1..399: note = protein_fcf41e2
  REGION 6..159: note = RuvC_domain
  SITE 9: note = RuvC_P1
  SITE 57: note = RuvC_P2
  SITE 98: note = RuvC_P3
  SITE 100: note = RuvC_P4
  SITE 103: note = RuvC_P5
  REGION 221..306: note = Tnp_domain
  SITE 229: note = Tnp_P1
  SITE 259: note = Tnp_P2
  SITE 267: note = Tnp_P3
  SITE 268: note = Tnp_P4
  SITE 279: note = Tnp_P5
MDHVVIGVDPHKLSATIEVVDQHEHLLGSGRFSTDQAGYAAMRAYAKTWPKRLWAVEGANGAGRPLAQRLLEAGEHVVDVPAKLAVRVRLFDTGHNRKTDAHDAHAVAVVAVRTTNLRVLKVDGELEAMRMLADRREALTRRRVQTVCRLQALLAELLPGQAKRDITTGQAKAMLATVRPRDIAGKTRRRIAAEELAELIAVEAKIKKATAELKAMVLARESRLMDIHGVGAVVAARILADVGDVARFADRNRFASWTGTAPLDASSGEQNRHRLSRAGNRRVNHMIHIAAVTQLRLDTEGRAYYRRKRADGKKPQEALRCLKRRISDAIYKQLVTDAVRAEGADPGGHCGASQESSAVDLPPHIDTSDQPLPDPQTRRYAAPPGTRKSQPLGTLASTG

SEQ ID NO: 14304 - protein, 388 aa, unidentified
  source 1..388: note = protein_8d6c494
  REGION 8..161: note = RuvC_domain
  SITE 11: note = RuvC_P1
  SITE 60: note = RuvC_P2
  SITE 101: note = RuvC_P3
  SITE 103: note = RuvC_P4
  SITE 106: note = RuvC_P5
  REGION 267..353: note = Tnp_domain
  SITE 275: note = Tnp_P1
  SITE 305: note = Tnp_P2
  SITE 313: note = Tnp_P3
  SITE 314: note = Tnp_P4
  SITE 326: note = Tnp_P5
MKNFDYSIGIDVSKDNFVVSIIKEDYFIKTNLSFSMDKAGFESFLYSTHQFKDSSICVFEPTGIYHTNLFNFLKINGYNVSMVNPYKVKQFFKLKKSKPTKTDNIDSKVLAEFAQFNQNTTQSISEEKENFRQLIREKENISTQIAQIKSEIKRLLYLLFPEIVRNGNAFSSGIISILKIFPSAWAIKNVSEEKFISSVEKYLPKKGKRPDLKLIYQMAKNSIAYHYPHYEKILKMKIDYLAFLENQKYQLDQLIEEFADKLYKREIEILTSIPGIAKNSAIYFISEIMDIRRFQDAKKLIGYCGLDPVIKQSGKYKGQWKISKKGNSHARRIVFIMASSVRKNCPYFEQYYEKKRNEGKSYMEAVIATSTKLIRVIYSLLFENRSFI

SEQ ID NO: 14305 - protein, 388 aa, unidentified
  source 1..388: note = protein_8d82e2d
  REGION 4..162: note = RuvC_domain
  SITE 7: note = RuvC_P1
  SITE 60: note = RuvC_P2
  SITE 101: note = RuvC_P3
  SITE 103: note = RuvC_P4
  SITE 106: note = RuvC_P5
  REGION 266..352: note = Tnp_domain
  SITE 273: note = Tnp_P1
  SITE 303: note = Tnp_P2
  SITE 311: note = Tnp_P3
  SITE 312: note = Tnp_P4
  SITE 325: note = Tnp_P5
MIYIGIDVAKDKHDCLISNSDGEILFDHFTISNSLEGFDFLFSRIQASSDSASQIKIGLEATGHYSSNILEFLVNKNLPIFILNPLHTSLYRKSLSFRKTKTDKADVHSIVSLLMTQKLTPYIPASYHRRELKSLTRYRFNLVQDCSVLKVSFSRLMNLIFPELEKIVHQVQVNSVYQLMSEYTSASALSTANLTHLTTLLRKYSKGHYGREKAIEIRSAAKQSIGTSDGILSLELQQTLVRIRLLQEQISIVEARIKEIIEEIDSPFITIPGISYMTAAMIHAEVGDFSNFSSAEKILAFAGMEPSIYQSGQSTSTHARMVKRGSKYLRYALFTAAKNVGNWDDTFKEFLQKKLSEGKHYNVAVSHVAKKLVRTLYSMEMNHTAYIK

SEQ ID NO: 14306 - protein, 344 aa, unidentified
  source 1..344: note = protein_0c01c15
  REGION 6..147: note = RuvC_domain
  SITE 9: note = RuvC_P1
  SITE 52: note = RuvC_P2
  SITE 87: note = RuvC_P3
  SITE 89: note = RuvC_P4
  SITE 92: note = RuvC_P5
  REGION 211..298: note = Tnp_domain
  SITE 219: note = Tnp_P1
  SITE 249: note = Tnp_P2
  SITE 257: note = Tnp_P3
  SITE 258: note = Tnp_P4
  SITE 270: note = Tnp_P5
MHIASIGIDLGKTTFHLVALGERNKVLVRKKFSRAQLLAYTANLPSSLIGLEACAGAHFMGAALREQGHEVRLIPAQFVKPYRKSNKNDFIDAESIAEAVTKENMRFVQIKTQEQLDVQAMHRVRDRLVQRRTALINEIRGFLLERGITFAADPTHLRKNLPGVMEDAEQNLSPRLRWLLGRLWQEWKQVEIDVKAITDEIKRISNEDARCRRLRQIPGFGPLVSTATVAAIGNGAAFRRGRGFAAWVGVVPRQYSTGGKQKLFGISKRGNIYLRRMLIHGARAVLLRVKYDTGGFGQWVHRLAQGAPRNKVVVAIANKLARIAWAVLSSDKDYQHQPLQMTAA

SEQ ID NO: 14307 - protein, 324 aa, unidentified
  source 1..324: note = protein_238a0c1
  REGION 8..149: note = RuvC_domain
  SITE 11: note = RuvC_P1
  SITE 52: note = RuvC_P2
  SITE 92: note = RuvC_P3
  SITE 94: note = RuvC_P4
  SITE 97: note = RuvC_P5
  REGION 191..278: note = Tnp_domain
  SITE 199: note = Tnp_P1
  SITE 229: note = Tnp_P2
  SITE 237: note = Tnp_P3
  SITE 238: note = Tnp_P4
  SITE 251: note = Tnp_P5
MNKDMIYFGIDISKDVFDVMDSNGNYFQFENDFKGFKKFIELLSSKSHCVMEATGYYHYKLAYYLLENNIRVSVENPLSVKRFIQMRLSKIKTDKSDAKMICLYAQHVDLKLWKGQTKNQIECLQITRLLSLYFKQTTAIKNKIHGEDVLGNPSSIVVRSLKRSLKFKQKEIKLIEKKLTEIVKQDHQELLTRIESIPGLGRKTSIMLIVLTDGFERFTSASELCSYSGLTPIIRQSGSSVKGRPRISKMGNKKLRNLLFMCSFTACKNNKACKALYDRIVAKGKSKKLALIAVCNKLLKQAFAIAKSGLIYDETYRSTLTKNL

SEQ ID NO: 14308 - protein, 310 aa, unidentified
  source 1..310: note = protein_884d758
  REGION 8..155: note = RuvC_domain
  SITE 55: note = RuvC_P2
  SITE 95: note = RuvC_P3
  SITE 97: note = RuvC_P4
  SITE 100: note = RuvC_P5
  REGION 191..275: note = Tnp_domain
  SITE 199: note = Tnp_P1
  SITE 228: note = Tnp_P2
  SITE 236: note = Tnp_P3
  SITE 237: note = Tnp_P4
  SITE 248: note = Tnp_P5
MKQTIVYIGIDASQSSFGCGWQNRFHRFDNDKAGRVTLVRWIKQKQSGPVQVICEASGGYEQDLLDALAEADLAVSLVQATRVRQYARAAGILAKTDKVDARVLARFGAAMRPEPTSPRSAAQKLLRELESQRRHLSDLLVAEQNRLEQLHDEKLRGLARALMGTIKKQIARIDARITTLIMQDQELCQKAQKLTSVKGVGERTAALLLAQMPELGTLNRREAAALAGLAPFNRDSGTMRGKRTIFAGRRAVRRGLYMAALVASRRNPILSNFYRRLRTKDKPHKVALTAVMRKLLLARNQALTPTQSFA

SEQ ID NO: 14309 - protein, 345 aa, unidentified
  source 1..345: note = protein_21072e4
  REGION 13..155: note = RuvC_domain
  SITE 16: note = RuvC_P1
  SITE 59: note = RuvC_P2
  SITE 94: note = RuvC_P3
  SITE 96: note = RuvC_P4
  SITE 99: note = RuvC_P5
  REGION 218..307: note = Tnp_domain
  SITE 226: note = Tnp_P1
  SITE 256: note = Tnp_P2
  SITE 264: note = Tnp_P3
  SITE 265: note = Tnp_P4
  SITE 277: note = Tnp_P5
MNNHSNKGQICTLGIDLSKMSFQLHGVDSSGKTVTRKKLSRQKLLPYMANLSPCVIGIEACGGAHYWFRQFTALGHSVRIIAPQFVKPYIKSNKNDAADAEAICEAVQRPNMRFVPTKSIEQQDIQSIHRMRSQTVSRRTAQANQIRGLLMEYGIIIPKGIFYIRKYIPSILEDAENGLTVLFRELLSMLYDEMVHLDERIQQLELKLETIASINQNCQRLLTIPGVGLLSATALIAAIGDVSVFKSGRELAAWLGLVPRQHSTGGTPTLLGISKRGDTYLRTLLIHGGRTVVRVADKYDDRRNQWISELEKRRGKNISAVAVANKNARIAWAVLSKKESYQTVA

SEQ ID NO: 14310 - protein, 388 aa, unidentified
  source 1..388: note = protein_2a53ee6
  REGION 4..160: note = RuvC_domain
  SITE 7: note = RuvC_P1
  SITE 58: note = RuvC_P2
  SITE 98: note = RuvC_P3
  SITE 100: note = RuvC_P4
  SITE 103: note = RuvC_P5
  REGION 264..351: note = Tnp_domain
  SITE 272: note = Tnp_P1
  SITE 302: note = Tnp_P2
  SITE 310: note = Tnp_P3
  SITE 311: note = Tnp_P4
MIYVGIDIAKLNHFASAISSEGEILIEPFKFTNDADGFHLLASKLESFDKASTIIGLESTAHYGDNLVRYLVAGLYKVCVLNPIKTSQMRKNNIRKTKTDKVDTYVIAKTLMMQDTLKFISFYDLDLMELKALGRFRQKAIKQRTRLKIQLKTYVDQVFPELQYFFKSGLHQKAVYAVLKEAPSPNRIASMHMTHLATLLKTTSHGHFTKEQAKELRVLAQKSVGANDSTLSIQITQSIEQIELLDSQLKKIEEEMTDIMKFNDSVIMTIPGIGYINGGMILGEIGDIHRFSNPNKLLAFAGLDPSVYQSGNFLGQTNTDVQTLLPCTKICTGQCTLNVIRNNFTFKSYYETKMAEGRTHYNALGHCSGKLVRIIWKMLTDKVEFNLK

SEQ ID NO: 14311 - protein, 336 aa, unidentified
  source 1..336: note = protein_0682c12
  REGION 2..144: note = RuvC_domain
  SITE 5: note = RuvC_P1
  SITE 48: note = RuvC_P2
  SITE 83: note = RuvC_P3
  SITE 85: note = RuvC_P4
  SITE 88: note = RuvC_P5
  REGION 206..291: note = Tnp_domain
  SITE 214: note = Tnp_P1
  SITE 244: note = Tnp_P2
  SITE 252: note = Tnp_P3
  SITE 253: note = Tnp_P4
  SITE 265: note = Tnp_P5
MIGLDIAKHVFQVHGADAVGHVLFRKRVTRAKLIGFLAAQTPCVVAMEACAGGHYWAREISKLGHRVRLIAPAYVKPFVKRQKNDAADAEAICEAAQRPSMRFVPVKTEEQQANGIVFRARDLLVRQRTQCVNALRGHLFEYGYVFPQGITHVATLVALVEDPRSSLPESVRTILKLLVDTFTALEGQIAELDAEINRRSKADPTARRLMTIPGVGPIASTAITALVPAAEGFAAGRDFAAWLGLTPLQKSTGGKQKLGAVSKRGERTIRRLLIIGASAVVQQASRRGAPKGSWLAQMLARKPKMLVTVALANKMARIVWALLVKGGIYRAPVAAA

SEQ ID NO: 14312 - protein, 338 aa, unidentified
  source 1..338: note = protein_b8d7bbf
  REGION 6..148: note = RuvC_domain
  SITE 9: note = RuvC_P1
  SITE 52: note = RuvC_P2
  SITE 87: note = RuvC_P3
  SITE 89: note = RuvC_P4
  SITE 92: note = RuvC_P5
  REGION 211..298: note = Tnp_domain
  SITE 219: note = Tnp_P1
  SITE 249: note = Tnp_P2
  SITE 257: note = Tnp_P3
  SITE 258: note = Tnp_P4
  SITE 270: note = Tnp_P5
MKITTIGLDIAKSIFHLYAVNQVGHLVKKKQLKRKQMLAYFAQLEPCLVAMEACGGANYWARELMALGHEVKLIAPQYVKPYVRGNKNDYNDAQGISEAVQRPDMRFVPIKSVEQQDIQNFHRQRELIKKERNALANQARGLLAEYGLVINKGVAALRRDLPLMLEDAENGLSALSRELFAEELEALRVLDKRFMDCEKRIKVLNQNNEMCQRLDDILGIGPITASATYAAAGDGKDFVNGRHYSAWLGLVPGQHSTGGKPVLLGISKRGNAYLRTLYIHGARAVLRHSATKQDRFSRWAQSVLARRGHNKACVAVANKIARMAWVIMAKGESYRAPV

SEQ ID NO: 14313 - protein, 338 aa, unidentified
  source 1..338: note = protein_ac958d2
  REGION 6..147: note = RuvC_domain
  SITE 9: note = RuvC_P1
  SITE 51: note = RuvC_P2
  SITE 86: note = RuvC_P3
  SITE 88: note = RuvC_P4
  SITE 91: note = RuvC_P5
  REGION 210..299: note = Tnp_domain
  SITE 218: note = Tnp_P1
  SITE 250: note = Tnp_P2
  SITE 258: note = Tnp_P3
  SITE 259: note = Tnp_P4
  SITE 272: note = Tnp_P5
MNNTIVGVDLAKDVIQVCIYTSNKVQSNTEMSRHEFLEWLFKTSSSTVLFEACGTSNFWTQKAVEAGHDARLISAKLVSSVRQNQKTDKNDALAIVQASFIPEISFIKGKTNEQQQLQSILRLRELAVKQKTASGNQLKALLLEFNIRVSTKNGGLGGAIQSTLEDAQNELSTAFRAALHAAWQHHLQIIKSIATYDRSLEELVEQHEDCKRLLKLEGVGVINAVNLYIALGCADLGSFTKGKDASACIGLTPIQHSTGGKVKLGSIGSYVKNSVLRSQLITGAMAVVGQVCKRTAVTSKDLWIQQLVARRGKKVAAVALANKTVRTAFAMLTLGTEY

SEQ ID NO: 14314 - protein, 343 aa, unidentified
  source 1..343: note = protein_d73d429
  REGION 6..149: note = RuvC_domain
  SITE 9: note = RuvC_P1
  SITE 54: note = RuvC_P2
  SITE 89: note = RuvC_P3
  SITE 91: note = RuvC_P4
  SITE 94: note = RuvC_P5
  REGION 213..300: note = Tnp_domain
  SITE 221: note = Tnp_P1
  SITE 251: note = Tnp_P2
  SITE 259: note = Tnp_P3
  SITE 260: note = Tnp_P4
  SITE 272: note = Tnp_P5
MKLSYVGVDLAKNVYQLHGVDRSGKAVWRRRLRRHQWMRVLLETVEPGCVIGMEACTGAHHWARELQSHGYTVKLIPPQFVKPYVKSNKNDANDAEAICEAMSRPHMRFVTVKSVEQQDIQATHRVRAELKDHRNAKANQIRGLVAEYGLVAPQTLLALRRAIPDWLEDAENGLTDYFRSLLHGLWDDLLTLDDRIKELDKEITRLANSNEVTRRLQQLRGVGPMVATALVATVGTGEQYRKGRQMAAALGLTPRQSSSGDKHRLFGISKRGDAYLRTLLIHGARAVVSQAKHRDDPLSRWATDIAKRRHPNVAAVALANKTARMAWAMLRNETDYDPNLAVG

SEQ ID NO: 14315 - protein, 322 aa, unidentified
  source 1..322: note = protein_e0c1107
  REGION 9..157: note = RuvC_domain
  SITE 12: note = RuvC_P1
  SITE 56: note = RuvC_P2
  SITE 96: note = RuvC_P3
  SITE 98: note = RuvC_P4
  SITE 101: note = RuvC_P5
  REGION 195..279: note = Tnp_domain
  SITE 203: note = Tnp_P1
  SITE 232: note = Tnp_P2
  SITE 240: note = Tnp_P3
  SITE 241: note = Tnp_P4
  SITE 252: note = Tnp_P5
MSLPGPLCVGIDVSKATLDIAASSAIEQFSVANDADGFDAIIAELRKHTVALVLMEATGGLEAAVACALQAEGFEIAVVNPRQARDFARAMGYLAKTDRIDARVLAQMAEVIHRHPERERFIRALPDVERQVLAAMVVRRRQLITMLVAERNRLHPAHPQSRKSINIIIKALEDELARIDKDMNTHIRNHFKELSERLNSIKGVGTMTVAALLAEVPELGRLSGREISALVGVAPVNRDSGTLRGRRTIFGGRAGVRTALYMAALVATRFNPVIKAFYTRLVAAGKPKKVALVACMRKLLTILNAMLRKNEGWDDSYHHIAP

SEQ ID NO: 14316 - protein, 397 aa, unidentified
  source 1..397: note = protein_96c803d
  REGION 6..164: note = RuvC_domain
  SITE 9: note = RuvC_P1
  SITE 62: note = RuvC_P2
  SITE 103: note = RuvC_P3
  SITE 105: note = RuvC_P4
  SITE 108: note = RuvC_P5
  REGION 273..359: note = Tnp_domain
  SITE 279: note = Tnp_P1
  SITE 309: note = Tnp_P2
  SITE 317: note = Tnp_P3
  SITE 318: note = Tnp_P4
  SITE 332: note = Tnp_P5
MESYYLGIDVGKFEHQATLVNEQKEMVGQSIRFANNIDSFTNLIDQIKKGIPEKSNIQAGMESTGHYWLNLDAFLKRSGIENVQIINPIETQKISKTRIRKVKNDKVDSFEIAKIVCDRKNATAIKQNEKLVKLKRLTRFCDKMKRQEKFIKREIVNLLEVVCPEFEGLFNNIFLKTPLSILEKYSDLRKLGHVKKEAFAELLKKNSRGRIGEAKSELILQTINNSVGKNYWDEFSVMQIKMLLDNFRLIEKQVDQLKKEIEKFSDQFEDKVYVNSVVGVSSFSAAVYLAELGDIERFKSKHQLTAFAGIDASVFESGEYKRKQGNRISKRGSKYLRKQLYYAAKTAIIFDPEMKKFYEKKKKEGKHYNVIMIAVARKILMRIYIVLKQKRLYEVIS

SEQ ID NO: 14317 - protein, 386 aa, unidentified
  source 1..386: note = protein_7e7cd32
  REGION 4..161: note = RuvC_domain
  SITE 7: note = RuvC_P1
  SITE 59: note = RuvC_P2
  SITE 99: note = RuvC_P3
  SITE 101: note = RuvC_P4
  SITE 104: note = RuvC_P5
  REGION 259..346: note = Tnp_domain
  SITE 267: note = Tnp_P1
  SITE 297: note = Tnp_P2
  SITE 305: note = Tnp_P3
  SITE 306: note = Tnp_P4
  SITE 319: note = Tnp_P5
MKLVGIDIAKYKHAAFIMDASTGESLCDPFLFKNNKDGFQKFYDELNKYTQDELLIGMEDTGHYNFAIESCLLAKGYKVALINPITTKNLRKASLKTVKRDKEDAILITKALLDKDYYRIISIQDEKLKEAKELTRYRTQLTIEMNRKKNILQRHIDIVFPEFNTLFNNEYTITYLNILRKYGDAYTIAHTDIRSLRKCFKYCNIFSAEDLKELASNSVGIHDVSISFIIQSVISSIDLINSQIEELDKKIEELAITQDSSITSIPGISIITGTSILAELGDISKYSNAGKLIKFAGVNPYISESGEFSADKTAITKKGSKYLRATLYRVIIPVIRHNPAFNNYYHLKRSQGKGHLCALGHCVRKLLRIIYHLEINHITFDINSLK

SEQ ID NO: 14318 - protein, 346 aa, unidentified
  source 1..346: note = protein_479ce47
  REGION 5..152: note = RuvC_domain
  SITE 8: note = RuvC_P1
  SITE 55: note = RuvC_P2
  SITE 92: note = RuvC_P3
  SITE 94: note = RuvC_P4
  SITE 97: note = RuvC_P5
  REGION 212..299: note = Tnp_domain
  SITE 220: note = Tnp_P1
  SITE 250: note = Tnp_P2
  SITE 258: note = Tnp_P3
  SITE 259: note = Tnp_P4
  SITE 271: note = Tnp_P5
MDHYAGIDVSLECSSVCVVDASGKIVREGKVASEPEALISWFISLGYELSRIGLEAGPLSQWLFAAMREAGLAVELLETRHVRKAFEAMPVKSDRNDARGIAQLMRLGWFRPVHCKSIGAQETRTLLTARKLVQSKLRDVENSLRGILRGFGLKVGKTTERSFAGRIRELASGHPSLETITEGLLAVHAVLLREFNSFEKQVRRVARSDTRTRLLMSIPCVGPVVALTYGSAIDDPARFKSSKQVGAHFGMTPKKYQSGETDYTGRISKIGDAWVRTALYEAAHIMLTKPVKGCSELKSWAMRIARRAGMSKAKVALARRLAVIMHRMLVDGTLFNPASKQTAAAA

SEQ ID NO: 14319 - protein, 342 aa, unidentified
  source 1..342: note = protein_5fc25b0
  REGION 5..152: note = RuvC_domain
  SITE 8: note = RuvC_P1
  SITE 55: note = RuvC_P2
  SITE 92: note = RuvC_P3
  SITE 94: note = RuvC_P4
  SITE 97: note = RuvC_P5
  REGION 212..296: note = Tnp_domain
  SITE 220: note = Tnp_P1
  SITE 250: note = Tnp_P2
  SITE 258: note = Tnp_P3
  SITE 259: note = Tnp_P4
  SITE 271: note = Tnp_P5
MNYYAGIDVSLECSSVAIVDATGKIIREGKVASDPVALIAWFRVFGLNVLRIGLEAGPLSQWLYAAMKEANLAVELLETRHVRNAFKTMAVKTDRKDARGIAELVRVGWFRPVHCKSMNAQETRAMLTARTLVQSKLHDIEASLRGILRGFGLKVGKITSNRFARRINELVVEHPTLQIIAEALLAAHEVLLRQFKGFEKRVRIMAREDAKARLLMTATGVGAIVSLTCSSGIDDPGRFKKSKTVGAHYGMAPKKYQSGETDYTGRISKTGDKSVRTALYQAAHIILTKPVKGSVLKSWAMRLAKRIGMKKAKVALARKLAVIMHRMLVDGKPFNPAAGAAA

SEQ ID NO: 14320 - protein, 392 aa, unidentified
  source 1..392: note = protein_8955377
  REGION 4..162: note = RuvC_domain
  SITE 7: note = RuvC_P1
  SITE 60: note = RuvC_P2
  SITE 101: note = RuvC_P3
  SITE 103: note = RuvC_P4
  SITE 106: note = RuvC_P5
  REGION 267..354: note = Tnp_domain
  SITE 275: note = Tnp_P1
  SITE 305: note = Tnp_P2
  SITE 313: note = Tnp_P3
  SITE 314: note = Tnp_P4
  SITE 327: note = Tnp_P5
MFYLGIDIGKRNHVATMLDDGKKAVFRAFSFSNSTEGGEALLAQIVKHAPDATQVSIGLEATGHYWLALYSFLSDRGYMIHVINPTQTDGWSKGIEIRKRKTDKIDSELIAELIHYGDFSSTQLADESIQSLRTLTRFRSYLVDSIADLKRKVICVLDQVFPEYETLFSDVFGATARELLLKYSSPDELEQLSVEKLTQVLEQLSRKKCSTAKAEKVLKAAKHSFGVTHCRDTFIFQLRALLNQMNFIEQQVTDTEAEIDVLMEQLQSPITTIPGIGPVLGAVILGEIGDIHRFESPSKLVAYAGIDASVSQSGDFEGTQMHMSKRGSPYLRRALFMAARSAVNSDAQLGAFFEKKHSEGKHYSACIGAVSRKLCHIIHAILSQNRPFSPKT

SEQ ID NO: 14321 - protein, 392 aa, unidentified
  source 1..392: note = protein_46f989e
  REGION 5..163: note = RuvC_domain
  SITE 8: note = RuvC_P1
  SITE 62: note = RuvC_P2
  SITE 102: note = RuvC_P3
  SITE 104: note = RuvC_P4
  SITE 107: note = RuvC_P5
  REGION 267..356: note = Tnp_domain
  SITE 275: note = Tnp_P1
  SITE 305: note = Tnp_P2
  SITE 313: note = Tnp_P3
  SITE 314: note = Tnp_P4
  SITE 327: note = Tnp_P5
MEPVIGLDVSKGASVFQAFVRRNEAHGKPETIRHTENGFSRLGNVIQELKERTKKEPVVILEATGHYHRIIVAYLADIGVKHFIINPLLSKRAKSAQLRKVKTDAADAWHLAEMYYRGDVEPHRSWNECYTELQHVTRQHEFITSLYVQAKLNMRALLDQVFPTFESVFYDLFSVTALATLQVCLSGQDQEWEEAIRKQAGKSRSTSWIRTKVEHLEVIYEQWSKSKKSATQIQMLRSMVSLLLSMQEQLEAIEKQMKQLAEQLPEVGLVKSIPGVGDKLAATIISEVGDAQQFGDAKQLVAYAGLDPGVYSSGQFVATSNRITKRGSKRLRRALYLAVQCGLRGSTNERLRGYYDKKREEGKPYKVTVIACANKLLHHIYAILKKGQPYQA

SEQ ID NO: 14322 - protein, 359 aa, unidentified
  source 1..359: note = protein_57d230e
  REGION 1..96: note = RuvC_domain
  SITE 2: note = RuvC_P2
  SITE 36: note = RuvC_P3
  SITE 38: note = RuvC_P4
  SITE 41: note = RuvC_P5
  REGION 195..283: note = Tnp_domain
  SITE 203: note = Tnp_P1
  SITE 234: note = Tnp_P2
  SITE 242: note = Tnp_P3
  SITE 243: note = Tnp_P4
  SITE 254: note = Tnp_P5
MESTGKYWVPVFNLLEDDINVTIANPKWVKAVKGNKDDTKDSKWIGDLFRLGLVPGSFIPCKAIRILREYTRYRYKLTSCKSSEKNRYQNALTVCNVALDSVVSDVFGKSATSIIDYLIEQSENSINHEEISSRLLRSLKKKSDSVIDSIEGYQMTDSQKDRMRLVRAHMDDITSTINDIDTMIDSLVAPYENAVQLLCTIPGVKRNSAITIISEIGTDMTRFSSTKRLCCWTGLTPGSNESAGKKKSVRITRAGVYLKPALVQCAHAAVTSEKSPYYKQKYERIMKRRGKKRAIIAIARMILTAIYQMLSNGEEWNPIDLYKIDMPEPLKEKQRAKAIKQALKLLKSEGIIPESLEAS

SEQ ID NO: 14323 - protein, 321 aa, unidentified
  source 1..321: note = protein_21be954
  REGION 4..150: note = RuvC_domain
  SITE 7: note = RuvC_P1
  SITE 52: note = RuvC_P2
  SITE 92: note = RuvC_P3
  SITE 94: note = RuvC_P4
  SITE 97: note = RuvC_P5
  REGION 191..278: note = Tnp_domain
  SITE 199: note = Tnp_P1
  SITE 229: note = Tnp_P2
  SITE 237: note = Tnp_P3
  SITE 238: note = Tnp_P4
  SITE 251: note = Tnp_P5
MTYVGIDVSKATFVVAYSSAKSSETKTFKNTTKGIREFIRTISPEENHCVLEATGNYSMLLVYLLSKAGFTVCMENPLKIKNFARVMLSVVKTDEIDARLIALYGERMQPAPFKLRSDSLLLLKQKRTVLRQLKKQLTANRNLEGSLKVLPFIDSKCKKVLEKTIKFLEKQIEEMEEELTSLAEIEYKKQMDLLTSIKGIGATLAAALIIATGGFTYFDNAKQLTRYLGLSPTYQQSGTSVNVKGHINRNGDAYLRSQLYIGAMASLRCNTECKACFDRLRSNGKPGKLAIVAVANKLIRQAFAIVAHEKKYIDGYKSVKP

SEQ ID NO: 14324 - protein, 343 aa, unidentified
  source 1..343: note = protein_e747bad
  REGION 6..147: note = RuvC_domain
  SITE 9: note = RuvC_P1
  SITE 52: note = RuvC_P2
  SITE 87: note = RuvC_P3
  SITE 89: note = RuvC_P4
  SITE 92: note = RuvC_P5
  REGION 212..295: note = Tnp_domain
  SITE 220: note = Tnp_P1
  SITE 250: note = Tnp_P2
  SITE 258: note = Tnp_P3
  SITE 259: note = Tnp_P4
  SITE 271: note = Tnp_P5
MEIAVVGIDLGKNKCSVVGLDAAGKVVTRRRMQRESVLKFTASLPPCVVAMEACCGAHHIGRIVLSQGHQVRLMSPEYVKPYVKAQKNDDRDAEGTAEAATRPTMRFVELKSQAQLDMQTLHRARDRLVGERTALINQLRAILLERGIVVAKGRRKLEVALDAMLTEPDGLQLTPRMLELVQDMRAQWRTLDQRIEAFGDEFAARARSDEPARLLSTIPGIGVINATALVAAIGRGEAFDRARDLPAWLGIVARQDTTGGKPRLLGITKRGNRYLRKLLIHGARAALPSLSQSNTPLGAWLRGLLARRHHNVAVVALANKLARIAWAVLRTGRPYHTNAVVSA

SEQ ID NO: 14325 - protein, 401 aa, unidentified
  source 1..401: note = protein_a37e5fc
  REGION 5..162: note = RuvC_domain
  SITE 8: note = RuvC_P1
  SITE 59: note = RuvC_P2
  SITE 99: note = RuvC_P3
  SITE 101: note = RuvC_P4
  SITE 104: note = RuvC_P5
  REGION 273..362: note = Tnp_domain
  SITE 281: note = Tnp_P1
  SITE 311: note = Tnp_P2
  SITE 319: note = Tnp_P3
  SITE 320: note = Tnp_P4
  SITE 333: note = Tnp_P5
MKYGVGIDVSKGKSTVAILSIAGEVIEEPFEINHDINGLNLLEEKIKDIPKEDLKIVMEETGTYHLPILGYLLDKDYFVVAENALKIKKYLDRGIRKAKTDKKDAYKLAEYACDNWYKLNKVRESDEIYTNLRFLSRRYLSNISIQTTQKVNFSNLCDLLFPGYYQLLDENIFILGLEIFKKYYHPELVLNKKQSQFINEIDKLAKKLGHKGAGITLAKKIYNLATQTISPYPNNKYSQLSAISCADELILTIKTSNEIISNMDELARELPEYYVISEIPGVGRKLTSRVIAEVEDIRRLKNAGSLIAYAGLDAPPYQSGQFEAINRHISKRGNKYLRKTGYEVMKAIKSSCKLDNELKSYIIKKENEGKLKKVAKIAGLNKFLRMYYGIVKKKYKELNIW

SEQ ID NO: 14326 - protein, 343 aa, unidentified
  source 1..343: note = protein_4c25a00
  REGION 5..151: note = RuvC_domain
  SITE 8: note = RuvC_P1
  SITE 53: note = RuvC_P2
  SITE 91: note = RuvC_P3
  SITE 93: note = RuvC_P4
  SITE 96: note = RuvC_P5
  REGION 211..298: note = Tnp_domain
  SITE 219: note = Tnp_P1
  SITE 249: note = Tnp_P2
  SITE 257: note = Tnp_P3
  SITE 258: note = Tnp_P4
  SITE 270: note = Tnp_P5
MDQYIGLDISLKDTAISIRQDGKRIWRGKCPSDPKLLAEMIRKHAPHAKRVVFETGPLSTWFYHALTAEGVPAICIEARHAQKVLDETLNKTDANDADGLAHLAEAGFYKAVRLKAFDSMLTRTLVAARNQLLTISTQLSNQIRGLMKTFGLIVPKGKGRIFDGNIRQLLDGNDGLGKIILPLLEAWRDIRRRAADLDRQLLAAARESQETKLLMTIPGIGAVTAISYVAAIEDPENFRTSRSVGAWLGLTTRRYQSGEVDYDGHISRRGDNHLRGLLYEAATVLLTRTSARNENSLRSWGLKLRERLGFKRAAVAVARKLAVIMHSMLKTGEVFNALAGATA

SEQ ID NO: 14327 - protein, 317 aa, unidentified
  source 1..317: note = protein_ef0c2f5
  REGION 10..154: note = RuvC_domain
  SITE 13: note = RuvC_P1
  SITE 56: note = RuvC_P2
  SITE 96: note = RuvC_P3
  SITE 98: note = RuvC_P4
  SITE 101: note = RuvC_P5
  REGION 192..276: note = Tnp_domain
  SITE 200: note = Tnp_P1
  SITE 229: note = Tnp_P2
  SITE 237: note = Tnp_P3
  SITE 238: note = Tnp_P4
  SITE 249: note = Tnp_P5
MKDSSSISLTGIDVSKDTLDVYFTKNGRQQKIDYRNESLKLLARQIIKLKATVVMEATGGYEKKLVRYLQDQGIACAVVNPKQVRDFARACGKLEKNDAIDARIIAAFGQTMQPRTTERIDKNREKLKVLTTRREQVQSMINQESNRRQQVEDRQMRAFIQRAIQFYESQLKELDSEMLQIIEADQTMKQKSKILLSAKGVGPTVTANLIAGLPELGQLNRQQIAKLVGLAPLVRDSGKFKEQRMTCAGRGHIRRVLYMAALVATRWNSRIRAFYLSLLERGKPKKLALTACMRKLLTILNSMVKNNQTWEQNLYSA

SEQ ID NO: 14328 - protein, 406 aa, unidentified
  source 1..406: note = protein_816086d
  REGION 4..161: note = RuvC_domain
  SITE 7: note = RuvC_P1
  SITE 60: note = RuvC_P2
  SITE 100: note = RuvC_P3
  SITE 102: note = RuvC_P4
  SITE 105: note = RuvC_P5
  REGION 276..363: note = Tnp_domain
  SITE 284: note = Tnp_P1
  SITE 315: note = Tnp_P2
  SITE 323: note = Tnp_P3
  SITE 324: note = Tnp_P4
  SITE 336: note = Tnp_P5
MNYLGIDVSKATSRYVLLDNDGEKAAKPFTLDNNQQAFAKLLERIKELNLQPDGLLIGIEATGIWWENLYCFMTEQKFKVIVLNPHQTNKFREALRLKAKTDDIDAYVIAGLLRSGEYAASYIPEETIQVLREIVKLRHQLVTNRQSFERQTHALLGLLFPEYEKTAIKNPFSIASLAILKAYPTAKHLAEAKTKNIEKIVRHIQGNNFNIAEIQTLIATAKNSIYSGRAKDARGMNLNILLTHVETLHQSIAQLDQRIDDILSPQNSDDAHSFPGANLLSIPGVGPKTLAAILSVVGADGSAYPDGKSFIGYIGFFPKIYESGETRRDNIISKRGPNYIRRALYIAAVACLKHNPQLKALYDRKISQGKKPKQALICVAKKLAHLCLSMLHSGESYNPSRVFMPA

SEQ ID NO: 14329 - protein, 384 aa, unidentified
  source 1..384: note = protein_92a92c0
  REGION 4..163: note = RuvC_domain
  SITE 7: note = RuvC_P1
  SITE 60: note = RuvC_P2
  SITE 101: note = RuvC_P3
  SITE 103: note = RuvC_P4
  SITE 106: note = RuvC_P5
  REGION 266..349: note = Tnp_domain
  SITE 273: note = Tnp_P1
  SITE 303: note = Tnp_P2
  SITE 311: note = Tnp_P3
  SITE 312: note = Tnp_P4
  SITE 325: note = Tnp_P5
MVCVGIDVAKDKHDCCILDSEGTTLVDCFTIPNNMDGFKSLLQTIQDCSQKSDKIKVGLEATGHYSYNILGFLLDNDLPVYVMNPLHTNLYRKSLSLRKTKTDRVDAKTIATMLLSDVDLKSYTDTAYHNEELKSLTRYRFDKVQERAKLKQSVSRLVTILFPELEQLVSSIHGTSIYALSEYPGAKQISEAHLTRLANILVKTSRGHYRKDKATHIRDAARTSIGSVMPAKSLELKHTIKLIQELTSEINEIEDAIRKIMDELKPPILSIPGMGFHSAAMILAEVGDFSNFNPPDKVLAYAGCSPSTYQSGKLTNCYAHMEKRGSRYLRYALYTATKYVCYWNPVFLLNTLPKSKLKASTTMLPYLMPQKETRTTDLRFAEVR

SEQ ID NO: 14330 - protein, 413 aa, unidentified
  source 1..413: note = protein_cf4ae81
  REGION 4..160: note = RuvC_domain
  SITE 7: note = RuvC_P1
  SITE 57: note = RuvC_P2
  SITE 97: note = RuvC_P3
  SITE 99: note = RuvC_P4
  SITE 102: note = RuvC_P5
  REGION 274..361: note = Tnp_domain
  SITE 282: note = Tnp_P1
  SITE 312: note = Tnp_P2
  SITE 320: note = Tnp_P3
  SITE 321: note = Tnp_P4
  SITE 334: note = Tnp_P5
MFAVGIDVSNGRSTVAVLQSKTKVTLKPFEVAHTAESLNRLAGTLNGLGDGVRVVMEHTGRYYESVAQFLHGAGFFVSALNPLLIKEYGDGKLRGGKTDKSDAVKIARFALDNWDELRQYTPMDAIRYQLKTLNRQYQLASKNRTACANNLIALLEQSFPGIRSLFDSPVRSDGSQKWVDFVDTFWHLDCVARLSLNAFNERYLKWCSRHGYNFSEAKAAQIHAHARQRIALVPKSDTAKLLVREAVAQLNVVSHTVEVYRDEMNRLASQLPEYETVMAMFGVGKSVGPQLMAEIGDLRRFTHQKSLVAFAGTDPGKNQSGDKDARSNRTSKRGSPYLRKTLFVIMTILIQRQPADDPVYQFLNKKRAEGKPYYVYMTAGGTKFLRIYYGRVRDCLKAKGLWDQPTLESGSSD

SEQ ID NO: 14331 - protein, 286 aa, unidentified
  source 1..286: note = protein_72bec91
  REGION 4..63: note = RuvC_domain
  SITE 7: note = RuvC_P1
  SITE 57: note = RuvC_P2
  REGION 196..282: note = Tnp_domain
  SITE 204: note = Tnp_P1
  SITE 234: note = Tnp_P2
  SITE 242: note = Tnp_P3
  SITE 243: note = Tnp_P4
  SITE 255: note = Tnp_P5
MLYVGIDVAKNKHDVTALNVPGKTVLKPLTFSNNKAGFELLDLSFRQLNQDCLIALKLLSDPNREQFQHDNRQVELKILARHIHRLKKKQSDWKVQYTRCLDIIFPELDKIVGKHSEYTYQLLTRYPNPQKRLEAGFDKLIEIKRLTASKIQDILSVAPRSIGTTSPAREFEIIEHYKRLIDKAETCVNDLMAEFNSVITTVTGIGNRLGAVILAEIRNIHAFDNPAQLQAFAGLDSSIYQSGQIDLAGRMIKRGSPHLRWALIQAAKACARFSPAFKAYLKTKLE

SEQ ID NO: 14332 - protein, 376 aa, unidentified
  source 1..376: note = protein_d8213dc
  REGION 4..159: note = RuvC_domain
  SITE 7: note = RuvC_P1
  SITE 57: note = RuvC_P2
  SITE 98: note = RuvC_P3
  SITE 100: note = RuvC_P4
  SITE 103: note = RuvC_P5
  REGION 252..338: note = Tnp_domain
  SITE 260: note = Tnp_P1
  SITE 290: note = Tnp_P2
  SITE 298: note = Tnp_P3
  SITE 299: note = Tnp_P4
  SITE 311: note = Tnp_P5
MLYVGIDVAKNKHDVTALNVPGKTVLKPLTFSNNKAGFELLDLSFRQLNQDCLIALEDTGHYAFNLLNFLHEQGYKVYTYTPLLIKEFAKSLSLRKTKTDKKDAHGIALKLLSDPNREQFQHDNRQVELKILARHIHRLKKKQSDWKVQYTRCLDIIFPELDKIVGKHSEYTYQLLTRYPNPQKRLEAGFDKLIEIKRLTASKIQDILSVAPRSIGTTSPAREFEIIEIIKHYKRLIDKAKKCVNDLMAEFNSVITTVTGIENRLGAVILAEIRNIHAFDNPAQLQAFAGLDSSIYQSGQIDLAGRMIKRGSPHLRWALIQAAKACARFSPAFKAYLKTKLEQGKHYNVAIIHLAKKLIRTLFYILKKSCHLTNKK

SEQ ID NO: 14333 - protein, 342 aa, unidentified
  source 1..342: note = protein_cf8e1b3
  REGION 4..159: note = RuvC_domain
  SITE 7: note = RuvC_P1
  SITE 57: note = RuvC_P2
  SITE 98: note = RuvC_P3
  SITE 100: note = RuvC_P4
  SITE 103: note = RuvC_P5
  REGION 252..338: note = Tnp_domain
  SITE 260: note = Tnp_P1
  SITE 290: note = Tnp_P2
  SITE 298: note = Tnp_P3
  SITE 299: note = Tnp_P4
  SITE 311: note = Tnp_P5
MLYVGIDVAKNKHDVTALNVPGKTVLKPLTFSNNKAGFELLDLSFRQLNQDCLIALEDTGHYAFNLLNFLHEQGYKVYTYTPLLIKEFAKSLSLRKTKTDKKDAHGIALKLLSDPNREQFQHDNRQVELKILARHIHRLKKKQSDWKVQYTRCLDIIFPELDKIVGKHSEYTYQLLTCYPNPQKRLEAGFDKLIEIKRLTASKIQDILSVAPRSIGTTSPAREFEIIENIKHYKRLIDKAEKCVNDLMAEFNSVITTVTGIGNRLGAVILAEIQNIHAFDNPAQLQAFAGLDSSIYQSGQIDLAGRMVKRGSPHLRWALIQAAKACARFSPAFKAYLKTKLE

SEQ ID NO: 14334 - protein, 345 aa, unidentified
  source 1..345: note = protein_24f6b81
  REGION 4..159: note = RuvC_domain
  SITE 7: note = RuvC_P1
  SITE 57: note = RuvC_P2
  SITE 98: note = RuvC_P3
  SITE 100: note = RuvC_P4
  SITE 103: note = RuvC_P5
  REGION 255..341: note = Tnp_domain
  SITE 263: note = Tnp_P1
  SITE 293: note = Tnp_P2
  SITE 301: note = Tnp_P3
  SITE 302: note = Tnp_P4
  SITE 314: note = Tnp_P5
MLYVGIDVAKNKHDVTALNVPGKTVLKPLTFSNNKAGFELLDLSFRQLNQDCLIALEDTGHYAFNLLNFLHEQGYKVYTYTPLLIKEFAKSLSLRKTKTDKKDAHGIALKLLSDPNREQFQHDNRQVELKILARHIHRLKKKQSDWKVQYTRCLDIIFPELDKIVGKHSEYTYQLLTCYPNPQKRLEAGFDKLIEIKRLTASKIQDILSVAPRSIGTTSPAREFEIIEIIEIIKHYKRLIDKAETCVNDLMAEFNSVITTVTGIGGRLGAVILAEIRNIHAFDNPAQLQAFAGLDSSIYQSGQIDLAGRMIKRGSPHLRWALIQAAKACARFSPAFKAYLKTKLE

SEQ ID NO: 14335 - protein, 260 aa, unidentified
  source 1..260: note = protein_ad3cb47
  REGION 4..63: note = RuvC_domain
  SITE 7: note = RuvC_P1
  SITE 57: note = RuvC_P2
  REGION 196..260: note = Tnp_domain
  SITE 204: note = Tnp_P1
  SITE 234: note = Tnp_P2
  SITE 242: note = Tnp_P3
  SITE 243: note = Tnp_P4
  SITE 255: note = Tnp_P5
MLYVGIDVAKNKHDVTALNVPGKTVLKPLTFSNNKAGFELLDLSFRQLNQDCLIALKLLSDPNREQFQHDNRQVELKILARHIHRLKKKQSDWKVQYTRCLDIIFPELDKIVGKHSEYTYQLLTRYPNPQKRLEAGFDKLIEIKRLTASKIQDILSVAPRSIGTTSPAREFEIIKHYKRLIDKAETCVNDLMAEFNSVITTVTGIGNRLGAVILAEIRNIHAFDNPAQLQAFAGLDSSIYQSGQIDLAGRMVKRGSPHLR

SEQ ID NO: 14336 - protein, 289 aa, unidentified
  source 1..289: note = protein_90cbcfd
  REGION 4..63: note = RuvC_domain
  SITE 7: note = RuvC_P1
  SITE 57: note = RuvC_P2
  REGION 199..285: note = Tnp_domain
  SITE 207: note = Tnp_P1
  SITE 237: note = Tnp_P2
  SITE 245: note = Tnp_P3
  SITE 246: note = Tnp_P4
  SITE 258: note = Tnp_P5
MLYVGIDVAKNKHDVTALNVQGKTVLKPLTFSNNKAGFELLDLSFRQLNQDCLIALKLLSDPNREQFQHDNRQVELKILARHIHRLKKKQSDWKVQYTRCLDIIFPELDKIVGKHSEYTYQLLTRYPNPQKRLEAGFDKLIEIKRLTASKIQDILSVAPRSIGTTSPAREFEIIEIIKHYKRLIDKAETCVNDLMAEFNSVITTVTGIGGRLGAVILAEIRNIHAFDNPAQLQAFAGLDSSIYQSGQIDLAGRMIKRGSPHLRWALIQAAKACARFSPAFKAYLKTKLE

SEQ ID NO: 14337 - protein, 316 aa, unidentified
  source 1..316: note = protein_cc27b51
  REGION 4..159: note = RuvC_domain
  SITE 7: note = RuvC_P1
  SITE 57: note = RuvC_P2
  SITE 98: note = RuvC_P3
  SITE 100: note = RuvC_P4
  SITE 103: note = RuvC_P5
  REGION 252..316: note = Tnp_domain
  SITE 260: note = Tnp_P1
  SITE 290: note = Tnp_P2
  SITE 298: note = Tnp_P3
  SITE 299: note = Tnp_P4
  SITE 311: note = Tnp_P5
MLYVGIDVAKNKHDVTALNVQGKTVLKPLTFSNNKAGFELLDLSLRQLDQDYLIALEDTGHYAFNLLNFLHEQGYKVYTYNPLLIKKFAKSLLLRKTKTDKKDAHGIALKLLSDPNREQFQHDNRQVELKILARHIHRLKKKQSDWKVQYTRCLDIIFPELDKIVGKHSEYTYQLLTCYPNPQKRLEAGFDNLIEIKRLTASKIQDILSVAPRSIGTTSPAREFEIIENIKHYKRLIDKAEKCVNDLMAELNSVITTVTGIGNRLGAVILAEIQNIHAFDNPAQLQAFAGLDSSIYQSGQIDLAGRMIKRGSPHLR

SEQ ID NO: 14338 - protein, 320 aa, unidentified
  source 1..320: note = protein_eb39f0f
  REGION 4..63: note = RuvC_domain
  SITE 7: note = RuvC_P1
  SITE 57: note = RuvC_P2
  REGION 196..282: note = Tnp_domain
  SITE 204: note = Tnp_P1
  SITE 234: note = Tnp_P2
  SITE 242: note = Tnp_P3
  SITE 243: note = Tnp_P4
  SITE 255: note = Tnp_P5
MLYVGIDVAKNKHDVTALNVPGKTVLKPLTFSNNKAGFELLDLSFRQLNQDCLIALKLLSDPNREQFQHDNRQVELKILARHIHRLKKKQSDWKVQYTRCLDIIFPELDKIVGKHSEYTYQLLTRYPNPQKRLEAGFDKLIEIKRLTASKIQDILSVAPRSIGTTSPAREFEIIEHYKRLIDKAETCVNDLMAEFNSVITTVTGIGGRLGAVILAEIRNIHAFDNPAQLQAFAGLDSSIYQSGQIDLAGRMIKRGSPHLRWALIQAAKACPRFSPAFKAYLKTKLEQGKHYNVAIIHLAKKLIRTLFYILKKSCHLTNKK

SEQ ID NO: 14339 - protein, 286 aa, unidentified
  source 1..286: note = protein_19ecd44
  REGION 4..63: note = RuvC_domain
  SITE 7: note = RuvC_P1
  SITE 57: note = RuvC_P2
  REGION 196..282: note = Tnp_domain
  SITE 204: note = Tnp_P1
  SITE 234: note = Tnp_P2
  SITE 242: note = Tnp_P3
  SITE 243: note = Tnp_P4
  SITE 255: note = Tnp_P5
MLYVGIDVAKNKHDVTALNVPGKTVLKPLTFSNNKAGFELLDLSFRQLNQDCLIALKLLSDPNREQFQHDNRQVELKILARHIHRLKRKQSDWKVQYTRCLDIIFPELDKIVGKHSEYTYQLLTCYPNPQKRLEAGFDKLIEIKRLTASKIQDILSVAPHSIGTTSPAREFEIIKHYKRLIDKAETCVNDLMAEFNSIITTVTGIGNRLGAVILAEIRNIHAFDNLAQLQAFAGLDSSIYQSGQIDLAGRMIKRGSPHLRWALIQAAKACARFSPAFKAYLKTKLE

SEQ ID NO: 14340 - protein, 339 aa, unidentified
  source 1..339: note = protein_8f893db
  REGION 4..159: note = RuvC_domain
  SITE 7: note = RuvC_P1
  SITE 57: note = RuvC_P2
  SITE 98: note = RuvC_P3
  SITE 100: note = RuvC_P4
  SITE 103: note = RuvC_P5
  REGION 249..335: note = Tnp_domain
  SITE 257: note = Tnp_P1
  SITE 287: note = Tnp_P2
  SITE 295: note = Tnp_P3
  SITE 296: note = Tnp_P4
  SITE 308: note = Tnp_P5
MLYVGIDVAKNKHDVTALNVSGKTVLKPLTFSNNKAGFELLDLSFRQLNQDCLIALEDTGHYAFNLLNFLHEQGYKVYTYTPLLIKEFAKSLSLRKTKTDKKDAHGIALKLLSDPNREQFQHDNRQVELKILARHIHRLKKKQSDWKVQYTRCLDIIFPELDKIVGKHSEYTYQLLTRYPNPQKRLEAGFDKLIEIKRLTASKIQDILSVAPRSIGTTSPAREFEIIEHYKRLIDKAETCVNDLMAEFNSVITTVTGIGGRLGAVILAEIRNIHAFDNPAQLQAFAGLDSSIYQSGQIDLAGRMIKRGSPHLRWALIQAAKACARFSPAFKAYLKTKLE

SEQ ID NO: 14341 - protein, 339 aa, unidentified
  source 1..339: note = protein_d27eac3
  REGION 4..159: note = RuvC_domain
  SITE 7: note = RuvC_P1
  SITE 57: note = RuvC_P2
  SITE 98: note = RuvC_P3
  SITE 100: note = RuvC_P4
  SITE 103: note = RuvC_P5
  REGION 249..335: note = Tnp_domain
  SITE 257: note = Tnp_P1
  SITE 287: note = Tnp_P2
  SITE 295: note = Tnp_P3
  SITE 296: note = Tnp_P4
  SITE 308: note = Tnp_P5
MPYVGIDVAKNKHDVTALNVSGKTVLKPLTFSNNKAGFELLDLSLRQLNQDYLIALEDTGHYAFNLLNFLHEQGYKVYTYNSLLIKKFAKSLLLRKTKTDKKDAHGIALKLLSDPNREQFQHDNRQVELKILARHIHRLKKKQSDWKVQYTRCLDIIFPELDKIVGKHSEYTYQLLTCYPNPQKRIEAGFDKLIEIKRLTASKIQDILSVAPRSIGTTSPAREFEIIKHYKRLIDKAETCVNDLMAEFNSVITTVTGIGNRLGAVILAEIRNIHAFDNPAQLQAFAGLDSSIYQSGQIDLAGRMVKRGSPHLRWALIQAAKACPRFSPAFKAYLKTKLE

SEQ ID NO: 14342 - protein, 270 aa, unidentified
  source 1..270: note = protein_5ba3e2e
  REGION 4..62: note = RuvC_domain
  SITE 7: note = RuvC_P1
  SITE 57: note = RuvC_P2
  REGION 199..266: note = Tnp_domain
  SITE 207: note = Tnp_P1
  SITE 237: note = Tnp_P2
MLYVGIDVAKNKHDVTALNVRGKTVLKPLTFSNNKAGFELLDLSLRQLNQDCLIALKLLSDPNREQFQHDNRQVDLKILARHIHRLKKKQSDWKVQYTRCLDIIFPELDKIVGKHSEYTYQLLTRYPNPQKRIEAGFDKLIEIKRLTASKIQDILSVAPRSIGTTSPAREFEIIEIIKHYKRLIDKAETCVNDLMAEFNSVITTVTGIGGRLGAVILAEIRNIHAFDNPAQLQAFAGLDSSWKNDQTGFPSSAVGTHTSCQSMRSLFTCF

SEQ ID NO: 14343 - protein, 288 aa, unidentified
  source 1..288: note = protein_1418c57
  REGION 5..151: note = RuvC_domain
  SITE 8: note = RuvC_P1
  SITE 52: note = RuvC_P2
  SITE 92: note = RuvC_P3
  SITE 94: note = RuvC_P4
  SITE 97: note = RuvC_P5
  REGION 184..269: note = Tnp_domain
  SITE 192: note = Tnp_P1
  SITE 221: note = Tnp_P2
  SITE 229: note = Tnp_P3
  SITE 230: note = Tnp_P4
  SITE 241: note = Tnp_P5
MNMYVGIDVGKAMLDVAWYPTKRHERFENNARGHKALLKALSRDAVEHIAIEATGGYERTILDALATAGYPVTRLASHRSRAYAMGMGKIAKNDRLDAHVLARMAATITPQPYVPASRERVDLADLVRCRQQLVSQRDDNRRRLAQATLPAARRALQAMIDAADKQIAAIGAPLDAAVRAVDPNSRLHGVPGIGPVTAATLIAYLPELGQLDRKKIAALVGVAPYVDQSGRRDGPRRVRGGRWIVRRTLYMATWAAIRTKGSALRARYQALRAAANWRKWPWLPACAA

SEQ ID NO: 14344 - protein, 340 aa, unidentified
  source 1..340: note = protein_539f980
  REGION 7..149: note = RuvC_domain
  SITE 10: note = RuvC_P1
  SITE 53: note = RuvC_P2
  SITE 88: note = RuvC_P3
  SITE 90: note = RuvC_P4
  SITE 93: note = RuvC_P5
  REGION 211..300: note = Tnp_domain
  SITE 219: note = Tnp_P1
  SITE 249: note = Tnp_P2
  SITE 257: note = Tnp_P3
  SITE 258: note = Tnp_P4
  SITE 270: note = Tnp_P5
MEQVYMIGIDLAKNSFQLHGARADGSVAFRKKLSRAKLLDFVAAQPRCTVAMEACGGTHHWGREIGSLGHAVRLVPPIYVKAYVKRQKNDASDAEAICEASSRPTMRFVAVKTEEQQARGMLFRTRDLLVRQRTQTINALRGHLAEFGVIAPQGPVHVGRLASALEGQASGLPEGVRELGGLLLEQIAGLDAKIAGLEREVHVRARQDEETRRLMSVPGIGPISAMAIQAFAPPMESFRRGRDFSAWFGLVPRQHTTGGKPKLGKISKMGQRDLRRLLITGAMTVVRWAVRRGVTTDPWLAGMLARKPRMLVAVALANRMARIVWALLTKKESYRAPATA

SEQ ID NO: 14345 - protein, 411 aa, unidentified
  source 1..411: note = protein_4b8f726
  REGION 5..163: note = RuvC_domain
  SITE 8: note = RuvC_P1
  SITE 62: note = RuvC_P2
  SITE 102: note = RuvC_P3
  SITE 104: note = RuvC_P4
  SITE 107: note = RuvC_P5
  REGION 273..373: note = Tnp_domain
  SITE 281: note = Tnp_P1
  SITE 311: note = Tnp_P2
  SITE 319: note = Tnp_P3
  SITE 320: note = Tnp_P4
  SITE 333: note = Tnp_P5
MNPVVGLDVAKGESQVQAFLDKKQPYKKGFKVAHTLEGLASLLDFIREVENVSGGRPPIVLESTGHYHTPVVQYFEDRGYLLIIVNPLISYRAKSSSLRKVKTDVIDARHLCELYYKEDLEPYKQRGIQLLNLRNLTRQHENITGLFVQTKLQFQAILDQVFPEYRGVFGDLHSYVSLLTLQAFPTSEEILGTGEETVAKKIKELCKSRSQKWADSQAEKLMAAAVQNPFQKNLYHSLTLSLDMYINMLLEYKKHLSKLEDEIDALAKGIEECKIIQSIPGIGEKIAATIISEIGEIDRFNHPKKLVAFAGIDPSVFESGTFKGTLNRITKRGSSRLRHALYMAVKCAIRDCRKKKTTDEIIPRNKRLREFYDKKREEGKPFKVAVIACANKFLHWIYALLKSKSTFQDLA

SEQ ID NO: 14346 - protein, 308 aa, unidentified
  source 1..308: note = protein_36f2fa0
  REGION 6..146: note = RuvC_domain
  SITE 51: note = RuvC_P2
  SITE 91: note = RuvC_P3
  SITE 93: note = RuvC_P4
  SITE 96: note = RuvC_P5
  REGION 187..275: note = Tnp_domain
  SITE 195: note = Tnp_P1
  SITE 224: note = Tnp_P2
  SITE 232: note = Tnp_P3
  SITE 233: note = Tnp_P4
  SITE 244: note = Tnp_P5
MPQAVIGCDLSRAVIDICELPSGRIGQIANTPEAIAVWLDTLDRDIRLVFEATSGCDGDLIAALATRGHPFSRVNPRQAREFARATGTLAKTDRVDARVLAQMGAALDLPATIPLSPARSRLADFLRRRRQLVDMRKAEKLHRHSAGQPEIVQAIEAMIDLLSQQIAQLDHQIAGFIAQDQALSEQARLLTAVPGIGPTVLATLLGELPELSTLCRRKIASLAGLAPHARESGTWRGARRIWGGRRKVREALYIAALNASRRIPVLTAMRDRMRAKAKAPKTILIAVARQLLVILNAMIRKRQPIALG

SEQ ID NO: 14347 - protein, 356 aa, unidentified
  source 1..356: note = protein_c3d4bee
  REGION 12..152: note = RuvC_domain
  SITE 15: note = RuvC_P1
  SITE 58: note = RuvC_P2
  SITE 93: note = RuvC_P3
  SITE 95: note = RuvC_P4
  SITE 98: note = RuvC_P5
  REGION 217..304: note = Tnp_domain
  SITE 225: note = Tnp_P1
  SITE 255: note = Tnp_P2
  SITE 263: note = Tnp_P3
  SITE 264: note = Tnp_P4
  SITE 276: note = Tnp_P5
MPHKLNSGIAVIGIDIGKNSFHVVGHDKRGAIVLRQKWSRGQVGARLANLPSCLIGMEACVGAHHLSRKLQMLGHDARLMPAKYVRPYSKGQKNDFRDAEAIAEAVQRPTMKFVATKTAEQLDLQALHRVRERLVSQLTGIINQIRAFLLERGVAVRQGLRFLRAELPGILATRSDMLSPRMLRVIENLTEDWRRLDERIEDLSSEIETLARQDQGCARLMSVPGIGPIIASAMVAAIGTGDAFSKGRDFGAWLGLVPKQISTGDRTILGGISRRGNRYLRTLFVQAAWVVLVRVGPKHWERYGLKSWIEAAKKRLHHNVLAIALANKLARIAWAVLHKGRAFECVKSDAMASRPA

SEQ ID NO: 14348 - protein, 356 aa, unidentified
  source 1..356: note = protein_d7ebbbe
  REGION 19..159: note = RuvC_domain
  SITE 22: note = RuvC_P1
  SITE 65: note = RuvC_P2
  SITE 100: note = RuvC_P3
  SITE 102: note = RuvC_P4
  SITE 105: note = RuvC_P5
  REGION 224..311: note = Tnp_domain
  SITE 232: note = Tnp_P1
  SITE 262: note = Tnp_P2
  SITE 270: note = Tnp_P3
  SITE 271: note = Tnp_P4
  SITE 283: note = Tnp_P5
MIWGHTEDHRMDATTIASIGIDLGKTTFHLVALDCHAKVIIRKKFSRTQLLAYTANLPWSLIGMEACSGSHFLAAKLRAQGHEVKLIPAQFVKPYRKSNKNDFIDAEAIAEAVTRHNMRFVPIKTDDQLDLQALHRVRERLVRRRTALINQIRGFLLERGLVFAQRPANLRRRLPFVLEDAEAHLTPLFRRLLADLWQEWQHVQADIAVLDEAMEQICSSDENCRRLREIPGVGPLVATAIVAAIGNGAAFGNGREFAAWLGLVPRQYSTGGRTQLFSISKRGNSYLRRMFIHGARAVLWRVKYDIGVLREWTTQLQSRAAKNVVAVALANKLARIAWAVLSSGEHYRLKPAVTAA

SEQ ID NO: 14349 - protein, 294 aa, unidentified
  source 1..294: note = protein_7ac6748
  REGION 1..77: note = RuvC_domain
  SITE 16: note = RuvC_P3
  SITE 18: note = RuvC_P4
  SITE 21: note = RuvC_P5
  REGION 170..256: note = Tnp_domain
  SITE 178: note = Tnp_P1
  SITE 208: note = Tnp_P2
  SITE 216: note = Tnp_P3
  SITE 217: note = Tnp_P4
  SITE 229: note = Tnp_P5
MLIKKFAKSLSLRKTKADKKDAHGIALKLLSDPNREQFQHDNRQVDLKILARHIHRLKKKQSDWKVQYTRCLDIIFPELDKIVGKHSEYTYQLLTRYPNPQKRIEAGFDKLIEIKRLTASKIQDILSVAPRSIGTTSPAREFEIIEIIKHYKRLIDKAETCVNDLMAEFNSVITTVTGIGNRLGAVMLAEIRNIHAFDNPAQLQAFAGLDSSIYQSGQIDLAGRMIKRGSPHLRWALIQAAKACARFSPAFKAYLKTKLEQGKHYNVAIIHLAKKLIRTLFYILKKICHLTNKK

SEQ ID NO: 14350 - protein, 346 aa, unidentified
  source 1..346: note = protein_16a778d
  REGION 5..152: note = RuvC_domain
  SITE 8: note = RuvC_P1
  SITE 55: note = RuvC_P2
  SITE 92: note = RuvC_P3
  SITE 94: note = RuvC_P4
  SITE 97: note = RuvC_P5
  REGION 212..300: note = Tnp_domain
  SITE 220: note = Tnp_P1
  SITE 250: note = Tnp_P2
  SITE 258: note = Tnp_P3
  SITE 259: note = Tnp_P4
  SITE 271: note = Tnp_P5
MKHYAGLDVSLKETSICIVNEAGSICREMKVPSHPEDLVRALQDPAWRLVRIGLEAGPLSQWLFSGLAPAGLPVVCIETRHTKAFLKAQVNKTDRNDARGIAQMMRVNLFRPVHIKTLTSQHRRALLMARKLLQEKAVAIENDIRGLLRNFGLKVGMTGAVGFDVRIRELVDGRPELADITASLLAARQMLREELSRLHRKVLEITREDGVCRRLMTIPGVGPVVALAFTSTIDVPARFRKSKAVGPVLGLTPVLKESGESKRVGQVSLCGDGMMRGLLYEAAQVLLTRVKKWSWLKAWAMNVAKRRGIRKAIVALARRLAVLMHRIWSDGTEFRWTKDPRVQPSL

SEQ ID NO: 14351 - protein, 354 aa, unidentified
  source 1..354: note = protein_6b86663
  REGION 12..152: note = RuvC_domain
  SITE 15: note = RuvC_P1
  SITE 58: note = RuvC_P2
  SITE 93: note = RuvC_P3
  SITE 95: note = RuvC_P4
  SITE 98: note = RuvC_P5
  REGION 217..302: note = Tnp_domain
  SITE 225: note = Tnp_P1
  SITE 255: note = Tnp_P2
  SITE 263: note = Tnp_P3
  SITE 264: note = Tnp_P4
  SITE 276: note = Tnp_P5
MSHTRNAAIAVVGIDIGKNSFHVVGLDQRGAIVLRQKWSRSQVEARFANMPPCLIGMEACVGAHHLSRKLKALGHDARLMPAKYVRPYLKGQKNDFRDAEAIAEAVQRPTMKFVATKTADQLDLQALHRVRERLVSQRTGIINQIRAFLLERGVAVRQGLRFLRAGLAQILATRTDVVSPRMVHVIEDLAGDWRRLDERIEGLSADIETLVQHDPACQRLMTVPGVGPIISSAVVAAIGRGEVFSKGRDFGAWLGLVPKQTSTGDRTILGKISRRGNRYLRVLFVQAAWVVLIRPKSWDRYGLKPWLEAAKKRLHRNVLAIALANKLARIAWSVLVHGRNFEARKIDEAAAQSV

SEQ ID NO: 14352 - protein, 413 aa, unidentified
  source 1..413: note = protein_ce5477e
  REGION 9..173: note = RuvC_domain
  SITE 12: note = RuvC_P1
  SITE 66: note = RuvC_P2
  SITE 112: note = RuvC_P3
  SITE 114: note = RuvC_P4
  SITE 117: note = RuvC_P5
  REGION 284..371: note = Tnp_domain
  SITE 292: note = Tnp_P1
  SITE 322: note = Tnp_P2
  SITE 330: note = Tnp_P3
  SITE 331: note = Tnp_P4
  SITE 344: note = Tnp_P5
MTQLNPLYVGIDVASHSNVAYLMKPDGSKHSVFPITNSKAGCQQLVKRIVSAMTGNGLSEMKIGMEATSIYGSHLVYTLKEDFSLSAYTKEIHVLNPKQVAKFKESYDDLPKNDYVDAYVIADCLRFGRINNEVYLGDYRYEALKKLTRARYTAVVNLSREKQRFLNTLFLKYSTFAQEKVFSDTFSTTALAVYEEFESADQLALMDLHELTEFIKEKGKNRFPDPDAVAKAIQKAARSSYRLPKTVNDSVNQVLSISISSMRALEASIKQYDKAIAEQMNAISNPLISVKGIGSVYSAGIIAEIGDIHRFKNQASLAKYAGLAWKQHQSGGFEAENTPLIHTGNRYLKYYLCEAVMSLVRCDTEYNSYYHLKYKEVNRAQHKRALVLTARKFVRLVYCLLSENRMYIAPEER

SEQ ID NO: 14353 - protein, 295 aa, unidentified
  source 1..295: note = protein_18f6aa1
  REGION 62..136: note = RuvC_domain
  SITE 76: note = RuvC_P3
  SITE 78: note = RuvC_P4
  SITE 81: note = RuvC_P5
  REGION 172..256: note = Tnp_domain
  SITE 180: note = Tnp_P1
  SITE 209: note = Tnp_P2
  SITE 217: note = Tnp_P3
  SITE 218: note = Tnp_P4
  SITE 229: note = Tnp_P5
MTKLALRHSHFGREKQKFPASFLKQQAFITGASKRAWLNTGSALHGSIRVRPAGSAKVSDLVAIGSRLIANGRLAKTDRVDAALLAKMGALLELRADQPKSETLHDLKQLATARLALIKDRTAAKARLAATTHVLPSKQIKRRLKQIERDLSQVTEAIDAIVAADKDLAARAEILTSIPGIAKVTACAILTEMPELGHLSGKKAAALAGLAPISRQSGKWQGKERIQGGRASVRRAVYLPAVVATRFNPDMKAKYEHLISTGKCKKLAITAVMRKLIVTANALLRDQRKWGEYPA

SEQ ID NO: 14354 - protein, 390 aa, unidentified
  source 1..390: note = protein_9733fe0
  REGION 4..161: note = RuvC_domain
  SITE 7: note = RuvC_P1
  SITE 60: note = RuvC_P2
  SITE 100: note = RuvC_P3
  SITE 102: note = RuvC_P4
  SITE 105: note = RuvC_P5
  REGION 266..353: note = Tnp_domain
  SITE 274: note = Tnp_P1
  SITE 304: note = Tnp_P2
  SITE 312: note = Tnp_P3
  SITE 313: note = Tnp_P4
  SITE 326: note = Tnp_P5
MFYIGIDISKNSHEISILDASHGIVEPSKKVANTAAGTAKLLTLFEKHQVLPDNCLIGMESTGHYWLVFYSFLVGLGFSVKVINPIVTDAYRNMLIRKVKNDSVDALVIAKVLMLGEYQESSVANEETLALRQLCRFRAYEVDTCSDLKRKAIALLDQVFPEYESLFSDTFGISSREVLSNFTTPEELSRINTRKLSNLLAKSSKGRFGVEKALELKAVASKSLGIKIATDAFAFQLRQLIDQLEFIEEQVEMLDAQIAEYMERTNSFITTIPGIGPVIGAVIVSEIGDISRFSDGKKLVAYAGLDACVSQSGNFEGSQMHMSKRGSPYLRRAIYTAANVASWSDPNLSEYYKRLKTRGKHHNVAVGAIARKLCYIIFAVLSENRAFESR

SEQ ID NO: 14355 - protein, 339 aa, unidentified
  source 1..339: note = protein_b6a621b
  REGION 6..148: note = RuvC_domain
  SITE 9: note = RuvC_P1
  SITE 52: note = RuvC_P2
  SITE 87: note = RuvC_P3
  SITE 89: note = RuvC_P4
  SITE 92: note = RuvC_P5
  REGION 211..296: note = Tnp_domain
  SITE 219: note = Tnp_P1
  SITE 249: note = Tnp_P2
  SITE 257: note = Tnp_P3
  SITE 258: note = Tnp_P4
  SITE 270: note = Tnp_P5
MNITTIGIDLAKTSFSLVGANKYGKVVLRKTVSRGKLPSVIAQCPPCLIGLEACSGAHYWAREFEKLGHEVKIIAAKFIEPYRKGGKNDNNDAEAICEAVRRPNIWFVPIKSADQQAALCVHRVRQGVVRDRTAWVNRLRGLLSEFGIVMPKGRYAAQSAVPTILADPDNGLPGLARQMIHDLWLSIQQANEQVLSYDRALSQLAKEDEVAKRLLTIPGVGEQTATGVVASVPDPRLFKNSRQFSAWLGLVPRQYTTGGKIRLGRITKRGDKYLRMCLVHGARAVIAKLGDKQDHVSCWIRGVIERRGYLRAVVALAARNARLIWTLMMKREDYRAIDA

SEQ ID NO: 14356 - protein, 366 aa, unidentified
  source 1..366: note = protein_3193f1d
  REGION 10..164: note = RuvC_domain
  SITE 13: note = RuvC_P1
  SITE 61: note = RuvC_P2
  SITE 101: note = RuvC_P3
  SITE 103: note = RuvC_P4
  SITE 106: note = RuvC_P5
  REGION 271..356: note = Tnp_domain
  SITE 279: note = Tnp_P1
  SITE 308: note = Tnp_P2
  SITE 316: note = Tnp_P3
  SITE 317: note = Tnp_P4
  SITE 329: note = Tnp_P5
MKTEDIQIFLGLDVGKTDHWACAVIQDGTRIWNKTLPNDEAKLTAAYQKLLAQGQVLVVVDQPATIGALAVVVAQNLDIPVAYLPGLSMRRIADMYPGSAKTDEKDAFIIADAARTMPHTLRSIRVSDEDEATLGMLTGFDLDLARQITQTSNRIRGLFTQIHPPLERILGPWLEHDAVLEILAIWPTPAQLKHAGKARIDAKLKKYGARRHTAWAVAIMDALDEQTVVVVGTDAAGLVIPHLARQLISLHAPRVDVATHLETLVEAHPLYSVLTSMPGVAVRTPAIIIAETSGKTFTSAAALSSYAGLAPTTRQSGTSIKSERVSHSGNKRLKRALFLSAFASIRFDPTSRDYYDRKRAQGKRHI

SEQ ID NO: 14357 - protein, 338 aa, unidentified
  source 1..338: note = protein_ec1d47b
  REGION 6..147: note = RuvC_domain
  SITE 9: note = RuvC_P1
  SITE 52: note = RuvC_P2
  SITE 87: note = RuvC_P3
  SITE 89: note = RuvC_P4
  SITE 92: note = RuvC_P5
  REGION 210..304: note = Tnp_domain
  SITE 218: note = Tnp_P1
  SITE 248: note = Tnp_P2
  SITE 256: note = Tnp_P3
  SITE 257: note = Tnp_P4
  SITE 269: note = Tnp_P5
MNYTTVGADIAKNVMQLYWVDPNTGEIMNKAIKRSAFLEHFANRAPCLVGMEACGGAQHWARRLLEMGHQVKLIPAKFAKAFNIRNKNDAADARAIWMATQMPGKSVAVKTEAQQAILALHRIRQQKIKFRTMQMNCLRGLLTEYGEVMGKSRAALDKAIPGVLERLTDRLPAMLIESLREQWNDLQNLDRQIAEIERRLRGWLKDDEASRKIAAIPGVGLLTSTAAVATMGDPKAFRSGREFAAWLGLVPKQVGTGGKTVLLGISKRGDTYLRTLLIHGARSVLSHSREPGAWIDQLTRRRHRNVVIVAIANKMARTIWAILAHGKPYEKDHVSMAA

SEQ ID NO: 14358 - protein, 347 aa, unidentified
  source 1..347: note = protein_b202428
  REGION 6..148: note = RuvC_domain
  SITE 9: note = RuvC_P1
  SITE 52: note = RuvC_P2
  SITE 87: note = RuvC_P3
  SITE 89: note = RuvC_P4
  SITE 92: note = RuvC_P5
  REGION 211..300: note = Tnp_domain
  SITE 219: note = Tnp_P1
  SITE 249: note = Tnp_P2
  SITE 257: note = Tnp_P3
  SITE 258: note = Tnp_P4
  SITE 270: note = Tnp_P5
MKITTIGIDLAKEVFQIHGVDDHGKIVLRKQLRRNGMAKFFANLESCLIGMEACGSAHHWARKLGEFGHTVKLMPPQFVKPYVKTNKHDMADAEAICEAVSRPNMRFVPIKHVEQQAILAVHRARQGLVKARTAQANQIRGLLSEFGIVIPQGIHSIAKRVPDILEDAENGLPGTMRHLLRRLNDHLKELGRQAEELELQIKLWHKENEASQRLEAIPGIGPITASAIVATVGEAKEFKNGRQLSAWLGLVPKQCSSGGKQLLLGISKRGDTYLRTLLIHGARAVIRFAENKAEPESWLRKLIMRRNKNIAAVALANKNVRIIWALLAKGTTLFHPDHASAANAAAT

SEQ ID NO: 14359 - protein, 369 aa, unidentified
  source 1..369: note = protein_374a0ab
  REGION 19..181: note = RuvC_domain
  SITE 22: note = RuvC_P1
  SITE 71: note = RuvC_P2
  SITE 107: note = RuvC_P3
  SITE 109: note = RuvC_P4
  SITE 112: note = RuvC_P5
  REGION 237..323: note = Tnp_domain
  SITE 245: note = Tnp_P1
  SITE 276: note = Tnp_P2
  SITE 284: note = Tnp_P3
  SITE 285: note = Tnp_P4
  SITE 296: note = Tnp_P5
MTIIPDAGKQPQSRTLVFAGVDTHKEIHVAAVVDETGTVLGTHSFSTTRAGYRALLAWVRSHGVLVRIGIEGTGSYGAGLTRYLAKNDVTVLEVDRPDRSDRRRKGKDDDLDAINAARAALHERRTTIPKSQDGAVEALRILRVARAQAVRERRNTLQLLRMSIVAAPDEVRDQIRNLTRMQLIRHLAAWRPDVSNATDPVVAYRVALKSFGRRYLELTDEIVDLDDLITPIVQALAPQLLERVGIGIEVAGQLLVTAGDNPERMKSEAAFAMLCGVSPLPASSGMTQRHRLNRGGDRQANRALHLAVISRLRLDPRTKAYATKKTAEGHSKMEIIRCLKRYLAREAYFLLNPGIEHITPNTKPRKIAA

SEQ ID NO: 14360 - protein, 405 aa, unidentified
  source 1..405: note = protein_6700045
  REGION 14..168: note = RuvC_domain
  SITE 17: note = RuvC_P1
  SITE 65: note = RuvC_P2
  SITE 105: note = RuvC_P3
  SITE 107: note = RuvC_P4
  SITE 110: note = RuvC_P5
  REGION 275..359: note = Tnp_domain
  SITE 283: note = Tnp_P1
  SITE 312: note = Tnp_P2
  SITE 320: note = Tnp_P3
  SITE 321: note = Tnp_P4
  SITE 333: note = Tnp_P5
MTDIEQHDSVEVFVGVDVGKGTHHAVALDRKGKRLLDSALPNDETKLRALIGKLKEYGKILLVVDQPATVGALPVAVAGAEGVLVAYLPGLAMRRIADLHAGEAKTDARDAYIIAEAARSMPHTLRSLKIADSQVAELTMLCGFDEDLAGQITATSNRIRGLLTQIHPALERAVGPHLDHPAMLDLLERYPSPAQLSSFSQKQLATRLLKLAPRMGKTWATEIVQALAEQTVVVAGTQAASIVLPRLALQLAALRKQREEVAKEVERLVLAHPLHPVLTSMPGVRVRTAARLLVDVATRAFASAAHLAAYAGLAPVTRRSGSSIRGELPSRRGNKQLRRAMFLSAFVALRDPISRAYYTRKITQGKRHNQALIALARRRCDVLFAMLRDGTLYSPPRPENLLTTT

SEQ ID NO: 14361 - protein, 344 aa, unidentified
  source 1..344: note = protein_c93064d
  REGION 13..155: note = RuvC_domain
  SITE 16: note = RuvC_P1
  SITE 59: note = RuvC_P2
  SITE 94: note = RuvC_P3
  SITE 96: note = RuvC_P4
  SITE 99: note = RuvC_P5
  REGION 218..304: note = Tnp_domain
  SITE 226: note = Tnp_P1
  SITE 256: note = Tnp_P2
  SITE 264: note = Tnp_P3
  SITE 265: note = Tnp_P4
  SITE 277: note = Tnp_P5
MNNYNVNSIVTVLGIDIAKQSFQLHGTDKHSKAVLKKRLTRNKLSAFIANSPPCLIGLEACGGAHYWVRTFKAQGHKVRMIAPQFVKPYVKSNKNDAVDAEAICEAVQRPSMRFVPDKSIAQQDIQSLHRVRSQLVARRTAQANQIRGLLQEYGLIIPKGISHVRKAIPLILEDANNTLTCLFRELLNELYDELVHLDDRVNTLEKKLEIISRESDDCQRLLTIPGIGLLTATALIAAIGNISAFNSGRELAAWLGLVPKQHSTGGIPTLLGISKRGNSYLRSLLIHGGRAVVRVAPLYSDKRNTWVNTLNERRGKNISAVAVANKNARIVWALLSNKENYKAA

SEQ ID NO: 14362 - protein, 340 aa, unidentified
  source 1..340: note = protein_7562e6a
  REGION 5..145: note = RuvC_domain
  SITE 8: note = RuvC_P1
  SITE 51: note = RuvC_P2
  SITE 86: note = RuvC_P3
  SITE 88: note = RuvC_P4
  SITE 91: note = RuvC_P5
  REGION 210..298: note = Tnp_domain
  SITE 218: note = Tnp_P1
  SITE 248: note = Tnp_P2
  SITE 256: note = Tnp_P3
  SITE 257: note = Tnp_P4
  SITE 269: note = Tnp_P5
MEQIIGIDLAKRVFQVHVVSAQGEKKANKMITREKLMAFIAQQPLSRIVMEACGSANYWSRQFKTFGHDVRQISPQYVSPFRMGNKNDKNDATAIVEADSRPGMRYVPEKSLEQQDIQCIHRVRQRLMKNRTALINQIRGLGLEYGIAIPEGAYKIMTCLPEYLEDAENELTALSRQLFHEIWLELQDCQQRIKTLDVRLEQISTQNEDTARLVNIPGIGPLGASALAIALGDSRSFNNGRHFASYLGLVPFVPSSGGKPRLLGITKRGDGYLRGLLIHGARSVVYRTVNLPDERCSALQRWLKGIIVRGGVNKAVVALANKNARVAWALVNQRTEYRNQ

SEQ ID NO: 14363 - protein, 352 aa, unidentified
  source 1..352: note = protein_153cff7
  REGION 5..164: note = RuvC_domain
  SITE 8: note = RuvC_P1
  SITE 59: note = RuvC_P2
  SITE 100: note = RuvC_P3
  SITE 102: note = RuvC_P4
  SITE 105: note = RuvC_P5
  REGION 226..311: note = Tnp_domain
  SITE 234: note = Tnp_P1
  SITE 264: note = Tnp_P2
  SITE 272: note = Tnp_P3
  SITE 273: note = Tnp_P4
  SITE 284: note = Tnp_P5
MGVIIGMDPHKRSATIEVIDQTGRVLEVGRFDTNEAGYAAMLAAGRAYGSSGERVWAVEGCNGIGRHIAHRLVHDGERVVDVPTKLSAQVRVFATGNARKTDPVDAHSVALAALYAPAEPGLRPVLVEDDLVVMGMMVDRRDELGRARTQTVNRLHRLLLELIPGGAKTFLSAPQARALVAKVKPRDLVGKTRRRLVVELIGELEVIDRKIKTAEKELTALVQERGSTLLELTGIGPTGAARLLAGVGDIHRFRDKDRFASWNGTAPLDASSGAQQRHRLSRAGNRRINRTLHIMAVVQLRNPSPGREFYDARKAGGTPSLMAMRSLKRRLPNVVYADGRRPDPPRPCPPRA

SEQ ID NO: 14364 - protein, 393 aa, unidentified
  source 1..393: note = protein_7d69558
  REGION 4..163: note = RuvC_domain
  SITE 7: note = RuvC_P1
  SITE 60: note = RuvC_P2
  SITE 101: note = RuvC_P3
  SITE 103: note = RuvC_P4
  SITE 106: note = RuvC_P5
  REGION 266..355: note = Tnp_domain
  SITE 274: note = Tnp_P1
  SITE 304: note = Tnp_P2
  SITE 312: note = Tnp_P3
  SITE 313: note = Tnp_P4
  SITE 328: note = Tnp_P5
MICVGIDVAKDKYDCFILSSEGEVLADVFTIPNNAEGFDTLLQTIRRCARPEDKIKVGLEATGHYSYNILGFLLNEGLDTYVINPLHTNLYRKSLSLRKTKTDRVDARTIAAMLMSDVDLKSYTDTAYHNEELKSLTRYRFDKVRERAKLKQSVSRLVTILFPELEKLVPSLHLASVYALLIEFPGAKQVAGAHLTHLKAILSDASKGRYGRDMAVTLRDAARCSVGSVMPAKSLELQHTIRLIRKLDAEIEDIETAIQSMMDEMQSPITTIPGIGVRMGAMILAEIGDFSRFNSPDKILAYAGMSPSTYQSGQLSLSGPYSHMEKRGSRYLRYALYNATKYVCLWDPAFAAYLAKKRGEGKHYNVALSHAAKKLVRLICALEKSQQSYRNAA

SEQ ID NO: 14365 - protein, 338 aa, unidentified
  source 1..338: note = protein_d0da593
  REGION 6..152: note = RuvC_domain
  SITE 9: note = RuvC_P1
  SITE 53: note = RuvC_P2
  SITE 91: note = RuvC_P3
  SITE 93: note = RuvC_P4
  SITE 96: note = RuvC_P5
  REGION 211..298: note = Tnp_domain
  SITE 219: note = Tnp_P1
  SITE 249: note = Tnp_P2
  SITE 257: note = Tnp_P3
  SITE 258: note = Tnp_P4
  SITE 270: note = Tnp_P5
MVILSVGIDLAKSVFAVHGVNEAGKAELLRPAVPRDKLHELIAALPPCVIGMEACSGAHHWARLFQASGHTVRLIAPKFVTPYRMSGKRGKNDAADAAAICEAVRRPHMRFVPIKTLEQQSLLMVHRARQGFVEQRTATLNRIRGCLSEFGIVLPLKAATVRRRACDCLEDLPGYANIVIGDLLSEVTRLDERITQYDQHIKAMAKEDVRAKRLMQLSGVGETTATCMLAMIGNGHDFDCGRQFAAWLGLAPGQYSSGGKTRLGRITKAADSDLRMLLILGARAMLAAAKNKTDATSRWAVALEARRGYWKAVVAIAAKNARMAWAVLRQGEGFALPS

SEQ ID NO: 14366 - protein, 405 aa, unidentified
  source 1..405: note = protein_90e329f
  REGION 15..169: note = RuvC_domain
  SITE 18: note = RuvC_P1
  SITE 67: note = RuvC_P2
  SITE 107: note = RuvC_P3
  SITE 109: note = RuvC_P4
  SITE 112: note = RuvC_P5
  REGION 274..361: note = Tnp_domain
  SITE 282: note = Tnp_P1
  SITE 313: note = Tnp_P2
  SITE 321: note = Tnp_P3
  SITE 322: note = Tnp_P4
  SITE 334: note = Tnp_P5
MCDELAEGNVPDIWAGVDIGKTHHHAVVINAEGKRLLSRRIRNDETELLTLIGDVLAISDDVLWAVDLNHGGAALLIGLLTAHGQSVAYLTGLAVHRASATYRGEGKTDAKDAFVIADQARIRRDLGLLRPGDEIAIDLRTLTTRRLDLVFDRTRQINRLRAQLLEIFPGLERALDLTNKGPVMLLTGYQTPAAIRRAGTKRIETWLKNRKVKGAASLAHAVMEAAQAQHAALPGETVAAAMVVRLARGVMALEEEVAELDALIEARFHEHPLADVIRSLPGMGTRLGAEFIAATGGDMDAFGSADRLAGFAGLAPQPRDSGRVSGNLRRPRRYHRGLLRTMYLSAMASLKSCPDSKVYYQRKRREGKGHKQALLALARRRVNVLWAMIRDGSCYQQSLPVAAAG

SEQ ID NO: 14367 - protein, 308 aa, unidentified
  source 1..308: note = protein_1a8ff85
  REGION 8..147: note = RuvC_domain
  SITE 11: note = RuvC_P1
  SITE 52: note = RuvC_P2
  SITE 92: note = RuvC_P3
  SITE 94: note = RuvC_P4
  SITE 97: note = RuvC_P5
  REGION 188..272: note = Tnp_domain
  SITE 196: note = Tnp_P1
  SITE 225: note = Tnp_P2
  SITE 233: note = Tnp_P3
  SITE 234: note = Tnp_P4
  SITE 245: note = Tnp_P5
MMISPDVVGIDVSKHHLDIFDGLTGKFERLPNTVDDVGKLAMRLCDRFVVFEATGAYDETLRRALAAAGVAFARVNPTQARSFAKAAGFLAKTDRVDARMLTALGSALRPKPAEATDEARERLGRLHKRRDQLVASRKQERTRRCETRDLDLAADIDRHLVFLDQEIATLEAKIADLIAAEPSLKRTFQLLVSIPGVGPLTGACLLAQMPELGQRNPKAIAALAGLAPINQDSGLRRGQRSIRGGRKRVRDALYMAAVAAARSKSRFKTSYQTMRASGKPAKLAFIALARKLLTVANAIVRDQQPFAA

SEQ ID NO: 14368 - protein, 311 aa, unidentified
  source 1..311: note = protein_83c1840
  REGION 6..154: note = RuvC_domain
  SITE 9: note = RuvC_P1
  SITE 52: note = RuvC_P2
  SITE 92: note = RuvC_P3
  SITE 94: note = RuvC_P4
  SITE 97: note = RuvC_P5
  REGION 188..272: note = Tnp_domain
  SITE 196: note = Tnp_P1
  SITE 225: note = Tnp_P2
  SITE 233: note = Tnp_P3
  SITE 234: note = Tnp_P4
  SITE 245: note = Tnp_P5
MTSDTIGVDISKDHLDAHRLSDGTNRRFTNDKTGHRAFLNWAGQPGSRIVYEPTGPYHRSFERKLAQAAHALVKVNPRQARRFAEATGKHAKTDPLDAALLARMGALLELEARPPRSHLLNDLKDLHMAREALVKNRTAARNRAKNLTLPILKRQNAEQLKQIERQVSAIEKEIMTLIKADPDLARRYDIIVSIPGLATITAFAMIIDMPELGTLENGQAASLAGLAPATRQSGTWTGRAFIRGGRASLRQALYMPALVAIRFNPQLKAKYDHFIAAGKPAKKAITAIMRKLIILANALIRDDRKWAPALP

SEQ ID NO: 14369 - protein, 411 aa, unidentified
  source 1..411: note = protein_056e2db
  REGION 5..164: note = RuvC_domain
  SITE 8: note = RuvC_P1
  SITE 61: note = RuvC_P2
  SITE 101: note = RuvC_P3
  SITE 103: note = RuvC_P4
  SITE 106: note = RuvC_P5
  REGION 272..358: note = Tnp_domain
  SITE 280: note = Tnp_P1
  SITE 311: note = Tnp_P2
  SITE 319: note = Tnp_P3
  SITE 320: note = Tnp_P4
MRLFAGDDWAEDHHDVELVDQAGKVLAKRRLPEGVAGMARLHELVGQQLGEDAEGAEVMIGIETDHGPWVAALVAAGYVVFGVNPLQASRYRERHGVSGAKSDSGDAHMLADMVRTDSHQLRAVAGDSAEAGGVRVLARTHKTLIWERTRQVQRLRHQLLEYFPATLEAFGDLDAADALELLGKAPDPARAARLTRAQVSAALKRARRRNITDKTTAILAALRGGHLGQPPAVTAAYAVTVRSLIAVITTLNEQVRILQGQVEEDFGRHPDAEIYRSQPGMGAVLGARVLGEFGDDPGRYADGKCRRNYAGTSPLTRASGKKKVVAARFIHNDRLVDALNARAFAALTASPGARTLYDELRARGIEHNDALRRLANRLVGVLHGCLKTRTLYDEATAWSHRQNLPQSSVAA

SEQ ID NO: 14370 - protein, 425 aa, unidentified
  source 1..425: note = protein_ace0e5e
  REGION 4..157: note = RuvC_domain
  SITE 7: note = RuvC_P1
  SITE 59: note = RuvC_P2
  SITE 94: note = RuvC_P3
  SITE 96: note = RuvC_P4
  SITE 99: note = RuvC_P5
  REGION 286..371: note = Tnp_domain
  SITE 292: note = Tnp_P1
  SITE 323: note = Tnp_P2
  SITE 331: note = Tnp_P3
  SITE 332: note = Tnp_P4
  SITE 344: note = Tnp_P5
MLGIGIDWSEEFHLVALGRPGEGVIEVTRVEHTPAAVDALVAEIAGLEPDPGEVRVVIETRHGLLVERLVDAGYVVVPVNPDLVARRRGPAKKKDDAEDARIACLIALDRHERLRPLIPHGEIAGELRAIARDDERAARDERRPGNRLRQDLISTFPAALRIGGQDLGAPTFLRLLERWPTANALEAATRVDLVAFARSCRHGWPERFADRVQASLGNEHFRPKDYLVRAKADTIRLAATQLLLIGRQRRSWERRMGELLLGAPRQGRDRKPKGDGLGKGFPGGGIYLSFPGLGDRLAARIAGEIGDHPEQFDTPNSLQCYAGKAPVTRRSGKSELVVACRLAHNRFLGAAVQQWAFCSLRRSGWAREFYDSQRARGKGHHAALRALGNRWLEILWYCVHNGVLYDEAIHVANRNRALGRATQAA

SEQ ID NO: 14371 - protein, 398 aa, unidentified
  source 1..398: note = protein_0761e79
  REGION 9..162: note = RuvC_domain
  SITE 12: note = RuvC_P1
  SITE 60: note = RuvC_P2
  SITE 101: note = RuvC_P3
  SITE 103: note = RuvC_P4
  SITE 106: note = RuvC_P5
  REGION 225..309: note = Tnp_domain
  SITE 232: note = Tnp_P1
  SITE 262: note = Tnp_P2
  SITE 270: note = Tnp_P3
  SITE 271: note = Tnp_P4
  SITE 282: note = Tnp_P5
MSKTQAVIIGVDPHKMSVTIEVVDTHEQLLGTGRFATDRAGHAALQRYVKQWPQRTWAVEGANGAGRPLAQRLVAAGERVVDVPAKLAARVRLFDTGHNRKTDALDAHSIAVVAVRTGGLRVLVEDGELEALRMLTDRRDELARQRVQTVNRLQRLLSELLPGQRKRDLSATQAKTMLATVRPRDIAGKTRRRMAAEEVADLVAGDAKLKKIKAELKATVLARGSGLMDIYGIGPAGAARTLADVGDVTRFVDRNRFASWTGTAPLDASSGEQTRHRLSRAGNRRMNHVLHVAAIVQIRHDTEGRAYYRRKLAAGKTPMEALRCLKRRLSDVVYRQLVADAQKHDGAGPGGHCGATLQSSAADSHPLIDTSDQPLPGPAQPTLRRPSPGRKTLTTSTP

SEQ ID NO: 14372 - protein, 340 aa, unidentified
  source 1..340: note = protein_58ef10b
  REGION 6..148: note = RuvC_domain
  SITE 9: note = RuvC_P1
  SITE 52: note = RuvC_P2
  SITE 87: note = RuvC_P3
  SITE 89: note = RuvC_P4
  SITE 92: note = RuvC_P5
  REGION 209..294: note = Tnp_domain
  SITE 216: note = Tnp_P1
  SITE 246: note = Tnp_P2
  SITE 254: note = Tnp_P3
  SITE 255: note = Tnp_P4
  SITE 267: note = Tnp_P5
MNITTIGLDIAKNVFQVRGVDGHGKGVLCKKLSRGKVLEFFVNLPPCLIGLEACPGAHYWARELIKLGHTVKLMPAQYVKAYLKGNKNDGNYAEAICEAVSRPGMRFVAINTEAQQDIQMLHRIRSRLVADRTALINQIRGLLGEYGIVFGQGPGQVRRGVAVLLKREDPRLSGMARELLEDLRAQLSELDQRSDVRVREACRVDGCSVKLAALPGIGPLTATALVAAVNDGKQFQNGRQMAANLGLTPREHSSGGKQRLMGISKRGNTYLRTLLIHGARTVLRHAAGKTDRLSCWAVTIQARRGANVAAVALANKLARIAWAVLARDRIYRADWVEQSV

SEQ ID NO: 14373 - protein, 400 aa, unidentified
  source 1..400: note = protein_1c18a13
  REGION 5..163: note = RuvC_domain
  SITE 8: note = RuvC_P1
  SITE 62: note = RuvC_P2
  SITE 102: note = RuvC_P3
  SITE 104: note = RuvC_P4
  SITE 107: note = RuvC_P5
  REGION 273..362: note = Tnp_domain
  SITE 281: note = Tnp_P1
  SITE 311: note = Tnp_P2
  SITE 319: note = Tnp_P3
  SITE 320: note = Tnp_P4
  SITE 333: note = Tnp_P5
MNPVVGLDVSKGESEVQAFLNKSIPYGKSFKIYHTSEGLTFFLQFLKDLENKTLVKPTIILEATVHYQAPVIQFLEKYNYLYIMINPLVSHQSKKTSLRKVKTDAMDAYNLCQLFYKEELEPYKKRGINLLNLRHLTRQHEAITGLYIQAKLQFHTMLDQVFPEYRRVFGDLFSKVSLNLLNVYPTSEKVLKECEVNLAEKIRSLCKTRSYQWALKKAAKLKEAAMNNPFDKIIYQSHLISLNMFIQMLLQYQEHLSILEEQIATLTKDIEEYKIIQSIPGIGEKIGATILSEIGEIERFNHPKKLVAFAGVDPSVFQSGKFNATINRITKRGSTRLRHVLYMAVLCGIRSSRNKRLKEFYDRKRVEGKPAKVAIIACVNKLLHWIYTLLKRKETFLDLN

SEQ ID NO: 14374 - protein, 320 aa, unidentified
  source 1..320: note = protein_b23c231
  REGION 9..159: note = RuvC_domain
  SITE 12: note = RuvC_P1
  SITE 58: note = RuvC_P2
  SITE 98: note = RuvC_P3
  SITE 100: note = RuvC_P4
  SITE 103: note = RuvC_P5
  REGION 193..277: note = Tnp_domain
  SITE 201: note = Tnp_P1
  SITE 230: note = Tnp_P2
  SITE 238: note = Tnp_P3
  SITE 239: note = Tnp_P4
  SITE 250: note = Tnp_P5
MSAHESLFIGIDISKHSLDVAFGAHPQAPVETLPYTEEQVQLLLKRLQTLNPTLIVLEATGGLERLLLTQLLQAGLPVARVQPRRVRALARAEGCWAKTDPLDARLLARFAERVRPPQQTLPDDQQQLLRDLLARREQLVHMRTTEVNRLATAARQLQPGIQKHIDWLDQEIKAVEQELNDHVDRSDKLSRKQELLQSVPGIGPITALNLLIRLPELESKNRKEIAAFVGVAPYSNQSGSNNKPRHIYGGRKDLRSVLYMATLAATRFNPTIRAFYQRLCDAGKPRKVAIVAAMRKLLTILNAMLRHDKPWESVLHTSSA

SEQ ID NO: 14375 - protein, 438 aa, unidentified
  source 1..438: note = protein_b6d064a
  REGION 16..175: note = RuvC_domain
  SITE 19: note = RuvC_P1
  SITE 74: note = RuvC_P2
  SITE 114: note = RuvC_P3
  SITE 116: note = RuvC_P4
  SITE 119: note = RuvC_P5
  REGION 290..384: note = Tnp_domain
  SITE 298: note = Tnp_P1
  SITE 328: note = Tnp_P2
  SITE 336: note = Tnp_P3
  SITE 337: note = Tnp_P4
  SITE 350: note = Tnp_P5
MSNKFIFNLDDLFISVGIDVGADFSWMSIALPNQQFVGKPYKILHSDMNSLTTAVSKIKEAEELYSLESRIFLESTGIYHYPLFCYLRDKGFNCSVINPIITKNSTNINIRKVHNDRFDSKKAALVGLKPDLKVSLMPSDLALNCRNLCREYYDLMDNRSAYVNKLQGELRMAFPQYLGIFSKVTINTSLALLETYTSPSAFINADKQEILDTIRSTARFGLTYAQNKYNAIIQAANEASEFGYIIDSNIKRIRLYISFIRKYDEEINNILDALHELVDANEDTDFVKQIHLIETFKGAGFLSAVSLMGEIGDFSAFGKPKQLFAYFGLDPAVKQSGKFEGTKVQMSKRGSAIARRVIHTLTLQSISTSRTGEAKNPVLRKYYLKKCESKPKLVAMGAVSHKVCNMIFAILRDNKPFVIITPQEHNKQYNAAKCDLVA

SEQ ID NO: 14376 - protein, 277 aa, unidentified
  source 1..277: note = protein_86c3c09
  REGION 6..147: note = RuvC_domain
  SITE 9: note = RuvC_P1
  SITE 52: note = RuvC_P2
  SITE 87: note = RuvC_P3
  SITE 89: note = RuvC_P4
  SITE 92: note = RuvC_P5
  REGION 211..273: note = Tnp_domain
  SITE 219: note = Tnp_P1
  SITE 249: note = Tnp_P2
  SITE 257: note = Tnp_P3
  SITE 258: note = Tnp_P4
MSIVMIGIDLGKNSCSLAALDERGAVVLRRRMRPASIVEFVAKHAPCAVAMEACCGAHHLGRQLLARGHTVKLMPPEYVRPYVKAQKNDDRDAEAIAEAATRPTMRFVELKTQEQLDIQSLHRVRSRLVGARTTLINQMRAILLERGITVAQGRRKFEKALDEMLADKALLAPGRLRELMTDMRAEWAALDGRIDAFDLEFAQLARTDDVARRLTSIPGVGALNATALVAAVGRAEAFDQARDLGAWLGLVPRQHTTGGKPRFLGLASEATHTFERF

SEQ ID NO: 14377 - protein, 389 aa, unidentified
  source 1..389: note = protein_ce65ae2
  REGION 4..163: note = RuvC_domain
  SITE 7: note = RuvC_P1
  SITE 60: note = RuvC_P2
  SITE 101: note = RuvC_P3
  SITE 103: note = RuvC_P4
  SITE 106: note = RuvC_P5
  REGION 266..353: note = Tnp_domain
  SITE 274: note = Tnp_P1
  SITE 304: note = Tnp_P2
  SITE 312: note = Tnp_P3
  SITE 313: note = Tnp_P4
  SITE 326: note = Tnp_P5
MICVGIDVAKDKHDCIIVSSEGEVLFKPFVILNNRVGFDELYEKICSVGVSFDKIKVGLEATGHYSYNLLGYLLDKGLPTYVINPLHTNLYRKSLSLRKTKTDKVDAHTIAYMLMSDVDLKSYSNTLYHNEELKSLTRYRFSKVEERAKLKTSVARLVNILFPELEKIVPTLHIASVYALLSEFPSAKLISKVHLTRLTNLLSEASKGRYGRDKAILIRDAARSSIGSYMPAKELELKHTIRLIQELNSEIDEIEDHINEIMEEMDTPILTIPGISNRMGAMILAEIGDFERFSSPDKILAYAGLSPSTYQSGQLTSSHSHMEKRGSRYLRYALFNATKFVCNWDPTFADYLQKKRSEGKHYNVAISHACKKLVRVIYHLQTTGEEYRS

SEQ ID NO: 14378 - protein, 312 aa, unidentified
  source 1..312: note = protein_2a8540a
  REGION 7..154: note = RuvC_domain
  SITE 10: note = RuvC_P1
  SITE 54: note = RuvC_P2
  SITE 93: note = RuvC_P3
  SITE 95: note = RuvC_P4
  SITE 98: note = RuvC_P5
  REGION 189..273: note = Tnp_domain
  SITE 197: note = Tnp_P1
  SITE 226: note = Tnp_P2
  SITE 234: note = Tnp_P3
  SITE 235: note = Tnp_P4
  SITE 246: note = Tnp_P5
MMTDDSIGIDISKDFLEAHRLSDGGTARFPNAPTGFRALSAWLGADIPARVVFEATGPYHRRFERALSRRLPLAKVNPLQARRFAQACGSRVKTDVVDARMLASFGKAFALKPDQPIDEKQYEIRELFSARGALIKDRTRLINRLQTQTLALVRRQTKARIEQLTRQLKALQQDINVRLQDCPSRARANAILRSIPGIGEVAAATILIEMPEVGTLDKKKAASLTGLAPMTQQSGKWRGKASIQGGRKQLRDALYMPALVAVKHNPDMCKKYQRMIKQGKPQKVALTAIMRKLIELANTLVKADREWVQNHA

SEQ ID NO: 14379 - protein, 385 aa, unidentified
  source 1..385: note = protein_d7b7329
  REGION 5..158: note = RuvC_domain
  SITE 8: note = RuvC_P1
  SITE 56: note = RuvC_P2
  SITE 97: note = RuvC_P3
  SITE 99: note = RuvC_P4
  SITE 102: note = RuvC_P5
  REGION 220..305: note = Tnp_domain
  SITE 228: note = Tnp_P1
  SITE 258: note = Tnp_P2
  SITE 266: note = Tnp_P3
  SITE 267: note = Tnp_P4
  SITE 278: note = Tnp_P5
MGVIIGMDPHKRSATIEIVDEKAAVLAAGRFGTDKAGYAQMLAAGRKFSDRIWAVEGCNGIGKHIAHRLVHDGETVVDVPPKLSAQVRVFATGNGRKTDPVDAHSVAMVALRAAGLVHVEVDDDLVVMGMLADRRDELGRARTQAINRLHRLLLELFPGGAKQFLSAQQARAMLATIRPRDLPGKTRRRLAAELISELEATDKKIKAIKKELAALVTARGSTLMDLHGIGPASAARLLADVGDIHRFASRDKFASWNGTAPLDASSGNQERHRLSRAGNRRINRTLHIMAIVQLRNQTPGRAYYDGRKAGGMPSMMAMRALKRRLSNVVFARMLADQNQREAGPGGQSGTTTDSSVTDLTPDIGSSDKPHPGPTCQTTATLRTVP

SEQ ID NO: 14380 - protein, 407 aa, unidentified
  source 1..407: note = protein_8ec63d1
  REGION 5..162: note = RuvC_domain
  SITE 8: note = RuvC_P1
  SITE 60: note = RuvC_P2
  SITE 99: note = RuvC_P3
  SITE 101: note = RuvC_P4
  SITE 104: note = RuvC_P5
  REGION 270..355: note = Tnp_domain
  SITE 277: note = Tnp_P1
  SITE 308: note = Tnp_P2
  SITE 316: note = Tnp_P3
  SITE 317: note = Tnp_P4
MAVYIGIDWSAAKHDVCVLNENGSVIATTVLPHTADGLLKLEALRQKLGVVPAECLIGIETAHTLVIDFLWARDYSQIYVIPPNVVKSTRGRYRQSGARTDTSDALLVADLLRTDRARLHPWRPDSLLTQQLRNRVGLVSHLTQTAVRLSNRLYAVLMRYYPAGLTIFSGLQTQIALQFLLAYPTPTAADALTFEQFKAFATEQRYPHPQKLAAAFARLKEAHPVSAAQTITVFEAEMQQLAHLLLEVVQAKCSHVRELQLLFQQHPDFSIFSSLPGAGDILAPALLTKFGDDRQRFPSAESVQALAGTCPVTEQSGKRRVISFRTACDHDFRAIVQQWAKASLKHSVWAQAYWQQTRPQCRSDSHGYRCLGNRWLAIAWKLWQTRTPYDEAYHLQQRLKRQRPRTA

SEQ ID NO: 14381 - protein, 342 aa, unidentified
  source 1..342: note = protein_1f77847
  REGION 6..149: note = RuvC_domain
  SITE 9: note = RuvC_P1
  SITE 52: note = RuvC_P2
  SITE 88: note = RuvC_P3
  SITE 90: note = RuvC_P4
  SITE 93: note = RuvC_P5
  REGION 209..293: note = Tnp_domain
  SITE 217: note = Tnp_P1
  SITE 247: note = Tnp_P2
  SITE 255: note = Tnp_P3
  SITE 256: note = Tnp_P4
  SITE 268: note = Tnp_P5
MSIVTVGLDLAKHVFQVHGVDEVGKVVVRRQLRREQMEAFFRGLTPCLVGMEACATAHHWARLIRALGHEVRLIPPTRVKAYVQRGKKNDAADAAAIAEAVTRPQMAFVPIKSEDQQAVLVLHRSRDLLVRQRTMLLNALRAHLAEFGIVGAQGPRKLVELIDRLSDLPIPELVRLALGELVQQVESCSARIAALEKAILAWHRTTEASRNLATIPGIGPITASVLAATVTDPSAFKNGRHLAAWLGLVPRQNSSGGKDRLGGITKAGDRSIRRLLVMGATTVIRYARSKAPGEGEWLKGLLARKPARLASIALANKMARIAWAVLSRGDVYRKTVPVLAVT

SEQ ID NO: 14382 - protein, 285 aa, unidentified
  source 1..285: note = protein_be0f88d
  REGION 1..48: note = RuvC_domain
  REGION 154..241: note = Tnp_domain
  SITE 162: note = Tnp_P1
  SITE 193: note = Tnp_P2
  SITE 201: note = Tnp_P3
  SITE 202: note = Tnp_P4
  SITE 214: note = Tnp_P5
MRRDLQPLRPGDDIAVELRILTSRRTDLVADRTRTINRLRAQLLEYFPALERAFDYSTSKAALLLLTGYQTPDGLRRAGAARLAAWLGKRKARNADAVAAKALQAAHAQHTVIPGQQLAAAMVARLAKEVMALDTEIGDTDAMIEERFRRHRHAEIIVSMSGFGVTLGAEFLAATGGDMSAFDSVDRLAGVAGLAPVPRDSGRISGNLQRPRRYNRRLLRACYLSALSSIRSDPVSRTYYNRKRAEGKRHSQAVLALARRRLNVLWAMLRDHTTYQPTTPTAAAA

SEQ ID NO: 14383 - protein, 342 aa, unidentified
  source 1..342: note = protein_95242a6
  REGION 6..148: note = RuvC_domain
  SITE 9: note = RuvC_P1
  SITE 52: note = RuvC_P2
  SITE 87: note = RuvC_P3
  SITE 89: note = RuvC_P4
  SITE 92: note = RuvC_P5
  REGION 211..296: note = Tnp_domain
  SITE 219: note = Tnp_P1
  SITE 249: note = Tnp_P2
  SITE 257: note = Tnp_P3
  SITE 258: note = Tnp_P4
  SITE 270: note = Tnp_P5
MEISTIGLDLAKNVFQVHAVDATGNVVIRKALRRRQVLHFFAKLPPCLIGMEACGTSHYWARELVTLGHVVRLMPPAYVKPYVKRGKTDAADAEAICEAVTRPTMRFVPVKSAEQQAALALHRTRDLLVRQRTQLVNMIRGLLAEFGIEMARGLHRALALAERLVAGEAPEVPPLAQRIVAGLAHQIGDLQLRLTALEKELLALHRSSELSQRLATIPGIGVISATALAASVVEPERFRSGRQFAASLGLTPLANCSGGKERLGKISRMGDRYLRRLLVVGMTSLVRRARSKPDSVDPRIVAMLERRSARVVTVAAANRTARVVWAIMTKGGTYRSPRIAVA

SEQ ID NO: 14384 - protein, 319 aa, unidentified
  source 1..319: note = protein_20ceee8
  REGION 9..152: note = RuvC_domain
  SITE 12: note = RuvC_P1
  SITE 56: note = RuvC_P2
  SITE 96: note = RuvC_P3
  SITE 98: note = RuvC_P4
  SITE 101: note = RuvC_P5
  REGION 192..277: note = Tnp_domain
  SITE 200: note = Tnp_P1
  SITE 229: note = Tnp_P2
  SITE 237: note = Tnp_P3
  SITE 238: note = Tnp_P4
  SITE 249: note = Tnp_P5
MAQNGLIVVGIDVAKDKIDACIRVLALRQPYPSSAQGHRRLVAWLRKHKVNKAVMEASGGYERDWAKLLRQAGVEVRIVDPKRVRSFALSAGRLAKNDVIDAEMIAWFAEIFTEAPSQTHDAAREELLALVKARIGLGDLKTRLQSQNEHAAPGLVQKAHARILKNLAREIAGLEAAIAAKIKATPHLAERAEIIASVPGFAATSAANLVAGMQELGQVSNEVAAALLGAAPYDDDSGQRRGERHIKGGRRWIRTAIYMPCLGAVTQNNPALKAFYRRLIAKGKKPKVALIACMRKLIVICNTLIARRQKWDPSRYALS

SEQ ID NO: 14385 - protein, 399 aa, unidentified
  source 1..399: note = protein_f957379
  REGION 8..164: note = RuvC_domain
  SITE 11: note = RuvC_P1
  SITE 62: note = RuvC_P2
  SITE 102: note = RuvC_P3
  SITE 104: note = RuvC_P4
  SITE 107: note = RuvC_P5
  REGION 270..357: note = Tnp_domain
  SITE 278: note = Tnp_P1
  SITE 309: note = Tnp_P2
  SITE 317: note = Tnp_P3
  SITE 318: note = Tnp_P4
  SITE 330: note = Tnp_P5
MAAPSLWAGIDAGKLDHHCVAIDASGRRLLSRRVRNDEAALVALIEDVIALADGGSVQWAIDLNAGGAALAIALLLVRDQDLLYIPGRIVHHAAAAYRGDGKTDAKDAAIIADQARMRTDLPEFRHRDETTVELRTLCARRADVSADRNRALNRLRAQLLEYFPALERAFDYSHRKAALILLTGYQTPEALRRTGRTRLENWLRDRHAYNPGAIVSRAMEAANAQHIVVNGQHLAAVMVARIAQQILDIDAELADLDDMIEERFSRHHQASVIRSMPGFGPLLGAELVAATNGALDSFPSADRLAAVAGLAPVPKDSGRITGNLKRPRRYDRRLLRVFYLAATNSIKTCPESRAYYDRKRAEGKHHRQAVLSLARRRVNVLWAMHRDNTTYKSTAKTAA

SEQ ID NO: 14386 - protein, 405 aa, unidentified
  source 1..405: note = protein_489b382
  REGION 11..166: note = RuvC_domain
  SITE 14: note = RuvC_P1
  SITE 63: note = RuvC_P2
  SITE 103: note = RuvC_P3
  SITE 105: note = RuvC_P4
  SITE 108: note = RuvC_P5
  REGION 273..359: note = Tnp_domain
  SITE 281: note = Tnp_P1
  SITE 311: note = Tnp_P2
  SITE 319: note = Tnp_P3
  SITE 320: note = Tnp_P4
  SITE 332: note = Tnp_P5
MFEIEDVGVFLGLDVGKTAHHGHGRTPAGKKVFDKQLPNSEPRLRAVFDKLTAKFGTVLVIVDQPASIGALPLTVARDAGCKVAYLPGLAMRRIADLYPGEAKTDAKDAAVIADAARTMPHTLRSLELTDEITAELTVLVGFDQDLAAEATRTSNRIRGLLTQFHPSLERVLGPRLDHPAVTWLLERYGSPAALRKAGRRRLVELIRPKAPRMAQRLIDDVFDALDEQTVVVPGTGTLDIVVPSLARSLAAVHTQRRALEAQINALLEAHPLSPVLTSMPGVGVRTAAVLLVTVGDGTSFPTAAHLASYAGLAPTTKSSGTSIHGEHAPRGGNRQLKRAMFLSAFACMNADPASRTYYDKQRARGKTHTQALLRLARQRINVLFAMLRDGTFYESRTPADVELAA

SEQ ID NO: 14387 - protein, 345 aa, unidentified
  source 1..345: note = protein_8974a53
  REGION 6..147: note = RuvC_domain
  SITE 9: note = RuvC_P1
  SITE 52: note = RuvC_P2
  SITE 87: note = RuvC_P3
  SITE 89: note = RuvC_P4
  SITE 92: note = RuvC_P5
  REGION 211..297: note = Tnp_domain
  SITE 219: note = Tnp_P1
  SITE 249: note = Tnp_P2
  SITE 257: note = Tnp_P3
  SITE 258: note = Tnp_P4
  SITE 270: note = Tnp_P5
MELHTIGIDLGKTVFHMVGLNLRGEVVVRKKFSRTQLLRFTANVRVGLIGMEACGGAHFLGRALREQGHEVRLIPAQYVKPYVKTNKSDYIDAEAIAEAVARPTMRFVPIKTDDQLDLQSLHRVRERWVMRRTAVINQIRGLLLERGITLRKGRCHVGAALPGILEDADAKLSSALRMLLAQLKLELDHLDMRIDEADALIKKTARENEACQRLVAIPGIGPVTATAVIAAIGNGGAFRKGREFAAWMGVVPREHSTGGKQKLLGISKRGNSYLRRLFVQGARAVLQQHTKQSSGLSVWLAQLISRSHRNVAAVALANKLARIAWAVLAKNESYRPPVLADVAAA

SEQ ID NO: 14388 - protein, 325 aa, unidentified
  source 1..325: note = protein_40b0a73
  REGION 4..154: note = RuvC_domain
  SITE 7: note = RuvC_P1
  SITE 59: note = RuvC_P2
  SITE 99: note = RuvC_P3
  SITE 101: note = RuvC_P4
  SITE 104: note = RuvC_P5
  REGION 198..284: note = Tnp_domain
  SITE 206: note = Tnp_P1
  SITE 235: note = Tnp_P2
  SITE 243: note = Tnp_P3
  SITE 244: note = Tnp_P4
  SITE 257: note = Tnp_P5
MAHIGIDVSKNKLDLCWLRERGKVKTKVFTNHPKHYPALMDWLTRQTGEQAQDLRVYLEATSIYHEPLTEWLHEMGVQVHVVNPAQVHHYAKALGIAGKTDKKDSQLLARYGIDRQPPRWQPEPEPVRRLRRLASRLETVQQDIQREQNRLEKARFNRDKETASSIDLVLLALQGEAKRLREEIKDHIDGNGDLKHDQSLLESIPGIGEVTSVHLMVLLRGKPFRSARQAAAFVGLVPSEWTSGSSVRGRPSLSKKGSSAIRRRLYMAAVVASRHNPMVGAFYARLRQAGKPPMSALGASMRKLVHIAFGVLNRQTPFQTQPVGG

SEQ ID NO: 14389 - protein, 401 aa, unidentified
  source 1..401: note = protein_c4454a5
  REGION 10..164: note = RuvC_domain
  SITE 13: note = RuvC_P1
  SITE 61: note = RuvC_P2
  SITE 101: note = RuvC_P3
  SITE 103: note = RuvC_P4
  SITE 106: note = RuvC_P5
  REGION 271..356: note = Tnp_domain
  SITE 279: note = Tnp_P1
  SITE 309: note = Tnp_P2
  SITE 317: note = Tnp_P3
  SITE 318: note = Tnp_P4
  SITE 330: note = Tnp_P5
MHNSDYAVFLGLDVGKGEHHAVGLAPDGRRLHDAPLPNTEAQLKALYGKLSRHGQVLVVVDQPASIGALPVAVARVAGCEVAYLPGLAMRRLADLHPGTAKTDARDAYVIADAARTLPHTLRRVDAGDEALAELGVLVGFDDDLAGEATRLTNRIRGLLTHIHPALERVTGPKTAHPAVLELLSRCGGPTGLAQAGRRKLTSIAVKHAPRMGQRLAAAIMTALAEQSVVVPGTAAAETVLPRLADSLREVLRQRDQVAAEVERMLDAHPLAEVLISMPGVGVRTGARILLEVGDAQAFPTSAHLAAYAGLAPVTRRSGSSIRGEHPPKGGNKQLKRACFLAAFAALHDPDSRAYYDRKRAEGKKHNAALICLARRRVDVLHAMLRNKAPYQRRAQELARAA

SEQ ID NO: 14390 - protein, 340 aa, unidentified
  source 1..340: note = protein_15435e5
  REGION 6..148: note = RuvC_domain
  SITE 9: note = RuvC_P1
  SITE 52: note = RuvC_P2
  SITE 87: note = RuvC_P3
  SITE 89: note = RuvC_P4
  SITE 92: note = RuvC_P5
  REGION 211..297: note = Tnp_domain
  SITE 219: note = Tnp_P1
  SITE 249: note = Tnp_P2
  SITE 257: note = Tnp_P3
  SITE 258: note = Tnp_P4
  SITE 270: note = Tnp_P5
MKHTVVGVDIAKNVFQLHWVELETGEIVSKQIKRSGFLEHFANRTSCLIGMEACGGAQHWARRLTAMGHQVKLLPGKAVKAFVTGNKNDACDARAIWTAVQQPGVRAVAVKTEEQQAVLALHRMRQQLVKFLTMQSNGLRGLLMEYGEVMAVGRTGLTRAMPEALARLSERFPAMLIDTLRQQWEMLGKLEEQIAQIEQRLQAWMKQDKACKAIAAIPGVGLLTATAAVATMGDARAFWCGREFAAWLGLVPRQTGTGGRVKLLGISKRGDTYLRTLLIHGARSVLTRAKECDAWIEQLGKRRPPNVVTVALANKMARTIWALIAHDRQFEKAHISSRPA

SEQ ID NO: 14391 - protein, 303 aa, unidentified
  source 1..303: note = protein_76ddcbd
  REGION 4..111: note = RuvC_domain
  SITE 15: note = RuvC_P2
  SITE 50: note = RuvC_P3
  SITE 52: note = RuvC_P4
  SITE 55: note = RuvC_P5
  REGION 173..258: note = Tnp_domain
  SITE 181: note = Tnp_P1
  SITE 211: note = Tnp_P2
  SITE 219: note = Tnp_P3
  SITE 220: note = Tnp_P4
  SITE 232: note = Tnp_P5
MGFFAGQPCCLVAMEACASAHYWAREIAALGHETRLIPPSYVKPFVKRQKNDVADAEAICEAAQRPTMRFVEPKSAEAQGAAVVFRTRDLLVRQRTQLINALRGHLAEFGFVVRQGPGHVSKLIELVADPSSDLPVEARPVLVVIAESLQSVQAKIAVLDREIAARAKADALAKRLMTIPGVGPVVATALVALAPPASTFRRGRDFAAWLGLTPKQHSSGGKERLGRTSKMGERSLRRLLILGASSAAKAAARDGSRASPWLVGMLARKPRMLVTVALANKMARIVWALMARGGSYRAPAAAA

SEQ ID NO: 14392 - protein, 330 aa, unidentified
  source 1..330: note = protein_3e80b5b
  REGION 4..160: note = RuvC_domain
  SITE 7: note = RuvC_P1
  SITE 61: note = RuvC_P2
  SITE 101: note = RuvC_P3
  SITE 103: note = RuvC_P4
  SITE 106: note = RuvC_P5
  REGION 201..287: note = Tnp_domain
  SITE 209: note = Tnp_P1
  SITE 238: note = Tnp_P2
  SITE 246: note = Tnp_P3
  SITE 247: note = Tnp_P4
  SITE 260: note = Tnp_P5
MFFVGCDVSKKKLDVGLLLSVEPLKVRSKVVQNHQPGWMTLVDWACRQAKCTPGELHVVLEATGVYHEAAAYALMQVGVKVSVVNPARVRDFAKGLAKHSKTDATDSVVLARYGEVTKPPLWQPPAAEIVELKGLLGRLQVIEQELARETNRLEKAQVSVTAQLVLDSLHKSRAFLEQEKRDLERRIDDHIDAHPQLKRDRELLESIPAIGRKTACRMLCVLRSRPFREAASVAAFLGLVPVQHQSGSSVYKSPHLSKAGSGAVRAALYMPAVVATRANPDVRAHYKRLVAQGKSKMSALGAAMRKLVHICFGVIKNQQPYRPNVSVQNA

SEQ ID NO: 14393 - protein, 405 aa, unidentified
  source 1..405: note = protein_c3cd4aa
  REGION 14..168: note = RuvC_domain
  SITE 17: note = RuvC_P1
  SITE 65: note = RuvC_P2
  SITE 105: note = RuvC_P3
  SITE 107: note = RuvC_P4
  SITE 110: note = RuvC_P5
  REGION 275..359: note = Tnp_domain
  SITE 283: note = Tnp_P1
  SITE 312: note = Tnp_P2
  SITE 320: note = Tnp_P3
  SITE 321: note = Tnp_P4
  SITE 333: note = Tnp_P5
MNSIEHYDDVAVFIGLDVGKSEHHAVALTRDGKKLYDKPLPNTEAKIISVLDQLAEHGPALLVVDQPATIGALPVAVAQAHGVLVGYLPGLTMRRVADLHPGEAKTDARDAFIIAETARTMPSTLRSIKVADEQIAELSMLCGFDDDLAAQITQVSNRVRGLLTQIHPTLERVLGPRLDHPAILDVLQRYPSPGELRRAGQKRVAARLLKRAPRKGGAWAQEIFDALDQQTVTVTGTNAASIVLPRLAKQLSELRQQRTDIASEVEKIVEAHPLHPVLTSMPGVGVRTAARLLTEIVGKHFPTAGHLASYAGLAPVTRRSGTSIRGEHPSKRGNKVLKRAMFLSAFAALRDPESRAYYDRKIAQGKRHNQALIALARRRCDVLHAMIRTGSLYQPRTQSETALAA

SEQ ID NO: 14394 - protein, 309 aa, unidentified
  source 1..309: note = protein_f315cd2
  REGION 5..150: note = RuvC_domain
  SITE 8: note = RuvC_P1
  SITE 52: note = RuvC_P2
  SITE 92: note = RuvC_P3
  SITE 94: note = RuvC_P4
  SITE 97: note = RuvC_P5
  REGION 186..270: note = Tnp_domain
  SITE 194: note = Tnp_P1
  SITE 223: note = Tnp_P2
  SITE 231: note = Tnp_P3
  SITE 232: note = Tnp_P4
  SITE 243: note = Tnp_P5
MFSCAGIDVSKDTLEIWINPQDIGASYLNTASDFLGLIDWLKRYQVSRVLLEATGGYEREVMKALQAAGFEVLRINPRRARDFAKAMGQRAKTDPIDARLLAQFAEVIKSPSNRITSPEQDNLRALVQQRENFVQQHGDDLRRLKTASADTVKPCLRSHIDYLCQAIKSIERLIRQTAKDLDSDKTARLCSVKGIGLVTAASLMAYLPELGEVGRHEIAALAGIAPYNDDSGKHEGPRHIGGGRFAARRAMYMACWVVIQRQPEFKARYDALRHKGKCAKVALIACMRVLLIRLNAMIRDRTEWKEPLA

SEQ ID NO: 14395 - protein, 391 aa, unidentified
  source 1..391: note = protein_1eff8c3
  REGION 4..163: note = RuvC_domain
  SITE 7: note = RuvC_P1
  SITE 60: note = RuvC_P2
  SITE 101: note = RuvC_P3
  SITE 103: note = RuvC_P4
  SITE 106: note = RuvC_P5
  REGION 266..353: note = Tnp_domain
  SITE 274: note = Tnp_P1
  SITE 304: note = Tnp_P2
  SITE 312: note = Tnp_P3
  SITE 313: note = Tnp_P4
  SITE 326: note = Tnp_P5
MIFIGIDVAKDKHDCFVISSDGEVLFDVFTISNTLYGFNDLLAKIKSVSSDLSKVKVGLEATGHYSYNLLGFLLDNGLPTYVLNPLHTNIYRKSLSLRKTKTDKVDARTITSMLMSCVDLKPYTRALYHNEELKSLTRYRFDKVSERAKLKSSVSRLVTILFPELEKLVPTLHMVSVYALLSEFPSAKHIANASLTRLTNLLYTVSKGHYDKDTAIRFREAARNSIGSVMPAKSLELKHTIKLIGELDYEISEIEAEIELIVDSLGTTILTIPGIGYATAASILAEVGDFSNFETPDKILAFAGMSPSTYQSGQLTNCYAHMEKRGSKYLRFALYNATKYVCKWDSNFAAYLANKRSEGKHYNVAISHAAKKLVRLIFALEKSRLPYVPAV

SEQ ID NO: 14396 - protein, 349 aa, unidentified
  source 1..349: note = protein_12d66ed
  REGION 6..147: note = RuvC_domain
  SITE 9: note = RuvC_P1
  SITE 52: note = RuvC_P2
  SITE 87: note = RuvC_P3
  SITE 89: note = RuvC_P4
  SITE 92: note = RuvC_P5
  REGION 211..298: note = Tnp_domain
  SITE 219: note = Tnp_P1
  SITE 249: note = Tnp_P2
  SITE 257: note = Tnp_P3
  SITE 258: note = Tnp_P4
  SITE 270: note = Tnp_P5
MNRTTYGLDIAKNVMQLHWVDGETGEIERKKLARAKLSEFFAQRQPARVAMEACGSAHHWARVLGGLGHQVELLPARQVRAFVRSNKDDAADARAIWLAAQHTDIRRAPVKTLEQQAVMSLHRARSHWVSVRTATINMLRSLLYEFGVVLPGGKKAGLKTISAKRAEIDVQLPQPMRRLVDLQLETLKGVDLSIDRLDAEIAEQQRQLAAARTLREVPGIGVLGATALAATLGDASGWRSGREFAASLGLVPSHSGTGGKTHVGHLSKRGDPYLRTLLIHGARAVIAQAKVKPAWLEELLRRRPLNVAVVALANKMARTVWALVAHGRAYRSEWKSTPPSGWGAQAQTA

SEQ ID NO: 14397 - protein, 403 aa, unidentified
  source 1..403: note = protein_9249e75
  REGION 12..166: note = RuvC_domain
  SITE 15: note = RuvC_P1
  SITE 63: note = RuvC_P2
  SITE 103: note = RuvC_P3
  SITE 105: note = RuvC_P4
  SITE 108: note = RuvC_P5
  REGION 273..357: note = Tnp_domain
  SITE 281: note = Tnp_P1
  SITE 310: note = Tnp_P2
  SITE 318: note = Tnp_P3
  SITE 319: note = Tnp_P4
  SITE 331: note = Tnp_P5
MILEQESIDVFLGLDVGKTGHHAVALNRAGKKLYDKALPQDETKIRDVLTKLAGHGKVLVVVDQPATIGALPVAVAQAAGAAVGYLPGLAMRRIADLHPGQAKTDARDAAIIAEAARSMPHTLRSVELDDETLAELGVLCGFDDDLAGQITATSNRIRGLLTQIHPALERALGPYLDHPAVADLLTRYPTPAALKTAGRGHVRARLKKHAPRAAERLTEAIFTALGEQTVVVVGTGAAGIVLPKLAEQLLALRRQRDEIADQVEALVEAHPLYEVLTSMPGIGVRTCARILTEVTGKHFASAAHLASYAGIAPVTRRSGTSIRGEHPSRRGNKKLKRALFLSAFAALHHPPSRAYYDRKRAEGKRHNQAIIALARRRSDVLFAMLRDGTLYEDPAPKNLPSAA

SEQ ID NO: 14398 - protein, 344 aa, unidentified
  source 1..344: note = protein_a971e53
  REGION 6..146: note = RuvC_domain
  SITE 9: note = RuvC_P1
  SITE 52: note = RuvC_P2
  SITE 87: note = RuvC_P3
  SITE 89: note = RuvC_P4
  SITE 92: note = RuvC_P5
  REGION 211..295: note = Tnp_domain
  SITE 219: note = Tnp_P1
  SITE 249: note = Tnp_P2
  SITE 257: note = Tnp_P3
  SITE 258: note = Tnp_P4
  SITE 270: note = Tnp_P5
MTIMMLGIDLGKNSCSVAGLDSDGNVVLRRRMQPKRVLSFASKLAPCTVAMEACCGAHYLGRLLAEQGHEVRLMSPEYVRPYVKAQKNDDRDAEAIAEAATRPTMRFVELKSQAQLDVQSLHRARSRLVGARTTLTNQLRAILLERGTVIAQRRHKLEQAVDALLADPDFMSGSRIRRLLADMRQEWIDLDRRIGALDREFVELARDNVAARRLTSIPGIGALNATALVAAVGDGATFAKARDLGAWLGLVPRQHTTGGKPRLLGISKRGNKYLRTLLIHGARAALPSLARSQTTLGVWLRNLLARRHRNTVVVALANKLARIAWMILRHEVTFQANRATAMAA

SEQ ID NO: 14399 - protein, 317 aa, unidentified
  source 1..317: note = protein_9179615
  REGION 4..151: note = RuvC_domain
  SITE 7: note = RuvC_P1
  SITE 54: note = RuvC_P2
  SITE 94: note = RuvC_P3
  SITE 96: note = RuvC_P4
  SITE 99: note = RuvC_P5
  REGION 191..276: note = Tnp_domain
  SITE 199: note = Tnp_P1
  SITE 228: note = Tnp_P2
  SITE 236: note = Tnp_P3
  SITE 237: note = Tnp_P4
  SITE 249: note = Tnp_P5
MCCAGIDVSKPHLDLALVFSTAKPTRFRFPNTPEGRQALLAALAHHRPDWVALEPTGPYHLPLLHLLAQRGFPVALVNPYHLAAFRRAAGERNKTDHQDALLLARYALVYREELQAYTLPPETLRELKALVGYREDLARRERAILNQQEAAHWAGSEEVIPLLQRELACVKELLREVEERIQALLSLIPEAEVLMALPGVGPQVAAAVLALLPPHLWGQAKRAAAYAGLIPEREVSGKSVERSRLSKKGPPLLQRKLFMGALVAVRHDPRMRAFYHRLLSRGKRKKQALVAVAHKLLRCMMGRLREYYANRLGQGVA

SEQ ID NO: 14400 - protein, 337 aa, unidentified
  source 1..337: note = protein_1e1c2bd
  REGION 7..149: note = RuvC_domain
  SITE 10: note = RuvC_P1
  SITE 53: note = RuvC_P2
  SITE 88: note = RuvC_P3
  SITE 90: note = RuvC_P4
  SITE 93: note = RuvC_P5
  REGION 211..296: note = Tnp_domain
  SITE 219: note = Tnp_P1
  SITE 249: note = Tnp_P2
  SITE 257: note = Tnp_P3
  SITE 258: note = Tnp_P4
  SITE 270: note = Tnp_P5
MSSIHIVGIDLGKHCFHAVAHNSSGAEVLHRKFNRNQLLIFLSKIEPTIIAFEACGGAHWLARKCGEFGHQARLIPPQYVKPYVKGNKNDFIDASAIAEAAGRPTMRFVAVKSEEAQVIAAIHRIRDGYIKERTATMSRVGAILLEFGLSFPKGHAKMKAMFQWLAEQNVSLPQRLLCELSSIHEHYKYLNEQIKAQDNKLQMVVNSNESAQLLKTIPGVGDLTSTLCVADVSSPNNFTNGREMAAWLGLVPRQFSTGGKTKLLGISKRGNKHLRTLFIHGARAVLSRPETVGKVFGEWLVNLRASKPFNVVVVALANKLVRIAWAVLYHRQAFKAV

SEQ ID NO: 14401 - protein, 339 aa, unidentified
  source 1..339: note = protein_57ae9df
  REGION 6..147: note = RuvC_domain
  SITE 9: note = RuvC_P1
  SITE 52: note = RuvC_P2
  SITE 87: note = RuvC_P3
  SITE 89: note = RuvC_P4
  SITE 92: note = RuvC_P5
  REGION 210..294: note = Tnp_domain
  SITE 218: note = Tnp_P1
  SITE 248: note = Tnp_P2
  SITE 256: note = Tnp_P3
  SITE 257: note = Tnp_P4
  SITE 269: note = Tnp_P5
MAHMIVGVDIAMNVMQVHWVDPESGEIVNRSIKRAAFLEYFANRKPCLVGMESCSGSQHWARRLIEMGHRVKLMPAKFVKAFNIRNKNDAADARAIWMATQMDCREVAVKSEAQQAILALHRMRQQLVKFRTMQTNSLRGLISEYGEVMGVGRAALDKAMVGVLERLSGRLPAILIDTLREQWKGLDDVDRQIGQIERRMREWMKGDQAVKAIAAIPGVGLLTATAAVATMGHAKAFKSGREFAAWLGLVPGQTGSGGTIKLQGISKRGDTYLRTLLVHGARSIIYRAKEPDLWVEQMKQRRPLNVVIVAMANKLARIIWAVLAHQQPYRKDYVSTRPA

SEQ ID NO: 14402 - protein, 344 aa, unidentified
  source 1..344: note = protein_55ed7be
  REGION 9..150: note = RuvC_domain
  SITE 12: note = RuvC_P1
  SITE 55: note = RuvC_P2
  SITE 90: note = RuvC_P3
  SITE 92: note = RuvC_P4
  SITE 95: note = RuvC_P5
  REGION 213..298: note = Tnp_domain
  SITE 221: note = Tnp_P1
  SITE 251: note = Tnp_P2
  SITE 259: note = Tnp_P3
  SITE 260: note = Tnp_P4
  SITE 272: note = Tnp_P5
MTKTPIAVLGIDLGKNSCSLAGLDATGAVVMRRKMIREGLLAFAAGLPSCVVAMEACCGAHFLGRTFEAHGHEVRLMSPEYVQPYVKAQKTDDRDAEAIAEAATRPTMRFVSLKSEAQLDLQVLHRVRERLVLARTALTNQLRAILLERGIIMPKGRMILMRRLQEIGLENLAVGARTRALLKDLIDECAELDRRIRAYDEEFAAVARHDAQARQLSGIPGVGVINATALLAAVGDGSAFARGRDLASWLGLTPRQHSTGGKTKMLGISKRGNRYLRKQLIHGARAAMPHLAAKSTRMGAWLRGLLERAHPNVVVVALAAKLARIIWAVLRNKTNFDPGAVLAA

SEQ ID NO: 14403 - protein, 399 aa, unidentified
  source 1..399: note = protein_2a2cdab
  REGION 6..159: note = RuvC_domain
  SITE 9: note = RuvC_P1
  SITE 57: note = RuvC_P2
  SITE 98: note = RuvC_P3
  SITE 100: note = RuvC_P4
  SITE 103: note = RuvC_P5
  REGION 221..306: note = Tnp_domain
  SITE 229: note = Tnp_P1
  SITE 259: note = Tnp_P2
  SITE 267: note = Tnp_P3
  SITE 268: note = Tnp_P4
  SITE 279: note = Tnp_P5
MDHVVIGVDPHKLSATIEVVDQHEHLLGSGRFSTDQAGYAAMCAYAKTWPKRLWAVEGANGAGRTLAQRLLEAGEHVVDVPAKLAARVRLFDTGHNRKTDAHDAHAVAVVAVRPTNLRVLKVDGELEAMRMLADRREALTRRRVQTVCRLQALLAELLPGQAKRDITTGQAKAMLATVRPRDIAGKTRRRIAAEELAELIAVEAKIKKATAELKAMVLARESRLMDIHGVGAVVAARILADVGDVARFADRNRFASWTGTAPLDASSGEQNRHRLSRAGNRRVNHMIHIAAVTQLRLDTEGRAYYRRKRADGKKPQEALRCLKRRISDAIYRQLVTDAVRAEGADPGGHCGASQESSAVDLPPHIDTSDQPLPDPQTRRYAALPGTRKSQPVGTLASTG

SEQ ID NO: 14404 - protein, 322 aa, unidentified
  source 1..322: note = protein_b38c41b
  REGION 8..158: note = RuvC_domain
  SITE 11: note = RuvC_P1
  SITE 64: note = RuvC_P2
  SITE 102: note = RuvC_P3
  SITE 104: note = RuvC_P4
  SITE 107: note = RuvC_P5
  REGION 194..281: note = Tnp_domain
  SITE 202: note = Tnp_P1
  SITE 232: note = Tnp_P2
  SITE 240: note = Tnp_P3
  SITE 241: note = Tnp_P4
  SITE 254: note = Tnp_P5
MKQFSFFTGIDVSKLWLDIAVLSATDGIVYQAKINNNAKDIRIFLRELKKLLKTEITQHLFCMEHTGKYGNAFLAVAAVAGAEVWVELPLQIKRSQGLVRGKTDQWDAVRIAKYALRFADKAVFWKPADQTILDIKELQVKRNRLVKAHSQLVQENKNDPLFKKPLLALKQAIEAIELKMEQQLEQNEDACHQYKLLKTVPGIGKQTALALIAVTNGFTRLTESRKLSCYAGLAPFPYSSGSSVKGRTKVSKMGDMKLKVLLNLSAWNAIRSISAFKDYFKRKVGEGKHKMSVINAIRNKLLALALAVIKRNSPFEKNYTFS

SEQ ID NO: 14405 - protein, 343 aa, unidentified
  source 1..343: note = protein_f0194ec
  REGION 7..149: note = RuvC_domain
  SITE 10: note = RuvC_P1
  SITE 53: note = RuvC_P2
  SITE 88: note = RuvC_P3
  SITE 90: note = RuvC_P4
  SITE 93: note = RuvC_P5
  REGION 211..295: note = Tnp_domain
  SITE 219: note = Tnp_P1
  SITE 249: note = Tnp_P2
  SITE 257: note = Tnp_P3
  SITE 258: note = Tnp_P4
  SITE 270: note = Tnp_P5
MTKDTMIGVDLAKTVLVLHGASMTGQLKFRKKLSRQSFGKFMAEHPPAMVVMEACGSAHYWAREMIRLGHEVKLIAPHYVKPFVKRQKNDAADAEAIVIAAQRPEMRFVDTKSAEQQGLAILFRARERLVHQRTELVNALRACLYEYGFVIPQGIHQIKRIKEILDAPNSDLPDLMREECCDLLEQIGEKTVRIDARTVKIKVLAAEADTARRLKTIPGIGPLTALAVEAFAPPMRNFRRGRDFAAWLGLVPRQFSSGGKERLGRISKAGQPDIRRLLIIGAMSRLNWLGRKSIPEGSWLARLAARKPRMLVAIALANKMARVIWAVLTKNEDYRGPAQAITA

SEQ ID NO: 14406 - protein, 404 aa, unidentified
  source 1..404: note = protein_df9027b
  REGION 4..160: note = RuvC_domain
  SITE 7: note = RuvC_P1
  SITE 59: note = RuvC_P2
  SITE 97: note = RuvC_P3
  SITE 99: note = RuvC_P4
  SITE 102: note = RuvC_P5
  REGION 270..356: note = Tnp_domain
  SITE 278: note = Tnp_P1
  SITE 309: note = Tnp_P2
  SITE 317: note = Tnp_P3
  SITE 318: note = Tnp_P4
MIFVGIDWAEAHHDVCVLDHEGGILAKGRVPDGLEGVGRLHAMVAECAEEPSEVVVGIEIDRGLLVGALVAAGYRVYAINPFAVSRYRDRHATSGAKSDPGDAKVLADLVRTDRRNHRGVAGDTGLAEAIKVLARAHQSLVWTRQRQVNQLRSTLREFYPGALHALGDDLASHEACSVLGMAPTPERGRRLTKTRIRRSLAASGRTRNLDRRAEQIHGALRAPQLEAPPVLAEAYGEVVGSLVVVIDGLTHQIGELERELTERFEGHPDAEILRSLPGLGPILGARVLAEFGDDPTRYADAKARRCYAGSAPITRASGTRLVVLARVARNRRLADACHLWAFSALTTSPGARRYYDARRARGATHHQALRALSNRLVGLLHGCLRHRQLYREDIAWPDSLAAVA

SEQ ID NO: 14407 - protein, 336 aa, unidentified
  source 1..336: note = protein_4906219
  REGION 6..147: note = RuvC_domain
  SITE 52: note = RuvC_P2
  SITE 87: note = RuvC_P3
  SITE 89: note = RuvC_P4
  SITE 92: note = RuvC_P5
  REGION 211..297: note = Tnp_domain
  SITE 219: note = Tnp_P1
  SITE 249: note = Tnp_P2
  SITE 257: note = Tnp_P3
  SITE 258: note = Tnp_P4
  SITE 270: note = Tnp_P5
MEPTTIAIDLATRVFQIHYVEPETGAIHSKVLKRAQLVPFFTNLAASRVVMEACGSAHYWARVLARLGHDVRLIAAQFVRPFVKSNKNDAADAAAIWEAAQRPGMRFVAVKTEDQQAMLALHRIRQQLVRMRVMQVNQLRGLLYEFGVVLPQGRRTSIEAAKAALASLADQLPAMLVDSLQDQCSRLRALDEQIARLEQRILDWRRNDDACRRISEIPGVGVLTATAAVSVIGQAETFRSGREFAAYLGLVPRQNSSGGKVKLGGISKRGDVYLRTLLIHGARSVISSSRHLPERLRQMLTRRPTNIVAVALANKMARTIWALLAYGRTYEATPAS

SEQ ID NO: 14408 - protein, 344 aa, unidentified
  source 1..344: note = protein_bb6eaa9
  REGION 7..148: note = RuvC_domain
  SITE 10: note = RuvC_P1
  SITE 54: note = RuvC_P2
  SITE 89: note = RuvC_P3
  SITE 91: note = RuvC_P4
  SITE 94: note = RuvC_P5
  REGION 213..297: note = Tnp_domain
  SITE 221: note = Tnp_P1
  SITE 250: note = Tnp_P2
  SITE 258: note = Tnp_P3
  SITE 259: note = Tnp_P4
  SITE 271: note = Tnp_P5
MNTIRVVGIDIAKSVFQVCVWMIDGSVAWNKKVTRQKLLDTLRQFEPGTMMAMEACSTSHFWGRTLSAMGFSVRLIPAQHVKVFAKSQKNDANDALAICETACRPGIHFVPVKTTEQQDIKALRNTRQLMVEQRTALANQLRSLLAENGLILPVGIQRLQQQLPELIEDASNDLTFTLRRLLSSLREDMQALNERVTYLDKEIAALSSQQTAYRHFLTVPGVGPLIAAAFISEVDAVQFSNGRELSAWCGLVPRQHSSGGKQRLSSVTKNGNRSLRTLVIHGARSVMRCVKKRDDNLGLWLKRLEARRGFLKTTVALANKLARIIWRILTDSVDFNMSKAFAAS

SEQ ID NO: 14409 - protein, 343 aa, unidentified
  source 1..343: note = protein_8580d38
  REGION 6..147: note = RuvC_domain
  SITE 9: note = RuvC_P1
  SITE 52: note = RuvC_P2
  SITE 87: note = RuvC_P3
  SITE 89: note = RuvC_P4
  SITE 92: note = RuvC_P5
  REGION 212..298: note = Tnp_domain
  SITE 219: note = Tnp_P1
  SITE 249: note = Tnp_P2
  SITE 257: note = Tnp_P3
  SITE 258: note = Tnp_P4
  SITE 270: note = Tnp_P5
MKVTTAGIDLAKNVFQVHGVDEHGKTVLKKQLKRDQMAAFFANLPPCLIGVEACGSAHHWARKLQSFGHTVKLMAPQFVKPYVKTNKNDAADAEAICEAVRRPNMRFVPVKNVEQQAVLALHRVRQGFVKARTAQANQIRGLLSEFGLIIPVGIVNIAKRVPELIEDASNELPGSFRLLIDRLMDHLKELDTQVDEMEAQVVAWHRASATSVKLQKIPGIGPITASALVASLGDAKNFDSGRQVAAWLGLVPRQHSSGGKNVLLGMSKRGDTYLRTLLIHGARAVIRAAQAKPDKEGWLHKLLARRNANVAAVALANKNARTVWALLAHGRQYQPGYGVACAA

SEQ ID NO: 14410 - protein, 343 aa, unidentified
  source 1..343: note = protein_d5b1927
  REGION 5..151: note = RuvC_domain
  SITE 8: note = RuvC_P1
  SITE 53: note = RuvC_P2
  SITE 91: note = RuvC_P3
  SITE 93: note = RuvC_P4
  SITE 96: note = RuvC_P5
  REGION 211..297: note = Tnp_domain
  SITE 219: note = Tnp_P1
  SITE 249: note = Tnp_P2
  SITE 257: note = Tnp_P3
  SITE 258: note = Tnp_P4
  SITE 270: note = Tnp_P5
MDQYIGLDVSLKETAISIREDGKRIWRGKCPSDPKILARMISRNAPYAKRVVFETGPLSTWFYHALTAEGVPAICIEARHAQKILNETLNKTDANDADGLAHLAEAGFYKAVRVKSFDAMLTRTLVGARNQLLSISTQLSNQIRGLMKTFGLIVPKGTGRVFDSNVRELLDENVSLARIILPLLEAWHDIRTHAADLGRQLLVAARESQATRQLMTIPGVGAVTAVSYVAAIEDPENFRTSRSVGAWLGLTTRRYQSGEVDYGGHISRKGDNHLRGLLYEAATVILTRTSARSESSLRSWGIKLRERLGFKRAAVAVARKLAVIMHSMLKTGEVFNRSAGATA

SEQ ID NO: 14411 - protein, 411 aa, unidentified
  source 1..411: note = protein_48e9a25
  REGION 4..168: note = RuvC_domain
  SITE 7: note = RuvC_P1
  SITE 65: note = RuvC_P2
  SITE 105: note = RuvC_P3
  SITE 107: note = RuvC_P4
  SITE 110: note = RuvC_P5
  REGION 276..362: note = Tnp_domain
  SITE 284: note = Tnp_P1
  SITE 315: note = Tnp_P2
  SITE 323: note = Tnp_P3
  SITE 324: note = Tnp_P4
MLFVGDDWAEDHHDVEVMDASGRRLAKARLPEGVAGITRLHAMIGQWLGDDVEDTEDVAARVKIGIETDRGPWVQALVAAGYTVYAVNPLQAARYRERLALSGAKSDAADAHMLADMVRTDSHQLRPVAGDTAEAEAVKVVTRMHKTLVWERTRAGQRLRHALREYFPAALAAFEDLDAADTLELLAKAPDPASGARLSLAQISAALKRARRRDIPAKAAAIQAALRAEHLGQPAVVTAAYAASVRALAALLVTLNEQVKALQGQVEAHFGRHPDAEIILSQPGLGAVLGARVLAEFGDDHARYVSAKARKNYAATSPITRASGKKRTVAARFVHNDRLIDALMTQAFSALKASPGARAYYDRQRARGASYNAALRQLANRLVGILHGCLKTGTPYDEATAWSHHLNETAA

SEQ ID NO: 14412 - protein, 339 aa, unidentified
  source 1..339: note = protein_c904e51
  REGION 6..148: note = RuvC_domain
  SITE 9: note = RuvC_P1
  SITE 52: note = RuvC_P2
  SITE 87: note = RuvC_P3
  SITE 89: note = RuvC_P4
  SITE 92: note = RuvC_P5
  REGION 210..297: note = Tnp_domain
  SITE 218: note = Tnp_P1
  SITE 248: note = Tnp_P2
  SITE 256: note = Tnp_P3
  SITE 257: note = Tnp_P4
  SITE 269: note = Tnp_P5
MDVSTIGLDLAKNVFQAHGADASGSVAFRKQLRRDKVLSFFASQPRCVVAMEACGGAHYWARAIGDLGHTVRLIPPAYVKPFVKRQKNDMADAEAICEAAQRPTMRFVTVKSEEQQASSAAFRVRDILVRQRTQLINSLRGHLTEYGLIVAQGPAHVAKLVEQVGDPESDLPEAARIVLLMIVETLRSLEEKIKQLDREIVRRTREDKDARRLTTIPGIGPITATALVALAPNATTFKKGRDFAAWLGPTPLQRSTGGKQKLGATSKMGERTLRRLLIIGASAVVQQACKRGSQQETWLARMLARKPRMLVIVALANKLARIAWALMASGGTYRAPAAA

SEQ ID NO: 14413 - protein, 345 aa, unidentified
  source 1..345: note = protein_59f81f1
  REGION 9..169: note = RuvC_domain
  SITE 12: note = RuvC_P1
  SITE 68: note = RuvC_P2
  SITE 108: note = RuvC_P3
  SITE 110: note = RuvC_P4
  SITE 113: note = RuvC_P5
  REGION 209..295: note = Tnp_domain
  SITE 217: note = Tnp_P1
  SITE 247: note = Tnp_P2
  SITE 255: note = Tnp_P3
  SITE 256: note = Tnp_P4
  SITE 269: note = Tnp_P5
MTNIVKQVAGIDVAQDELVVSLGKMDIAIETTIYAFKTFANKPSGFAALLVWISKHASADVPVRFVMEATGAYHEKLAYYLTEQEKQVSIVLPSKISNYVKTLDIKTVTDKTASQAICQFGLGRKLEIWQKPKKIFRDLKQLTRERDQIIAERTIAKNQLHAEQSGAFPNERSIIRLNQRIDLFNSQEKEIHTEISEAIKTDKELTKKINTITSIPGVGKLTATIVIAETNGFELIRNKRQLVSYSGLDIKEKQSGTSVKAKPKISKKGNRHVRKAMYMPALTAIRNDERFKAIFVRLVSKHGIKMKAAVAVQRKLLEMIYTIWKTDTKYNINYLQKTTQDIQAT

SEQ ID NO: 14414 - protein, 383 aa, unidentified
  source 1..383: note = protein_123d04a
  REGION 5..157: note = RuvC_domain
  SITE 8: note = RuvC_P1
  SITE 56: note = RuvC_P2
  SITE 97: note = RuvC_P3
  SITE 99: note = RuvC_P4
  SITE 102: note = RuvC_P5
  REGION 220..305: note = Tnp_domain
  SITE 228: note = Tnp_P1
  SITE 258: note = Tnp_P2
  SITE 266: note = Tnp_P3
  SITE 267: note = Tnp_P4
  SITE 278: note = Tnp_P5
MTIMIGIDPHKATHTAVAIDGDERVLDEFTLRASKAQTTRLRSWAGQFDGPEWAVESARGLGYLLAQQLVAAGETVFDVPPLLASRVRVLGSGRSQKNDPNDARSVAIAAMRSDRLCRVTTDDHAQVLRLLVKRHRDTAQLRAKLIVRLSALTTELSAGGIGPKATPQKAIELLKRVEVTDEVARSRVLIAGELLDDVARLDLLLKPSKQRIETAVVTSGTTLCDIVGIGPICAATIIGYTGNIGRFPTRAHFATYNATAPIEASSGGKVRHRLNPRGNRQLNFAIHIAAVVQIRSGDEGRVFYDRKIAEGRSNKEATRSLKNDGSLIGSTATSSPTRNGQPRAERQVGPGGQPGTTLQSSVAGLNPEHRRFGQVTSRTRQSR

SEQ ID NO: 14415 - protein, 317 aa, unidentified
  source 1..317: note = protein_905d7c2
  REGION 1..119: note = RuvC_domain
  SITE 23: note = RuvC_P2
  SITE 58: note = RuvC_P3
  SITE 60: note = RuvC_P4
  SITE 63: note = RuvC_P5
  REGION 182..272: note = Tnp_domain
  SITE 190: note = Tnp_P1
  SITE 222: note = Tnp_P2
  SITE 230: note = Tnp_P3
  SITE 231: note = Tnp_P4
  SITE 244: note = Tnp_P5
MAMTPTAFSNWLATQKPMTVVFEACATSNYWYQCAREYGHDARLISAKLVSNIRQNQKTDKNDAEAVLQASQLSNVKFISGKSKEQQELQSLVRMHQLSVKHKVAYGNQLCSLLLEFNIKLSPTDTGLNSAIQSILEDAENGFSAIFRDALHKAWHQYLKSIEFVKHYEQSVARASRASEACKNLMKIEGVGPTNAVNLYIALGCCKLGVFKKARDAAACIGLTPIQHSSGGKVRLGSIGKNIRNSSLRANLVAGAMSAVNQAVKRDSRTKKDEWIKGLVERRGKRCAAVALANKTVRTAFSLLRNGTEYKAELLAA

SEQ ID NO: 14416 - protein, 338 aa, unidentified
  source 1..338: note = protein_c26e6e6
  REGION 7..149: note = RuvC_domain
  SITE 10: note = RuvC_P1
  SITE 53: note = RuvC_P2
  SITE 88: note = RuvC_P3
  SITE 90: note = RuvC_P4
  SITE 93: note = RuvC_P5
  REGION 209..295: note = Tnp_domain
  SITE 217: note = Tnp_P1
  SITE 247: note = Tnp_P2
  SITE 255: note = Tnp_P3
  SITE 256: note = Tnp_P4
  SITE 268: note = Tnp_P5
MNTITLLGIDIGKHTFHLHGQDARGHQVLRKKLNRNQLLPFLAQISICKIAMESCGGSQWLARKIMEQGHHVQLIAPQHVKAYVTGNKNDFIDAEAICEAASRPRTRSVQVKTVEQQVLSTEHRLRKSLVNRRTAVINQVHGFLLEFGVVFPVGYAALDRLSGLMESRELPTRLISAIERMLEDIRQLTHEIKKLDVEIKQQLTQNDAGQRLQSIPGIGPLIASALVADVGDASIFKSSRDFAASLGLVPRQYSTGGETTLLGISKRGDKYLRSLLMQGAHAVLCRVDKRTDALGVWAKNLLARKHPNKVACALANKMARIVWVLLTKGGTFNSTLLA

SEQ ID NO: 14417 - protein, 340 aa, unidentified
  source 1..340: note = protein_028b3d9
  REGION 6..147: note = RuvC_domain
  SITE 9: note = RuvC_P1
  SITE 52: note = RuvC_P2
  SITE 87: note = RuvC_P3
  SITE 89: note = RuvC_P4
  SITE 92: note = RuvC_P5
  REGION 211..297: note = Tnp_domain
  SITE 219: note = Tnp_P1
  SITE 249: note = Tnp_P2
  SITE 257: note = Tnp_P3
  SITE 258: note = Tnp_P4
  SITE 270: note = Tnp_P5
MKITTIGIDLAKDAFQVHGIDEHGKICVKRSLKRKEMMEFFTRTEPCLIGMESCSGAHYWARRLRDVGHTVKLMAPQFVKPYVKGNKHDAADAEAICEAVRRPTMRFVPIKTVDQQSILAVHRVRQGMIKARTAQANQIRGLLAEFGLIVPVGISHLFLKVPTMLDEAKDTIPGVFRELIHRLLEHMKELTRQVDQLEIQIHQWHRASEVSRNLEQIPGVGPITASALVASIGDARNFKNGRQLAAWLGLVPKQHSSGGKTRLQGISKRGDSYLRTLLVHGARAVVKSAERKPEQHVWLSKLMDRSHNNIATVAQANKNARVIWALMAHEQKFRSDYVRT

SEQ ID NO: 14418 - protein, 323 aa, unidentified
  source 1..323: note = protein_79b30b7
  REGION 8..150: note = RuvC_domain
  SITE 11: note = RuvC_P1
  SITE 52: note = RuvC_P2
  SITE 92: note = RuvC_P3
  SITE 94: note = RuvC_P4
  SITE 97: note = RuvC_P5
  REGION 191..278: note = Tnp_domain
  SITE 199: note = Tnp_P1
  SITE 229: note = Tnp_P2
  SITE 237: note = Tnp_P3
  SITE 238: note = Tnp_P4
  SITE 251: note = Tnp_P5
MTKDRNYFGIDISKDIIDVCDDNGNHYRFKNSLSGFKKLHKLIDVTTVCVMESTGYYHVKLAYYLLEQNHKVSIVNPLKIKRYIQMQLSKIKTDKSDSKMIQAYGVACNPSLWLGQSKTQQNSLQLSRLLSMYVKQTTQLKNKIHGEEVLGFPSKDVVRSLNRQLKNLKKEIEVLEEKLLKNVKSEYQESLTLLKTIPGIGDKTALMLLVFTDGFQRFTSSRELCSYAGITPIIRQSGTSINGRPRMSKMGNPKLRNLLFMCSFNACKYNQGCKALYDRIVAKGKSKKLALIAVCNKLLKQAFSIVKNRMPYDENYKSVLVNN

SEQ ID NO: 14419 - protein, 386 aa, unidentified
  source 1..386: note = protein_24a0886
  REGION 4..159: note = RuvC_domain
  SITE 7: note = RuvC_P1
  SITE 57: note = RuvC_P2
  SITE 98: note = RuvC_P3
  SITE 100: note = RuvC_P4
  SITE 103: note = RuvC_P5
  REGION 262..349: note = Tnp_domain
  SITE 270: note = Tnp_P1
  SITE 300: note = Tnp_P2
  SITE 308: note = Tnp_P3
  SITE 309: note = Tnp_P4
  SITE 322: note = Tnp_P5
MIYVGIDVSKNKHDCFIVHSDGTVIKDVFTIPNSIEGFKYLIDSIPSTDEIVKVGLEATGHYSINIANFLNSNGYPPIILNPLQTSLFRKALTLRKTKTDKVDAKCIASMLSNPDLKPHSNLDYQILELKSLTRHRKRLREQSSKLKVSLNRLVEIMFPEITDCLYSINQKSTMAILYEFPSLKLIADAHLTKFTNILKKNSKGKYSKAKAIDIKNSAKNSIGSDSRALSFELKQTIRLINDIEEELILLDNEIKSIMENVQSPILTIPGISYNLGSIILSEIGDIHRFSSSSKLVAFAGLDPSTYQSGNFRASNVSMVKRGSPYLRWALLQAARLISMRDNNFKNYYQKKRSEGKCHNVAITHVAKKLIRVLHYLLINDLEFVPQ

SEQ ID NO: 14420 - protein, 319 aa, unidentified
  source 1..319: note = protein_f6cb70c
  REGION 10..154: note = RuvC_domain
  SITE 13: note = RuvC_P1
  SITE 56: note = RuvC_P2
  SITE 96: note = RuvC_P3
  SITE 98: note = RuvC_P4
  SITE 101: note = RuvC_P5
  REGION 196..280: note = Tnp_domain
  SITE 204: note = Tnp_P1
  SITE 233: note = Tnp_P2
  SITE 241: note = Tnp_P3
  SITE 242: note = Tnp_P4
  SITE 253: note = Tnp_P5
MDNLSHGRVIGIDVSRDWLDVHCLPDGHCCRVPNTPAGHAAVADLAQDRDAVVCFESTGGQEWQLWALLETEGVAARQVPPAQVKAFAQSRGTRAKTDRIDAALIARFFAFRPEAGRSLPTEKLRFLRALTSKRAQLVEMRKRLLAQIRAHQKLGTAAMFEDIDTEMKQRIDSLIKELEDRITQAIASDDRLSETAVVLRSIPGIGPVVSAMLIAEMPEIGTITGEEAAALTGLAPVAHDSGTLRGKRAIAGGRRALRHVMFQAALVAAHHNPSLKSFADRLRKAGKPHKVVITAVARKLVIVANALCKSRQKWTAATA

SEQ ID NO: 14421 - protein, 349 aa, unidentified
  source 1..349: note = protein_32affc0
  REGION 12..152: note = RuvC_domain
  SITE 15: note = RuvC_P1
  SITE 58: note = RuvC_P2
  SITE 93: note = RuvC_P3
  SITE 95: note = RuvC_P4
  SITE 98: note = RuvC_P5
  REGION 217..302: note = Tnp_domain
  SITE 225: note = Tnp_P1
  SITE 255: note = Tnp_P2
  SITE 263: note = Tnp_P3
  SITE 264: note = Tnp_P4
  SITE 276: note = Tnp_P5
MAHRKPTNAAVYGIDLGKNIFHIAGADADGAIIGNWKLRRDTILQFFRVAAPALIGMEACPGSQWLARHLQAFGHRVRIIPAQFVKPYVKSNKNDIIDAAAIAEAVTRPTMRFVEIKTAAQAELQALHRIRDRMVASRTRLVCQMRAMCIEFGVAIHQGIGKFKADMPRVLVNEENDLTPMMRRLLADLFDDLRRLEERIAAVTREIEANAAQDERSRRLMTVPGIGPLAATAILASAGDGRQFRSARDMAAWLGLVPRQHSTGGKSTLLGISRRGNHYLRRLLIHGARSCVMHLDRSRDRLGAWIDRLQKRMHVNKVTVALAAKVARVAWVILNRPGAIYERREPVTA

SEQ ID NO: 14422 - protein, 344 aa, unidentified
  source 1..344: note = protein_85b3cf0
  REGION 6..149: note = RuvC_domain
  SITE 9: note = RuvC_P1
  SITE 53: note = RuvC_P2
  SITE 88: note = RuvC_P3
  SITE 90: note = RuvC_P4
  SITE 93: note = RuvC_P5
  REGION 212..298: note = Tnp_domain
  SITE 220: note = Tnp_P1
  SITE 250: note = Tnp_P2
  SITE 258: note = Tnp_P3
  SITE 259: note = Tnp_P4
  SITE 271: note = Tnp_P5
MNIKVVGIDLAKNVFQICVLGEDNSVIKNRKVFRDKLLHEVRQFPPNTLIAMEACFSSNYWGETIQNMGYQVKLLPAQHVKPMARRQKNDANDALAICEAAFRPNIHAVPIKTQQQRDIKALRTVRNTLVTRRTATVNQVRALAAEYGVIFPKGLKALQQELPAALEDADNGLSMVIRSLLQGLYDDIKIISRDIDSLTDELTQLAKLHPRYQALLKIPGFGPIVSASVLSELGTGEQFTNGRQFSAWCGLVPRQNSSGGKSTLMGMTKNGNRELRTLLIHGARAVLRFAAKRQDAMGRWLNGLVARRGKVKAIVALANKLGRIAWRIITGDEEFQVSRAFKTA

SEQ ID NO: 14423 - protein, 339 aa, unidentified
  source 1..339: note = protein_60de799
  REGION 6..147: note = RuvC_domain
  SITE 9: note = RuvC_P1
  SITE 52: note = RuvC_P2
  SITE 87: note = RuvC_P3
  SITE 89: note = RuvC_P4
  SITE 92: note = RuvC_P5
  REGION 210..297: note = Tnp_domain
  SITE 218: note = Tnp_P1
  SITE 248: note = Tnp_P2
  SITE 256: note = Tnp_P3
  SITE 257: note = Tnp_P4
  SITE 269: note = Tnp_P5
MKYTPVGVDIAKHLIQVHFINQHTGEVVDKQIRRQDFLTFFSNRESCLIGMEACGGSQHWARELKKQGHEVRLLQGRFVKAFVMGNKNDVMDARAIWMAVQQPGKEIAVKTEEQQSVLVLHRSRNQLVKFRTAQINSLHGTLLEFGETIHKGRAAMDREFPAALERMKTKLPPYLITVLEDQYNRLSELDSLINGLEKQINSVARQNETCQRLMEIPGIGPLIATAAVATMGEVSSFKSGREFAAYVGLVPKQTGSGGKVRLLGISKRGDTYLRTLFIHGARAAALLSKEPVPWITELKKRRPTSVAIVAMANKLARTVWAIAAHGHKYNKDHISIRPY

SEQ ID NO: 14424 - protein, 364 aa, unidentified
  source 1..364: note = protein_d5de197
  REGION 11..164: note = RuvC_domain
  SITE 14: note = RuvC_P1
  SITE 62: note = RuvC_P2
  SITE 103: note = RuvC_P3
  SITE 105: note = RuvC_P4
  SITE 108: note = RuvC_P5
  REGION 226..311: note = Tnp_domain
  SITE 234: note = Tnp_P1
  SITE 264: note = Tnp_P2
  SITE 272: note = Tnp_P3
  SITE 273: note = Tnp_P4
  SITE 284: note = Tnp_P5
MPAILKTQMVIAIDPHKASWTAAAVDASSRPVAAIRVPVSRDGYRALRRFARQWPDSTWAIEGASGLGAPLTAWLRTDGIDVVDIPAKLAARVRTLSTGHGRKNDDADAVSVGIAALSARSLTSVVVDGTVIALRAIVDHRDDLVKTRTQTVNRLHVVLANLIPGGAKRDLTAERAVELLRKVRPRDAAGKTLRSLAADLVTEVRHLDRRITKAAADIKTAVSASGTTLTELCGIGELTAAKILARVGTIDRFCSAAAFASYNGTAPIDVSSGDVIRHRLSRAGDRQLNCCLHIMALTQIRQDTPSKAYYLRKRTGGKSHKEAIRCLKRRLSDIVYRQLLRDATRRKAGPGGQSGAALISSAAS

SEQ ID NO: 14425 - protein, 338 aa, unidentified
  source 1..338: note = protein_b55b17b
  REGION 6..148: note = RuvC_domain
  SITE 9: note = RuvC_P1
  SITE 52: note = RuvC_P2
  SITE 87: note = RuvC_P3
  SITE 89: note = RuvC_P4
  SITE 92: note = RuvC_P5
  REGION 211..298: note = Tnp_domain
  SITE 219: note = Tnp_P1
  SITE 249: note = Tnp_P2
  SITE 257: note = Tnp_P3
  SITE 258: note = Tnp_P4
  SITE 270: note = Tnp_P5
MHTTTLGIDLAKHVFQLHGVDARGRAVLSRRVKRQQLLEAVANLPACVIGMEACGSAHHWGRAFEQLGHTVKLMSPKYVRPYVKTNKNDRRDAEAICEAVGRPTMRFVSIKTVEQADMQALHRTRSLFVKHRTAVINQIRGLLAEYGLVIAQSPEKVRPAVVRFLDDAGSGLTACARDTFSELYEQLKDLDSRIERVTHRVERVYRTHPVCRKLAAVPGIGPLTATALLATVGRPQAFQNGRHLAAWLGLVPRQYSSGGKEILGGISKRGNRYVRTLLIHGARAVVQRATRRTDTQGQWLCTLMRRKGTNVAAVALANKNARVIWAMLAHDEEYRQPA

SEQ ID NO: 14426 - protein, 305 aa, unidentified
  source 1..305: note = protein_5275aff
  REGION 1..76: note = RuvC_domain
  SITE 7: note = RuvC_P3
  SITE 9: note = RuvC_P4
  SITE 12: note = RuvC_P5
  REGION 176..261: note = Tnp_domain
  SITE 184: note = Tnp_P1
  SITE 214: note = Tnp_P2
  SITE 222: note = Tnp_P3
  SITE 223: note = Tnp_P4
  SITE 234: note = Tnp_P5
MFPGAAKTDPIDTRKILELFHLKDHLPLAKDALQKVVSAPLVNDKLKRLSRRRRQLVNEKIRVANRLQSDMQAVCPELLAITSNVSNLKFLRFLTCRDDLTQLARLRRTTLLKIPSVGQKYACIIQEWQRKANFSAEVEYVGPMIIQDARRILELRKQIHALDEVMAELADQSELACRIGSIQGFGKTCVAELAGEVGTTERFAGERSLSLYVGMSPLSRDSGQHHGSKCPRQVNHRAKAAMMTAVARHINCVPESRAYYEKKRAEGKSHNQAVRALGRHLVRVIWSMLKNERDYELREVIPSVT

SEQ ID NO: 14427 - protein, 344 aa, unidentified
  source 1..344: note = protein_a2a2a6a
  REGION 6..147: note = RuvC_domain
  SITE 9: note = RuvC_P1
  SITE 52: note = RuvC_P2
  SITE 87: note = RuvC_P3
  SITE 89: note = RuvC_P4
  SITE 92: note = RuvC_P5
  REGION 211..296: note = Tnp_domain
  SITE 219: note = Tnp_P1
  SITE 249: note = Tnp_P2
  SITE 257: note = Tnp_P3
  SITE 258: note = Tnp_P4
  SITE 270: note = Tnp_P5
MQIRSVGIDLGKTTFHLVALGAAGKVLAKKKFTQKQLLAFTANMQTSLIGLEACSGAHFLGRALRNQGHDVRLIAAQFVKPFVKSNKNDFVDAEAIAEAVERKNMRFVPIKTDDQLDLQAMHRIRDRLVSRRTAVINQIRAFLLERGMVFAQKPAKLKAAMADVLENAENTLTPMMRNMIGILWDEWKTVEQQIEELTEKLEQIAASDAGCCRIRQIPGIGPIVATAIVAAIGNGSAFRKGRDFAAWLGLVPRQYSTGGKAKLLGISKRGNTYLRKILIHGARAAAMRIKRDRFAIGRWMNALESRAPRNVLVVAMANKLARIAWAVLSTGEDYRPGGTASVAA

SEQ ID NO: 14428 - protein, 405 aa, unidentified
  source 1..405: note = protein_5446ebd
  REGION 10..162: note = RuvC_domain
  SITE 13: note = RuvC_P1
  SITE 61: note = RuvC_P2
  SITE 99: note = RuvC_P3
  SITE 101: note = RuvC_P4
  SITE 104: note = RuvC_P5
  REGION 269..355: note = Tnp_domain
  SITE 277: note = Tnp_P1
  SITE 308: note = Tnp_P2
  SITE 316: note = Tnp_P3
  SITE 317: note = Tnp_P4
MNAATPARLAGLDWASRLHVVCVLDPNGQVRARFQVPHTGKDLRGLTRRLAKLQVGRVAIERPDGPVVQTLLDAGFQVVVIPSRQVKHLRGRYGSAGNKDDRFDAYLLADVLRTDGHRLHPLRPDSPETAGLRAVSRARKQLVDHRVALANELRANLEIAFPGAACLFAEVDSPIALTFLGRFPSAERAAWLTQARLGGFLRRVGYCGRATAAQLYQRLLDAPDGLAGAEADARAAVTGSLVAALQAVRAQIDQLDGEIIERLGAHADGHIFTSLPRSGRVRAAALLAELGDCRQRFPDSPSLECLAGAAPSTRQSGKHKTVTFRFACNKKLRQAVMDFAGDSRHANPWAAHLYNQARARGHRHPHAVRILARAWLRVIWRCWQDGVAYDPAHHGAYQRLIAQGG

SEQ ID NO: 14429 - protein, 315 aa, unidentified
  source 1..315: note = protein_9f0b611
  REGION 11..154: note = RuvC_domain
  SITE 14: note = RuvC_P1
  SITE 58: note = RuvC_P2
  SITE 98: note = RuvC_P3
  SITE 100: note = RuvC_P4
  SITE 103: note = RuvC_P5
  REGION 193..277: note = Tnp_domain
  SITE 201: note = Tnp_P1
  SITE 230: note = Tnp_P2
  SITE 238: note = Tnp_P3
  SITE 239: note = Tnp_P4
  SITE 250: note = Tnp_P5
MERRERSTKIGGIDVGKRLLDAAVHGCAEQFQAANDAGGWEELAVWLKERGMGRVGLEATAGYERGVRARLEAAGLEVVVHQPLEVRLFARLKRRRAKTDRLDAALIAAATAQVDTVRAAQDPRLAELAERMTAYEQITDQTAQLRTFMEHVTLPDLIASLGEQIESLSRLKTRLALEIFTRIKAFEDLAARWRLLQSLPGAGPIVAASLVIRMPELGALKRGQPAALLGVAPFDRQSGQWRGNSVIGGGRSRPRRMLYLAAIAAKRFDPGFKAFANRLLAKGKPPKLAIVAVMRKLIEAANLVLARQQPWVRQA

SEQ ID NO: 14430 - protein, 341 aa, unidentified
  source 1..341: note = protein_d977bd8
  REGION 1..96: note = RuvC_domain
  SITE 33: note = RuvC_P3
  SITE 35: note = RuvC_P4
  SITE 38: note = RuvC_P5
  REGION 206..292: note = Tnp_domain
  SITE 214: note = Tnp_P1
  SITE 245: note = Tnp_P2
  SITE 253: note = Tnp_P3
  SITE 254: note = Tnp_P4
MGTALIAAGYQVYGVNPKQAARHRELLSLSGAKSDKADAHTLADMVRTRRHQLRQVAADSDIAEAVKVVARAHQTLIWERTRHMLRLRAALRDYFPAALAAYQVLTLTGADALELLAKAPTPAAAAKLTIGQISAVLNKARRRDIPAKAAAIQRALRTEHLGQADIVAGAYAATVRATVAVLQTLNTEIRTLEGQVEAHFGQHPDAEVYLSQPGIGVILGARVLAEFGDAAGRYASAKSRKNYAGTAPITRQSGKSKTVHARFIHNDRLVDALHMQASAAVLHDPGSRAYYDELRARDIGHNAALRQVGNRLVGILHGCLKTTTVYDKNTAWSHRELTAAA

SEQ ID NO: 14431 - protein, 336 aa, unidentified
  source 1..336: note = protein_0be06fe
  REGION 6..147: note = RuvC_domain
  SITE 9: note = RuvC_P1
  SITE 52: note = RuvC_P2
  SITE 87: note = RuvC_P3
  SITE 89: note = RuvC_P4
  SITE 92: note = RuvC_P5
  REGION 209..296: note = Tnp_domain
  SITE 217: note = Tnp_P1
  SITE 247: note = Tnp_P2
  SITE 255: note = Tnp_P3
  SITE 256: note = Tnp_P4
  SITE 268: note = Tnp_P5
MKLATIGLDLAKHVFQVHGVDEVGQVVVKRRLRRAQVVSYFASLPPCLVGMEACATAHFWARELRALGHEVRLMPPQYVKAYVKRGKNDAADAAAICEAVTRPSMRFVPVKTEEQQSALLMHRARELLIRQRTQLINAVRGHLAEFGLVVARGPWNVPRLLASMDEDQRVPEATRQVIQLLAAQLDDVGRRIAEVDARIVAWHKTNPISRRLATIPGIGPLTATAIAATVPDPDVFRGGREFAAWLGLVPRQKSTGGKPRLGRISRLGDKYIRQLLIVGAQTVLLRSKVARADAWIQGLLARRPRLVVAIALANKMARIVWAVMAKGQSYRQAAPA

SEQ ID NO: 14432 - protein, 254 aa, unidentified
  source 1..254: note = protein_d8032d5
  REGION 11..95: note = RuvC_domain
  SITE 14: note = RuvC_P1
  SITE 62: note = RuvC_P2
  REGION 128..213: note = Tnp_domain
  SITE 134: note = Tnp_P1
  SITE 165: note = Tnp_P2
  SITE 173: note = Tnp_P3
  SITE 174: note = Tnp_P4
  SITE 186: note = Tnp_P5
MMTPDDIDVWAGLDVGKSAHHAHALDRDGATLYDKPVRQDEKAIRSMLEHLSRRGRVLLVVDQPNTIGSLPLTVARDMGIAVAYLPGTGMAETIIPSIAHDIKAIKDRRREVGRQVGKLLEDHPLLTVPASMPGIGVRTASNILLGIGGDIANFKSAAHLAAYAGIAPVTGQSGTSIKGERPARGGNKRLKNALWQSSFVASTKHPPSIAYYKRKREQGKHHNAAIICLARRRCDVIYSMLKNGALYQEPALAS

SEQ ID NO: 14433 - protein, 327 aa, unidentified
  source 1..327: note = protein_f97b2d2
  REGION 2..69: note = RuvC_domain
  SITE 9: note = RuvC_P3
  SITE 11: note = RuvC_P4
  SITE 14: note = RuvC_P5
  REGION 132..217: note = Tnp_domain
  SITE 140: note = Tnp_P1
  SITE 170: note = Tnp_P2
  SITE 178: note = Tnp_P3
  SITE 179: note = Tnp_P4
  SITE 190: note = Tnp_P5
MFSTGQGRKTDATDAHSVAVVALRTPGLRPVQVDDLTVALRLLVDRRDELGAARTLTVNRLHRLLVELIAGGANKFLSATQAKALLATVRPRDVVGKTRRRLAAELVVELDGIDKRIKVANKELTELVGATGSTLLELHGIGPSGAARLLGDIGDVSRFPTRGHFASWNGTAPIDASSGEQNRHRLSRAGNRRINRVLHIMAIVQLRNDTEGRAYYRRKIAAGKTGMEAIRALKRRLSDIVYRRLVDDQKRLRQDVKVTGPGGHSGAATGSSAADSNPNVDASEKSLPGPASTDPTPATAEPPHRSPARSRRPVNAPTRSRRQAQSA

SEQ ID NO: 14434 - protein, 344 aa, unidentified
  source 1..344: note = protein_611d77d
  REGION 6..147: note = RuvC_domain
  SITE 9: note = RuvC_P1
  SITE 52: note = RuvC_P2
  SITE 87: note = RuvC_P3
  SITE 89: note = RuvC_P4
  SITE 92: note = RuvC_P5
  REGION 212..296: note = Tnp_domain
  SITE 220: note = Tnp_P1
  SITE 250: note = Tnp_P2
  SITE 258: note = Tnp_P3
  SITE 259: note = Tnp_P4
  SITE 271: note = Tnp_P5
MKIAVLGIDLGKNVCSVVGLDPSGAVVLRRRVRRDTLIDLVAKLPTCIVGMEACCGAHHLGRLFAAQGHDIRLMSPEYVRPYVKAQKNDDRDAEGIAEAATRPTMRFVEMKTEDQLDMQTLHRSRERLVGERTALINQLRAILLDRGIVVPQGKRKLDQYLVILMNEQDGERLSARIRMLVADIRAQWQELDRRIEEFDAEFVRWAKENEDARRLVTIPGVGVTISTALIAAVGKAETFEHGRDLAAWLGLVPRQSTTGGKPRLMGISKRGNKYLRKLLIHGARAALPYVAEKDTALGRWAKSLLSRVHQNVAVVAFANKLARICWAVLRSGQRFAAKGAPLVV

SEQ ID NO: 14435 - protein, 295 aa, unidentified
  source 1..295: note = protein_5c919f5
  REGION 6..147: note = RuvC_domain
  SITE 9: note = RuvC_P1
  SITE 52: note = RuvC_P2
  SITE 87: note = RuvC_P3
  SITE 89: note = RuvC_P4
  SITE 92: note = RuvC_P5
  REGION 211..281: note = Tnp_domain
  SITE 219: note = Tnp_P1
  SITE 249: note = Tnp_P2
  SITE 257: note = Tnp_P3
  SITE 258: note = Tnp_P4
  SITE 270: note = Tnp_P5
MELHTIGIDLGKTVFHLVGLNLRDEVVVRKKFSRRQLLQFTANLQVDLIGMEACGGAHFLGRALREQGHEVRLMPAQYVKPYVKTNKNDYIDAEAIAEAVARPTMRFVPIKTDDQLDMQSLHRVRERWVMRRTATVNQIRGLLLERGITLQKGRSHVNTALPGILEDADSKLSGSLRVLLAQLKLELDQTTMRIDEADAVLNQTARENEACQRLVTIPGIGPVTATALIAAIGNGAAFRKGREFSAWMGVVPREHSTGGKQNCLGSASMGTPTCKVCLSKVPVPYCNIVRSKQPA

SEQ ID NO: 14436 - protein, 341 aa, unidentified
  source 1..341: note = protein_f123640
  REGION 6..147: note = RuvC_domain
  SITE 9: note = RuvC_P1
  SITE 52: note = RuvC_P2
  SITE 87: note = RuvC_P3
  SITE 89: note = RuvC_P4
  SITE 92: note = RuvC_P5
  REGION 211..297: note = Tnp_domain
  SITE 219: note = Tnp_P1
  SITE 249: note = Tnp_P2
  SITE 257: note = Tnp_P3
  SITE 258: note = Tnp_P4
  SITE 270: note = Tnp_P5
MTIVMIGIDLGKNSCSLATVDESGAVVQRRRMRPGSIPAFAQRHAPCTIAMEACCGAHHLGRLLAAQGHTIKLMAPEYVRPYVKAQKNDERDAEAIAEAASRPSMRFVELKSQEQLDVQSLHRVRSRLVRCRTMLINQMRALLLERGITVAQGRRNFEKAVDAMIIDDTSLLAARMRDLMIDMRAEWVALDRRIELLDREFVELARTDDLTRRLMTIPGIGALNATALVAAVGDASGFSRGRDLGAWLGLVPRQYTTGGKPRLLGISKRGNKYLRTLLIHGARATMASLEKSKTRLGAWLRALLARCHYNTVVVALANKLARIAWVTLRRGTDFANQPATA

SEQ ID NO: 14437 - protein, 400 aa, unidentified
  source 1..400: note = protein_98ed697
  REGION 10..164: note = RuvC_domain
  SITE 13: note = RuvC_P1
  SITE 62: note = RuvC_P2
  SITE 102: note = RuvC_P3
  SITE 104: note = RuvC_P4
  SITE 107: note = RuvC_P5
  REGION 269..356: note = Tnp_domain
  SITE 277: note = Tnp_P1
  SITE 308: note = Tnp_P2
  SITE 316: note = Tnp_P3
  SITE 317: note = Tnp_P4
  SITE 329: note = Tnp_P5
MERHVTAIWAGIDAGKTHHHCVVIDTTGKRLLSRRVAHDETELLKLLGDVLALGEVTAWGIDLADGGAGLLIAVLLNHGQHLLYIPGRTVNRASEGYRGDGKTDAKDAAIIADQARVRRDLMPLRPGDELVTELKILTGRRRDLADDRTRAINRLRGHLTSIFPGLERELDLGNTGPLVLLTGYQTPAAIRRTGLRRLTTWLRNRKVRGAGQLAATAVQAAEGQHTAVSGETVTAQVVHTLAREVMTLNENIAETDKLIEGRFRQHRHAEVISSLPGIGPLLGAEFLAATGGDMDIFETADRLAGFAGVAPASRDSGRISGNLHRPKRYSRRLQRVFYTSALISIRCCGESRRFYDRKRAEGKRHVQAVLALARRRVNVLWALLRDGRCYEPIPPVTQTA

SEQ ID NO: 14438 - protein, 350 aa, unidentified
  source 1..350: note = protein_53654b4
  REGION 14..156: note = RuvC_domain
  SITE 17: note = RuvC_P1
  SITE 60: note = RuvC_P2
  SITE 95: note = RuvC_P3
  SITE 97: note = RuvC_P4
  SITE 100: note = RuvC_P5
  REGION 218..306: note = Tnp_domain
  SITE 226: note = Tnp_P1
  SITE 258: note = Tnp_P2
  SITE 266: note = Tnp_P3
  SITE 267: note = Tnp_P4
  SITE 279: note = Tnp_P5
MNKLSRDLSAVTVVGLDLAKHVFQVCCVDGQGRIVVNRALKRREVLSFFRGLPACLVGIEACGSAHHWARMLIGVGHEVKLMPPAYVKAYVRRQKNDAMDAAAIAEAVTRPTMRFVPVRSIDNQAHLMHHRVREMLVQQRTQIFNALRSHLGEVGVIAAQGARNVRALANLLSSGHEDIPVPVAQALQPLVRQIEKLDEEIAGLDKILALAAKADADACRLMTIPGIGAHTAHAVTATLGSDGIAQFCGPREFAAFLGLTPRQNSSGGKTRLGKISKMGNQYIRKLLVVGAHAVLCHRDKHDDALRIWVRRLIANKPFKLVAVALANKMARLIYALLKGQGHYIKVMQPA

SEQ ID NO: 14439 - protein, 462 aa, unidentified
  source 1..462: note = protein_7aa8d1d
  REGION 73..228: note = RuvC_domain
  SITE 76: note = RuvC_P1
  SITE 125: note = RuvC_P2
  SITE 165: note = RuvC_P3
  SITE 167: note = RuvC_P4
  SITE 170: note = RuvC_P5
  REGION 335..420: note = Tnp_domain
  SITE 343: note = Tnp_P1
  SITE 373: note = Tnp_P2
  SITE 381: note = Tnp_P3
  SITE 382: note = Tnp_P4
  SITE 394: note = Tnp_P5
MTTSPCRVHGLGGGVTSSGGTDRPLIRGMTTDFFAGREALRNVDVAISAVAGPDEYDRRTPHVIDTGDIDVYLGLDVGKGEHHATALTPAGKKTFDRRLPNSEPKLREVFAKLQAKHGTVLVIVDQVASIGALPLTVARELGCHVAYLPGLTMRRIADLYPGEAKTDAKDAFIIADAARAMPHTLRSVDLDDETIAELQMLVGFDDDLAAEATRLSNRLRGLFTQIHPHLERVLGPRMQHPAVLRLLDQFGSPAQIRKAGRRRLVTLIRPKAPRMAERLIDDVFSALDEQTVVVPGTDAAALIVPSLASSLQAVLDQRKLLAHRIEELLEAHPLSKVLMSMPGIGIRTGARILIDVGDGTAFPSAAHLAAYAGLAPATRTSGSSIRGEQPSRRGNKQLKRAFFLSAFAALADPASRTYYDKKIAQGKHHTQAILCLARRRADVLFAMLRDGTFYQPPTPTTP

SEQ ID NO: 14440 - protein, 338 aa, unidentified
  source 1..338: note = protein_7b847cd
  REGION 6..146: note = RuvC_domain
  SITE 9: note = RuvC_P1
  SITE 51: note = RuvC_P2
  SITE 86: note = RuvC_P3
  SITE 88: note = RuvC_P4
  SITE 91: note = RuvC_P5
  REGION 210..303: note = Tnp_domain
  SITE 218: note = Tnp_P1
  SITE 248: note = Tnp_P2
  SITE 256: note = Tnp_P3
  SITE 257: note = Tnp_P4
  SITE 269: note = Tnp_P5
MNDNVVGLDIAKNIFHCYSLNAEGKAIRKKLKRAELLAFFANYPASLIGIEACGGAHHWGRELTKLGHQVVLLNARYVKNFVVGNKNDFNDAQAIFDAVTRPNKRVVAIKTLEQQDVQLVHNIRQDLVDKRTALVNQLRGLLSERGIVIAQGIDRVRKELPLILEEAENGLTPLSREVLAEQYGQLKALDQAIKDQDRRISRLCNSNALSRRFLEVPGIGPITATIVAADLGHGKGYASSRDYAASLGVVPRQHSSGDKAVYLGISKRGNRYIRTKLIHGARSVVKYCSGKTDPLNRWLQALVERRGFNKAVVALANKNARILWAMATKEQAYEPKAA

SEQ ID NO: 14441 - protein, 411 aa, unidentified
  source 1..411: note = protein_92cb11f
  REGION 16..170: note = RuvC_domain
  SITE 19: note = RuvC_P1
  SITE 67: note = RuvC_P2
  SITE 107: note = RuvC_P3
  SITE 109: note = RuvC_P4
  SITE 112: note = RuvC_P5
  REGION 278..362: note = Tnp_domain
  SITE 285: note = Tnp_P1
  SITE 315: note = Tnp_P2
  SITE 323: note = Tnp_P3
  SITE 324: note = Tnp_P4
  SITE 336: note = Tnp_P5
MSEPGEIQAVPFAVFCGLDVGKSEHHACALDAAGKRVHDKALPNDETALRAVFTTLAGHGRVLVVVDQPASIGALAVAVARSMAIDVAYLPGLAMRRIADLHPGQGKTDARDAHVIAEAARSMPHTLRRVGTDDETLAELTVLAGYDDDLAGQSTRLTNRLRDALLHIHPALERLLGPRLDRGGVQDLLAAAPTPQALRELGEDGIAELMSPRSPRLARTLPAQILAALDTQTLVVAGTAAFARVIAGVTAQLRDVHTERNDLAVELEARLEAHPLGLVLTSMPGLGVRTAIKILTIVGDGSAFPTAGHLAAYAGLAPVTRRSGTSIKGETRSQRGNHALKSALFLSAFASLADPVSRAYYDRKRAQGKRHNAALICLARRRTDVLFAMLRDRTPYSPPTVTEPDPALAAA

SEQ ID NO: 14442 - protein, 341 aa, unidentified
  source 1..341: note = protein_6e7ec61
  REGION 7..149: note = RuvC_domain
  SITE 10: note = RuvC_P1
  SITE 53: note = RuvC_P2
  SITE 88: note = RuvC_P3
  SITE 90: note = RuvC_P4
  SITE 93: note = RuvC_P5
  REGION 212..298: note = Tnp_domain
  SITE 220: note = Tnp_P1
  SITE 250: note = Tnp_P2
  SITE 258: note = Tnp_P3
  SITE 259: note = Tnp_P4
  SITE 271: note = Tnp_P5
MEKVTTVGLDLAKNVFQVHGVDATGRVVLRRKLRRAEVLDFFAAMEPATIGMEACGGAHFWARELGRQGHEVRLMPPAYVRPYVKRGKTDAADAEAICEAVTRPSMRFVPAKTEAQQATAVELKTRELLVRQRTQAVNALRAHLSEYGIIAAQGAAKLADLVAVVRDAEDRRLPPMAREVLLELVEQVEDLEGRIERLDRRMIRRVREDETARRLATIPGIGAITAVALQGLVPDVRGFRSARHFAAWLGLTPRPHSSGGKERLGHISKQGNPMLRRLLVLGATAQLRHAKLAAEEASWVAQLLARRPFKVVAVALANRMARIAWALLAKGGTYRTPATAT

SEQ ID NO: 14443 - protein, 340 aa, unidentified
  source 1..340: note = protein_7b0641f
  REGION 5..158: note = RuvC_domain
  SITE 8: note = RuvC_P1
  SITE 56: note = RuvC_P2
  SITE 97: note = RuvC_P3
  SITE 99: note = RuvC_P4
  SITE 102: note = RuvC_P5
  REGION 220..306: note = Tnp_domain
  SITE 228: note = Tnp_P1
  SITE 258: note = Tnp_P2
  SITE 266: note = Tnp_P3
  SITE 267: note = Tnp_P4
  SITE 278: note = Tnp_P5
MDVVIGIDPHKASHTAVALADTEVELARLQLSSTRSQVDRLLAWAKPFPQRRWAIEGAEGLGFLLAQQLVAADQVVVDVPATLAARTRLLGNGRTNKNDPNDALSVAVTALRHRGLRTVTTAGYSELLRLLAKRHIDLSNQRTRLVARLHALATELSPGGIAKKLNSTDAAKFLAAVTPTDAVAQLRCASSAELADDIARIEAQTKQSERRLRDAVAASGSTITDIYGIGPVIAAMLIGNTGDIGRFANRDHFAAYNGTAPVEFSSGGRIVHRVSERGNRTLNHSLHLAAMCQLRQRHSEGRAYFDRRVAEGKTNKEAIRALKRQISNNVYRHLVADIAH

SEQ ID NO: 14444 - protein, 416 aa, unidentified
  source 1..416: note = protein_0c55618
  REGION 12..167: note = RuvC_domain
  SITE 15: note = RuvC_P1
  SITE 64: note = RuvC_P2
  SITE 104: note = RuvC_P3
  SITE 106: note = RuvC_P4
  SITE 109: note = RuvC_P5
  REGION 275..361: note = Tnp_domain
  SITE 283: note = Tnp_P1
  SITE 314: note = Tnp_P2
  SITE 322: note = Tnp_P3
  SITE 323: note = Tnp_P4
MSLALPEALFFVGIDWAAAEHAVCVQDQTGKIISEFVIEHSTDGIARLVRRLGKYGPAGQVPIAIERPNGRLVDLLLEAGHPVVPVKPNAIKAWRESEVLSGAKNDAGDAAVIAEYLRLRRHRLRVATPYSDETKALRTVVRTRDDLVDMRVAATNQLSALLDAFWPGAEALFADVESPISLEFLTRYPTPATAARLGVKRMAAFLVKHGYSGRRSPAELLERLRSAPAGTVADALSEGLRDAVLALVATLKALNAAIKDLDRSSAAHLGEHPDGEIFTSLPRSGQINAAQMLAEWGDCRPAYASADSVAALAGCTPVTKQSGKHRAVHFRWACNKRFRKAMTTFADNSRHASPWAQKIYRDARAAGKDHPHAVRILARAWIRVIYRCWLDGTPYDPQQHGAAASLTEQTSERIAA

SEQ ID NO: 14445 - protein, 332 aa, unidentified
  source 1..332: note = protein_3911a92
  REGION 1..104: note = RuvC_domain
  SITE 43: note = RuvC_P3
  SITE 45: note = RuvC_P4
  SITE 48: note = RuvC_P5
  REGION 166..251: note = Tnp_domain
  SITE 174: note = Tnp_P1
  SITE 204: note = Tnp_P2
  SITE 212: note = Tnp_P3
  SITE 213: note = Tnp_P4
  SITE 224: note = Tnp_P5
MEGCNGIGRHIAQRLVADGETVVDVPAKLSARARVFDTGQGRKTDPVDAHSVAVAALCTKGLRQVTIDDVAVALRLLVDRRDGLGHAHTGLLNRIHKLLLELLPGGAKQFLSAPQARTLLKTIRPRELVGATRRRLASELITELAQVDKKIKAANKELTELVETTGSSLQDLNGIGPSGAARLIGDIADISRFASRGHFASWNGTAPLDASSGDHKRHRLSRAGNGRINRALHIMAIVQLRQDTEGRAYYRRELAAGKTPIEAMRCLKRRLSDVVYKQMINDARQTRTGPGGHAGATLQSSAADPIPMVNTSEQSLPGPADSQPRTPLLAVS

SEQ ID NO: 14446 - protein, 278 aa, unidentified
  source 1..278: note = protein_9bec00c
  REGION 6..155: note = RuvC_domain
  SITE 9: note = RuvC_P1
  SITE 53: note = RuvC_P2
  SITE 93: note = RuvC_P3
  SITE 95: note = RuvC_P4
  SITE 98: note = RuvC_P5
  REGION 189..273: note = Tnp_domain
  SITE 197: note = Tnp_P1
  SITE 226: note = Tnp_P2
  SITE 234: note = Tnp_P3
  SITE 235: note = Tnp_P4
  SITE 246: note = Tnp_P5
MTDITIGADISKDHIDLHSLPDGRSLTVANDRKGFAAIVRWIGTKGVERIVYEPTGACHKAFERFMMVQRLRLSKVNPRLARRFAEATGRLAKTDRIDAGLLARYGALLAPRILRANTQIHNDLKELHVARLALIKDRTAAKNRAKNVSNLLLKRQNVDRLRQIERQMKAVDEAIMSLIGADVSLKARFDILVSIPGVSQITAFTLLIEMPELGELDEKAVAALSGLAPMSRQSGRWTGRAFIAGGRAIVRHALYMPALVACRFNPQLKTKYEVRRTH

SEQ ID NO: 14447 - protein, 316 aa, unidentified
  source 1..316: note = protein_e7ae38a
  REGION 8..150: note = RuvC_domain
  SITE 11: note = RuvC_P1
  SITE 55: note = RuvC_P2
  SITE 95: note = RuvC_P3
  SITE 97: note = RuvC_P4
  SITE 100: note = RuvC_P5
  REGION 190..274: note = Tnp_domain
  SITE 198: note = Tnp_P1
  SITE 227: note = Tnp_P2
  SITE 235: note = Tnp_P3
  SITE 236: note = Tnp_P4
  SITE 247: note = Tnp_P5
MPKPLVFVGIDVAQATLEVAVRPTGEAWQVANDETAFSDLIERLREIKPVLIVLEATGGIHLPVVAALAAAKLPVVAVNPRQARDFAKATGKLAKTDRIDAQVLAHFAEAVRPEVRPLPDVATQELAVLVARRRQLMEMRVAEQNRSRGTPARIRAQIREHVEWLNRQINELDHEIGQRIRSSPAWRERDDLYRSTPGVGPVLSATLLADLPELGSVSHKQIAALVGLAPFNQDSGKKRGQRVIWGGRASVRAALYMATLVATRRNPVIRTFYQRLLAMHKPKKLALTACMHKLLTILSAMVRHHTSWSAPVSASA

SEQ ID NO: 14448 - protein, 320 aa, unidentified
  source 1..320: note = protein_44f9b73
  REGION 8..163: note = RuvC_domain
  SITE 11: note = RuvC_P1
  SITE 56: note = RuvC_P2
  SITE 96: note = RuvC_P3
  SITE 98: note = RuvC_P4
  SITE 101: note = RuvC_P5
  REGION 195..279: note = Tnp_domain
  SITE 203: note = Tnp_P1
  SITE 232: note = Tnp_P2
  SITE 240: note = Tnp_P3
  SITE 241: note = Tnp_P4
  SITE 252: note = Tnp_P5
MSAISVVAGIDVAKGHVDVDVVGAQFAPRQFDNEAEGHSAIASTLKALCVGLVVMEATGGYEAALACALQGAGLAVAVVNPSQPRRFAESQGYRAKTDRIDAHVLAEFGQTLVRRPDLARFLRPMDDADQQWLAALVTRRRQLLAMMTSERQRLQITPKKLHPSLEAIIQAIKAQLDDVEAQMVTHVKEHFGRLDAILQSVSGIGPIASATFIAELPELGKLNRRQIASLVGVAPFAKESGKTKGRRRVQGGRFEVRRVLYMATLTAAFRNPVFKAHYDRLKAAGKCSKVAPVACMRKLLTTLNAMVKTNSMWDPQHCQA

SEQ ID NO: 14449 - protein, 315 aa, unidentified
  source 1..315: note = protein_08855f8
  REGION 9..150: note = RuvC_domain
  SITE 12: note = RuvC_P1
  SITE 56: note = RuvC_P2
  SITE 96: note = RuvC_P3
  SITE 98: note = RuvC_P4
  SITE 101: note = RuvC_P5
  REGION 191..276: note = Tnp_domain
  SITE 199: note = Tnp_P1
  SITE 228: note = Tnp_P2
  SITE 236: note = Tnp_P3
  SITE 237: note = Tnp_P4
  SITE 248: note = Tnp_P5
MTQTIITTAGIDTSKAKLDVAVHDRSERWQVANALPGWRALAANLSKAGVTRVGIEATGGYERGVVEYLRKAGFTVLVLQPTQVKAFGRVHLRRAKNDALDAFLIAACTATLDQPKTAPDPRLAQLAGYLTFLEQIEEDIARHKTRLEHIDEPGLRRIVNSDIVRLKARRAAQIRDIAKRLRASDDLAMRLNLVLSIPGIGERTALALLIRMPELGQVSREEAAALAGLAPFDDDSGKHKGLRRIAGGRSRLRRSLFAAALPAAFRWNKALVALYARLTAAGKAHTAALIACARKLLIYANTVVQRGTPWTEKAA

SEQ ID NO: 14450 - protein, 339 aa, unidentified
  source 1..339: note = protein_b847d36
  REGION 6..147: note = RuvC_domain
  SITE 9: note = RuvC_P1
  SITE 52: note = RuvC_P2
  SITE 87: note = RuvC_P3
  SITE 89: note = RuvC_P4
  SITE 92: note = RuvC_P5
  REGION 210..298: note = Tnp_domain
  SITE 218: note = Tnp_P1
  SITE 248: note = Tnp_P2
  SITE 256: note = Tnp_P3
  SITE 257: note = Tnp_P4
  SITE 269: note = Tnp_P5
MKRTTVGVDIAKNVFQLYWVDTDTGEIINKQLKRAVFLEHFANREPCLIGMEACGGAQHWARRLIEMGHDVKLMPAKFVKAFLIGNKNDPADARAIWMATQMPSKAVAVKTEAQQAVLALHRLRQQKIKFRTMQMNSLRGLLAEYGEVMAKSRAALDKAIRGVLARLAERLPAMLIDSLREAWNDLERLDKQIAEIERHLQTWMKEDKACTAIAAIPGVGLLTATATVASMGDAKAFKSGREFAAWLGLVPKQIGTGGKIQLLGISRRGDTYVRTLLIHGARSVLFHAKHAGTWAEQIQKRRPPNVVTVALANKMARTIWAVLAHDRPYKQDHVSTRPA

SEQ ID NO: 14451 - protein, 400 aa, unidentified
  source 1..400: note = protein_2889dbc
  REGION 9..162: note = RuvC_domain
  SITE 12: note = RuvC_P1
  SITE 60: note = RuvC_P2
  SITE 101: note = RuvC_P3
  SITE 103: note = RuvC_P4
  SITE 106: note = RuvC_P5
  REGION 224..309: note = Tnp_domain
  SITE 232: note = Tnp_P1
  SITE 262: note = Tnp_P2
  SITE 270: note = Tnp_P3
  SITE 271: note = Tnp_P4
  SITE 282: note = Tnp_P5
MSKQKSAIIGVDPHKMSVTIEVVDTHERLLGGGRFDTTNAGYAAMRRYVRQWPDRLWAVEGANGAGRPLAQRLLAAGEHVVDVPAKLAARVRLFDTGHNRKTDALDAHSIAVVAVRTDGLRVLVEDGELEALRMLTDRRDELAHQRVQTVNRVQRLLSELLPGQRKRDLSAAQAKAMLATVRPRDIAGKTRRRMAAEEIADLVAVDAKLKRIKAELKAAVLEHGSHLMDIYGIGPAGAARVLADVGDVARFADRNRFASWTGTAPIDASSGEQTRHRLSRAGNRRMNHVLHVAAIVQIRHDTEGRTYYRRKLAAGKTPLEALRCLKRRLSDVVYRQLVADAQPAQPDEADPGGHCGATLQSSAADSHPLIDTSDQPLPGPAQPTLRRPPLGRKTLAPATP

SEQ ID NO: 14452 - protein, 393 aa, unidentified
  source 1..393: note = protein_eac6323
  REGION 11..164: note = RuvC_domain
  SITE 14: note = RuvC_P1
  SITE 62: note = RuvC_P2
  SITE 103: note = RuvC_P3
  SITE 105: note = RuvC_P4
  SITE 108: note = RuvC_P5
  REGION 226..311: note = Tnp_domain
  SITE 234: note = Tnp_P1
  SITE 264: note = Tnp_P2
  SITE 272: note = Tnp_P3
  SITE 273: note = Tnp_P4
  SITE 284: note = Tnp_P5
MEQSPTTSVVIGMDPHKRSVTIEVMAADEAILDRGRFDTDERGFAALLERAGRWPSRVWAVEGCNGIGRHVATRLVAVGEQVLDVPPKLSARVRTFATGQGRKTDATDAHSVALVGTRMAGLRPVVPDAQREILRILVDRRRAIGDEHTVKVNQLHALLLELVPGGAKRDLSAAQARKILTGVRPRDVVGKTRKRVAAELVTDLERLYLRKKAADKELTVLLRESGTTLTQLHGIGPSGAARLIVEVGDITRFPNAGHFASWTGTAPIDASSGDNVRHRLSRGGNRKINRTLHIMAIVQLRNPTEGRAYYDRKVAAGKTPNEAMRCLKRRLSDLVYRALLDDLTHGAATGPGGQRGNDSDSSATGSQPHTGTSDKPLPGPVAVKATTPVQQAS

SEQ ID NO: 14453 - protein, 316 aa, unidentified
  source 1..316: note = protein_3e3df38
  REGION 8..154: note = RuvC_domain
  SITE 11: note = RuvC_P1
  SITE 55: note = RuvC_P2
  SITE 95: note = RuvC_P3
  SITE 97: note = RuvC_P4
  SITE 100: note = RuvC_P5
  REGION 190..274: note = Tnp_domain
  SITE 198: note = Tnp_P1
  SITE 227: note = Tnp_P2
  SITE 235: note = Tnp_P3
  SITE 236: note = Tnp_P4
  SITE 247: note = Tnp_P5
MEISPIFIGIDVSKARLDVAVRPSGESESVSNDEDGIKALVKRLGEIQPALIVLEATGGVERLVARALSSAELPVVVVNPRQVRDFAKATGQLAKTDSIDAGVLARFGEAVRPALRPFPDEVTLELRALIARRRQITEMIVAERNRLSGASKSVRKRIAAHIRWLEAELVRADKDLDQSIRQSPIWRENEDLLRSVPSIGPVVSRTLLAELPELGRLNRKQIAALVGIAPLNRDSGTLRGRRAIWGGRASVRAALYMAALVASRRNAAIRAFYKRLRHAGKAPKVALVACMRKLLTILNSMIKHKTRWSEITLQTT

SEQ ID NO: 14454 - protein, 418 aa, unidentified
  source 1..418: note = protein_c8117d4
  REGION 6..159: note = RuvC_domain
  SITE 9: note = RuvC_P1
  SITE 57: note = RuvC_P2
  SITE 98: note = RuvC_P3
  SITE 100: note = RuvC_P4
  SITE 103: note = RuvC_P5
  REGION 221..307: note = Tnp_domain
  SITE 229: note = Tnp_P1
  SITE 259: note = Tnp_P2
  SITE 267: note = Tnp_P3
  SITE 268: note = Tnp_P4
  SITE 279: note = Tnp_P5
MAEVMIGIDPHKASHTAVAIGLSEQQLGQLQVCACPSQTDQLLAWAAAWPERAWAVEGAAGLGHLLAQQLAAAGERVLDVPPKLAARVRLLQAGDTNKNDPNDAFSVAVAALRSTAKRPVIAEDHAVVLKVWAKRHRDLARARNQACCRLHAVLCDLVPGGIRKEISAGQAARILEQVRPADAVTTARCELAAEFLTDIRRLDAQLRTTNKKLAAAVKASGTSLTGLFGVGPVIAGTVIGDVRQVFRFPSRDHFAAYDGTAPVEVSSGGRKVYRLSLRGNRRLNHAIHMAAITQLRYKHSQGRAYYEKKLAEGKTHKEALRSLKRRISDAIYAALVADARQAAAACSKGPGGQPGNLSVSRAAGSHPAHTSSSDKPLPGLPPPYGPALRQDPPPVSPTERVGTGLGTPRPAEEIRHNH

SEQ ID NO: 14455 - protein, 324 aa, unidentified
  source 1..324: note = protein_99d206d
  REGION 8..151: note = RuvC_domain
  SITE 11: note = RuvC_P1
  SITE 52: note = RuvC_P2
  SITE 92: note = RuvC_P3
  SITE 94: note = RuvC_P4
  SITE 97: note = RuvC_P5
  REGION 193..280: note = Tnp_domain
  SITE 201: note = Tnp_P1
  SITE 231: note = Tnp_P2
  SITE 239: note = Tnp_P3
  SITE 240: note = Tnp_P4
  SITE 253: note = Tnp_P5
MNIMNKFIGIDISKQTFDVSFSKKKQEVFDNNQKGFKKMFKDIDPETGVVMEASGPYYLNLATFLHNKKVRVFVINPLKIKRFSQMNFNRAKTDKKDAEVIRNYALKMQEDLKEWKPEPKHIKDMKQLHTSIELLNKQLQQTKNQLGAFEDSGSVCKELGKSFRSILKKLEKEKERLEGQMLALGKEEYQQTVKSLTSIPGIGDKTAIMLIAISGDFEKFDHYKQLIAYVGFSPRIYQSGTSVKGKGHICKMGKSQIRKLLYMCSWTAKRYNKACVEMYERLEKKGKPERVIKIAIANKLLKQAFAIAKNKTTFDKNYQSKVCF

SEQ ID NO: 14456 - protein, 385 aa, unidentified
  source 1..385: note = protein_c044d92
  REGION 28..170: note = RuvC_domain
  SITE 31: note = RuvC_P1
  SITE 74: note = RuvC_P2
  SITE 109: note = RuvC_P3
  SITE 111: note = RuvC_P4
  SITE 114: note = RuvC_P5
  REGION 230..300: note = Tnp_domain
  SITE 238: note = Tnp_P1
  SITE 268: note = Tnp_P2
  SITE 276: note = Tnp_P3
  SITE 277: note = Tnp_P4
  SITE 289: note = Tnp_P5
MVIPTLRGHTFAGCFISEAIITSAVALVGIDPGKQSFHLYGKDGSGRKIFRTKATRQQMMRLLGILPACTVVMEACAGAHFMARQLTALGHQVKLISPQFVRPFVKGNKNDFIDAEAICEAASRPSMRFVSPKIEARQTLSVLHRMRDSLVRDRTKTANQAHGFLLEFGISLPKGLSLVRRLPSTLDEHELPPRLVVLLTRLHQHSRCLDGQIKAPDKEMTTQLEEDDLGSRLLTIPCVGPITASLLSAEMGDGKQYGGSRDFAASVGLVPRQHSTGGRANLLGISKRGRQVSAAAFSAVRPGLPAAPGASAGCLGPLGPLATAATPCEHGGARPGQQVLPSRLGVRRQPLGIRSRASRLRRLTRPFSCTTEHPSRFCDAEQPMT

SEQ ID NO: 14457 - protein, 344 aa, unidentified
  source 1..344: note = protein_aa6ba89
  REGION 7..149: note = RuvC_domain
  SITE 10: note = RuvC_P1
  SITE 53: note = RuvC_P2
  SITE 88: note = RuvC_P3
  SITE 90: note = RuvC_P4
  SITE 93: note = RuvC_P5
  REGION 211..297: note = Tnp_domain
  SITE 219: note = Tnp_P1
  SITE 249: note = Tnp_P2
  SITE 257: note = Tnp_P3
  SITE 258: note = Tnp_P4
  SITE 270: note = Tnp_P5
MQKDTMIGVDLAKAVFQLHAASMNGEPKFRKKMARQAFLRFMAQQPSSLVVMEACASAHYWSREMIRLGHEVKLIAPQYVKPSVKRQKNDAADAEAIVIAAQRPEMRFVNPKSAEQQSRAILFRGRDRLVHQRTELVNALRACLYEYGHVVPQGIQQIHRIAEILKAPNSDLPDLMREECLDLLDQIAEQTVRINARTEKIKALATEADTARRLQTIPGVGPLTALAVEAFAPPMENFRCGRDFAAWLGLVPRQFSSGGKERLGRASKAGQADIRRLLIIGARSRLNWMGRKSISESSWLARIVARKPRMLVAIALANKMARTIWAMVTKNEDYRVPAQAVAAA

SEQ ID NO: 14458 - protein, 322 aa, unidentified
  source 1..322: note = protein_403e64d
  REGION 7..155: note = RuvC_domain
  SITE 10: note = RuvC_P1
  SITE 54: note = RuvC_P2
  SITE 94: note = RuvC_P3
  SITE 96: note = RuvC_P4
  SITE 99: note = RuvC_P5
  REGION 190..274: note = Tnp_domain
  SITE 198: note = Tnp_P1
  SITE 227: note = Tnp_P2
  SITE 235: note = Tnp_P3
  SITE 236: note = Tnp_P4
  SITE 247: note = Tnp_P5
MAMLSFGGIDVSKDRLDVVVLPEEECSSVPNDAAGWAELVERLRGFSITAIGIEPSGGYERGAMRALLAAGMPVRQVNPFKLRQFARASGVLAKNDPLDARMIASFVTIMPTRPAQRQTPAAERLAEMLATRRQLSAEKVAAENASRLLEDAMLQRLSRRRIVRLAADIDLLDKRMVEIVATDDALVHRYRLLTSMPGVGAVLACTLIALLPELGRMSRKQVAALVGVAPYAFESGTLKGRRCIWGGRAHIRQVLYMAAMSASNWNPVLKAFHDRLTAAGKLPKVVIVAVMRKMITMLNAMVRDNVVWADRLSGRRVLPTAR

SEQ ID NO: 14459 - protein, 336 aa, unidentified
  source 1..336: note = protein_f331988
  REGION 2..144: note = RuvC_domain
  SITE 5: note = RuvC_P1
  SITE 48: note = RuvC_P2
  SITE 83: note = RuvC_P3
  SITE 85: note = RuvC_P4
  SITE 88: note = RuvC_P5
  REGION 206..291: note = Tnp_domain
  SITE 214: note = Tnp_P1
  SITE 244: note = Tnp_P2
  SITE 252: note = Tnp_P3
  SITE 253: note = Tnp_P4
  SITE 265: note = Tnp_P5
MIGLDLAKSVFQAHGADASGGVVFRKRLRRDKLLAFFAGQPRCVVAMEACASSHYWAREIAALGHETRLIPPAYVKPFVKRQKNDMADAEAICEAAQRPTMRFVTPKSAEAQGAAVVFRTRDLLVRQRTQLINALRGHLAEFGFIVRQGSGHVSKLIDLVADPSSELPAEARAVLAVIADSLQAIQARISVLDREIAARAKADPLVRRLMTIPGVGPIVATALVALAPEASTFRRGRDFAAWLGLTPRQHSSGGKERLGRTTKMGERSLRRLLILGASSAAKNAGRDGSRASPWLVGMLARKPRMLVTVALANKMARIVWALMAHGGTYRAPVAAV

SEQ ID NO: 14460 - protein, 341 aa, unidentified
  source 1..341: note = protein_3c3f83f
  REGION 7..149: note = RuvC_domain
  SITE 10: note = RuvC_P1
  SITE 53: note = RuvC_P2
  SITE 88: note = RuvC_P3
  SITE 90: note = RuvC_P4
  SITE 93: note = RuvC_P5
  REGION 209..295: note = Tnp_domain
  SITE 217: note = Tnp_P1
  SITE 247: note = Tnp_P2
  SITE 255: note = Tnp_P3
  SITE 256: note = Tnp_P4
  SITE 268: note = Tnp_P5
MSTAALVGIDLGKHSFHLHGQGCSGREVFRTRATRQQMMRLLGNLPACTVVMEACAGAHFMARQLTALGHEVKLISPQFVRPFVKGNKNDFIDAEAICEAASRPSMRFVSPKTEARQTFSVLHRMRDSLVRDRTKTANQAHGFLLEFGISLPKGLSLVRRLPSTLDEHELPPRLVTLLTRLHQHFCYLDGQIKALDKEMTTQLEEDDLGSRLRTIPCVGPITASLLSAEMGDGKQYGGSRDFAASVGLVPRQHSTGGRANLLGISKRGDKNLRRLLVQCARVYLQRLEHQQGALADWVRSLRQRRHSNVVVCALANKFARIAWAIAANHSEFEAEPVVCAA

SEQ ID NO: 14461 - protein, 405 aa, unidentified
  source 1..405: note = protein_a823b4f
  REGION 14..168: note = RuvC_domain
  SITE 17: note = RuvC_P1
  SITE 65: note = RuvC_P2
  SITE 105: note = RuvC_P3
  SITE 107: note = RuvC_P4
  SITE 110: note = RuvC_P5
  REGION 275..359: note = Tnp_domain
  SITE 283: note = Tnp_P1
  SITE 312: note = Tnp_P2
  SITE 320: note = Tnp_P3
  SITE 321: note = Tnp_P4
  SITE 333: note = Tnp_P5
MAVIVDQQDVDVFIGLDVGKSGHHAVAVNRSGRKLFDKALPNDEAKLQEILAGLTGHGKILLVVDQPATIGALPVAVAQAAGAAVGYLPGLAMRRIADLHPGQAKTDARDAMIIAEAARTMPHTLRSIALDDQLLAELGVLCGFDDDLAGQITAVSNRIRGLLTQIHPALERALGPHLDHPAVADLLTRYPTPAALRTAGRGHVRARLKKHAPRAAERLTEAVFTALGQQSVVVVGTGAAGIVLPKLAEQLLSLRRQRDEITAQVEALVEAHPLYRVLTSMPGIGVRTCARILTEVTGKHFASAAHLASYAGIAPVTRRSGTSIRGEHTSRRGNKKLKRALFLSAFAALHHPPSRAYYDRKRAEGKRHNQALIALARRRSDVLFAMLRDGTLYQDPQPRNLPSAA

SEQ ID NO: 14462 - protein, 320 aa, unidentified
  source 1..320: note = protein_e4d5358
  REGION 10..150: note = RuvC_domain
  SITE 13: note = RuvC_P1
  SITE 55: note = RuvC_P2
  SITE 95: note = RuvC_P3
  SITE 97: note = RuvC_P4
  SITE 100: note = RuvC_P5
  REGION 191..274: note = Tnp_domain
  SITE 198: note = Tnp_P1
  SITE 227: note = Tnp_P2
  SITE 235: note = Tnp_P3
  SITE 236: note = Tnp_P4
  SITE 248: note = Tnp_P5
MTILTSPTVVGIDVAKAEIVVYREDLKTIQAIDNNRQAVGRWLKTLPAQSSIALEATSIYHLDTVEMAHKMGHRVYVVDAYRVSHYRESVGQRAKTDPCDARLLARYLSSEQERLRIWSPPPHAYKVLKSLLQRRAELIKLRVSISLSWSGEPLLQESLALLLKSYEQAEQALQQLLRKVSREAGITENIKRCKAIEGVGELTATALATAFMRGQFASSDAFIAFLGMDLRAKDSGKKNGPRHLSKKGDAELRRLAHNAAMAACRSPAWKPYYESFLARGLAKTQALVILARKLCRVAFALMKNQSEYLPNLRLQGSPAT

SEQ ID NO: 14463 - protein, 361 aa, unidentified
  source 1..361: note = protein_e19570a
  REGION 1..105: note = RuvC_domain
  SITE 2: note = RuvC_P2
  SITE 42: note = RuvC_P3
  SITE 44: note = RuvC_P4
  SITE 47: note = RuvC_P5
  REGION 219..307: note = Tnp_domain
  SITE 227: note = Tnp_P1
  SITE 257: note = Tnp_P2
  SITE 265: note = Tnp_P3
  SITE 266: note = Tnp_P4
  SITE 279: note = Tnp_P5
MEHTGRYYESIAKVLHEAGLYVSAVNPLLIKEYGNNSLRKVKTDKADAMKIAKYALDNWSELRDYTPMDTIRYDLKTMNRQFQLAIKQKTATANNIIALQEQSFPGIRKLFDSPVRGDGTQKWVDLTHDFWHVDCVRSGSLNAFTERYRKWCKRNRYQFSTEKAAEIYALAKSAVVLVQKTSVTKTLVQAAADQLTAISRSVETYRSEMNKLASQLPEYSVVMEMYGVGESLGPQLMAEIGDVRRFERKQSLVAFAGTDPAPSESGNYCSRSNRTTKRGSPYLRRTLFNIMKVHLQRAPADEPVFQFMDKKRAEGKPYYVYMIAAGNKFLRRYYGKVMAYFSSLEDLPPVDMDSTGLHHTK

SEQ ID NO: 14464 - protein, 399 aa, unidentified
  source 1..399: note = protein_0ce63ff
  REGION 12..166: note = RuvC_domain
  SITE 15: note = RuvC_P1
  SITE 63: note = RuvC_P2
  SITE 103: note = RuvC_P3
  SITE 105: note = RuvC_P4
  SITE 108: note = RuvC_P5
  REGION 273..357: note = Tnp_domain
  SITE 281: note = Tnp_P1
  SITE 310: note = Tnp_P2
  SITE 318: note = Tnp_P3
  SITE 319: note = Tnp_P4
  SITE 331: note = Tnp_P5
MIKDHEQVDIFIGVDVGKSNHHAVAIDRNGKKLLDRALPQDEAKLRSIIKAVAGKGTVLLVVDQPSTIGALPVADAQAEGIMVGYLPGLAMRRIADLHPGEAKTDARDAAIIAEAARTLPHTLRSIVLADEQAAELSMLCGFDDDLAKQATATSNRIRGLLTQVHPALERVVGKHLDHPAMAELLVKYPTPEKLHRAGQNRVAMLLSRHAPRAGKSWAAEVFTALGEQTVVVAGTNAAGIVLPQLAAMLKQLRAAREDILAQIEALVEAHPLHEVLTSMPAVGVRTEARLITEVAGKEFKTAGHLASYAGLAPVTWRSGTSIRGDHPSKKGNKALKRAFFLSAFAALKDPLSRAYYDRKRAEGKRHNQALIALSRRRCDVLFAMLRDGTFYEAPAAKTA

SEQ ID NO: 14465 - protein, 330 aa, unidentified
  source 1..330: note = protein_1d9c6f0
  REGION 14..167: note = RuvC_domain
  SITE 17: note = RuvC_P1
  SITE 65: note = RuvC_P2
  SITE 106: note = RuvC_P3
  SITE 108: note = RuvC_P4
  SITE 111: note = RuvC_P5
  REGION 230..286: note = Tnp_domain
  SITE 237: note = Tnp_P1
  SITE 267: note = Tnp_P2
  SITE 275: note = Tnp_P3
  SITE 276: note = Tnp_P4
MRNSDNQTPPRVVIGMDPHKRSVTIEVMTPDEGIVGHGRFGTDEAGFAAMLDYARRWPDRVWAIEGCEGIGRHVAHRLLPLGEEVVDVPAKLSARMRVFATGQGRKTDDTDGHSIALVGVRMQGLQSVVHDEQLKLLRLLVDRRRRIGEDHSRMICQLHALILELVPGGAKRDLSAAQARAILAKVRPRDAVGKARKRVAMELVVDLERLYQRKKAANKELTDLVKATGTGLLDLRGIGPSGAARLLVEVGDITRFPSKAHFASWTGTAPIDVSSASTPTTGCPAVGTVRSTGSCTSWPSSSCATAPAQAVPTTTGRSPRGRPRTQRCGA

SEQ ID NO: 14466 - protein, 312 aa, unidentified
  source 1..312: note = protein_11b8c3a
  REGION 5..123: note = RuvC_domain
  SITE 28: note = RuvC_P2
  SITE 64: note = RuvC_P3
  SITE 66: note = RuvC_P4
  SITE 69: note = RuvC_P5
  REGION 192..277: note = Tnp_domain
  SITE 200: note = Tnp_P1
  SITE 230: note = Tnp_P2
  SITE 238: note = Tnp_P3
  SITE 239: note = Tnp_P4
  SITE 250: note = Tnp_P5
MLPANRLGYREALRLGRRGGRRRLWALEGTGSYGAGLARSLRERGERVVEVERPAREGSRRRMKSDSLDALRAARAALAGQALACPRAAGKREALRVLLQAREGAVAVRRSGLNQLRALVVSAPEELRERLRGHGRDALVRACARLRPQRRLKPELYATALALRSVARRVEQATREARELESELRRLISELCPQLLALEGVGPISAAQVLVSWSHRGRFRSEAAFARLAGALPIPASSGQSVRHRLDRGGDRRLNRALHTIVLTRRRGEAATIAYFARRVGEGKSERDAVRCLKRYLARQLFRLLEAVPATT

SEQ ID NO: 14467 - protein, 403 aa, unidentified
  source 1..403: note = protein_c44da85
  REGION 4..160: note = RuvC_domain
  SITE 7: note = RuvC_P1
  SITE 57: note = RuvC_P2
  SITE 97: note = RuvC_P3
  SITE 99: note = RuvC_P4
  SITE 102: note = RuvC_P5
  REGION 274..361: note = Tnp_domain
  SITE 282: note = Tnp_P1
  SITE 312: note = Tnp_P2
  SITE 320: note = Tnp_P3
  SITE 321: note = Tnp_P4
  SITE 334: note = Tnp_P5
MNSVGIDISKGRSTVAVMRPFGEVVISPFEVHHTDSELSALARRLKSLNGETRVVMEATGNYHAPVAKLLHDAGLYVSVVNAKLVHGYGNNELRRVKTDKKDAVKLANYGLDRWLTLPRYVPEEGARLLLKNCYRQYRQYSKVQTVLKNNLISLLDTVFPNVNRLFSSPIRGDGSEKWVDFVAEFWHCRCVSEKSEKAFANKYQRWCKKHGYNFSVAKAHTIHAEASGHIGVMPKSETTKLLVEQAVAQLRATSVALTALKREMLTLAAQLPEYPVVMGMFGVGPTLGPQLIAEIGDVRRFYSKKALVAYAGLDAPPNDSGDVTGKHKSMSKIGASSLRRTLFLVMSVYLRSAPLDESVYQFMDRKRAEGKPYHVYMMASANKFLRIYYATVKAYLESLEHTT

SEQ ID NO: 14468 - protein, 343 aa, unidentified
  source 1..343: note = protein_7edc94d
  REGION 6..150: note = RuvC_domain
  SITE 9: note = RuvC_P1
  SITE 54: note = RuvC_P2
  SITE 89: note = RuvC_P3
  SITE 91: note = RuvC_P4
  SITE 94: note = RuvC_P5
  REGION 213..299: note = Tnp_domain
  SITE 221: note = Tnp_P1
  SITE 251: note = Tnp_P2
  SITE 259: note = Tnp_P3
  SITE 260: note = Tnp_P4
  SITE 272: note = Tnp_P5
MKISRVGVDLAKNVFQLHGVDRHGKTVLKRRLSRDKWISALIKSAEPDCEIGMEACGGAHHWARVLTTKGFRVKLIPPQFVTPYVKSNKNDAKDAEAICEAMSRPNMRFVKAKTVEQQDIQATHRIRSELMCHRTAKANQIRGLVTEYGLVAPLQMASLRAAIPRWLEDAENGLTDRFRTLLHGLWEDLLTLDQRIETLNGEIESIAKSDPVAQRLQQLRGVGPLVATALIATVGNGDQFSKGRQMAASVGLTPRQHSSGGKDRLLGISKRGDTYLRSILIHGARSVVANAKHKDDRLSRWVTELAQRRHPNVAAVALANKTVRMAWAMMNHDADYDPEFAAS

SEQ ID NO: 14469 - protein, 408 aa, unidentified
  source 1..408: note = protein_265627a
  REGION 11..166: note = RuvC_domain
  SITE 14: note = RuvC_P1
  SITE 62: note = RuvC_P2
  SITE 102: note = RuvC_P3
  SITE 104: note = RuvC_P4
  SITE 107: note = RuvC_P5
  REGION 273..358: note = Tnp_domain
  SITE 281: note = Tnp_P1
  SITE 311: note = Tnp_P2
  SITE 319: note = Tnp_P3
  SITE 320: note = Tnp_P4
  SITE 332: note = Tnp_P5
MSTPDDVDVWIGLDVGKEDHFADVLDDEGESLFARSVANDEADLVALIEAARRHGTPGLVIDQPGSIAQLAIAVAAQHQVPVAYVPGLVMRRAADLYPGEAKTDRRDAFVIADTARTRRRSVHWLDAGSDELLEQLRVLNGFDVDLAADLTRLTNRLRDSLVAVSPALERAVGSRLHQAGVRDLLAKHPTPTALRAAGRARITSVVKKRSPRVAVKVADAVMAALDAQTVTMPAEQAVGRVIGELAVELDRIHTRRDALAAEIEEVFLAHPFGQVLVTLPGIGPRTGARILAEIGDGTRFANGSKLASYAGLAPVTRQSGTSIRGESQSRRGNHRLKNAMFLAAFASLRSPDSKAFYDRKRAEGKKHNAAVICLARRRCDVILAMLRNLEPYRTPVTPPAVEATPIAA

SEQ ID NO: 14470 - protein, 322 aa, unidentified
  source 1..322: note = protein_e122c73
  REGION 8..147: note = RuvC_domain
  SITE 11: note = RuvC_P1
  SITE 52: note = RuvC_P2
  SITE 92: note = RuvC_P3
  SITE 94: note = RuvC_P4
  SITE 97: note = RuvC_P5
  REGION 191..278: note = Tnp_domain
  SITE 199: note = Tnp_P1
  SITE 229: note = Tnp_P2
  SITE 237: note = Tnp_P3
  SITE 238: note = Tnp_P4
  SITE 251: note = Tnp_P5
MNKYKETFGVDISKDVFDVYGTLSGHNQYKNDESGFVKFLKELPDTALVVMEATGYYHYRLAQFLYKNKIVVSVVNPLSIKRFIQMKLAKVKTDKSDAKSICDYALINAVPIYNALTDVQSECLQLFRLLDVYLKHRTATKNKLHGEETLGIPSRYVYRSLKRNKKHLDKEISAIELKLLSLIKQEQQEQLTLLRTVPGIGQKTALFLIVITDGFSKFEHAAQLCSYVGITPTIRESGSSVKGRSRISKVGNRKLRNLLFLCSFNACKHNKACRELYERIVNKGKSKKVALIAVANKLIKQCFAIAKSGRAYDETYVSVLLK

SEQ ID NO: 14471 - protein, 400 aa, unidentified
  source 1..400: note = protein_0fd487a
  REGION 12..166: note = RuvC_domain
  SITE 15: note = RuvC_P1
  SITE 63: note = RuvC_P2
  SITE 103: note = RuvC_P3
  SITE 105: note = RuvC_P4
  SITE 108: note = RuvC_P5
  REGION 273..358: note = Tnp_domain
  SITE 281: note = Tnp_P1
  SITE 311: note = Tnp_P2
  SITE 319: note = Tnp_P3
  SITE 320: note = Tnp_P4
  SITE 332: note = Tnp_P5
MSSDRPDYQVFCGLDVGKDGHHATALNPAGRRLHDAPLPNDEARLIELFDRLARHGRVLVVVDQPASIGALSVAVARAQGHDVAYLPGLAMRRIADLHPGQAKTDARDAHVIADAARTMPHTLRRVDVGEEALAELEVLIGFDDDLAGEATRISNRIRGLLTQIHPAAERVLGPRVAHPAVLELLSRFGGPTGLRQAGHRRLTSTAVKHGPRIGQQLVIDLLTALDQQTVTVPGAAAAETVLPKLADSLRTVLAQRAELAVQVEERLDAHPLARVLTSMPGIGVRTAARILLEVGDGSAFPTSGHLAAYAGLAPVTRRSGSSIRGEHPPKGGNKNLKRAFFLAAFASLADSNSRAYYDRKRAEGKRHNAALICLARRRCDVLHAMLRNRATYQPRPATAA

SEQ ID NO: 14472 - protein, 402 aa, unidentified
  source 1..402: note = protein_dfa2b84
  REGION 8..164: note = RuvC_domain
  SITE 11: note = RuvC_P1
  SITE 60: note = RuvC_P2
  SITE 101: note = RuvC_P3
  SITE 103: note = RuvC_P4
  SITE 106: note = RuvC_P5
  REGION 270..356: note = Tnp_domain
  SITE 278: note = Tnp_P1
  SITE 308: note = Tnp_P2
  SITE 316: note = Tnp_P3
  SITE 317: note = Tnp_P4
  SITE 329: note = Tnp_P5
MTAGQVWAGADIGKEHHWVAVVDDKGAMVFSRKLVNDERQIRDLVTEVDQLAERVSWTVDLTTVYASLLLTVLADAGKSVRYLAGRAVWQASTIYRGGEAKTDAKDARVIADQSRMRGADLPVLHPDDELITELRMLTAHRADLVADRTRTINRLRHQLVAVCPALERAAAMTQDRGWVVLLARYQRPKAIRQSGITRLTRVLTDAGVRNAATIAAAAVAAAKSQTVRLPGEEVAAGLVAKLAQGVIDLDDRIKAADADIEDRFRRHPLAEVITSLPGMGFRLGVEFLAAVGDPALIGSADQLAAWAGLAPVPKDSGKRTGRLHTPKRYSRRLRRVMYMSALTAIRCDPHSRAYYQRKRDEGKRPIPATICLARRRTNVLYALIRDNRTWQPDSPPITKSAA

SEQ ID NO: 14473 - protein, 404 aa, unidentified
  source 1..404: note = protein_9892e6c
  REGION 9..163: note = RuvC_domain
  SITE 12: note = RuvC_P1
  SITE 61: note = RuvC_P2
  SITE 101: note = RuvC_P3
  SITE 103: note = RuvC_P4
  SITE 106: note = RuvC_P5
  REGION 270..358: note = Tnp_domain
  SITE 278: note = Tnp_P1
  SITE 309: note = Tnp_P2
  SITE 317: note = Tnp_P3
  SITE 318: note = Tnp_P4
  SITE 330: note = Tnp_P5
MTTRPEIWVGIDVGKTAHHACAVDNAGTTVFSQKVDNDQAAIEAVIARAGRIGEQVRWAIDLTSPMALLLISVLLAADQTVTYVPGRVVNTMTHGFRGEAKTDAKDAKVIAETARLRRDLNQVTMPDELVVGLTQLTGYRTDLMADWVAGINRLRSLLGSIFPALEAAFDYSTRTPLILVAGMCTPTEIRGAGTVGVATYLAESGAWKPAIAKTAATAVEAAQRQTLALPGEADTAMLIKRIARKLLDLDREIKDTDKLITTRFRQHPWARIIESLPGMGPGLGAEFLVGTGGDLANLASAGRLASYAGLVPVPRDSGRVAGNLRRPKRYNRRMRRVFYMAALSSLRYESGPSRRFYDRKRSERQIHTQALLALARRLVDVLWALLRDGREFSIDNPAPAAAVA

SEQ ID NO: 14474 - protein, 354 aa, unidentified
  source 1..354: note = protein_e1e48be
  REGION 6..147: note = RuvC_domain
  SITE 9: note = RuvC_P1
  SITE 52: note = RuvC_P2
  SITE 87: note = RuvC_P3
  SITE 89: note = RuvC_P4
  SITE 92: note = RuvC_P5
  REGION 211..296: note = Tnp_domain
  SITE 219: note = Tnp_P1
  SITE 249: note = Tnp_P2
  SITE 257: note = Tnp_P3
  SITE 258: note = Tnp_P4
  SITE 270: note = Tnp_P5
MQIHTIGIDLGKTVFHLVGLNLRGEVVVRRKCSRTQLLQFTANTQADLIGMEACAGAHFLGRALREQGHEVRIIPAQYVKPYVKTNKSDFIDAEAIGEAVARPTMRFVPIKTDDQLDMQSLHRVRERWVIRRTAVVNQIRGLLLERGITLRQGRRHLEAALPGILEDAMTRLSGALRMLISQLKHELEELANFIGEADGVMERTSCENESCRRLLSIPGIGPVTATALIAAVGNGAAFRKGREFSAWVGMVPRESSTGGKQKLLGISKRGNPYLRKLFIQGARAVMLRGTKQSIGLRTWIENIALRKHPNVAAVALANKMARIAWVVLARGEAYRPSLLTESEPNLHSLQMKPA

SEQ ID NO: 14475 - protein, 350 aa, unidentified
  source 1..350: note = protein_ca1ae18
  REGION 6..148: note = RuvC_domain
  SITE 9: note = RuvC_P1
  SITE 52: note = RuvC_P2
  SITE 87: note = RuvC_P3
  SITE 89: note = RuvC_P4
  SITE 92: note = RuvC_P5
  REGION 210..295: note = Tnp_domain
  SITE 218: note = Tnp_P1
  SITE 248: note = Tnp_P2
  SITE 256: note = Tnp_P3
  SITE 257: note = Tnp_P4
  SITE 269: note = Tnp_P5
MNDTMIGVDLAKSVFQLHGASMTGQLKYRKKLTRPQFRKFMADQPPSVVVMEACGSAHYWTREMVRFGHDVKLIAPQYVLPFVKRQKNDAADAEAIVIAAQRPEMRFVEPKSQEQQARAVLFRARERLVHQRTELVNALRAVLYEFGHAVPKGIGNIKQFDVILEDPNCDLPALVRDECGDLVKQIAEQTIRIDAKTKTAKEMATTANTARRLQTMPGVGPLTALAIEAFAPAMQSFKRGRDFAAWLGLVPRQHSSGGKERLGRVSKAGQTDIRRLLIIGAMSRLNWMGRKTITEGSWLARMLARKPRMLVAIALANKMARGIWAMLTKNEDYRDPVPAVAARSTCAATT

SEQ ID NO: 14476 - protein, 341 aa, unidentified
  source 1..341: note = protein_285d40c
  REGION 8..163: note = RuvC_domain
  SITE 11: note = RuvC_P1
  SITE 64: note = RuvC_P2
  SITE 102: note = RuvC_P3
  SITE 104: note = RuvC_P4
  SITE 107: note = RuvC_P5
  REGION 205..292: note = Tnp_domain
  SITE 213: note = Tnp_P1
  SITE 243: note = Tnp_P2
  SITE 251: note = Tnp_P3
  SITE 252: note = Tnp_P4
  SITE 265: note = Tnp_P5
MQTKKYFTGLDISADDFSASCITSPDNSVFSTQKFLNNFDGFNEFLSLLTKNNIKQSEVIICMEATGVYSENLSYFLASKGFTLCIEAPHKIKNKTKDSPRKNDFIDAVSIAEYAFRYSDKLSFWKPKDEIIEQIQVLLTTREHLSIQMIANQNALKTLKYKYYQTPLANQIYEKTISKFKEHIKQIDQEIKSLIDKDDSFKNKISLAKSVPGVGLLLAANLLVLTKGFTEHLNYKHAAAYTGICPYEQRSGTSLYKPPRSRKCGPAKLRKLLYLAALSVRTHNQIFKKYFLRKVAEGKNKRLVLNNIENKLLKIIFAVINSGVSYTYNYKSINPALLKTA

SEQ ID NO: 14477 - protein, 410 aa, unidentified
  source 1..410: note = protein_f1f06b8
  REGION 7..171: note = RuvC_domain
  SITE 10: note = RuvC_P1
  SITE 64: note = RuvC_P2
  SITE 110: note = RuvC_P3
  SITE 112: note = RuvC_P4
  SITE 115: note = RuvC_P5
  REGION 282..368: note = Tnp_domain
  SITE 289: note = Tnp_P1
  SITE 319: note = Tnp_P2
  SITE 327: note = Tnp_P3
  SITE 328: note = Tnp_P4
  SITE 341: note = Tnp_P5
MPSPLFVGIDVSCKDNKVQLLHSDGAEITRFSVPNNHPGAKSLSEKITGVMGKNKFDSLVIGLEATSVYGHPLVYFLRQEPSIKALNPRIHVLNPKQVANFKKAYPELPKNDWVDAWVIADNLRFGRITKEVCMDEKFDALQKLTRERYHVAKNLTREKNRFLSNLFLKFSALAQEDIFSDKFGATSIAIIEDFFSVDDIAYMDVDKLAEFLNKKSKGHFADPHELAETIKKAARSSYRLPKTVNDSVNQVLAVSLVAIKALKKQLETLDKAIETQFALIPNTLQSIKGVGPVYAAGIVAEIGDIKRFPNHAALAKFAGLAWSEHQSGQFKAENTHMIRSGNRYLKYYLLEAANKVRVHDPEFKRFYELKYARTPKTPHKRALALTARKFVRLVYALLHSNRLYTPPKGE

SEQ ID NO: 14478 - protein, 317 aa, unidentified
  source 1..317: note = protein_1a857ff
  REGION 7..149: note = RuvC_domain
  SITE 10: note = RuvC_P1
  SITE 53: note = RuvC_P2
  SITE 88: note = RuvC_P3
  SITE 90: note = RuvC_P4
  SITE 93: note = RuvC_P5
  REGION 233..279: note = Tnp_domain
  SITE 238: note = Tnp_P3
  SITE 239: note = Tnp_P4
  SITE 251: note = Tnp_P5
MENIALIGIDLGKNSFHIHCQDRRGKAVYRKKFTRPKLIEFLATCPATTIAMEACGGSHFMARKLEELGHSPKLISPQFVRPFVKSNKNDFVDAEAICEAASRPSMRFVQPRTESQQAMRALHRVRESLVQDKVKTTNQMHAFLLEFGISVPRGAAVISRLSTILEDNSLPLYLSQLLLKLQQHYHYLVEQIKDLESQLKRKLDEDEVGQRLLSIPCVGTLTASTISTEIGDGRQYSTGGRTTLLGISKRGNKKIRTLLVQCARVFIQKLEHQSGKLADWVRDLLCRKSNFVVTCALANKMARIAWALTARQQTYVA

SEQ ID NO: 14479 - protein, 316 aa, unidentified
  source 1..316: note = protein_57484a1
  REGION 7..148: note = RuvC_domain
  SITE 10: note = RuvC_P1
  SITE 53: note = RuvC_P2
  SITE 87: note = RuvC_P3
  SITE 89: note = RuvC_P4
  SITE 92: note = RuvC_P5
  REGION 232..278: note = Tnp_domain
  SITE 237: note = Tnp_P3
  SITE 238: note = Tnp_P4
  SITE 250: note = Tnp_P5
MENIALIGIDLGKNSFHIHCQDRRGKAVYRKKFTRPKLIEFLATCPATTIAMGLWRFSLYGSHVVSVGAFPKLISPQFVRPFVKSNKNDFVDAEAICEAASRPSMRFVQPRTESQQAMRALHRVRESLVQDKVKTTNQMHAFLLEFGISVPRGAAVISRLSTILEDNSLPLYLSQLLLKLQQHYHYLVEQIKDLESQLKRKLDEDEVGQRLLSIPCVGTLTASTISTEIGDGRQYSTGGRTTLLGISKRGNKKIRTLLVQCARVFIQKLEHQSGKLADWVRDLLCRKSNFVVTCALANKLARIAWALTARQQTYVA

SEQ ID NO: 14480 - protein, 404 aa, unidentified
  source 1..404: note = protein_c49b7c0
  REGION 6..158: note = RuvC_domain
  SITE 9: note = RuvC_P1
  SITE 57: note = RuvC_P2
  SITE 95: note = RuvC_P3
  SITE 97: note = RuvC_P4
  SITE 100: note = RuvC_P5
  REGION 278..354: note = Tnp_domain
  SITE 307: note = Tnp_P2
  SITE 315: note = Tnp_P3
  SITE 316: note = Tnp_P4
  SITE 327: note = Tnp_P5
MEGCFAGVDWASEEHACCVVDGDGRIVEGRRYRHDERGITALCRRLLDLGVELVALERPDGLLIERLLDAGLQVIAIHPNRVAAMRPRFSASGGKSDGFDSFVLAELARTDSHRYRILVADCDQTKALRALTRAREDLVKTRVGLANELRAQLECFWPAVIGVFADIDSPIALAFIKRYPSPADARGLGEQRLARFLARHAYSGRRTPAELLSRLKGAADGRAAALETEARRQIVLALISALEPIVARIGELTSEIRGALADHADGDTFRSLFKDPNSVITAATMLAEMGDCRARYPTYKALSADGGQSPVAVESGKSKRARFRWACDHRLRDAIATLADSSRHHNPWAKDIYQRAIARGATHPHPIRILGRAWCGVIWRIWQDNDVYDPARHTALQQLLATTS

SEQ ID NO: 14481 - protein, 340 aa, unidentified
  source 1..340: note = protein_220461c
  REGION 6..148: note = RuvC_domain
  SITE 9: note = RuvC_P1
  SITE 52: note = RuvC_P2
  SITE 87: note = RuvC_P3
  SITE 89: note = RuvC_P4
  SITE 92: note = RuvC_P5
  REGION 211..297: note = Tnp_domain
  SITE 219: note = Tnp_P1
  SITE 249: note = Tnp_P2
  SITE 257: note = Tnp_P3
  SITE 258: note = Tnp_P4
  SITE 270: note = Tnp_P5
MNVTTIGIDLAKSVFQLHGVDAQGEVVFRKKLRRSAVLDFLRELRPCLIGLEACATAHFWAREIGALGHDVRLIPPAYVKPYVKRQKNDAADAEAICEAVTRPHMRFVPIKSAKRQGVLMLHRTRDLLMRQRTMTLNAVRAHLAEFGIITAQGPQKLLTLIRAIRTGEVPGLPRIAGIALESLASQLDSLTDEIRKLERQLMLWHRADETSQRLETIPGVGVITATALAASVPDPGVFKSGRQFAAFLGLVPRQNSSGGKGRLGRISKMGDGYLRRLLVVGATSVVRRANSNTSATGAWVRCLLERKPARVVTVAVANKTARIAWAILARGETYRASMAA

SEQ ID NO: 14482 - protein, 419 aa, unidentified
  source 1..419: note = protein_62c633d
  REGION 11..160: note = RuvC_domain
  SITE 14: note = RuvC_P1
  SITE 65: note = RuvC_P2
  SITE 100: note = RuvC_P3
  SITE 102: note = RuvC_P4
  SITE 105: note = RuvC_P5
  REGION 255..345: note = Tnp_domain
  SITE 263: note = Tnp_P1
  SITE 296: note = Tnp_P2
  SITE 304: note = Tnp_P3
  SITE 305: note = Tnp_P4
  SITE 316: note = Tnp_P5
MSFKILKNNCCGLDVHKTWIYACIGITDSNGRTEYKQARFSSFTKGLQELCDWLVKYNCNDVCMESTGKYWIPVFNILEKNNLWVTLSHPKYTKPQKGNKTDRKDAKWICDLYMCGMVKPSFIPPADIRQLRDLVRYRFKLTCMITGEKNRAQNCLTVSNFKLDDVFSDVFGKSSRSITEQILQHPGETFDVAPFVDGRCKTPIEEIQAAVDGAISTEQAVKLRQCLNHIDELEKHQAEIEREIFRLSDKYESILNLIRTVPGFDKNPLTAIQVLSEIGGDMSVFPTAKNLVSWAGCCPRNDQSNHKIKSTRISRAGSYFKPVLVQVANALIKSKKHPEFTTRYRRIKARRGHKKAIIAISRMILTAIWHILTDLKPYTPEGFLESRPVNDSKVLTTSQALNLLKQRGYIIKDNTIPVT

SEQ ID NO: 14483 - protein, 387 aa, unidentified
  source 1..387: note = protein_b758d0d
  REGION 4..159: note = RuvC_domain
  SITE 7: note = RuvC_P1
  SITE 58: note = RuvC_P2
  SITE 98: note = RuvC_P3
  SITE 100: note = RuvC_P4
  SITE 103: note = RuvC_P5
  REGION 263..350: note = Tnp_domain
  SITE 271: note = Tnp_P1
  SITE 301: note = Tnp_P2
  SITE 309: note = Tnp_P3
  SITE 310: note = Tnp_P4
  SITE 323: note = Tnp_P5
MIYTGIDIAKDKHFCAIADSDGEVLEKPFGFDNNRAGYSLLLSKLKPFSKESVLIGIESTAHYGSNLLCFLHDNGYRIAVINPIQTATLRKTGIRKTKTDAVDSLLIIKSLMVNNHKPFDKQDIAYLRLKNLCRFRSKQKKSIARLKIQLVSFVDISFPELQTFFKSGIHGKACYELLKNCPAKDDITALHLTRLGNLLSKSSHGRFGKEEAIALKSLAKSSVGTSDTSISYQIVTTIEQIELLEKQIASLDNLIISQVSDLDSVLLSVPGMSHIICAMILGEIGDIKRFSEPCKLLAFAGLDPTVNQSGKFKAKSTKMSKRGSYLLRYALVFAAWNVCRNNNTFNAYYELKRSQGHGHYSALGHVAHKLVRVIFKMLKDNVAFSLD

SEQ ID NO: 14484 - protein, 397 aa, unidentified
  source 1..397: note = protein_67ed8c0
  REGION 9..163: note = RuvC_domain
  SITE 12: note = RuvC_P1
  SITE 60: note = RuvC_P2
  SITE 100: note = RuvC_P3
  SITE 102: note = RuvC_P4
  SITE 105: note = RuvC_P5
  REGION 270..355: note = Tnp_domain
  SITE 278: note = Tnp_P1
  SITE 308: note = Tnp_P2
  SITE 316: note = Tnp_P3
  SITE 317: note = Tnp_P4
  SITE 329: note = Tnp_P5
MTSGFGVFLGLDVGKGEHHAVGLDPAGKRLHDGPLPNSEPKLRALLDKLAVHGPLLVVVDQPATIGALPVAVARASGHQVAYLPGLAMRRIADLYPGRAKTDARDAFIIADAARTLPHTLRPVDVGDDALAELDVLVGFDDDLAGEATRIGNRIRGLLTGIHPALERAIGPRISHPAVLEILSRCGGPTGIRATGRRKLTSIAAAHAPRIGDKLVAAIMTALDEQTVTVPGTAAADTVLPRLADSLKTVLHQRKQVATEVEEILDAHPLAGVLTSMPGIGVRTAARILLEIGDASAFKSSGHLAAYAGIAPVTRNSGSSIKGEHPARTGNRKLKRAFFLAAFAALSDPVSRAYYDRKRAEGKKHNAALICLARRRCDVLFAMLRNKTYYRHPEPAAA

SEQ ID NO: 14485 - protein, 345 aa, unidentified
  source 1..345: note = protein_d76e52e
  REGION 6..148: note = RuvC_domain
  SITE 9: note = RuvC_P1
  SITE 52: note = RuvC_P2
  SITE 87: note = RuvC_P3
  SITE 89: note = RuvC_P4
  SITE 92: note = RuvC_P5
  REGION 212..299: note = Tnp_domain
  SITE 220: note = Tnp_P1
  SITE 250: note = Tnp_P2
  SITE 258: note = Tnp_P3
  SITE 259: note = Tnp_P4
  SITE 271: note = Tnp_P5
MEITTIGLDLAKNVFQVHGVDATGKVVVRKALRRVQMMPFFTKLASCLIGMEACGTSHHWARELAALGHDVRLMPPAYVKPYVKRGKTDAADAEAICEAVTRPTMRFVPVKSREQQAALFLHRTRSLLVKQRTQLVNMMRGQLAEFGIDIPKGLERALTMARQIIDGEAEMDLPPYGMRMLAILCQQALATHVQIREIDRELQKLERSDEMAKRLATIPGIGPIGATAFAAAVTDPAQFRSGRQFAAWLGLTPLQNSSGGKERLGRISKMGDQYLRRLLVIGATAMVRQFKMRPEKTPPHVASLLARKPVRVATVAMANKMARIVWALMARGETYRVGHIPALAA

SEQ ID NO: 14486 - protein, 402 aa, unidentified
  source 1..402: note = protein_7bb73bf
  REGION 5..160: note = RuvC_domain
  SITE 8: note = RuvC_P1
  SITE 59: note = RuvC_P2
  SITE 97: note = RuvC_P3
  SITE 99: note = RuvC_P4
  SITE 102: note = RuvC_P5
  REGION 268..354: note = Tnp_domain
  SITE 276: note = Tnp_P1
  SITE 307: note = Tnp_P2
  SITE 315: note = Tnp_P3
  SITE 316: note = Tnp_P4
MQFFVGIDWATQAHTVCVIDQAGRSRWQGAVPHTSAGLAELRARLRRLRRRGPVRIALERPSGLLVDTLVDAGLEVVPIHPNALKASRPRYSAAGGKSDPGDAFILADVLRTDGHRFRPLRPPSDDTRALRALVRGRDDLVAQRVALANQLRALLERFWPGAAAIFADVDSPIALAFLARYPTPHSAVRLGQKRLAQFLGQHAYCGRRPVAELLARLRTAPASQVGEAEAEASGDVVRALVAVLNPLGAQIQQLTAAIEAALPQHPDGRLLQSLPRSGAINAAQILAELGDDRTRFPTDDQLAAEGGLAPVTHASGKHHAVVFRWACNKRLRRALTTFADNSRHASRWAALVYQRARARGCRHPHAIRILARAWTRILWRCWQDRTPYDVSRHRAAQTLVAA

SEQ ID NO: 14487 - protein, 273 aa, unidentified
  source 1..273: note = protein_ac1557f
  REGION 2..75: note = RuvC_domain
  SITE 14: note = RuvC_P3
  SITE 16: note = RuvC_P4
  SITE 19: note = RuvC_P5
  REGION 138..225: note = Tnp_domain
  SITE 146: note = Tnp_P1
  SITE 176: note = Tnp_P2
  SITE 184: note = Tnp_P3
  SITE 185: note = Tnp_P4
  SITE 197: note = Tnp_P5
MSPQFVKPYVKTNKHDMADAEAICEAVSRPNMRFVPIKNVEQQAILSIHRARQGFVKARTAQANQIRGLLSEFGIVLPLGIQSINKRMPDILEDAENGLPGILRKLLERLNDHLKELDHQVEELELQIKWWHKKNEASQKLEAIPGIGPITASAIVATVGEAKEFKNGRQLSAWIGLVPKQCSSGGKQILLGISKRGDTYLRTLLIHGARAVIRFAENKPKPENWLSKLIMRRNRNIAAVALANKNVRIIWALLAKGSTFRPDPASAACAAAS

SEQ ID NO: 14488 - protein, 343 aa, unidentified
  source 1..343: note = protein_8e05f7f
  REGION 5..152: note = RuvC_domain
  SITE 8: note = RuvC_P1
  SITE 55: note = RuvC_P2
  SITE 92: note = RuvC_P3
  SITE 94: note = RuvC_P4
  SITE 97: note = RuvC_P5
  REGION 212..300: note = Tnp_domain
  SITE 220: note = Tnp_P1
  SITE 250: note = Tnp_P2
  SITE 258: note = Tnp_P3
  SITE 259: note = Tnp_P4
  SITE 271: note = Tnp_P5
MEHFAGLDVSVKETSVCIVDDTGKIVREVKVASEPEALLAMLKNPAYHFKRIGLEAGPLSQWLYSALAEAGLPVICVETRHMRAVLKAQINKTDRNDARGIAQMMRAGLYRPVHVKTLRSQKLRMLLTHRKLLQAKAIAIENDLRATLRNFGLKVGVVGTVKFEARIKELVESIPDLAELVEPLLVVRRTLREQIGILHRRLLAIVRDDDVCRRLMSVPGVGPVVALTYRATVDIPIRFRNSKAVGAVFGLTPSRHQSGESDRTGGISRCGDEMMRVMLYEAAQIMLVRSVKWSWLKAWAVKIARRRGLKKAIVALARRLAVIMHRIWVDGTEFQWTREEAAA

SEQ ID NO: 14489 - protein, 402 aa, unidentified
  source 1..402: note = protein_c0de85f
  REGION 5..160: note = RuvC_domain
  SITE 8: note = RuvC_P1
  SITE 57: note = RuvC_P2
  SITE 97: note = RuvC_P3
  SITE 99: note = RuvC_P4
  SITE 102: note = RuvC_P5
  REGION 268..354: note = Tnp_domain
  SITE 276: note = Tnp_P1
  SITE 307: note = Tnp_P2
  SITE 315: note = Tnp_P3
  SITE 316: note = Tnp_P4
  SITE 327: note = Tnp_P5
MRFFVGLDWASAAHAVCLIDLRGRIRWQASVPHSADGLAALVRRLRRWRQRGPFAIALERPSGLLVDTLVQAGFDVVPIHPNVVKATRPRYSAAGGKSDPGDAFLLADLLRTDGHRFRPLQPPSDDTRALRTLVRGRDDLVAQRVALANQLRALLERVWPGAARLFADVDSPIALAFLARYPTAHSAARLGEKRLAHFLLQHAYCGRRSPRDLLARLHAAPPSQLGDTEAEAAGDLVRSLVAILTPLVAQIQQLAAAIAAALQHHPDAPVVQTLPRSGTINAAQILAELGDDRRRFVSADHLAAEAGVVPVTHASGKHHGVTFRWACNKRLRAALTTFANNSRHASAWAAAVYQRALGRGCDHPHAIRILARAWVRVLWRCWQNRTAYDLSRHGAAAALAAA

SEQ ID NO: 14490 - protein, 351 aa, unidentified
  source 1..351: note = protein_c308f49
  REGION 12..158: note = RuvC_domain
  SITE 15: note = RuvC_P1
  SITE 65: note = RuvC_P2
  SITE 101: note = RuvC_P3
  SITE 103: note = RuvC_P4
  SITE 106: note = RuvC_P5
  REGION 230..317: note = Tnp_domain
  SITE 237: note = Tnp_P1
  SITE 267: note = Tnp_P2
  SITE 275: note = Tnp_P3
  SITE 276: note = Tnp_P4
  SITE 290: note = Tnp_P5
MTSLQQIAEVVIGVDTHVHTHSAAVVDARTGGVLAEITVTADAGGYQELIDFAGQHSGQRAWAIEGTGGHGNGLARVLAQRDEPVIELDRPERAKRRNGAKSDPLDAVRAAREALSRDNLGTPRSHGDRQALSVLLAARQSAVQGAGDAQRQLFSLVIAAPETLRKRFRGHKLPAMTRLAAQLRGSPRWDTETATTAAVLRALARRALDLAAEAAQHEKDIRAIVAAWRPDLLTQRGVGPITAAVILCAWSHPGRVRSEAAFAMLGGVAPIPADSGSGTAPKRFRLNRYGDRQLNRALHTITLSRLRYDPTTQAYAKRRTAEGKTPRDIKRCLKRYIARDLYRLLEHPAAT

SEQ ID NO: 14491 - protein, 342 aa, unidentified
  source 1..342: note = protein_5554440
  REGION 6..147: note = RuvC_domain
  SITE 9: note = RuvC_P1
  SITE 52: note = RuvC_P2
  SITE 87: note = RuvC_P3
  SITE 89: note = RuvC_P4
  SITE 92: note = RuvC_P5
  REGION 211..298: note = Tnp_domain
  SITE 219: note = Tnp_P1
  SITE 249: note = Tnp_P2
  SITE 257: note = Tnp_P3
  SITE 258: note = Tnp_P4
  SITE 270: note = Tnp_P5
MKVHTIGIDLGKTKFHIVGLNERGEVIIRKQFSRAQLLHFTANRKVYLIGMEACGGAHFLGRALQQQGHEVRLIPAQYVKPYVKTNKNDYIDAEAIAEAVSRPRMRFVPIKSDDQLDLQSLHRVRERWVSRRTAVINQIRSLLLERGITVRKGRRYIEAALPGILEDADAKLSGALRLLLAQLKLELDQMAKRLEEADALIEQTALENEACRRMVKIPGLGPVTATAVIAAIGNGAAFRKGREFAAWMGVVPREHSTGGKQKLLGISKRGNRYLRKLFVQCARAVLQQKTKQTPGLRAWLEKLTARSHYHVAGVALANKLARMAWAVLATGEAYRAPLPAAA

SEQ ID NO: 14492 - protein, 343 aa, unidentified
  source 1..343: note = protein_cbf137e
  REGION 7..149: note = RuvC_domain
  SITE 10: note = RuvC_P1
  SITE 53: note = RuvC_P2
  SITE 88: note = RuvC_P3
  SITE 90: note = RuvC_P4
  SITE 93: note = RuvC_P5
  REGION 212..303: note = Tnp_domain
  SITE 220: note = Tnp_P1
  SITE 250: note = Tnp_P2
  SITE 258: note = Tnp_P3
  SITE 259: note = Tnp_P4
  SITE 271: note = Tnp_P5
MQTISTIGLDIAKSVFQVDGVDASGQVVVRRQLKRRYVLAFFQKLPPCLVGIEACASSHYWSRELQALGHTVRLMPPAYVKPYVKRHKNDATDAEAICEAVSRPNMRFVATKTAEQQSCLTLHRTRHLFIRQQTAVINVVRALFAEFGIVAPVGRNGVEQLLEVAADSNDKRLPDVARACVTALGAQLRMLKVQILEFDRMIMAWHRSSEASQRLDDIPGVGPALATALVASIADPKAFRSGRDFSAWIGLVPKQNSSGGKDRLGSISKRGDRYLRSLFTTGALAVIRYAKIHGTKHRPWLTALLARRPTKVAAIALANKIARMAWAIMAKGERYKEPAALAA

SEQ ID NO: 14493 - protein, 411 aa, unidentified
  source 1..411: note = protein_0ac6554
  REGION 4..160: note = RuvC_domain
  SITE 7: note = RuvC_P1
  SITE 59: note = RuvC_P2
  SITE 97: note = RuvC_P3
  SITE 99: note = RuvC_P4
  SITE 102: note = RuvC_P5
  REGION 269..355: note = Tnp_domain
  SITE 277: note = Tnp_P1
  SITE 308: note = Tnp_P2
  SITE 316: note = Tnp_P3
  SITE 317: note = Tnp_P4
MIFVGDDWAEAHHDVYVCDQSGARLVQRRLPEGLEGMRVFHELLADHAGDPAEVHIGIETDRGLWVQALVEVGYMVYAINPRAASRYRDRHTVSGAKSDPGDAKMLAELVRTDRHNHLRVAGDSDLSEGIKILARAHQNLIWDRIRATNRLRSALREYFPAALDTFSELADRDTLAVLERAPTPIQAAALTEAKIRNALRAGGRARNVDTRARQIAQGLRVEALSAPGPVVSAFAATTRSSVAVIAELNRQIAALETDLADHFEQHPDADIYLSLPGIGVILGARALGEFGDDPNRYADTKSRKNYAGTSPITRASGTRRVALARFIRNSRLADAIDQWAFCSLRSSPGARAFYDHHRARGDSHHKALRALGNRLVGILHGCLRHHTTYNEHTAWAHRTDNDLTHKSGIAA

SEQ ID NO: 14494 - protein, 404 aa, unidentified
  source 1..404: note = protein_1e536da
  REGION 4..159: note = RuvC_domain
  SITE 7: note = RuvC_P1
  SITE 59: note = RuvC_P2
  SITE 96: note = RuvC_P3
  SITE 98: note = RuvC_P4
  SITE 101: note = RuvC_P5
  REGION 267..353: note = Tnp_domain
  SITE 275: note = Tnp_P1
  SITE 306: note = Tnp_P2
  SITE 314: note = Tnp_P3
  SITE 315: note = Tnp_P4
MWYAGIDWADDHHDLVVLDEPGRQVRTLRVAHTPAGLAHLTAALEQICGSDAKLQLACFVETNRGLLIAALLEAGFPVYPVNPKTVDRRRNAAGVKTDQVDAYLLAKTGRSDLADLRPLTPDSPLIAELKVLSRDQDSLIVSQTRILNQLTACLKAYYPVALTLFAKLHQQSTIAFLRAYPTPQDAMASSEAAIAAILKQAGHTRAAQAAATIAQTLHQPHLLADAVTTRTKARLMLALLAQLGPLMQQIAAYDTEIERLFLMSADSGLFASLPRAGKRLAPRLLAEIGDDRSRYTDAAALQALSGTAPVCFESGKYARAHRRYACLKPLRNAMQHFAWQSTLQEPWALAYYQRKRAEGKSHSVALRSLANVWLRIIYAMWRDHTPYVRPTFQAAQEQHMRKAA

SEQ ID NO: 14495 - protein, 341 aa, unidentified
  source 1..341: note = protein_3a27b02
  REGION 6..147: note = RuvC_domain
  SITE 9: note = RuvC_P1
  SITE 51: note = RuvC_P2
  SITE 86: note = RuvC_P3
  SITE 88: note = RuvC_P4
  SITE 91: note = RuvC_P5
  REGION 210..300: note = Tnp_domain
  SITE 218: note = Tnp_P1
  SITE 250: note = Tnp_P2
  SITE 258: note = Tnp_P3
  SITE 259: note = Tnp_P4
  SITE 272: note = Tnp_P5
MYRTKVGVDLAKYIIQVCILNGKKVTSNLEMTTDEFLCWLVKSKPMTIAFEACSTSNYWYQQAIKAGHDARLVSAKLVKAVRQNQKTDKNDALAIVQTLFLPEMSFIAGKSIEQQQLQSIQRLRELALKHQGAAQKQIVSLLLELNIRVPNAQASLLSKLEDMLEDAENDLPDIFRATLGVAKNQLENMINTIREYDKHLEKTIHSLPDCKKLLKLEGVGPINAVNLYIALSGEQSQPFKKGKDASACIGLTPIQYSSGGKTNIGTIGKHCKNTFLRSQLIAGAMAVVIKVLKYGTKTKKELWLQGLMQRRGNKCAAVALANKTVRTAHAMLSQNTEYHAA

SEQ ID NO: 14496 - protein, 387 aa, unidentified
  source 1..387: note = protein_68b1d9a
  REGION 5..161: note = RuvC_domain
  SITE 8: note = RuvC_P1
  SITE 59: note = RuvC_P2
  SITE 100: note = RuvC_P3
  SITE 102: note = RuvC_P4
  SITE 105: note = RuvC_P5
  REGION 261..347: note = Tnp_domain
  SITE 269: note = Tnp_P1
  SITE 299: note = Tnp_P2
  SITE 307: note = Tnp_P3
  SITE 308: note = Tnp_P4
  SITE 320: note = Tnp_P5
MIYYVGIDISKYKHDFCIISNTGEVIVENGSFENNKKGFQFLLDQLKPYNKSNVHIACEATGHYSLNLELFLSSHGYSFMKMNPLIVHQFLKARSLRRTKTDKADSITIANYLMSVPYKPNSDLLYHIYTLKSLCRSREQLIKEKSKFQVLLTNELDKAFPELKTFFNNKISETLLYILNKYKNPKHISIMKDYDSLRKISHGKFTYSKFVKLKTLAKNTVGHYDDNTDLLISSYVSLIYMFNNKIDPIDKRISTIIKELNPRMLSIPGMGEISAATILSEYGDINNFSSPSKMLAFAGLEPSIIQSGTLHTNGKMVKHGSGHLRYSIMNISMSILRYSPTFYDYYLKKRSEGKCHRVALSHVSKKLIRVIYSLEKNNTNFNPSLLK

SEQ ID NO: 14497 - protein, 312 aa, unidentified
  source 1..312: note = protein_a38dc17
  REGION 6..155: note = RuvC_domain
  SITE 9: note = RuvC_P1
  SITE 53: note = RuvC_P2
  SITE 93: note = RuvC_P3
  SITE 95: note = RuvC_P4
  SITE 98: note = RuvC_P5
  REGION 189..273: note = Tnp_domain
  SITE 197: note = Tnp_P1
  SITE 226: note = Tnp_P2
  SITE 234: note = Tnp_P3
  SITE 235: note = Tnp_P4
  SITE 246: note = Tnp_P5
MTQITIGVDVSKDTLDVHLHPDGTHRQFTNDDTGYRAILGWIAGRPVARLVFEATGAYHRAFERVMGQAGIALCKVNPARARRFAEATGQSAKTDRIDAAMLARMGAVLEPETRAAPSKTACDLKELHMMRAALVKDRTAAKNRAGTLTLALLKRQLRQRLVAIDRQIRQIEQAMHALIETDPELARKRDILISIPGIAERSAFALLTGMPELGNLNSQAAGALAGTAPRTRQSGKWTGKAFVQGGRAHVRRSLYMPALAAARFNPDLKQTYKSLTGRGKPPKLALTAIMRKLIVLANTLIRDNRKWTPQHH

SEQ ID NO: 14498 - protein, 410 aa, unidentified
  source 1..410: note = protein_ca9bab5
  REGION 6..170: note = RuvC_domain
  SITE 9: note = RuvC_P1
  SITE 63: note = RuvC_P2
  SITE 109: note = RuvC_P3
  SITE 111: note = RuvC_P4
  SITE 114: note = RuvC_P5
  REGION 282..368: note = Tnp_domain
  SITE 289: note = Tnp_P1
  SITE 319: note = Tnp_P2
  SITE 327: note = Tnp_P3
  SITE 328: note = Tnp_P4
  SITE 341: note = Tnp_P5
MSQLYVGIDVSSKSNVAYLMKPDGSKHSTFLVRNSLDGSRQLVKRIHNAITSESLTDVIIGLESTSVYGDNLVCFLREDGTLTPYNKKIHVLNPKQVAKFKLAYNDLPKNDYVDAFVIADCLRFGRINKEVYLDDYRYKALQNLTRARFFAVQNLTKEKQRFLNYLFKKYSTMAQEKVFSDTFSTTALAVYEEFDSAETLAEMDLQQLTVFIKEKGKNRFPDPDAVAKAIQKAARSSYRLPKTVNDSVNQVLSISISSMRAMEQQIKAFDKAIADQMELIPNTLTSIKGIGPVYSAGIIAEIGDINRFPNQASLAKYAGLAWQQHQSGDFESQNTRMIKSGNRYLKYYLGEAAMSLVRCDAEYSRFYHLKYNEVNKYQHKRALALTARKLVRLVFRLLKDNCLYRAPESK

SEQ ID NO: 14499 - protein, 408 aa, unidentified
  source 1..408: note = protein_784f8bd
  REGION 15..171: note = RuvC_domain
  SITE 18: note = RuvC_P1
  SITE 69: note = RuvC_P2
  SITE 109: note = RuvC_P3
  SITE 111: note = RuvC_P4
  SITE 114: note = RuvC_P5
  REGION 277..364: note = Tnp_domain
  SITE 285: note = Tnp_P1
  SITE 316: note = Tnp_P2
  SITE 324: note = Tnp_P3
  SITE 325: note = Tnp_P4
  SITE 337: note = Tnp_P5
MVMSTEAVVTQAVWAGIDAGKSDHFCVVIDAQGKRLLSQRVANDEATLLKLISSVATMADGGEVTWAIDLNAGGAALLITLLIAADQRLLYIPGRTVHHASGSYRGEGKTDAKDAAVIADQARMRRDLQPLRPGDDIAVELRILTSRRTDLVADRTRTINRLRAQLLEYFPALERAFDYSTSKAALLLLTGYQTPDGLRRAGTARLAAWLGKRKARNADAVAAKALQAAHAQHTVIPGQQLAAAIVARLAKEVMALDTEIGDTDAMIEERFRRHRHAEIIVSMSGFGVTLGAEFLASTGGDMSAFDSVDRLAGVAGLAPVPRDSGRISGNLQRPRRYNRRLLRACYLSALYSIRSDPASRTYYNRKRAEGKRHSQAVLALARRRLNVLWAMLRDHTTYQPTTPTAAAA

SEQ ID NO: 14500 - protein, 427 aa, unidentified
  source 1..427: note = protein_32707fe
  REGION 4..157: note = RuvC_domain
  SITE 7: note = RuvC_P1
  SITE 59: note = RuvC_P2
  SITE 94: note = RuvC_P3
  SITE 96: note = RuvC_P4
  SITE 99: note = RuvC_P5
  REGION 283..369: note = Tnp_domain
  SITE 291: note = Tnp_P1
  SITE 321: note = Tnp_P2
  SITE 329: note = Tnp_P3
  SITE 330: note = Tnp_P4
  SITE 342: note = Tnp_P5
MLGVGIDWAEEFHDVALGRPGDGVFDEIHVDHTPAALDALIARIVALEPDAAEVRVVIETRHGLLVERLVDAGFTVLPVNPDLIARRRGPAKKKDDAADARIACRLALDRFTDLRALVPHGEQAGQLRAIARDDLRAQRDARRLLNRLRADLIATFPAALAIAGDDMAAPTFLKLLQRWPTADALASAARDELEAFARSCRHGWPDRFTDKVTAALAADQLAAKPYLVRAKADTIRLAAAQLLLIHTQRHAWEKRMGALLLGAPREGRAHQPGDDRGPAVPGGEIYLSFPGLGDRLAARIAAEIGDITTFTTANARQCYAGKAPVTRRSGKSELTVATRLACNRFLADAVQQWAFTSLLRSRWAREFYDAKTAIGNNHHKALRALGNRWLEVLWHCLTHGVAYDEAVHVANRNRALGRLNQPRKQAA

SEQ ID NO: 14501 - protein, 271 aa, unidentified
  source 1..271: note = protein_def7f6c
  REGION 2..77: note = RuvC_domain
  SITE 17: note = RuvC_P3
  SITE 19: note = RuvC_P4
  SITE 22: note = RuvC_P5
  REGION 141..228: note = Tnp_domain
  SITE 149: note = Tnp_P1
  SITE 179: note = Tnp_P2
  SITE 187: note = Tnp_P3
  SITE 188: note = Tnp_P4
  SITE 200: note = Tnp_P5
MKLIAPQFVKPYVKSNKNDANDAEAICEALSRPNMRFVTVKTIEQQDIQAVHRVRFELSNQRKAKGNQIRGLVAEYGLVAPKELWHLRVAIPVWLEDAENGLSARLRRLLSGLWQDLLVLDQRMTELDREIALIANADPVAKRLQQLRGVGPMIATALVATVGDAKQFANGRQMAASIGLTPRQNSSGGKERLLGISKRGDTYLRTLLIHGARSIVRTAKGKDDRLSQWVTRIAETRHYNVAAVALANKTTRIAWAMMKHGTECRADQTAA

SEQ ID NO: 14502 - protein, 391 aa, unidentified
  source 1..391: note = protein_b6c15c2
  REGION 6..163: note = RuvC_domain
  SITE 9: note = RuvC_P1
  SITE 61: note = RuvC_P2
  SITE 102: note = RuvC_P3
  SITE 104: note = RuvC_P4
  SITE 107: note = RuvC_P5
  REGION 267..351: note = Tnp_domain
  SITE 273: note = Tnp_P1
  SITE 303: note = Tnp_P2
  SITE 311: note = Tnp_P3
  SITE 312: note = Tnp_P4
  SITE 324: note = Tnp_P5
MSMYFVGIDISKYKHDCCILSAAEQKVVSKFTIKNDKSGFAQLLTIFNSLSNPEDIRIGFESTAHYALNLELFLENANHSFMEVNPVLIKEYKKSTTLRRTKTDSVDCESIARWLMTVEYKPHSKGFYHAYSLKSLTRLRDKFIRQRSFYLVKITNVLDHTFPEFKPFFNERLSKTALYLLENYGSAEKMARMNSTSYEKLRSVSRGKFSPQQFLRLKELAANTVGVNNSIFDVELNSLLTLYKSLVKEIDTLENEIYKLIEEVHPHYMSVPGIGPLSAAVIYSEYGDITNFSNPGQMLAFAGIEPGINESGTESHGGRMVKRGSSQLRYTLINCCLPLIRFDMTFAAYYARKRGEGKPHRVAITHVAKKLIRVIYALERQDMDFNIQRLR

SEQ ID NO: 14503 - protein, 306 aa, unidentified
  source 1..306: note = protein_b3909d7
  REGION 6..148: note = RuvC_domain
  SITE 9: note = RuvC_P1
  SITE 52: note = RuvC_P2
  SITE 87: note = RuvC_P3
  SITE 89: note = RuvC_P4
  SITE 92: note = RuvC_P5
  REGION 211..297: note = Tnp_domain
  SITE 219: note = Tnp_P1
  SITE 249: note = Tnp_P2
  SITE 257: note = Tnp_P3
  SITE 258: note = Tnp_P4
  SITE 272: note = Tnp_P5
MSLSIYGIDLAKHSFSIHGEDATGKVLIHKTISRSKVLATFANIPPALIGIEACGASHYWARKLTKLGHTVKIMASKYVAPFRTGAKNDLNDAAAICVAVTRPSTRFVKIKSAEQQAILMLHRARDNWVHERTALLNQIRAIMAEFGIITPKGRHALQSMIPLVLEDADNQLPDLARAIIADCYEHLCCINQRISDQEHFFDMLISRSHNAKKIMKVAGIGPITATAIIASVGKGEQFDKGRDFAAWLGLVPTQYSTGGKPRLSLWCKSLVERRGLKRAIVALAAKNARIVWSLLYHDTEYAPMNN

SEQ ID NO: 14504 - protein, 402 aa, unidentified
  source 1..402: note = protein_c8932e2
  REGION 7..172: note = RuvC_domain
  SITE 10: note = RuvC_P1
  SITE 63: note = RuvC_P2
  SITE 103: note = RuvC_P3
  SITE 105: note = RuvC_P4
  SITE 108: note = RuvC_P5
  REGION 272..357: note = Tnp_domain
  SITE 280: note = Tnp_P1
  SITE 310: note = Tnp_P2
  SITE 318: note = Tnp_P3
  SITE 319: note = Tnp_P4
  SITE 330: note = Tnp_P5
MDTPLLVAVDVGSRFHQVAVGDGTGHVLDEFRIDHEPSGFTAFFERVERHRRSPDQRVQVAMEGYNGWARPLDSQTLARGWALYNVNNLKLARYKEIFPAPAKTDAIDSRRMLELFALDQQPGVARNALQRVTLIPKAHRHLKYLTRRRRVLVQERAGRLTRLNCDLQALCPGLLSITGSIDNRWFLRFLTCRDRLTALPRVRASTLLRIRGIGRAYLAKIQAWQPTAQFGPDIAFGDMDVVTDARLILTLSERITELDTELERLACESQPARLLRSIPGFGPTGVAELVGEIGTLDRFTKESGLAVYVGMAPLANSSGVRDRGKRPRSVNTRCQNALMTCVARHMAHVPESRAYYDRKRAQGKTHNQAVRALGRHLIRMIWTMLRQGREYHRLPTFETPKP

SEQ ID NO: 14505 - protein, 344 aa, unidentified
  source 1..344: note = protein_de5da10
  REGION 6..147: note = RuvC_domain
  SITE 9: note = RuvC_P1
  SITE 52: note = RuvC_P2
  SITE 87: note = RuvC_P3
  SITE 89: note = RuvC_P4
  SITE 92: note = RuvC_P5
  REGION 211..299: note = Tnp_domain
  SITE 219: note = Tnp_P1
  SITE 250: note = Tnp_P2
  SITE 258: note = Tnp_P3
  SITE 259: note = Tnp_P4
  SITE 271: note = Tnp_P5
MNVTTFGVDIAQNVMQVHWVDGQTGEVGRRALKRSQLAPFFARQGPCRIVLEACGGGHYWGRTLSALGHEVRLIHARHVRPYVRGNKDDAADAQAIWSAAQQPDRRWVPIKSEEQQAVLSLHRVRSQWIKVRTQTINSLRGLLYEFGVVLPGGRQAGVKAIGVHRAQIDAQVPALMHAMIDGQLRMLSQIDERIDAIEAQLHALEKQLDSARRVRQIPGVGLLGATALAAVLGDDAKGYRNAREFAACLGLVPCHRGTGGKVVIGRLSKRGDPYLRTLLMHGARAVIFSSKTKSAWLQQLLARRPVNVVVAALANKIARTAWALVAHGREYQAGGFAHAPAPQP

SEQ ID NO: 14506 - protein, 340 aa, unidentified
  source 1..340: note = protein_eba00e2
  REGION 7..148: note = RuvC_domain
  SITE 10: note = RuvC_P1
  SITE 53: note = RuvC_P2
  SITE 88: note = RuvC_P3
  SITE 90: note = RuvC_P4
  SITE 93: note = RuvC_P5
  REGION 212..297: note = Tnp_domain
  SITE 220: note = Tnp_P1
  SITE 250: note = Tnp_P2
  SITE 258: note = Tnp_P3
  SITE 259: note = Tnp_P4
  SITE 271: note = Tnp_P5
MSTIQVIGIDLGKSNFHVYALDSNPNSSFKKHFSRKQLIDFLSNQLPTVVAFEACGGAHWLARKCQDLGHVVKLIPPQYVKPYVKTNKNDFVDAEAITEAATRHNMRFVSPKTEEQQVIAICHRVRDGYVKERTAVMSRIGATLLEFGLSLPTGHKCMKELFCWLARQEHVTLPPLLLRELEVMHSDYHRLNDQIAEQDRKLKEWAKQEELCELVKSIPGVGDMVATALVMEVGSAVQFRNGREMAAWMGLVPRQYSTGGKHKLLGISKRGNKHLRCLFVHGARAMMSRLGRNKGPYDVWLLKLRESKPFNVVCIALANKLARIAWAVLTTRTPFQGTAC

SEQ ID NO: 14507 - protein, 341 aa, unidentified
  source 1..341: note = protein_ef9a553
  REGION 7..149: note = RuvC_domain
  SITE 10: note = RuvC_P1
  SITE 53: note = RuvC_P2
  SITE 88: note = RuvC_P3
  SITE 90: note = RuvC_P4
  SITE 93: note = RuvC_P5
  REGION 211..298: note = Tnp_domain
  SITE 219: note = Tnp_P1
  SITE 249: note = Tnp_P2
  SITE 257: note = Tnp_P3
  SITE 258: note = Tnp_P4
  SITE 270: note = Tnp_P5
MTNATLIGIDLGKHCFFVHAQDARGTQIWRKKMTRKQLYARLATCPVAVLAMEACAGAHWLARKFQLYGHQVRLIAPHFVRPFVKGNKTDFADAEAICEAASRPAMRFVVVKTAEQQTWLALHRVRESLVGERTATSNQIHAFLLEFGIDLPIGALAITRLPVLLDESRHALPPTMVTLLLRLHQRYARLSQEIVELETQIKQQTLEDEAGQRLLTIPGIGPITASSLLAMAGDARAFKCSRDFAASLGLVPRQHSTGGRAALLGISKRGNKQLRSLLVQGARAVMRFAEQRTDALGRWLQALLRRRHSNVVACALANKMARIAWAILAKGGEYRAQPAIA

SEQ ID NO: 14508 - protein, 404 aa, unidentified
  source 1..404: note = protein_f12bf51
  REGION 5..161: note = RuvC_domain
  SITE 8: note = RuvC_P1
  SITE 57: note = RuvC_P2
  SITE 98: note = RuvC_P3
  SITE 100: note = RuvC_P4
  SITE 103: note = RuvC_P5
  REGION 270..356: note = Tnp_domain
  SITE 278: note = Tnp_P1
  SITE 309: note = Tnp_P2
  SITE 317: note = Tnp_P3
  SITE 318: note = Tnp_P4
MRLFVGHDWAEAHHDVFVEDEAGGKLAAVRVPEGIEGVARFHALVADHIDDPSEVMVATETDRGLFVGALVAAGYRVLAINPMSVARYRERHATSGAKSDAADAWVLAELARVDGQHHRPISGDTGLADAVRALARAHQSLIWARKRHTNQLRSALREFYPAALDAFDDLASGDALAVLAIAPTPTAGRHLTSPRIVSALRRGGRQRLVDQRAGEIRQALRAEHLRAPDVVADAMGATVVALVGVISELRIQIRRLETELADRFDQHPDATIIRSLPGLGMILGARVLAEFGDDPNRFDSAKSRKNYAATSPITRASGKHQVVLARYARNHRLADTCHLWAFAAITASPGARAFYDHRRQTGDTHNRALRALANRLVGILHGCLRHGAPYDEHTAWAHRNDLAA

SEQ ID NO: 14509 - protein, 415 aa, unidentified
  source 1..415: note = protein_bb3767f
  REGION 19..175: note = RuvC_domain
  SITE 22: note = RuvC_P1
  SITE 72: note = RuvC_P2
  SITE 112: note = RuvC_P3
  SITE 114: note = RuvC_P4
  SITE 117: note = RuvC_P5
  REGION 290..377: note = Tnp_domain
  SITE 298: note = Tnp_P1
  SITE 328: note = Tnp_P2
  SITE 336: note = Tnp_P3
  SITE 337: note = Tnp_P4
  SITE 350: note = Tnp_P5
MAANLKLIGLRGIQEMNAVGIDVSKGKSTVAIMRPFGEVVAEPFEVSHTDAELRKLACFLEKLPGETRIVMEYTGSYWQPIAKVLHDAGLFVSVVNALLIYKYGNNSIRKGKTDKLDAVKIANYCLDRWTTLESYTPVDQIRQTLKTCRRQYDQYIKLKVNLKNNLISLLDETFPGVNTLFKSAPRDADGHEKWIDFAGKFWHRECVCGKSEKAFTNQYRKWCAKAGYRFSSEKAVSIYAHAASQVDTLPMTDAIRCLITHAVAQLNTIIETISAIQHEMLTLASQLPEYPIVMQMFGVGPVLGPQLMAEIGDVRRFDRKQSLVAFAGVDAPPCQSGTFDSKNRHISKRGSPRLRKTLFQVMTTLIQHAPADDPVFQFLDRKRREGKHYYVYMTAAANKFLRIYYGTVTAYLEKL

SEQ ID NO: 14510 - protein, 348 aa, unidentified
  source 1..348: note = protein_09ddd96
  REGION 7..147: note = RuvC_domain
  SITE 10: note = RuvC_P1
  SITE 53: note = RuvC_P2
  SITE 88: note = RuvC_P3
  SITE 90: note = RuvC_P4
  SITE 93: note = RuvC_P5
  REGION 210..298: note = Tnp_domain
  SITE 218: note = Tnp_P1
  SITE 248: note = Tnp_P2
  SITE 256: note = Tnp_P3
  SITE 257: note = Tnp_P4
  SITE 269: note = Tnp_P5
MEKIIRIGMDTSKSVFQLHGVNAGEQPVLRKKLSRKEMVKFFEKAPPTAIALEACGGSHHWARLLSSFGHEVKLIAPQLAKPYVKRGKNDAADAEALCEAMSRPTMRFVPMKTADQQAALMLVGVRQRLLHNRTQLANAIRGFAMEFGIVAAKGMCRIEPLLERIAADQSLPELARELFAMHGEEYRDLLAEIKTVDEKLIALHRSDECSKRLAEIPGVGPIGASLLMMKAPDPKMFRSGRDFAAWIGLTPKDHSTAGKVRLGVITRAGDEMLRSILVVGATSLLQHVRTGRSRHASRWLLELLQRKRPKLVAVALANKIARIAWKLMVSGQPYRKSQDVQQPAGLTA

SEQ ID NO: 14511 - protein, 420 aa, unidentified
  source 1..420: note = protein_fbbf133
  REGION 29..183: note = RuvC_domain
  SITE 32: note = RuvC_P1
  SITE 80: note = RuvC_P2
  SITE 120: note = RuvC_P3
  SITE 122: note = RuvC_P4
  SITE 125: note = RuvC_P5
  REGION 290..375: note = Tnp_domain
  SITE 298: note = Tnp_P1
  SITE 328: note = Tnp_P2
  SITE 336: note = Tnp_P3
  SITE 337: note = Tnp_P4
  SITE 349: note = Tnp_P5
MPAADARSVTRPNTLPIEVDVSVEYAVFLGLDVGKGEHHACALDPSGKKLHNKALPNDEQRLRTLFTQLGRHGRVLVVVDQPASIGALPVAVARDQGCQVAYLPGLTMRRLADLHPGNAKTDARDAYIIADAARTLPHSLRRVDTGQEALAELEVLVGFDDDLAGESTRLVNRIRGLLVTIHPALEKALGPRLHHPAALELLITYGGPDGLRAAPADDLLATTKPLAPRMAGRLVEAVKTALDAQTVVVPGTTAAVTVLPHLARSLRSVHDQRDQVATQVEEILDAHPLAKVLISMPGLGIRTSARILLEIGDITAFATPGHLAAYAGLAPVARRSGSSIKGEHPPKGGNKALKRAMFLAAFASLSDPLSRAYYDRKRAEGKKHNAALICLARRRSDVIYAMLRDKQPYQPTRKLTAQAA

SEQ ID NO: 14512 - protein, 324 aa, unidentified
  source 1..324: note = protein_dab66eb
  REGION 6..160: note = RuvC_domain
  SITE 9: note = RuvC_P1
  SITE 62: note = RuvC_P2
  SITE 102: note = RuvC_P3
  SITE 104: note = RuvC_P4
  SITE 107: note = RuvC_P5
  REGION 202..288: note = Tnp_domain
  SITE 210: note = Tnp_P1
  SITE 239: note = Tnp_P2
  SITE 247: note = Tnp_P3
  SITE 248: note = Tnp_P4
  SITE 261: note = Tnp_P5
MPMYQLGIDVSKNTLDLCLLREGIKGRIKTRKLKNTADAAKVVTEWLKKQSCELGEVHIIMEATGVYHEPLAYGLHFAGARISLANPHRTREFARGMNILTKNDKVDAWMLACYGSLKEPEAWTPPPESVRYLRALLRRRDALVADSTREKNRLEKSVFTDSPDAVRASIEHMLQELNNEIEHLDVLIQEHIETHPELNQDFRLLTSIKSVGYLLGLNMLAILKSHSFESAEQAAAFLGVVPVERRSGTSVKGKPKLSKIGPPEIRTKLYLAALCGLRFNPVMKTDVYEVMPEGKVKDVCYWSINAKTCALVLWCAENTVTIRC

SEQ ID NO: 14513 - protein, 407 aa, unidentified
  source 1..407: note = protein_c9763b1
  REGION 4..163: note = RuvC_domain
  SITE 7: note = RuvC_P1
  SITE 60: note = RuvC_P2
  SITE 100: note = RuvC_P3
  SITE 102: note = RuvC_P4
  SITE 105: note = RuvC_P5
  REGION 273..359: note = Tnp_domain
  SITE 281: note = Tnp_P1
  SITE 312: note = Tnp_P2
  SITE 320: note = Tnp_P3
  SITE 321: note = Tnp_P4
MLFLGDDWAEAHHDIEIEDDQGRVLVRRRLPEGVSGLATLHALVGDHLQEGEEPEQVLVGIETDRGPWVQALIAAGYTVYPINPLQAARYRERHGVAGAKSDPGDAHVLAEIVRLDRAHHRPAAGDSTVAEGVRLAARAHQSMIWMRQRAANTLRSLLRECYPAALAAFSDDLAGRDALAVLTAAPGPAPGRGLSVSRVAGLLRKAGRQRNIDARAAEIVTALRSKQIPVRDELAVVNAASVSALVAVLTTMVAQTGALEEQVRLGFGQHPDAEIYLSQPGLGTILGARVLAEMGDDPDRYADARARKNYAGMAPITRASGTKRVVLARYARNRRLADALYQQAFSALTSSPGARACYDRHRARGATHHQALRALANRLVGILHGCLRHHTRYDEATAWATEHQLAA

SEQ ID NO: 14514 - protein, 411 aa, unidentified
  source 1..411: note = protein_406fc5f
  REGION 5..164: note = RuvC_domain
  SITE 8: note = RuvC_P1
  SITE 61: note = RuvC_P2
  SITE 101: note = RuvC_P3
  SITE 103: note = RuvC_P4
  SITE 106: note = RuvC_P5
  REGION 272..358: note = Tnp_domain
  SITE 280: note = Tnp_P1
  SITE 311: note = Tnp_P2
  SITE 319: note = Tnp_P3
  SITE 320: note = Tnp_P4
MRLFAGDDWAEDHHDVEVMNEAGKVLAKKRLPEGVAGMAGLHEMIGRHLGEDADDAEVAVGIETDRGPWVAALVAAGYTVFGVNPLQASRYRERHGVSGARSDSGDAHMLADMVRTDSRQLRAVAGDSAEAEGIKVLARTHKTLIWERTRQVQRLRHQLREYFPAALEAFDDLDAPGALELLGKAPDPARAARLTRAQVSAALKHAGRRNITDKATAILAALRGEQLGQPAAVTAAYAVTVRSLIAVTAALNEQVRILQGQVEADFGRHPDAEIYRSQPGIGAILGARVPGEPGDDPDRYADGKCRRNYAGTSPLTRASGKKKVVAARFIRNDRLVDALNARAFASLNASPGARALYDELRARGIEHNDALRRLANRLVGILHGCLKTHTLYDEATAWSHRQNLPQSSVAA

SEQ ID NO: 14515 - protein, 391 aa, unidentified
  source 1..391: note = protein_9228002
  REGION 4..163: note = RuvC_domain
  SITE 7: note = RuvC_P1
  SITE 60: note = RuvC_P2
  SITE 101: note = RuvC_P3
  SITE 103: note = RuvC_P4
  SITE 106: note = RuvC_P5
  REGION 266..353: note = Tnp_domain
  SITE 274: note = Tnp_P1
  SITE 304: note = Tnp_P2
  SITE 312: note = Tnp_P3
  SITE 313: note = Tnp_P4
  SITE 326: note = Tnp_P5
MICVGIDVAKDKHDCFIINSEGEVLEDVFTIPNNMEGFHCLIQKIQACSTTQDKIKVGLEATGHYSYNILGFLLDNGLPTYVLNPLHTNLYRKSLSLRKTKTDRVDARTIAAMLMSDVGLKPYTDTVYHNEELKSLTRYRFDKVRERAKLKQSISRLVCILFPELEKLVTTLHMTSVYALLDEFPGAKQIAQAHLTHLKSVLHDASKGRYSRDTALSIREAAKVSIGSVMPAKSLELRHTIRLIRELDAEIEEIESAIQRIMDELDSPITTIPGISTRMGAMILAEVGDFSRFDSPDKILAYAGLSPSTYQSGQLTNCYAHMEKRGSRYLRFAIFNATKYVCHWDTTFSAYLAKKRSEGKHYNVAISHTAKKLVRLIYALEKSGKPYRPAA

SEQ ID NO: 14516 - protein, 324 aa, unidentified
  source 1..324: note = protein_84ac9ef
  REGION 5..160: note = RuvC_domain
  SITE 8: note = RuvC_P1
  SITE 58: note = RuvC_P2
  SITE 98: note = RuvC_P3
  SITE 100: note = RuvC_P4
  SITE 103: note = RuvC_P5
  REGION 196..282: note = Tnp_domain
  SITE 204: note = Tnp_P1
  SITE 234: note = Tnp_P2
  SITE 242: note = Tnp_P3
  SITE 243: note = Tnp_P4
  SITE 255: note = Tnp_P5
MTAVVGIDIAKQTFDIATLQSNGKYRTKAKLPNDLKGFETLQQWLLKHAEPQAWIVMEATGIYHEALAEWLFKQGYRVCVLNPAQPAFYARSQLQRVKTDKVDAKLLTDYGSRHLAELRSWQPEAPEIRRLRALVHRLKDIQELEQIERNRLESTQESKVRDSIQSVLDHLKKQTDETLKAIKQLFDDNDDLRGKRDLLTSIDGIADRTAALLLAELGDIQRFNSSKAVTAFSGLNPRLQESGKHKGHVRISRMGPARLRAGLYMPAVSSLTHNQAIREMGERMKAKGKAGKQIACAAMRKLLCIAYGVLKSGRPFDPALAIAR

SEQ ID NO: 14517 - protein, 323 aa, unidentified
  source 1..323: note = protein_917869b
  REGION 5..155: note = RuvC_domain
  SITE 8: note = RuvC_P1
  SITE 58: note = RuvC_P2
  SITE 98: note = RuvC_P3
  SITE 100: note = RuvC_P4
  SITE 103: note = RuvC_P5
  REGION 195..280: note = Tnp_domain
  SITE 203: note = Tnp_P1
  SITE 233: note = Tnp_P2
  SITE 241: note = Tnp_P3
  SITE 242: note = Tnp_P4
  SITE 254: note = Tnp_P5
MTCVIGIDIAKHTFDIAKPLERDKYRTKAKLANSPEGFKQFDQWLEKHAEPHCWVLMEATSVYHEALATHLHQQGYQVCVINPARIAKYAQSELRRVKTDKTDAKLIARYAQRHLEELRPWEPEPESIRQLRGLVRRLADLKELAQMERNRLDVSAESAQASIRVHLEHLDGQIALINTAINDHIDNDPDLREQKRLMKSIDGVSDGTTATLLAELGSPLRFDSARQLAAFCGLTPRLQESGIYRGKSTISRTGSGRLRAALYMPALSAMTYNPVIKAMKVRLAERGKAGRLAVCAAMRKLLHIIYGVLKSGQPFDPIRALAR

SEQ ID NO: 14518 - protein, 396 aa, unidentified
  source 1..396: note = protein_40798af
  REGION 4..158: note = RuvC_domain
  SITE 7: note = RuvC_P1
  SITE 59: note = RuvC_P2
  SITE 99: note = RuvC_P3
  SITE 101: note = RuvC_P4
  SITE 104: note = RuvC_P5
  REGION 264..354: note = Tnp_domain
  SITE 272: note = Tnp_P1
  SITE 302: note = Tnp_P2
  SITE 310: note = Tnp_P3
  SITE 311: note = Tnp_P4
  SITE 327: note = Tnp_P5
MATIGIDIGGRSHAVARCREGLVRADREVLRVSQSRAGFAALDTWLERQAEPVSLVTMESSGHYWMPLASHLRRQDVPVAVVNPLSAKYFARSRLARTKSDPADARSLAEMGMRDQPAARDPLAGAELRQAARFAMTLVDEQAKVCQRLIRLVELGFPELGELFDDPTCRTAREVLRIAPTARAATKRRTTTLANANAGPGHRRLGQTKAERLQAAAADSIAVPELDAEVAFEVGILLDQYDLLERQIEVADARVAGLLDGETARRLRTIPAVGPAIAATFLAEIGDIDRFSDFDQLLAFAGVHPAERSSGRKGSNPETAWHMSKAGNSHLRAAAYRMAVVGVQHNPVIRAHYERKRAAGKSKMNALGHCMRKALSLVWGVWRNGQDFDPNWGLEA

SEQ ID NO: 14519 - protein, 374 aa, unidentified
  source 1..374: note = protein_07b50a9
  REGION 7..147: note = RuvC_domain
  SITE 10: note = RuvC_P1
  SITE 53: note = RuvC_P2
  SITE 88: note = RuvC_P3
  SITE 90: note = RuvC_P4
  SITE 93: note = RuvC_P5
  REGION 210..295: note = Tnp_domain
  SITE 218: note = Tnp_P1
  SITE 248: note = Tnp_P2
  SITE 256: note = Tnp_P3
  SITE 257: note = Tnp_P4
  SITE 269: note = Tnp_P5
MPEIIRIGLDTSKSVFQLHGVDAADRPVLRKKLRRRDVLPFFAKLAPTRIGMEACGGAHYWARELKALGHEAVLLPPQYVKPYVQRNKNDAADAEAICEAMSRPRMRFVPVKTAEQEAAQMLMGMRARLVGCRTQLSNAIRGYAAEFGVVAAKGLNKIEPLLARLESDPAVPETAKQLFAAHGQEYAALKAEVREIEAKLVAWHRQNELSRRLAEVPTIGPIGACLLVTKVTDPQAFRCGRDLSAWVGLTPKDHSTAGKVRLGVITRAGDETLRKVLIAGATAVIQQVRKGRGNPSPWLVDLVRRKPPKLAAVALANKMVRVAWRLMVSGERYNPHHRRSPRGAPRSAMGGCAPRPSLASCPTAGATPAAPMRA

SEQ ID NO: 14520 - protein, 364 aa, unidentified
  source 1..364: note = protein_8db8f0f
  REGION 8..135: note = RuvC_domain
  SITE 32: note = RuvC_P2
  SITE 73: note = RuvC_P3
  SITE 75: note = RuvC_P4
  SITE 78: note = RuvC_P5
  REGION 238..325: note = Tnp_domain
  SITE 246: note = Tnp_P1
  SITE 276: note = Tnp_P2
  SITE 284: note = Tnp_P3
  SITE 285: note = Tnp_P4
  SITE 298: note = Tnp_P5
MPTAWRAFNSFWKRFTAVLYLKTVYSIKVGLEATGHYSYNLLGFLLDSGLPTYVLNPLHTNLYRKSLSLRKTKTDKVDARTIAAMLLSDLGLKPYTDTAYHNEELKSLTRYRFDKVRERAKLKQSVSRLVCILFPELENLVPSLHMSSVYALLEEFPGAKQIADSNLTRLKFLLAGASKGRYGRDIAVAIRDAAGASIGSIMPAKSLELRHTIRLIRGLDAEIADIESSIRSVMEELHSPITTIPGMGLRMGAMIVAEVGDFSRFDSPDKVLAYAGLSPSIYQSGQLNNGYAHMEKRGSRYLRFAIYNAAKYVCIWDPTFAAYLAKKRAEGEHYNVASHAAKKLVRLIYAMEKSRLPYRPVTAT

SEQ ID NO: 14521 - protein, 408 aa, unidentified
  source 1..408: note = protein_e4896c5
  REGION 9..154: note = RuvC_domain
  SITE 12: note = RuvC_P1
  SITE 58: note = RuvC_P2
  SITE 93: note = RuvC_P3
  SITE 95: note = RuvC_P4
  SITE 98: note = RuvC_P5
  REGION 250..337: note = Tnp_domain
  SITE 258: note = Tnp_P1
  SITE 289: note = Tnp_P2
  SITE 297: note = Tnp_P3
  SITE 298: note = Tnp_P4
  SITE 309: note = Tnp_P5
MEVVYRCCCGIDVHKKVIVACLNNGGEQDLREFGTTTSEIKSLAKWLTESGCEMIAMESTGVFWKPLYNLFELMDLDAIVVNAAHMKALPGRKTDVKDAEWIADLLRHGLLKASYIPSREQRELREITRYRKSLTEERCRETNRLQKILEGANIKLDSVVKDINGKSARKLLERIIEDDVPTSEAEVSRIVHGSMRSKLGQLVTAIEGITTPLQRKLLAQVIDHIDDLNRRIANLDELVQDYMDEYVAAIAALCEIPGIARRSAEVILAEIGLDMSRFPSAAHLCSWAGVCPGNYQSAGHRKHGKTTKGNKALKTILTQCAKSARSVKKSYFSAQYQRISARRGKNRATLAVAHSMLIAIYHMLKNNVPFRDLGADYYDSFNRDKKIHGYLKRLKALGWEPDTLPGSA

SEQ ID NO: 14522 - protein, 261 aa, unidentified
  source 1..261: note = protein_5b08017
  REGION 5..153: note = RuvC_domain
  SITE 8: note = RuvC_P1
  SITE 52: note = RuvC_P2
  SITE 92: note = RuvC_P3
  SITE 94: note = RuvC_P4
  SITE 97: note = RuvC_P5
  REGION 147..223: note = Tnp_domain
  SITE 175: note = Tnp_P2
  SITE 183: note = Tnp_P3
  SITE 184: note = Tnp_P4
  SITE 195: note = Tnp_P5
MQHTIGIDISKGTLDCFELSSSKHYQYPNDDLGQKDLIKWIKKQDAVLVVFEATGAYHRSLEATLARHKHPFAKVNPRQARRFAEATGRLAKTDRVDAVMLAKMGSILDLPAQEPKSENINILRELLTARRALTKDNAAAKTRAQTTVHAVLKIQIKARQKQITLQLKQAASLAGLAPISRQSGKWQSKERIQGGTAFFRRAMYMPALCIIRHNLSSKQKYDQMIKTGKPAKVAITAIMRKLDVLANVLLRDDWMWAEKPT

SEQ ID NO: 14523 - protein, 411 aa, unidentified
  source 1..411: note = protein_401f253
  REGION 5..163: note = RuvC_domain
  SITE 8: note = RuvC_P1
  SITE 62: note = RuvC_P2
  SITE 102: note = RuvC_P3
  SITE 104: note = RuvC_P4
  SITE 107: note = RuvC_P5
  REGION 273..373: note = Tnp_domain
  SITE 281: note = Tnp_P1
  SITE 311: note = Tnp_P2
  SITE 319: note = Tnp_P3
  SITE 320: note = Tnp_P4
  SITE 333: note = Tnp_P5
MNPVVGLDVAKGESQVQAFLDKKKPYKTSFKVPHTLEGLGTLSEFLKEIEDLIGIRPPIVLESTGHYHTPVVQYFEERGYLLIIVNPLVSYRAKSSSLRKVKTDIIDARHLCELYYKEELEPYKKRGIQLLNLRNLTRQHQSMTAMYVQTKLQFQAVLDQIFPEYEDVFGDLYSAVSLLTLLEFPTSKEVLGVEEDTLANRIDELCKSRSSKWARTQAKKLIEAASRNPFKEIWYQSHITSLELYIKMLLEYQRHLSKLEAEIDALAKEMEEYQIIQSIPGIGEKIAATIISEIGEIERFSHPKKLVAFAGLDPSIFESGRFKGTVNRITKRGSSRLRHALYMAVRCAIRDSRKKKTTPEIIPRNKKLREFYDKKRGEGKPYKVAIIACANKLIHWIFALLKSNSIFQDIA

SEQ ID NO: 14524 - protein, 347 aa, unidentified
  source 1..347: note = protein_6b7a2f7
  REGION 12..153: note = RuvC_domain
  SITE 15: note = RuvC_P1
  SITE 58: note = RuvC_P2
  SITE 93: note = RuvC_P3
  SITE 95: note = RuvC_P4
  SITE 98: note = RuvC_P5
  REGION 216..301: note = Tnp_domain
  SITE 224: note = Tnp_P1
  SITE 254: note = Tnp_P2
  SITE 262: note = Tnp_P3
  SITE 263: note = Tnp_P4
  SITE 275: note = Tnp_P5
MERASVTDVNIIGLDLAKRVFQAHGARADGSVAFRRKLTRQQVLTFFSKQPRCIVAMEACATAHDWGRELQVLGHEVRLIPPVYVKPFVKRQKNDAADAEAIAEAAARPTMRFVTVKTEEQQARAMVFRTRDLLVRQRTQLINALRGHLAEHGVVAPQGTAKVKLLSDVIEDVNTTLQPLVVELGRLYLDQIAALDGKIADLERVLKREAARGVTTSRLQTMPGIGPITAMAIETFAPPMESFRRGRDFAAWLGLVPVQHSTGGKQVLGRTSKMGQRDIRRLLIIGAMAVVKSAGRKSAPEGSWLARMLARKPRMLVAIALANKMARSAWAMLTKGEDFRVPAATAS

SEQ ID NO: 14525 - protein, 341 aa, unidentified
  source 1..341: note = protein_483b057
  REGION 7..149: note = RuvC_domain
  SITE 10: note = RuvC_P1
  SITE 53: note = RuvC_P2
  SITE 88: note = RuvC_P3
  SITE 90: note = RuvC_P4
  SITE 93: note = RuvC_P5
  REGION 212..298: note = Tnp_domain
  SITE 220: note = Tnp_P1
  SITE 250: note = Tnp_P2
  SITE 258: note = Tnp_P3
  SITE 259: note = Tnp_P4
  SITE 271: note = Tnp_P5
MSLIKVVGIDLAKLVFSIHGVDKHDKCKLRKTIKRNKLLEEITQLPPCIIAMEACSGAHYWAREFIKLGHDVRIMASKFVIPYRQNEKNDANDAEAICEAATRPKTRFVSIKSEEQQAVLCLHRIRQGAIKDRTARINRLRGLLAEFGIIMPKGRYPAQNAINGILEDAENNLPFLARELLNDLWQSIKSLNAEILKYDRKLYKLANQMKDAKRLMSIPGIGEVTATAVVATVNDAKHFDTSRSFAAWIGLVPRQYSTGGVARLGRISKRGEKHIRTCLIHGARAVIANCKNKTDRTSLWVKDLIERRGFKRATVALAAKNARLIWALLHSEKEYQIDYVK

SEQ ID NO: 14526 - protein, 348 aa, unidentified
  source 1..348: note = protein_12f56cb
  REGION 13..155: note = RuvC_domain
  SITE 16: note = RuvC_P1
  SITE 59: note = RuvC_P2
  SITE 94: note = RuvC_P3
  SITE 96: note = RuvC_P4
  SITE 99: note = RuvC_P5
  REGION 218..305: note = Tnp_domain
  SITE 226: note = Tnp_P1
  SITE 256: note = Tnp_P2
  SITE 264: note = Tnp_P3
  SITE 265: note = Tnp_P4
  SITE 277: note = Tnp_P5
MNKYSDQKSIKVVGIDLAKSVFHLHGLDKSGHTMMRKRLSRQKLIELMAQLPPCLVGMEACGGSHDWARRLMAMGHDVRLISPQFVKPYVKSNKNDAADAAAICEAVQRPDMRFVPIKSVEQQDIQSLHRARSLVVSHRTAQANQMRGLMLEYGVVIAKSVAALRKAVPEILEDADNALTPMFRELLCGLWEEMLRLDQRISTYDAEIKHLSEQSEVCKRLMTIPGIGPMVSTALVAAVADGKAFKSGREMAAWLGLVPRQHSTGGKPRLLGISKRGDVYLRKLLIHGARAALRWADRKQDRRSRWVSDLATRRGQNIAAVALANKTVRTAWALMTREEEYRTATATV

SEQ ID NO: 14527 - protein, 482 aa, unidentified
  source 1..482: note = protein_1714965
  REGION 51..197: note = RuvC_domain
  SITE 54: note = RuvC_P1
  SITE 101: note = RuvC_P2
  SITE 136: note = RuvC_P3
  SITE 138: note = RuvC_P4
  SITE 141: note = RuvC_P5
  REGION 326..413: note = Tnp_domain
  SITE 334: note = Tnp_P1
  SITE 365: note = Tnp_P2
  SITE 373: note = Tnp_P3
  SITE 374: note = Tnp_P4
MKPKQQEKTKNATYQPTQGHWQQMNRKQRREMTRKIQSEDISLEMIHPDAAGIDIGNESHYVAVPPTRDSQPVRRFGCTTAELKAMADWLKQCGIRTVAMQSTGVYWIAVYDILEEAGFEVYLVNARETKNLPGRKSDVQESQWLMKLHTYGLLRNSFRPSQEIRTMRSYWRQRNDLVQSAGRHIQRIQKALTQMNVQLANVLSDVSGMTGQTIIKAILAGERDPHKLAAFRDHRVKASEEEIARSLEGHWEDDVLFVLKQEQDGYEFCRKQMAECDQRLEQYLQQREDRSAGAAPPEEKRKERLKKKKGNKPLFDLRIGLFRMTGTDLTRIDGIDVMTAMTILSEAGSDMSKWKTEDHFVSWLRLCPDNRISGDKIIGKGRLPTNNRVSIALKMAANALRTSKTYLGAQFRRLRSRLNTPVAIKAMAAKLARLVYRMLRYGMKYVDQGAEFYETQHRRLQIKHLKTKAAKLGFQLIQVPAA

SEQ ID NO: 14528 - protein, 341 aa, unidentified
  source 1..341: note = protein_b2ca6e4
  REGION 7..149: note = RuvC_domain
  SITE 10: note = RuvC_P1
  SITE 53: note = RuvC_P2
  SITE 88: note = RuvC_P3
  SITE 90: note = RuvC_P4
  SITE 93: note = RuvC_P5
  REGION 211..300: note = Tnp_domain
  SITE 219: note = Tnp_P1
  SITE 249: note = Tnp_P2
  SITE 257: note = Tnp_P3
  SITE 258: note = Tnp_P4
  SITE 270: note = Tnp_P5
MANAALIGIDLGKQCFFLHAQDRRGNQVWRKKATRKQLYELLATCPACVVAMEACAGAHWLARKCQSFGHQPRLIAPQFVRPFVKGNKTDFADAQAICEAACRPAMRFVALKTTQQQTLLALHRVRDALVTERTATSNQIHAFLLEFGISLPASALAITRLPLLLDDPANALPPLMVALLHRLHRRHAQLAQEISELDTQIKRQVIEDDAGRRLLTIPGIGPVTASNLLAMAGDMDGFKRGRDFAASIGLVPRQHSTGGRPTLLGLFQRGGQHFRRLLVQGARSVMRVIDRRHDALGRWAQELLRRRHSNVVACALANKMARIVWAILAKGGEYRAQPVIA

SEQ ID NO: 14529 - protein, 347 aa, unidentified
  source 1..347: note = protein_a0af2c6
  REGION 15..157: note = RuvC_domain
  SITE 18: note = RuvC_P1
  SITE 61: note = RuvC_P2
  SITE 96: note = RuvC_P3
  SITE 98: note = RuvC_P4
  SITE 101: note = RuvC_P5
  REGION 220..306: note = Tnp_domain
  SITE 228: note = Tnp_P1
  SITE 258: note = Tnp_P2
  SITE 266: note = Tnp_P3
  SITE 267: note = Tnp_P4
  SITE 279: note = Tnp_P5
MANDHTNTDNVVKVLGIDLAKQSFHLYGVDVAGQRVINKTLSRKQLAAFVANLPPCLIGLEACGGAHHWARRFSAFGHTVRMMAPQFVKPYVKSNKNDAVDAEAICEAVQRPNMRFVPTKGIEQQDIQSLHRVRSQLVSRRTAQANQVRGLLLEYGLVIPKGIHHVRKALPALLEDSENALSALFRELLNELYDEMGYLDQRIATLERKLAAISAQHEDCQRLMTIPGVGLLTATALLAAIGDISVFKSGRELAAWLGLVPRQHSTGGKPTLLGISKRGDAYLRTLLIHGGRSVSRVAHKHEDKHHLWISDIKRRRGENISNVAVANKNARIAWALLTKKENYRAAA

SEQ ID NO: 14530 - protein, 419 aa, unidentified
  source 1..419: note = protein_2c6e35e
  REGION 21..177: note = RuvC_domain
  SITE 24: note = RuvC_P1
  SITE 74: note = RuvC_P2
  SITE 114: note = RuvC_P3
  SITE 116: note = RuvC_P4
  SITE 119: note = RuvC_P5
  REGION 291..378: note = Tnp_domain
  SITE 299: note = Tnp_P1
  SITE 329: note = Tnp_P2
  SITE 337: note = Tnp_P3
  SITE 338: note = Tnp_P4
  SITE 351: note = Tnp_P5
MREDALRLQSLRIGGMCMNCVGIDVSKGKSMIAVMRPFGEVVISPFEIRHTTSELSELAKRLKSLDGETRVVMESTGNYHVPVAWLLQDAGLYVSVVNALLVHDYGNNSLRRAKTDKKDAVKLANYGLDHWLTLTRYVPEANTRLLLKNCYRQYQQYSKVHTMLKNNLISLLDAVFPEVNRLFSSPPRADGSEKWVDFVSAFWHCQCISRLTLKSFSAKYLKWCKKYGYKFSQEKALELHTKACSCIGVMPSNDTTKLLVQQTIVQLQATSAALASLKQEMQSLAASLPEYPVVMGMFGIGPILGPQLMAEIGDVRRFHSKKALVAFAGIDAPPYQSGQMDIRSRSISKRGSAALRRTLFLVMGVYLQNAPQDEPVYKFMDKKRSEGKPYRVYMMASANKFLRIYYASVTTYLNTLAQT

SEQ ID NO: 14531 - protein, 331 aa, unidentified
  source 1..331: note = protein_660aff8
  REGION 7..159: note = RuvC_domain
  SITE 10: note = RuvC_P1
  SITE 59: note = RuvC_P2
  SITE 97: note = RuvC_P3
  SITE 99: note = RuvC_P4
  SITE 102: note = RuvC_P5
  REGION 202..289: note = Tnp_domain
  SITE 210: note = Tnp_P1
  SITE 240: note = Tnp_P2
  SITE 248: note = Tnp_P3
  SITE 249: note = Tnp_P4
  SITE 262: note = Tnp_P5
MEIKEVIGIDASKLTLDCCIHTIGEQAVFENSPEAISKMADWSIKTSDMGKANLLFVFEHTGLYTHQLIQYLGANGYTFHVVPGLEIKRSLGISRGKEDRADAKRIALYGYRVREEVEPYRVRGEALESLKGLMSMRRKLVSQRAGHKSTLGEQQRILDKKSGKVLFEVQQALIDALDVQVSHIENELERIIGQNPSLRNLYRLLVGIRGIGPVTARFLIVYTVGFTAFKNWRKFSSYCGTAPFPHSSGTSIRGRTKVSHLANKEGKTLLNMCAVSAIQFNPEMKAYYERRVEAGKNKMSTLNIIRNKLLARAFAVVARGTPYVNTMKYAS

SEQ ID NO: 14532 - protein, 277 aa, unidentified
  source 1..277: note = protein_bf53cc6
  REGION 6..147: note = RuvC_domain
  SITE 9: note = RuvC_P1
  SITE 52: note = RuvC_P2
  SITE 87: note = RuvC_P3
  SITE 89: note = RuvC_P4
  SITE 92: note = RuvC_P5
  REGION 211..272: note = Tnp_domain
  SITE 219: note = Tnp_P1
  SITE 249: note = Tnp_P2
  SITE 257: note = Tnp_P3
  SITE 258: note = Tnp_P4
MHIASIGIDLGKATFHLVALGEHNKVLLRKKFSRPQLLAYTANLPASLIGLEACAGAHFMGAALRGQGHQVRLIPAQFVKPYRKSNKNDFIDAEAIAEAVTKQNMRFAQLKTQEQLDWQAMHRVRDRLVRRRTALINEIRGFLLERGITFAAQPIHLRKNLPAVIEDAEQNLSPRLRWLLDRMWQEWKQTETEIQAITDEIERISEEDARCRQLRQIPGFGPLVSTATVAAIGNGSAFRRGRDFAAWVGVVPRQYSTGASRNYTASASAATSICVVC

SEQ ID NO: 14533 - protein, 344 aa, unidentified
  source 1..344: note = protein_b48f764
  REGION 6..147: note = RuvC_domain
  SITE 9: note = RuvC_P1
  SITE 52: note = RuvC_P2
  SITE 87: note = RuvC_P3
  SITE 89: note = RuvC_P4
  SITE 92: note = RuvC_P5
  REGION 211..295: note = Tnp_domain
  SITE 219: note = Tnp_P1
  SITE 249: note = Tnp_P2
  SITE 257: note = Tnp_P3
  SITE 258: note = Tnp_P4
  SITE 270: note = Tnp_P5
MSIVILGVDLGKNSCSVVGVDAAGAVVVRRTMRRQALIDYVAKLPVCMVAMEACCGAHHLGRLFAAQGHEIRLMSPEYVRPYIKAQKNDDRDAEGIAEAASRPTMRFIELKGQEELDIQTLHRVRSRLVAERTGLINQLRAILLERGVIFPAGRRKLEHGVDGMLADGDEMLSPRIGRLVVELRAEWKELDAKIGTLNGEFVKLARNDAAMRRLTSIPGIGVLNATALVAAVGNGSSFAKARDLGAWLGLVPRQHSTGGKTRLLGISKRGNTYLRTLLIHGARAALPSLSQSDTPLGRWLKAMIERGVHRNAVVVALANKLARIAWSVLRKETGFERCYPAAAA

SEQ ID NO: 14534 - protein, 330 aa, unidentified
  source 1..330: note = protein_77a91fc
  REGION 7..156: note = RuvC_domain
  SITE 10: note = RuvC_P1
  SITE 58: note = RuvC_P2
  SITE 99: note = RuvC_P3
  SITE 101: note = RuvC_P4
  SITE 104: note = RuvC_P5
  REGION 200..287: note = Tnp_domain
  SITE 208: note = Tnp_P1
  SITE 238: note = Tnp_P2
  SITE 246: note = Tnp_P3
  SITE 247: note = Tnp_P4
  SITE 260: note = Tnp_P5
MREETEAGIDVSKDVLDVAVRRHDGGLETGRFENDAAGHRTLVRWLTKRGRRVRVVLESTGTYSLDVAVALHRARGVGVMVANPRAIKQFAGALMQRSKTDLTAAAALREYAARMPFVEWRPPAGEVLALRGIARRIAALVVERTRERNRLHALQATAERVAVVLNDIEVNVRHLERRIELLTAEAVALVREHVTLHRAFERLTSVPGIATHSAVQLLPELLVLPDDMTVRQWVAHAGLDPRACQSGTSVHKPARISKVGNAHIRRALFMPALVAVQHDPHVKAFFAKLVARGKKPIQAYVAVMRKLLHAIYGMFATETTFVGEKFHAVA

SEQ ID NO: 14535 - protein, 425 aa, unidentified
  source 1..425: note = protein_83dd2b5
  REGION 19..179: note = RuvC_domain
  SITE 22: note = RuvC_P1
  SITE 77: note = RuvC_P2
  SITE 118: note = RuvC_P3
  SITE 120: note = RuvC_P4
  SITE 123: note = RuvC_P5
  REGION 286..372: note = Tnp_domain
  SITE 294: note = Tnp_P1
  SITE 324: note = Tnp_P2
  SITE 332: note = Tnp_P3
  SITE 333: note = Tnp_P4
  SITE 345: note = Tnp_P5
MDCTQNEKINQVTETTLVIGMDIAKRTHYASLIDVRGRVLQKAFPVLQSKEGFEAFYQIILNAMKEYQKTDVIVGIEPTGHYWLNLAYFLTERGIPLVMVNPMHVKRSKELDDNLQTKHDAKDALVIARLVKDGRFSYPRILAGVEAELRVGATLRNQLVEERSAIKNKLIRWLDRYFPEFMQVFPSFGKTALAALWCTPFPGDVISKTTEELLHDYRQVEGVKAPQKHKIIQLAHVALDSIGVTEGLEMARIEIATLVRRYRQLEHEIQELMSQLTNLAKTSVEYEWLSTVPGIGDTTIIELLSEIGSFSYYQHPRQLIKLAGLTLREHSSGQHSGQKRISKRGRRHLRALLFRVMMPMVRCNEAFRQLHVYYTTRAKNPLRKKQSMVVLCGKLLKILYALSTKQVAFDAQRVLTDIPSLEGAI

SEQ ID NO: 14536 - protein, 305 aa, unidentified
  source 1..305: note = protein_cae7fc0
  REGION 19..75: note = RuvC_domain
  SITE 22: note = RuvC_P1
  REGION 180..267: note = Tnp_domain
  SITE 188: note = Tnp_P1
  SITE 218: note = Tnp_P2
  SITE 226: note = Tnp_P3
  SITE 227: note = Tnp_P4
  SITE 240: note = Tnp_P5
MVLKQYQIISNEVLSMILVGIDVAKDKHDCFIMNSDGEILAKAFTFPNTLEGFNFLKVQERAKLKTSVSRLVQILFPELEKLVPTLHIPSMYRLLEEYPGASYIASAHLTKLTNLLRESSHGHYNRDTAIKIREAARNSIGSVMPAKSLELKHTIKLIRELSSEIDEIDAEIKIMMEEIASPITTIPGISYNMGAMIISEIGDFSRFSSPDKVLAYAGVSPSTYQSGRIDNCYSHMEKRGSRYLRYALFIAAQYVCCWDNTFSEYLSKKRSEGKHYFVAISHAVKKLVRVIFHLERTRQPYLKAA

SEQ ID NO: 14537 - protein, 274 aa, unidentified
  source 1..274: note = protein_e278d9e
  REGION 3..80: note = RuvC_domain
  SITE 21: note = RuvC_P3
  SITE 23: note = RuvC_P4
  SITE 26: note = RuvC_P5
  REGION 145..232: note = Tnp_domain
  SITE 153: note = Tnp_P1
  SITE 183: note = Tnp_P2
  SITE 191: note = Tnp_P3
  SITE 192: note = Tnp_P4
  SITE 204: note = Tnp_P5
MSLSVKVISPQYVKPIVRGQKNDGNDAQAIAVALMQPTMQFVPPKSPEQQDIQALHRARQRIVNHRNATVCQIRGMLLDRGITIGTAVSRVRRAVPIILEDAKNSLSVRMRRTIAELYDLFNDLGRSINFFDKEIDAVFRQSEACQRIAKVKSIGPKTATAVVAAIGKGTEFKNSRHFAVWLGLVLRHHSSGDKQVLMNMMKKGDKHLRTLFIHGARAVVRVATNNNDGSLSQWVNQLKERRGFNKTTVAVANKNARIIWSMLRNNTEYQAVGS

SEQ ID NO: 14538 - protein, 341 aa, unidentified
  source 1..341: note = protein_0f1f542
  REGION 7..149: note = RuvC_domain
  SITE 10: note = RuvC_P1
  SITE 53: note = RuvC_P2
  SITE 88: note = RuvC_P3
  SITE 90: note = RuvC_P4
  SITE 93: note = RuvC_P5
  REGION 209..296: note = Tnp_domain
  SITE 217: note = Tnp_P1
  SITE 247: note = Tnp_P2
  SITE 255: note = Tnp_P3
  SITE 256: note = Tnp_P4
  SITE 268: note = Tnp_P5
MQSVTLVGIDLGKHSFHLHGQDQRGKAVFRKKMSRKQLAEFFATFHPCTVVMEACAGAHHMARKLAGFGHQIRLISPQFVRPFVKGNKNDFVDAEAICEAASRPSMRFVTPKTESQQMLSALHRVRESLIRDRTKTVNQIHGFLLEFGISLPVGQAVITRLPAVLAEHSLPPALVSILERLHAHFKYLSGQIAEIDKEISRQLADDNLGQRLLSIPGVGPITASVLAAEMGDGKQYGCSRDFAASVGLVPRQYSTGGRANLLGISKRGDKNIRRLLVQCARAYMQRLERQTGRLAEWVRAMLTRRHSNVVACALANKFARTAWALATRHTTFDAGAGAMPA

SEQ ID NO: 14539 - protein, 283 aa, unidentified
  source 1..283: note = protein_ca998a2
  REGION 7..149: note = RuvC_domain
  SITE 10: note = RuvC_P1
  SITE 53: note = RuvC_P2
  SITE 88: note = RuvC_P3
  SITE 90: note = RuvC_P4
  SITE 93: note = RuvC_P5
  REGION 211..274: note = Tnp_domain
  SITE 219: note = Tnp_P1
  SITE 249: note = Tnp_P2
  SITE 257: note = Tnp_P3
  SITE 258: note = Tnp_P4
  SITE 270: note = Tnp_P5
MSAVTTVGLDLAKNVFQVHGIDETGKIMIRRQLRRNEVVKFFRELPARLVGMEACGTAHYWGREIAALGHTVKLMPPAYVKPYVKRGKTDAADAEAICEAVTRPTMRFVAVKTADQQAVLMLHKTRDLLVRQRTMLINGLRGHLAEFGIIAAKGPAGVKAVIEALHAAKDQLPEPARLALHGIVDQLRLLGAEIERLETRIVEWHRSNDVSRRLATIPGIGPITASAIAAAAPDGSLFSSGRQFAAWLGLTPKAHSSGGKERQVGISKQGDGSAACSSSAPRP

SEQ ID NO: 14540 - protein, 348 aa, unidentified
  source 1..348: note = protein_44a4a42
  REGION 6..148: note = RuvC_domain
  SITE 9: note = RuvC_P1
  SITE 52: note = RuvC_P2
  SITE 87: note = RuvC_P3
  SITE 89: note = RuvC_P4
  SITE 92: note = RuvC_P5
  REGION 211..297: note = Tnp_domain
  SITE 219: note = Tnp_P1
  SITE 249: note = Tnp_P2
  SITE 257: note = Tnp_P3
  SITE 258: note = Tnp_P4
  SITE 270: note = Tnp_P5
MEITTIGLDLAKRVFQVHGVDAAGGVVVRKALRRAQVLPFFAKLPPCLVGMEACGTSHHWARELIRLGHEVRLMPPAYVKPYVKRGKTDAADAEAICEAVTRPTMRFVAVKSRERQAALSMHRARNLLVKQRTQLVNMMRGLLAEFGVDIPQGLERALLMAQQVVDGAAPDVPAEAVKIIGMLSQQALDTHAQIREIDRSLVALLRTDDVARRLATIPGIGPVGATALAAAVTDPGQFRSGRQFAAWLGLTPRQNSSGGKERLGRITKMGDKYLRKLLVVGATSLVRRARSKPESVNPRLVDLLARKPVRVATVAMANKTARIVWAIMTRGEIYRAFHMPMLASSTEA

SEQ ID NO: 14541 - protein, 343 aa, unidentified
  source 1..343: note = protein_18caeef
  REGION 6..148: note = RuvC_domain
  SITE 9: note = RuvC_P1
  SITE 52: note = RuvC_P2
  SITE 87: note = RuvC_P3
  SITE 89: note = RuvC_P4
  SITE 92: note = RuvC_P5
  REGION 211..294: note = Tnp_domain
  SITE 219: note = Tnp_P1
  SITE 249: note = Tnp_P2
  SITE 257: note = Tnp_P3
  SITE 258: note = Tnp_P4
  SITE 270: note = Tnp_P5
MQVTTLGIDLAKNVFQVHGVDAQGRKVFSKAITRKKLLAFLAQLPACRVGMEACGSAHYWARELQALGHEVRLMAPQFVKPYVKTNKNDRADAEAICEAVTRPNMRFVPIKTPDQQAVLALHRVREGQIKARTAQANQLRGLLAEFGIVVPQGMTTLFRELPGILEDAENGLPDLFRTLLADRLDELRRLDQAVKEQERQIQAWHRSHAVSRRLAEIPGIGSISATALVAAIGNARHFKNGRQLAAWMGLVPKQHSSGGQSNLLGISKRGDRYLRMLLIHGARSALLADQRRGEGGDPWLEGLRQRRGSNVATVALANKNARTVWALMAHDRTFDPGLRGAAA

SEQ ID NO: 14542 - protein, 413 aa, unidentified
  source 1..413: note = protein_cb7174e
  REGION 14..166: note = RuvC_domain
  SITE 17: note = RuvC_P1
  SITE 65: note = RuvC_P2
  SITE 103: note = RuvC_P3
  SITE 105: note = RuvC_P4
  SITE 108: note = RuvC_P5
  REGION 273..359: note = Tnp_domain
  SITE 281: note = Tnp_P1
  SITE 312: note = Tnp_P2
  SITE 320: note = Tnp_P3
  SITE 321: note = Tnp_P4
  SITE 332: note = Tnp_P5
MSVTPEAIPARACAGVDWAKDDHAICFIDPDGLVVERFTVPHTAAGLKTLVRRLLAVGVAEVGIERGDGPVVEALLQAELTVLVISPNQVKNLRSRYGSAGNKDDRFDAYVLADAVRTDRRRLTPLTRSTPATIALRSTVRARRDLVEHRVAAANQLRAHLQVVFPGVVGLFAALDSAVSLSFLERFPTQSKADWLTSKRLADWLGKLGYSGRVAPETLHQRLLDAPRGTTDDNAHAHTATTLAFVAVLRALTTQIDQLEDSVAAQLDVHPDRHIMTSLPRSGMLRAARLLAEIGDARGRFPTADSLACLAGVAPSTRQSGKVKAVTFRWSADHQLRDALCDFAGDSRHANPWADDLYQRARARGHDHPHAVRILGRAWASIIWRCWQDQLAYQPDRHQALQRVLNEQARKVA

SEQ ID NO: 14543 - protein, 332 aa, unidentified
  source 1..332: note = protein_0a0d538
  REGION 6..156: note = RuvC_domain
  SITE 9: note = RuvC_P1
  SITE 61: note = RuvC_P2
  SITE 99: note = RuvC_P3
  SITE 101: note = RuvC_P4
  SITE 104: note = RuvC_P5
  REGION 200..287: note = Tnp_domain
  SITE 208: note = Tnp_P1
  SITE 238: note = Tnp_P2
  SITE 246: note = Tnp_P3
  SITE 247: note = Tnp_P4
  SITE 260: note = Tnp_P5
MDLIHIGIDISKKTLDLSIYGRERRNSGFLHVTNDKKGFSKILSWVKGLKIQLSQVWFCMEHTGEYGYALALFFDEHGITYSMVSGADIKGANPSKKGKNDKQDAAMIARYAHEKRDSLAPSHLNIRPLYELRCLLNERRMYVRQRAQWKAQRSERRLFSTKHRDSRVNRAIKTLSATIREIEEEIRSVIAVNEDIRRNFELIMSIPGIGLINAVNFIVATANFSTFNNARRYASHICVAPFAVVSGTSINKGTHTSKIGRHDLKTELRTTVLAVLKADSEMRKYFDRRKADGKKYNVIANNIMFKLICRVFAVVRRGTRFVETHKYLQKKE

SEQ ID NO: 14544 - protein, 361 aa, unidentified
  source 1..361: note = protein_b7bc76f
  REGION 4..156: note = RuvC_domain
  SITE 7: note = RuvC_P1
  SITE 55: note = RuvC_P2
  SITE 96: note = RuvC_P3
  SITE 98: note = RuvC_P4
  SITE 101: note = RuvC_P5
  REGION 219..304: note = Tnp_domain
  SITE 227: note = Tnp_P1
  SITE 257: note = Tnp_P2
  SITE 265: note = Tnp_P3
  SITE 266: note = Tnp_P4
  SITE 277: note = Tnp_P5
MIMIGIDPHKSTHTAVAIDDKEVVLAEYKVRASSRQLERLQEWASDFDDRHWAVESAGGLGYLLAQQLVGDGEVVFDVPPMLAARVRLLGTGRSQKSDPNDARSVAIAALRSERLTRVSSENHVQVLRMLAKRHRDMSRTRAKSKTRLHAVMLELRAGGLASKMSVNKAEVFLETVTVTDAVVRHRMLIAQELVAEIAEMDQRLKASNKRLAEAVRASGSTVTDVVGIGPFCAATIIGYTGDIGRFPTKNHYATYNATAPIEASSGDNARHRLNPGGNRYINHAIHIAAVSQLSYDSEGRRYYDRKLAEGKNPKEAVRCLKRRISDAVYRRLKTDRVATSSHADCALAESASAGPAPRVSC

SEQ ID NO: 14545 - protein, 322 aa, unidentified
  source 1..322: note = protein_b18636f
  REGION 8..159: note = RuvC_domain
  SITE 11: note = RuvC_P1
  SITE 58: note = RuvC_P2
  SITE 98: note = RuvC_P3
  SITE 100: note = RuvC_P4
  SITE 103: note = RuvC_P5
  REGION 197..281: note = Tnp_domain
  SITE 205: note = Tnp_P1
  SITE 234: note = Tnp_P2
  SITE 242: note = Tnp_P3
  SITE 243: note = Tnp_P4
  SITE 254: note = Tnp_P5
MSGSPVTIGIDVASAHVDVAATGAELPAALGRVDNDTEGHSTLADGLARLKPTLVLMEATGGYEAALACALQAAGLRVAVVNARMARDFARAMQRLAKTDRIDAATLAEFASVLTRRSDCERFIRPLSDSEQQDLAALVTRRRQLVSMQLSERQRLRLARPVTRPSIEAVLEAIARQLDDVEATMARRVEQHHAPMTKLLQNVAGIGRVAAATLIAELPELGRLNRRQICALVGVAPYANDSGASRGRRHIVGGRFEVRRVLYMATLTATRHNAAIRAFYERLVAAGKHKKVALIACMRKLITHLNAIVREHLNAQNRPSIT

SEQ ID NO: 14546 - protein, 344 aa, unidentified
  source 1..344: note = protein_663d0f8
  REGION 6..148: note = RuvC_domain
  SITE 9: note = RuvC_P1
  SITE 52: note = RuvC_P2
  SITE 87: note = RuvC_P3
  SITE 89: note = RuvC_P4
  SITE 92: note = RuvC_P5
  REGION 211..297: note = Tnp_domain
  SITE 219: note = Tnp_P1
  SITE 249: note = Tnp_P2
  SITE 257: note = Tnp_P3
  SITE 258: note = Tnp_P4
  SITE 270: note = Tnp_P5
MEITTVGLDLAKNVFQVHAISCTGEVLVRRALRRAQVMPFFRKLPPCLIGMEACGTSHHWARELTALGHEVRLMPPAYVKPYVKRGKTDAADAEAICEAVTRPTMRFVPIKSVEQQSALSLHRTRDLLVRQRTQLVNMVRGLLAEFGIDIPKGLTHALAFVRRAIAGEAHEVPKLAAKVIGALAEQAIAVQDSIHRLERDLLAWYRSNDLARRIATVPGVGLLGATALAATVTDPSHFRSGRQFAAWLGLTPLNNSSGGKERLGRISKMGDQYLRRLLVTGMTSLVRRNKHHPSAADPRLNALLARKPVRLATVAMANRTARAIWAIMVRGEVYRTPALGIAAV

SEQ ID NO: 14547 - protein, 403 aa, unidentified
  source 1..403: note = protein_c1382e0
  REGION 4..160: note = RuvC_domain
  SITE 7: note = RuvC_P1
  SITE 57: note = RuvC_P2
  SITE 97: note = RuvC_P3
  SITE 99: note = RuvC_P4
  SITE 102: note = RuvC_P5
  REGION 269..355: note = Tnp_domain
  SITE 277: note = Tnp_P1
  SITE 308: note = Tnp_P2
  SITE 316: note = Tnp_P3
  SITE 317: note = Tnp_P4
MVFVGIDWAEAHHDICVVDDDGQVLAKRRVPEGIEGVGKLHALIAEHAEDPAGVVVGIETDRGLLVGSLVAAGYKVYAINPLASSRYRDRHATSGAKSDPGDARVLADLVRTDRHKHRVLAGDSNLAGAVQILARAHQGLVWTRQRQVNQLRNALREFYPGALSAFEDLDASDALAILERAPTPIRGRALSQAKIISALREGGRERNLEAKAAQIQAQLRLPQLEAPTLLAEAYGHSVAATVAVIKQLNLQIAALEQELASSFETHPDAEIYLSLPGLGVVLGARAMAEFGDDRTRFLHPKARKSYAGTAPITRASGTRKVVLARVARNRRLADACYQWAFSALTRSEGARHRYDVLRARGQTHHQALRALANRLVGILHGCLVKRQPYSEHIAWSALVEVAA

SEQ ID NO: 14548 - protein, 352 aa, unidentified
  source 1..352: note = protein_3fcabda
  REGION 6..148: note = RuvC_domain
  SITE 9: note = RuvC_P1
  SITE 52: note = RuvC_P2
  SITE 87: note = RuvC_P3
  SITE 89: note = RuvC_P4
  SITE 92: note = RuvC_P5
  REGION 211..296: note = Tnp_domain
  SITE 219: note = Tnp_P1
  SITE 249: note = Tnp_P2
  SITE 257: note = Tnp_P3
  SITE 258: note = Tnp_P4
  SITE 270: note = Tnp_P5
MNITTIGVDLAKNVFQVHGVDEFGKAALRKQLKRAQVLSFFVNLPRCVIGMEACGSAHFWARKFTELGHTVKLMAPQFVKPYVKTNKNDAADAEAICEAVGRESMRFVPIKNAEQQALLALHRARQGFVGARTAQVNQIRGLLAEFGIVIPAGIRRVRENMPEILQDAESELPCISRDLFSRLFSHFLELDSQVRQLEAQIQAWHREDAVSRRLQGIPGVGPITASALVGSIGDASTFKNGRQLAAWLGLVPRQKSSGGKEQLLGISKRGDTYLRTLLIHGARSVVRQLKLKATQPEGWLARLALRRNLNIAAVALANKNARIVWALLVHGRDYQAGYVAPRSRGIMAVTAQ

SEQ ID NO: 14549 - protein, 343 aa, unidentified
  source 1..343: note = protein_b5788e1
  REGION 6..147: note = RuvC_domain
  SITE 9: note = RuvC_P1
  SITE 52: note = RuvC_P2
  SITE 87: note = RuvC_P3
  SITE 89: note = RuvC_P4
  SITE 92: note = RuvC_P5
  REGION 211..298: note = Tnp_domain
  SITE 219: note = Tnp_P1
  SITE 249: note = Tnp_P2
  SITE 257: note = Tnp_P3
  SITE 258: note = Tnp_P4
  SITE 270: note = Tnp_P5
MHIVRIGLDLAKYVFHLHGVDERGKVVLRKTLRRPAVALFFANLPPCIVGMEASNGAHYWAKTFSELGHDVRLISPQFVTPYVKSNKNDRNDAEAICEAVGRPNMRFVPVKSAEQLAIQAIHRIRSRLVANRVRLVNQIRGLLGEHGVVIAQTIGNLRRALPRIVDEESNGLNSIVRELIGELREELIDLDRRVAIYDRKIRELYRTSAACQRLGMVEGIGPITATALVAAAGDAKCFKNGRQFAAWIGLVPRQRSSGGRSRLLGISKRGDRYLRTLLIHGARAALGRIRGKQDPRSLWLLKARERHHPNVVAVALANKNARIAWSLLASGMSYDQRLTVSSA

SEQ ID NO: 14550 - protein, 403 aa, unidentified
  source 1..403: note = protein_503ea9b
  REGION 5..161: note = RuvC_domain
  SITE 8: note = RuvC_P1
  SITE 58: note = RuvC_P2
  SITE 98: note = RuvC_P3
  SITE 100: note = RuvC_P4
  SITE 103: note = RuvC_P5
  REGION 276..362: note = Tnp_domain
  SITE 283: note = Tnp_P1
  SITE 313: note = Tnp_P2
  SITE 321: note = Tnp_P3
  SITE 322: note = Tnp_P4
  SITE 335: note = Tnp_P5
MNNVAGIDISKGKSTVSVLRPFGEVVAKPFAVSHTGSELRQLANYLKSLDGETRVVMEHTGRYYEPVAQFLHNEGIFVSAVNPKLIKDYGGNTLRKVKTDAADSRKIARYGLDNWAELRQYASMDTIRYQLKTLNRQQGLYSKTKTMMKNNLIALLDQTYPGANALFDSPVREDGTQKWVDFAASFWHVDCVRSMSQSAFTERYRKWCKRHSYNFSNVKADEIYTEARDLIPMLPKDAMTKLLVQQAVDSLNAVSTAQARLKAEMLTLASQLPEFPVVMAMRGVGESLGPQLMAEIGDVTRFPHRGSITAFAGVDPGANQSGSHESQSVNTSKSGPPELRKALFLVMDCLLKTMPQDDPVYRFMDKKRSEGKPYLVYMTAGANKFLRVYYGKVKEYLSQLENL

SEQ ID NO: 14551 - protein, 320 aa, unidentified
  source 1..320: note = protein_4a3b476
  REGION 6..153: note = RuvC_domain
  SITE 9: note = RuvC_P1
  SITE 54: note = RuvC_P2
  SITE 94: note = RuvC_P3
  SITE 96: note = RuvC_P4
  SITE 99: note = RuvC_P5
  REGION 193..280: note = Tnp_domain
  SITE 201: note = Tnp_P1
  SITE 231: note = Tnp_P2
  SITE 239: note = Tnp_P3
  SITE 240: note = Tnp_P4
  SITE 253: note = Tnp_P5
MKELTAGIDVSKETLDISLYNGGKHDNITIANNKKSFMKFLKKYSSDDLQIVMEATGIYHLRIALEAHDLGYFVSVVNPLIIKRYGEMKMLRAKTDRVDARLIAEYGYEQSPKEFTPHSDDRMVLFQLLKAIEDLYKTRTEFRNRLESYTHGYPVSKEVGKTYRSMVQKIDREIERLKKKLQDSLDTHFPDQSSKLTSIKGVGKMTASMIMAFYGNFEQFETAKQAVSFAGLNPHPRQSGTSVKRGSSISKRGHALIRKTLYMSALSAKKHNPVYREYYERLLASGKSKKVALVAVAHKLLRHIFAIVKYDREWDPQYAK

SEQ ID NO: 14552 - protein, 339 aa, unidentified
  source 1..339: note = protein_c267b02
  REGION 6..146: note = RuvC_domain
  SITE 9: note = RuvC_P1
  SITE 52: note = RuvC_P2
  SITE 87: note = RuvC_P3
  SITE 89: note = RuvC_P4
  SITE 92: note = RuvC_P5
  REGION 211..297: note = Tnp_domain
  SITE 219: note = Tnp_P1
  SITE 249: note = Tnp_P2
  SITE 257: note = Tnp_P3
  SITE 258: note = Tnp_P4
  SITE 270: note = Tnp_P5
MDITTIGFDLAKTVFQVHGADGEGRVVLRRKLRRGKVLAFFAGLPSCLIGMEACASAHYWARELQALGHEVRLIPPQYVRPFVKTNKNDAADAEAICEAVTRPTMRFAPAKSAEQQSVLMLHRARELLVRQRTMVINALRSHCAELGLIVAQGASKVEELVAIIEDPGDGRLPPLAREALGMLVEQLRSAQVRIKALEATLMAWHRSNQASRRLATIPGVGVITATALVATIGDGAQFRSGRQLSAWLGLVPRQHSSGGKDKLGRISKRGDGYIRRLLVHGARTVLRWRRAKPSTRPGWTDQLLARRPTNVVLVAMANKTARVAWALLRYERIYQPTLA

SEQ ID NO: 14553 - protein, 311 aa, unidentified
  source 1..311: note = protein_4df1d33
  REGION 6..152: note = RuvC_domain
  SITE 9: note = RuvC_P1
  SITE 53: note = RuvC_P2
  SITE 92: note = RuvC_P3
  SITE 94: note = RuvC_P4
  SITE 97: note = RuvC_P5
  REGION 189..272: note = Tnp_domain
  SITE 196: note = Tnp_P1
  SITE 225: note = Tnp_P2
  SITE 233: note = Tnp_P3
  SITE 234: note = Tnp_P4
  SITE 245: note = Tnp_P5
MINDTIGIDISKAHLDAHRLSTATHARFDNTAAGLRAFERWLGQTSPERVVFEPTGPYHRRFESHFSGRLPLVKVNPLQARRFAQAHGTRAKTDAVDARMLALMGRALELVPDQPTDPKQRELKELHVARTGLVRDRTALMNRLGTQQLDVTRRLTRARLRQVNHQIDRLNAEIERRNRDCPKRARAIGILTSIPGIGAITARALLSECPEIGTLGSKQIAALAGLAPIIRQSGQWSGKAHIQGGRRLLRESLFMPALVAMKRNPDLSQKYDALRAAVKPHKVALAVLMRKHLILANTLISENREWTPKHP

SEQ ID NO: 14554 - protein, 339 aa, unidentified
  source 1..339: note = protein_2f9b643
  REGION 6..147: note = RuvC_domain
  SITE 9: note = RuvC_P1
  SITE 52: note = RuvC_P2
  SITE 87: note = RuvC_P3
  SITE 89: note = RuvC_P4
  SITE 92: note = RuvC_P5
  REGION 211..298: note = Tnp_domain
  SITE 219: note = Tnp_P1
  SITE 249: note = Tnp_P2
  SITE 257: note = Tnp_P3
  SITE 258: note = Tnp_P4
  SITE 270: note = Tnp_P5
MKITVCGVDLAKEVFQFHGVNAAGKVEKRIQLRRGKVMEFFANMAPCLIGMEACGSAHYWARQLQSLGHTVKLIAPQFVKPYVKTNKHDAADAEAICEAVQRPSMRFVPIKNIEQQAILAVHTARAGFVKQRTAQANQIRGLLAEFGLIVPKGLALLKERVPTLLDEAKDELPGAFRQTILELLDHLNVLDKRVKQFELEIQNWHRSNSMSQRLEKIPGIGPITASALVAAIGNAKHFANGRQLAAWLGLVPKQHSTGGRTNLLGISKRGDTYLRTLLIHGARAVIRHAANKIKQDWLHSLLSRRHKNIAAVALANKNARTVWALLAHDREFRADYAAA

SEQ ID NO: 14555 - protein, 414 aa, unidentified
  source 1..414: note = protein_84ec4e5
  REGION 18..170: note = RuvC_domain
  SITE 21: note = RuvC_P1
  SITE 69: note = RuvC_P2
  SITE 107: note = RuvC_P3
  SITE 109: note = RuvC_P4
  SITE 112: note = RuvC_P5
  REGION 274..360: note = Tnp_domain
  SITE 282: note = Tnp_P1
  SITE 313: note = Tnp_P2
  SITE 321: note = Tnp_P3
  SITE 322: note = Tnp_P4
  SITE 333: note = Tnp_P5
MKSARKTLPPEPDNGLTCGIDWARDNHAMSIIDTTGREITRHMITHDAAGLRELLTVLTTAGVTEVAIERPDGPVVDALLQAGITVVVISPNQVKNLRGRYGSAGNKDDRFDAFVLADTLRTDRARLHPLLPDAPSTVALRQACRARKDLVAHRVAVTNQLRAHLMIVFPGAVGLFANIDSPISLKFLSRFDSQDRADWLSVTRMANWLASVSYSGRTDPAELYRHLQAAPRGAAGIDGATITAAFVATLHTLAAQIKVLDDSIADQLAAHADAHIFTSLPRSGTFRAARLLAEIGDCRGRFPTPDALTCLAGVAPSTRQSGRVKHVGFRWAADKQLRDAVCDFAGDSRRANPWAADLYNRARARGHDHPHAVRILARAWLYVIWHCWQDGVTYDPAKHRALQTLLNQDQHRAA

SEQ ID NO: 14556 - protein, 350 aa, unidentified
  source 1..350: note = protein_178db32
  REGION 6..150: note = RuvC_domain
  SITE 9: note = RuvC_P1
  SITE 54: note = RuvC_P2
  SITE 89: note = RuvC_P3
  SITE 91: note = RuvC_P4
  SITE 94: note = RuvC_P5
  REGION 213..299: note = Tnp_domain
  SITE 221: note = Tnp_P1
  SITE 251: note = Tnp_P2
  SITE 259: note = Tnp_P3
  SITE 260: note = Tnp_P4
  SITE 272: note = Tnp_P5
MNIIRVGVDIAKSVFHVHGVDRHGQTQWQGKYSRSQWLDALSRKVPAGAEIGMEACASSHHWARELQKRGYFVRLIAAQFVKPYVKSNKNDRVDAEAICEAMSRPNMRFVAPKTVAQQDIQAAHRIREELVGQRTAKANQIRGLVGEYGIVAPVGIQQLRRALPDWLEDAENGLSDSFRILLNGLADDLRHLDDRVAALDQRITDTVNQDPVARRLMTLRGVGQLTASALSGALGDGQAFRRGRDFAASLGLTPRQHSTGGRERLLGISKRGDSYVRKLLVHGARAVLRHVNGKDDGLSHWLKGLVSRKHVNVATVALANKTARIAWALVHNGTAYDDKLAAGSAHEIAA

SEQ ID NO: 14557 - protein, 344 aa, unidentified
  source 1..344: note = protein_364de3e
  REGION 5..152: note = RuvC_domain
  SITE 8: note = RuvC_P1
  SITE 55: note = RuvC_P2
  SITE 92: note = RuvC_P3
  SITE 94: note = RuvC_P4
  SITE 97: note = RuvC_P5
  REGION 212..299: note = Tnp_domain
  SITE 220: note = Tnp_P1
  SITE 250: note = Tnp_P2
  SITE 258: note = Tnp_P3
  SITE 259: note = Tnp_P4
  SITE 271: note = Tnp_P5
MKHYAGLDVSVKETAICVVDDDGQVCSEMKIASHPEELSLALSGIGVHFERIGLEAGPLSQWLFEGLARAGLPVICIETRHAKAFLKAQVNKTDRNDARGIAQMMRVNLYRPVHVKTRESQQRRALLRARKLLQEKAIAVENDIRGLLRNFGLKVGIVGRGKFEARALELIAELPELEKVISVLLAARRKLREGFAKLHREVVEIATGDAVCMRLMTVPGVGAVTSLAFVSTIDIPARFRRSRAVGPVLGLTPVLKQSGESQRVGRVSLCGDGMMRALLYEAAQSMLTRVKKWSWLKAWAVGVAKRSGFKKAVVALARRLSVIMHRMWVDGSEFRWSREGAIAM

SEQ ID NO: 14558 - protein, 346 aa, unidentified
  source 1..346: note = protein_f1b3abf
  REGION 6..150: note = RuvC_domain
  SITE 9: note = RuvC_P1
  SITE 54: note = RuvC_P2
  SITE 89: note = RuvC_P3
  SITE 91: note = RuvC_P4
  SITE 94: note = RuvC_P5
  REGION 213..300: note = Tnp_domain
  SITE 221: note = Tnp_P1
  SITE 251: note = Tnp_P2
  SITE 259: note = Tnp_P3
  SITE 260: note = Tnp_P4
  SITE 272: note = Tnp_P5
MKINRVGVDLAKNVFQLHGADYKGKTVWKRQLSRSKWLPVLCDTVEPGTEIGMEACAGAHHWARQLMQRGYPVKIIPPQFVKPFIKSNKNDANDAAAICEAMGRPDMYPVKVKTVEQQDLQAMHRIRDEIKSHRIAKANQIRGLVTEYGLVAPQQLHALRRAIPDWLEDAENGLSFLFRQLLQGLWGDLYALDQRMAELDKQIAVVAQEDPTAKRLQQLRGVGPLIATALVATIGDGKQYRKGRDMAAALGLTPRQHSSGGKDRLLGISKRGDAYLRCLLVHGARSAVRTAKDKDDRLSRWIINLQARRHANVVAVAMANKMARMAWVIMTKDVDYDPDLAAASIS

SEQ ID NO: 14559 - protein, 348 aa, unidentified
  source 1..348: note = protein_c65d81f
  REGION 10..152: note = RuvC_domain
  SITE 13: note = RuvC_P1
  SITE 56: note = RuvC_P2
  SITE 91: note = RuvC_P3
  SITE 93: note = RuvC_P4
  SITE 96: note = RuvC_P5
  REGION 217..303: note = Tnp_domain
  SITE 225: note = Tnp_P1
  SITE 255: note = Tnp_P2
  SITE 263: note = Tnp_P3
  SITE 264: note = Tnp_P4
  SITE 276: note = Tnp_P5
MQSTAKLPVIGLDLAKSVFQLHIVDMDSGEIQRRQIKRAKLTDFFAKCQKSLVAMEACASSHYWARTLISLGHQVKMFPAQHVKAFLLRDKTDAMDAQAIWVAAQQPHILPVPVKTERQQACLALHGMRRQLMKMRIMQTNALRGILAEFGIALPVGHNKLLKSIHGELAKAQQANLLAADLVVSVQEQLKRIDGLQQDIEHIGQRLRTMIREDRQMQAIQQIPGVGDLTASALVAAVGDFSAFKSGRQFASWVGLTPKQVGTGGRTQQLGISKRGDTYLRTLLIAGARAVIAMSEKSSWITRLLERRHYNVVVVALANKMARTAWAVLAKGAAFDQVKWNPIEQVGR

SEQ ID NO: 14560 - protein, 345 aa, unidentified
  source 1..345: note = protein_c931156
  REGION 7..148: note = RuvC_domain
  SITE 10: note = RuvC_P1
  SITE 53: note = RuvC_P2
  SITE 88: note = RuvC_P3
  SITE 90: note = RuvC_P4
  SITE 93: note = RuvC_P5
  REGION 210..297: note = Tnp_domain
  SITE 218: note = Tnp_P1
  SITE 247: note = Tnp_P2
  SITE 255: note = Tnp_P3
  SITE 256: note = Tnp_P4
  SITE 268: note = Tnp_P5
MTQYKRIGIDTSKAVFTLHGVDQQDRPVLRINLRRAQMIPFFRKLPRTEIAMEACGGAHYWSRELIALGHEVRLIPPQYVKPYVKRSKNDRNDAEAICEAAGRPGMHFVPVKSVTQQAQGMVLKVRETLVSQRTLLVNTLRGHAAEFGVIAAKGLGQVGPLLTAIEQETAIPPEAKDMASLLGREIDDLDAKIKELDVKLTAAHKANEVSQRLASIPGVGPITALTLAIEIDPQAFESGRHLAAWAGLTPKEHSTGGKQRMGGISRAGHERLRVLLVAGATSVINAAMRPGSKLMTEWLRALLARKPRKLVAVALANKMARVAWVLMTRGQVYRRPAAATVAAVA

SEQ ID NO: 14561 - protein, 313 aa, unidentified
  source 1..313: note = protein_50ea656
  REGION 1..76: note = RuvC_domain
  SITE 13: note = RuvC_P3
  SITE 15: note = RuvC_P4
  SITE 18: note = RuvC_P5
  REGION 190..277: note = Tnp_domain
  SITE 198: note = Tnp_P1
  SITE 228: note = Tnp_P2
  SITE 236: note = Tnp_P3
  SITE 237: note = Tnp_P4
  SITE 250: note = Tnp_P5
MKKYGDTELRKAKTDKRDSLRIAQYALEKSYSLIPYTPQDQKYEDLRFLSRQYSQRISTLTVAKVQLLSLLDETMPGITTILPLKSRDPDNCVLLRFIKRFKSFDVIRKMGKTRFLDSYQVLVKKTKDRFAGSKGLAIYELVLNSVTTRGENPLSAMTQDQCVDLVSTSQKAADEINLQMRIIAETMPEYKVLRSMAGVGDRLGPIILGEIGDIRRFHNGKALNTYAGNDAPPYQSGQFESRNRHISKRGNPALRKACFEVMQALKLTKPQDDPVYLFLLKKEQEGKPYNVAKMAAVNKFLRIYYARAMELYK

SEQ ID NO: 14562 - protein, 402 aa, unidentified
  source 1..402: note = protein_89cef98
  REGION 4..161: note = RuvC_domain
  SITE 7: note = RuvC_P1
  SITE 60: note = RuvC_P2
  SITE 100: note = RuvC_P3
  SITE 102: note = RuvC_P4
  SITE 105: note = RuvC_P5
  REGION 270..357: note = Tnp_domain
  SITE 278: note = Tnp_P1
  SITE 308: note = Tnp_P2
  SITE 316: note = Tnp_P3
  SITE 317: note = Tnp_P4
  SITE 330: note = Tnp_P5
MQYLGIDIGKRAHEAALLDQDGNHLGKTVRFSNSHKGAEKLLDLINEHECLPDNTLIGMEATGHYWLSIHTFLKKLGFDIVVFNPIQSDSFRNFYIRKTKTDKVDAVLIAQVIRMDVPNTSYISSEDTIKLKQLTRFRVSMVDQTSDIKRQIISCLDQVFPEYERLFSDMFGKTSRKLLLESPLPEDLLNIESTHLTKLLKEASKGRFTEEKSMLKVDEIKGLASDSFGISIASDVFKMQIQLLIQQIELLESQIKDVESKINELLEKDNHHLTTITGIGPITAATIIGEIGDIKRFERPNQLLAFAGLDASIYQSGDFTGTNNRISKRGSPYLRRAIWQAAFVASNKDPALSEYYQSLRARGKHHGTAIGAVCRKLVNIIFAVWTNDKPYEVRHHSNKEQE

SEQ ID NO: 14563 - protein, 333 aa, unidentified
  source 1..333: note = protein_edec787
  REGION 7..155: note = RuvC_domain
  SITE 10: note = RuvC_P1
  SITE 60: note = RuvC_P2
  SITE 98: note = RuvC_P3
  SITE 100: note = RuvC_P4
  SITE 103: note = RuvC_P5
  REGION 203..290: note = Tnp_domain
  SITE 211: note = Tnp_P1
  SITE 241: note = Tnp_P2
  SITE 249: note = Tnp_P3
  SITE 250: note = Tnp_P4
  SITE 263: note = Tnp_P5
MKFKTFIGIDVSKLTLDICLITADGVIEHFKIENKELSIKKFFKNLEKSCLWEDILVCAEFTGHYSNPLKVFCISQNIALWLESGAEIKLRSGVQRRKNDKIDAERIVDYAIRYVDKARLQNLDDKVIETVKSLSNERDMYIRDRAKYKSQVKDFEGYIDSDIYKAKSKRLKKQILSLTKLIDSIDKQIDQQFASSEKLTIQKEILLSVGGVGDKVATETIIATRGFTKFGNGREFSCHVGVAPFSFESGTSQRSRKKVSNRANKELKKLFHMAALSAIKMKGELREYFERKVAEGKNKMTVINAVRAKIINRIFALIRDNRKYEKSYIPSVV

SEQ ID NO: 14564 - protein, 402 aa, unidentified
  source 1..402: note = protein_6ce019d
  REGION 5..161: note = RuvC_domain
  SITE 8: note = RuvC_P1
  SITE 58: note = RuvC_P2
  SITE 98: note = RuvC_P3
  SITE 100: note = RuvC_P4
  SITE 103: note = RuvC_P5
  REGION 275..362: note = Tnp_domain
  SITE 283: note = Tnp_P1
  SITE 313: note = Tnp_P2
  SITE 321: note = Tnp_P3
  SITE 322: note = Tnp_P4
  SITE 335: note = Tnp_P5
MYNAVGIDVSKGKSTVAVLQPAGVIIRKPFNVNHTSSELDELAKYIGSLEGETRVVLECTGRYHEPVVKTLSEAGLFVSAVNPHLIKNFGNNSIRKVKSDPADAKKIARYTLDNWIELRQYSSMDNTRTQLKTLNSQFSFFMKQKVAAKANLIALLDNTYPSVNKLFDSPVRDDGSEKWVDYAYSFWHVDCVRKIGLKTFTERYQAFCKKHHYNFQPAKPAELFLASKDLIAVFPKEASYKLLIQQSIQQLNLASSHVEELRSKMNELASTLPEYTTVMGMYGVGKTFGSQLIAEIGDISNFSHREALTAFAGVDPGVDQSGTHNSKSNKASKCGSNRLRKTLFQIMSTLLQTAPEDDKVYQFLVKKRAEGKPYYVYMTAGANKFLRIYYGKVKECIRNLEQ

SEQ ID NO: 14565 - protein, 329 aa, unidentified
  source 1..329: note = protein_6bbd5d4
  REGION 7..158: note = RuvC_domain
  SITE 10: note = RuvC_P1
  SITE 59: note = RuvC_P2
  SITE 97: note = RuvC_P3
  SITE 99: note = RuvC_P4
  SITE 102: note = RuvC_P5
  REGION 200..287: note = Tnp_domain
  SITE 208: note = Tnp_P1
  SITE 238: note = Tnp_P2
  SITE 246: note = Tnp_P3
  SITE 247: note = Tnp_P4
  SITE 260: note = Tnp_P5
MEVNEIIGIDASKLTLDCCIHSSGQQDVFDNNPEGIDRLLDWVSTRVLVKKEQILFVFENTGLYTIKLIDGLQERRFLMYVASGLEIRRSLGIARGKDDKADAKRIALYGYRLKEDIEPYSPPSSAIIKLKRLMSIRRKLVVQLAGYVANLKEQKRVLNDDEILFNVQENVMSVLQAQIKVVEKEMNRIIKEEPELAKLQQLITSVKGIGPVTARFLIIYTAGFTSFQSWRKFASYVGIAPFPNRSGTSIKGRNKVSNLANKEGKTLLHMCAASAIQCSPEIKVYYERRLAKGKHKMSTLNIIRNKLLSRAFAVVARGTPYVNTMKYAS

SEQ ID NO: 14566 - protein, 345 aa, unidentified
  source 1..345: note = protein_7b375a1
  REGION 5..153: note = RuvC_domain
  SITE 8: note = RuvC_P1
  SITE 57: note = RuvC_P2
  SITE 95: note = RuvC_P3
  SITE 97: note = RuvC_P4
  SITE 100: note = RuvC_P5
  REGION 222..307: note = Tnp_domain
  SITE 229: note = Tnp_P1
  SITE 259: note = Tnp_P2
  SITE 267: note = Tnp_P3
  SITE 268: note = Tnp_P4
  SITE 280: note = Tnp_P5
MPIVGGLDIHRKQITFDYLDTATGQVRRGQVSPADREHLRAWLARFAGREDVAFAVEGCTGWRYVAGELAAAGIAVHLAEPADTAFARGRKRHAKTDKTDCRHLRQLLAEGRLPQCWIPPGHILECRALLELYNDLRREHTAWAQRIHAVLFHQGAPALGEGTLRSEQGLAALRAAAAAQLSPAGQLQVATALEVTAALEARMHAVRHQLLDAARHLTGAKVLAARLYGVGPVTALALTCWLGGAGRFSSSRKAVRFAGLDVTVWSSDRKGPPGRLSRQGPPVLRWAVYEAGKTHARSSAPDHAYYAQVKENNGGKRAALSEARKIIRQACHILTELGDDALAAV

SEQ ID NO: 14567 - protein, 348 aa, unidentified
  source 1..348: note = protein_26e4400
  REGION 10..152: note = RuvC_domain
  SITE 13: note = RuvC_P1
  SITE 56: note = RuvC_P2
  SITE 91: note = RuvC_P3
  SITE 93: note = RuvC_P4
  SITE 96: note = RuvC_P5
  REGION 218..306: note = Tnp_domain
  SITE 225: note = Tnp_P1
  SITE 255: note = Tnp_P2
  SITE 263: note = Tnp_P3
  SITE 264: note = Tnp_P4
  SITE 276: note = Tnp_P5
MKSASQLPIIGMDIAKNVFQLHIVDAETGEIQRRQLKRAKVAEFFTNRQASLVAIEACGGAHHWARTLQAMGHQVKLLPAKHVRAFVLRDKTDALDAQAIWVAAQQPHIREVPVKSEQQQSCLSLHRIRAQLMKIRIMQTNALRGLLYEFGIVLPEGHKKLLLSVQAELAKAQQDNRLPEVVVLSVQEQLKRVEALQDDLNQLDKRLAAMVKQNQQMLAVQAIPGVGPLTATALVATATDLSTFKSGRQFAAWLGLTPRQVGTGGRTQQLGISKRGDTYLRTLLISGARAVVCRSAHSSWIERLLQRRHLNVVVAALANKMARTVWAVLAKGHAFDQVKWNPTETAAA

SEQ ID NO: 14568 - protein, 341 aa, unidentified
  source 1..341: note = protein_b15c6ba
  REGION 7..149: note = RuvC_domain
  SITE 10: note = RuvC_P1
  SITE 53: note = RuvC_P2
  SITE 88: note = RuvC_P3
  SITE 90: note = RuvC_P4
  SITE 93: note = RuvC_P5
  REGION 209..295: note = Tnp_domain
  SITE 217: note = Tnp_P1
  SITE 247: note = Tnp_P2
  SITE 255: note = Tnp_P3
  SITE 256: note = Tnp_P4
  SITE 268: note = Tnp_P5
MDEVTLIGIDLGKHVFHIHGQDAKGHAIFRKKLSRQQLLSFFSNLRAVTVVMEACAGSHWLARKLNAMGHVTKLISPQYVRPFVKSNKNDYIDAEAICEAASRPAMRFVEPRTEAQQLLAALHRTREGLVTERTATINRIHGILLEFGVVVPMSKATLRRLPDVIAIHDLPLRLLQIIQRLHEHYKYLDAQVVETEKELVAQLHEDENAARLLSVPGIGPITASLLASEIGSIAQYVGGRNFAASIGLVPRQKSTGGRTTLCGISKRGDKHLRHLLVQGARAVIQRVHKRNDRLGEWIRSMLSRRHSNVVACALANKLARIAWAVLTKHTDYHGSLLVRTS

SEQ ID NO: 14569 - protein, 343 aa, unidentified
  source 1..343: note = protein_8edad3f
  REGION 6..149: note = RuvC_domain
  SITE 9: note = RuvC_P1
  SITE 54: note = RuvC_P2
  SITE 89: note = RuvC_P3
  SITE 91: note = RuvC_P4
  SITE 94: note = RuvC_P5
  REGION 213..299: note = Tnp_domain
  SITE 221: note = Tnp_P1
  SITE 251: note = Tnp_P2
  SITE 259: note = Tnp_P3
  SITE 260: note = Tnp_P4
  SITE 272: note = Tnp_P5
MKLIRVGVDLAKNVFQVHGVGRKEKAVWRRRFTRENRVKALLETVEPGCEIGMESCGGAHHWARKLQEKGFTVKLIAPQFVNPYVKSNKNDANDAEAICEAMSRPGMRFVAVKSVEQQDIQAVHRIRSGLIEQRTAKANQIHGLVAEYGLIAPKQLSHLRVALPLWLEDGQNGLTDRFRRLLNALWGDLLALDARVKELDREIVLIAQSNPLAKRLEQLRGIGPISATALAAAVGDGTQFANGRQMAAALGLTPRQHSSGGKERLLGISKRGDAYLRTLLIHGARSVVRTTKGKTDRLSVWITRLAQRRHPNVAAVALANKTARMAWAMLKNGTDYEPNRLAV

SEQ ID NO: 14570 - protein, 328 aa, unidentified
  source 1..328: note = protein_7224463
  REGION 5..159: note = RuvC_domain
  SITE 8: note = RuvC_P1
  SITE 62: note = RuvC_P2
  SITE 102: note = RuvC_P3
  SITE 104: note = RuvC_P4
  SITE 107: note = RuvC_P5
  REGION 204..289: note = Tnp_domain
  SITE 212: note = Tnp_P1
  SITE 241: note = Tnp_P2
  SITE 249: note = Tnp_P3
  SITE 250: note = Tnp_P4
  SITE 262: note = Tnp_P5
MMHFTGIDVSKNKFDVCWLRDATTNKRKTKVFKNKQEGHEALAEWLLNNIKAVPENIVIILEPTGVYHESLMYLLHDKGFKVYLVNTGNAKKYAEAINLTHKTDKSDACMLANYGYAQQSNLQLWLPEAVEVRELKALLRRLDALESDYQRELNRLDSSEFSLPSERVLASLKEMIRALKSEIEKLKKDIDNHINGHPELKNNRKLLESIPGIGSVLSRELTYLFAAKTFKNAKQVGAYSGLIPKFHESGKLKGRTTLSKTGPSRLRAKLYMAAVVAGRYNKSVMRQKETLLKRGKTMMQVIGANMRKLMQICFGVVKNQTEYQPQVT

SEQ ID NO: 14571 - protein, 321 aa, unidentified
  source 1..321: note = protein_05fd7d2
  REGION 15..163: note = RuvC_domain
  SITE 18: note = RuvC_P1
  SITE 62: note = RuvC_P2
  SITE 102: note = RuvC_P3
  SITE 104: note = RuvC_P4
  SITE 107: note = RuvC_P5
  REGION 198..282: note = Tnp_domain
  SITE 206: note = Tnp_P1
  SITE 235: note = Tnp_P2
  SITE 243: note = Tnp_P3
  SITE 244: note = Tnp_P4
  SITE 255: note = Tnp_P5
MAQTCSKLESHDVVVGIDVSKDHLDAAQYPSGDLIQTSNDTKGLRTLLRWIGRQHAVHVVFEATGPFHRQLESHLAKAGIPFSRINPRHARKFAEATGKLAKTDRVDAMMLARMGALLEPRTSTICNELQSALQELAAGRRNLTRDRTALLNRQQNLQLSLLKRLTRYRLRQIEAQIAAIDQAISELISTDESLSRKRTILVSIPGIGEATAAMLIADIPELGTLENGQVAALAGLAPVTRQSGKWQGKSFIRGGRIHVRNALYMPALVAMRHNPDLRSIYLSLTDKGKHAKVALTALMRRLVILANVLLRNDRLWEPRHT

SEQ ID NO: 14572 - protein, 337 aa, unidentified
  source 1..337: note = protein_4af68db
  REGION 6..163: note = RuvC_domain
  SITE 9: note = RuvC_P1
  SITE 65: note = RuvC_P2
  SITE 103: note = RuvC_P3
  SITE 105: note = RuvC_P4
  SITE 108: note = RuvC_P5
  REGION 209..297: note = Tnp_domain
  SITE 217: note = Tnp_P1
  SITE 248: note = Tnp_P2
  SITE 256: note = Tnp_P3
  SITE 257: note = Tnp_P4
  SITE 270: note = Tnp_P5
MKKFFIGIDFAKTKFDVVVLSKDDLVSKGEYNQFCNTKDGVKQLEKWLLQVCGNDVITECVICGENTGVYSVLAAKMLTRDGYTVCLESALRIKRSMGISRSKNDKKDARDIAEYAARHYDKLVVYQEPSLTSEALKTLFSQRRLLVKQKSDLQRRNKELTGLYKDNPLLKKMLASDKRIINAIDAEIEKIEAQMKSIIEGNPEVKKVYDILTSMKGIALVNAVALIVYTDNFKRFDYDARRICSYWGIAPFANQSGTSINGKPHVSHFADHYLKSLLSQAVVCAIRFCPDISNYAQRLLARKKHISIVHNNCKNKMIHILVAMVKNGTLYGEIQKN

SEQ ID NO: 14573 - protein, 334 aa, unidentified
  source 1..334: note = protein_f8ee331
  REGION 7..149: note = RuvC_domain
  SITE 10: note = RuvC_P1
  SITE 53: note = RuvC_P2
  SITE 88: note = RuvC_P3
  SITE 90: note = RuvC_P4
  SITE 93: note = RuvC_P5
  REGION 209..297: note = Tnp_domain
  SITE 217: note = Tnp_P1
  SITE 247: note = Tnp_P2
  SITE 255: note = Tnp_P3
  SITE 256: note = Tnp_P4
  SITE 268: note = Tnp_P5
MQNITLIGIDLGKHTFHVHAQDKNGHALLRKKFSRTQLTAFLSTCSTATVVMESCAGAHFMARHITQLGHQVKLISPQFVRPFVKSNKNDFIDAEAICEAASRPSMRFVTPRTEDQQAMAALHRVRDSLVRERVKTTNQMHAFLLEFGISMPRGTAVIRRLAAVLEEHSLPPYLTRLLMRLQQHYTYLSEQVEGLEQELKTHMADDEATQRLLTIPGVGMITASLLATKLGDGKNYVGSRDFAASTGLVPRQYSTGGKNTLMGISKRGDKNLRRLLVQCARAFMQRLEHHPGRLAEWVKVQLTRHHSNVVACGLANKLARIAWAVTAHRTVFSQ

SEQ ID NO: 14574 - protein, 326 aa, unidentified
  source 1..326: note = protein_2a51baa
  REGION 9..157: note = RuvC_domain
  SITE 12: note = RuvC_P1
  SITE 63: note = RuvC_P2
  SITE 97: note = RuvC_P3
  SITE 99: note = RuvC_P4
  SITE 102: note = RuvC_P5
  REGION 259..305: note = Tnp_domain
  SITE 267: note = Tnp_P1
  SITE 298: note = Tnp_P2
MKVTYQTCCGVDVHKSFLVATIVKTTGGIEPSYQKKRFSTFNNSILEFKQWLLDNDCHDVCMESTGKYWVPVFNLLEDEINVVIANPKWVKAVKGNKDDTKDSKWIGDLFRLGLVKGSYIPCKIVRILREYTRYRYKLVSCRSSEKNRYQNALTVCNVALDSVVSDIFGKSSMSIIDYLLEQSGTSINHEEIASKLLRSLKSKEDAVIESVEGYQMTDAQKYRMRLVRTHMDYITAEINDVDKMIENMISSNPDFENAVQLLCTIPGVKRDSAITIISEIGTDMSQFSSSKRLCCWAGLLHQAAMNLLVRRNLFGLHVPVSTSNLH

SEQ ID NO: 14575 - protein, 339 aa, unidentified
  source 1..339: note = protein_8374a1c
  REGION 4..157: note = RuvC_domain
  SITE 7: note = RuvC_P1
  SITE 55: note = RuvC_P2
  SITE 96: note = RuvC_P3
  SITE 98: note = RuvC_P4
  SITE 101: note = RuvC_P5
  REGION 220..305: note = Tnp_domain
  SITE 228: note = Tnp_P1
  SITE 258: note = Tnp_P2
  SITE 266: note = Tnp_P3
  SITE 267: note = Tnp_P4
  SITE 278: note = Tnp_P5
MFMIGIDPHKGSHTAAAVDRNDTVIDTFRVVADCHQRDRLLAWAEAFTPRTWAVEGATGMGALVAQQLVAAGEHVVDVPPKLSSRVRLLERGKIDKTDPNDARSAAIVAWHNPSLNVVAGLDEHRVVLRLLADRDHQITAQRTRTICRLHALLCLLIEGGTARSLSAERADQLLASVHIAGPVSRERIDAGRQLLDEIRALDTSRIEVRKRTAEMIVASATTVTDVYGIGPLMAAIIIGRVGDIRRFPTAGHFARHNGTAPIEASSGPKKRHRLNPRGDRQLNHAIHMAAVTQISHDTVGRVYYARKQAEGKTRKEAMRALKRHISDAVYQRLIGDTRR

SEQ ID NO: 14576 - protein, 344 aa, unidentified
  source 1..344: note = protein_0d05aa7
  REGION 7..148: note = RuvC_domain
  SITE 10: note = RuvC_P1
  SITE 53: note = RuvC_P2
  SITE 88: note = RuvC_P3
  SITE 90: note = RuvC_P4
  SITE 93: note = RuvC_P5
  REGION 211..296: note = Tnp_domain
  SITE 219: note = Tnp_P1
  SITE 249: note = Tnp_P2
  SITE 257: note = Tnp_P3
  SITE 258: note = Tnp_P4
  SITE 270: note = Tnp_P5
MTNDTMIGVDLAKNVFQVHGASETGAVLFRKKLSRTQFQRFMAQQEPCVVAMEACGGANYWARELQRLGHSVKLISPRYVKPFIKRHKNDAVDAEAIVEAAQRPGMRTVDIKTEQQQARAILFRTREQFVRQRTDLVNALRSHIYEFGHVVPQGVSQVGRLEDILCEPGTDLPALVREMGQVLLAQIKQKTEMIQALDKRISATASDSEEARRLQSIPGVGPITALAIEAFAPDLATFRRGRDFAAWLGLVPKQHSTGGKQRLGRMSKAGQSDIRRLLIIGAMSRLNWLGRKSIKEGSWLDRIKGRKPRLLVAVALANKMARMIWAIATKKELYRDPELSLAAG

SEQ ID NO: 14577 - protein, 344 aa, unidentified
  source 1..344: note = protein_23aefb4
  REGION 5..159: note = RuvC_domain
  SITE 8: note = RuvC_P1
  SITE 57: note = RuvC_P2
  SITE 98: note = RuvC_P3
  SITE 100: note = RuvC_P4
  SITE 103: note = RuvC_P5
  REGION 222..307: note = Tnp_domain
  SITE 230: note = Tnp_P1
  SITE 260: note = Tnp_P2
  SITE 268: note = Tnp_P3
  SITE 269: note = Tnp_P4
  SITE 280: note = Tnp_P5
MSITIGIDPHKASHTAVAVDGFETVIDEICIHSCPTQAVLLRDWADGFRDDRTWAVESAQGLGYLLAQQLIAAGETVVDVPAVRASRVRTLSTGRSQKNDPNDARSVAIAALRANDLAAVLPDDHTRILRLLGKRHRDLGRQKNLECNRLHALLLEMFPGGADFKMSSMTRVNTLLDRFIATDSMGRQRLDLAHDLVDSINALSAQMKTSKRRITAAVKASGTSLTDIVGLGPITAALIIGHTGNIDRFASRHQYASYNATAPIEASSGDKVRHRLNPRGNRQLNWAIQVIAISQLRHDSIGRRYYDRKRDEGKTSKEALRALKRRISDSVYRHLTNDARQLRG

SEQ ID NO: 14578 - protein, 384 aa, unidentified
  source 1..384: note = protein_29d1eab
  REGION 39..181: note = RuvC_domain
  SITE 42: note = RuvC_P1
  SITE 85: note = RuvC_P2
  SITE 120: note = RuvC_P3
  SITE 122: note = RuvC_P4
  SITE 125: note = RuvC_P5
  REGION 245..332: note = Tnp_domain
  SITE 253: note = Tnp_P1
  SITE 283: note = Tnp_P2
  SITE 291: note = Tnp_P3
  SITE 292: note = Tnp_P4
  SITE 304: note = Tnp_P5
MGSGKRKEDPPSERHRCARVEMFSNHSKDRGSNMQVTTYGVDLAKRVFQVHWVEGQTGEVKRKTLLRQEVGEFFAQRELGVVAMEACGSAHHWGRLLSRLGHQVRLVSAQFVRPFVKTNKTDAADAQAIWEAAQRPEMRFVGLKSEEQQALLSLHRVRQQLVKVRTMQALQIRSLLYEFGIVLPKSWRALLVQAGSVLADSTRNEIPQLLRGELLSQLESLRTLTSRIQQLEQAIASYRGRLEDCKRIEAIPGIGRLTSSALVATIGDARTFRSGREMAAFLGLVPRQSGTGGRVRLMGISKRGDPYLRTLLIHGARSVITHGSRPGRTLEPWIQTLLLRRPKNVAIVALANKMARTAWALLAHGRSFDRSWGQALPAPVNLTT

SEQ ID NO: 14579 - protein, 286 aa, unidentified
  source 1..286: note = protein_60caec3
  REGION 7..149: note = RuvC_domain
  SITE 10: note = RuvC_P1
  SITE 53: note = RuvC_P2
  SITE 88: note = RuvC_P3
  SITE 90: note = RuvC_P4
  SITE 93: note = RuvC_P5
  REGION 212..283: note = Tnp_domain
  SITE 220: note = Tnp_P1
  SITE 250: note = Tnp_P2
  SITE 258: note = Tnp_P3
  SITE 259: note = Tnp_P4
  SITE 271: note = Tnp_P5
MNRISTIGLDLAKTIFQVHAVDASGAVVLQRALRRGRVLEFFASLPPCLIGMEACATAHYWARELSRLGHKVRLIPPAYAKAYVRRNKNDAAEAAAICEAVSRPNMRFVVVKTEGQQAAAGVHKTRELLVKQRTMIINHLRGMMAEFGIVAAAGPQHAAELVAVLLDPAEAHLPVPLRQTLRVMVDLFAAIERKLEGIDKQLLDWGRNNQTCRNLVTIPGYGPILSSAMAAIVVDPKVFRSGREFAASLGLVPRHEGTSGHIKLGPISKRGNGYLRRLLVNGPPRC

SEQ ID NO: 14580 - protein, 409 aa, unidentified
  source 1..409: note = protein_f9094d7
  REGION 12..168: note = RuvC_domain
  SITE 15: note = RuvC_P1
  SITE 64: note = RuvC_P2
  SITE 105: note = RuvC_P3
  SITE 107: note = RuvC_P4
  SITE 110: note = RuvC_P5
  REGION 275..359: note = Tnp_domain
  SITE 283: note = Tnp_P1
  SITE 312: note = Tnp_P2
  SITE 320: note = Tnp_P3
  SITE 321: note = Tnp_P4
  SITE 333: note = Tnp_P5
MAWDLQDFALFIGLDVGRTEHHATALTRTGEKVYDKALPNDETKLRQLLTELTDSHGRALLVVDQPATIGALPVAVAKETPEVEVAYLPGLTMRRMADLHAGSAKTDARDAFIIAETARTMPSALRQIAASDEQIAELAVLAGFDDDLLGQTTATRNRLRGLLTQTHPGLERAIGSHLHHYGVLDALAAWPTPQKLKAAGRGHVRNRIKKHNPRLAERITEAIFTALDAQTVVVAGTGAAATIIPILTNQLKDLYTQRAHVLAQVEALVEAHPLAQVLTSMPGIGVRTAARILTEVVGKNFKTAGHLASYAGIAPTTRRSGTSIRGEFANRAGNKRLKSTLFNSAFASLHHGPSRAYYDKKRAAGKTHKQAVIALARRRLDTLYAMLRDGTFYQEPDNARGGSGHALAA

SEQ ID NO: 14581 - protein, 344 aa, unidentified
  source 1..344: note = protein_131f871
  REGION 6..147: note = RuvC_domain
  SITE 9: note = RuvC_P1
  SITE 52: note = RuvC_P2
  SITE 87: note = RuvC_P3
  SITE 89: note = RuvC_P4
  SITE 92: note = RuvC_P5
  REGION 211..297: note = Tnp_domain
  SITE 219: note = Tnp_P1
  SITE 249: note = Tnp_P2
  SITE 257: note = Tnp_P3
  SITE 258: note = Tnp_P4
  SITE 270: note = Tnp_P5
MEIRTVGIDLAKNVFQIHGMNERGKPLLRKQLKRDQVAVFFANLPPCLIGMEACSSAHYWARTLETLGHTVRLMAPQFVKPYVKSNKNDAADAEAICEAVTRPTMRFVPIKNVEQQSVLALHRARQGFVKARTAQANQIRGLLAEFGLIVPQGIAHITTRLPSVIEGAANELPVSFRQLIERLIEHFKVLDKEVEELEAQIKAWHRADEISRQLERVPGIGPLTASALVASIGDAKNFKNGRQLAAWLGLVPRQHSSGGRPTLLGMSKRGDAYLRTLMIHGSRSVIYRAGQKNDPDSWLVKLIKRRNINVAAVALANKTARIVWALLTNKSEYQPDYRHSLTTA

SEQ ID NO: 14582 - protein, 346 aa, unidentified
  source 1..346: note = protein_0ff8474
  REGION 7..148: note = RuvC_domain
  SITE 10: note = RuvC_P1
  SITE 53: note = RuvC_P2
  SITE 88: note = RuvC_P3
  SITE 90: note = RuvC_P4
  SITE 93: note = RuvC_P5
  REGION 210..297: note = Tnp_domain
  SITE 218: note = Tnp_P1
  SITE 248: note = Tnp_P2
  SITE 256: note = Tnp_P3
  SITE 257: note = Tnp_P4
  SITE 269: note = Tnp_P5
MEKISRIGMDTSKRIFQLHGVDGAEQPVVRKKLPRDRMIAFFKALPPTVVVLEACGASHHWARVLGAMGHTVKLIAPQLAKPYLKRGKNDAADAEALCEAASRPTMRYVAVKTVDQQADLMLAAMRERLLRQRVQLANAIRGHAAEFGLIAAKGASHVAELLAMVQADAALPRLARQVFAGLAADYAHVETQLAAADAELRAWYKQNAVAQRLTQIPGVGPVVAATLVMKTPDPKAFASGRDYAAWLGLTPKDHSTAGRTRLGRITRAGDETLRSLLVVGATAVIWQTRRGATRRVMPWLASLLARKPPKLAAVALANKIARVAWKLMASGEAYDINHAAPKPATA

SEQ ID NO: 14583 - protein, 361 aa, unidentified
  source 1..361: note = protein_afb84d9
  REGION 7..147: note = RuvC_domain
  SITE 10: note = RuvC_P1
  SITE 53: note = RuvC_P2
  SITE 88: note = RuvC_P3
  SITE 90: note = RuvC_P4
  SITE 93: note = RuvC_P5
  REGION 210..297: note = Tnp_domain
  SITE 218: note = Tnp_P1
  SITE 248: note = Tnp_P2
  SITE 256: note = Tnp_P3
  SITE 257: note = Tnp_P4
  SITE 269: note = Tnp_P5
MEEIIRIGMDTSKSVFQLHGVNAVEQPVLRKKLSRREMVKFFEKTLPTTIALEACGGSHHWARLLGSFGHEVKLIAPQLAKPYVKRGKNDAADAEALCEAMSRPTMRFVPVKTADQQAALMLVGLRERLIRNRTQLANAIRGFAMEFGIAAAKGMCRIEPLLERIAADQSLPALARELFAMHGVEYRDLLAETKAVEEKLTALHRSDECSRRLAQIPGVGPVGASLLMIKTPDPRLFRSGRDFAAWIGLTPKDHSTAGKVRLGVITRAGDEMLRSILVVGATSLLQHVRAGRSRHASRWLIELLQRKKPKLVAVALANKIARIAWKLMVSGETYRRTEGQSATVEFRRLAITVSRDVTVLS

SEQ ID NO: 14584 - protein, 341 aa, unidentified
  source 1..341: note = protein_dd229b8
  REGION 7..148: note = RuvC_domain
  SITE 10: note = RuvC_P1
  SITE 53: note = RuvC_P2
  SITE 88: note = RuvC_P3
  SITE 90: note = RuvC_P4
  SITE 93: note = RuvC_P5
  REGION 211..295: note = Tnp_domain
  SITE 219: note = Tnp_P1
  SITE 249: note = Tnp_P2
  SITE 257: note = Tnp_P3
  SITE 258: note = Tnp_P4
  SITE 270: note = Tnp_P5
MEKASTIGLDLAKNVFQAHGADASGAVTFRKKLRRAQVLEFFSSQPPCTVAMEACGGAHFWGRELGKLGHAVRLIPPAYVKPFVKRQKNDAADAEAICEAVQRPTMRFVAIKSEAAQAAAVVFRTRDVLVRQRTQIINALRGHLTEFGLVVAQGPAHVAKLVMAVQDPEHSLPEAARPILCVLVDMLGLLDQRIKLLDVEIARRAKEDDLARRLMSVPGVGPVIATAVAALAPPADTFKRGRDFAAWLGLTPLQHSTGGKQKLGGTSKMGDRTLRRLLIIGASAVVRWAARKGPPAGSWLAGMLARKPPMLVRVALANKMARIIWALMAKGGIYRAPVAAA

SEQ ID NO: 14585 - protein, 348 aa, unidentified
  source 1..348: note = protein_3fcda79
  REGION 7..149: note = RuvC_domain
  SITE 10: note = RuvC_P1
  SITE 53: note = RuvC_P2
  SITE 88: note = RuvC_P3
  SITE 90: note = RuvC_P4
  SITE 93: note = RuvC_P5
  REGION 212..297: note = Tnp_domain
  SITE 220: note = Tnp_P1
  SITE 250: note = Tnp_P2
  SITE 258: note = Tnp_P3
  SITE 259: note = Tnp_P4
  SITE 271: note = Tnp_P5
MKEVTTIGLDLAKAVFQVHGVDAAGAVTLRRAVRRRQVLSFFTKLPPCLVGMEACATAHYWAREIAKLGHDVRLIPPAYAKAYVRRNKNDPADAEAICEAVSRPSMRFVAVKTEVQQAAAGIHKVREMLIKQRTMLINTLRGLMGEFGIVVAEGPRHVGELIAILADPADRRIPTPLHEGLLAIVETLRGIERRIEIVDQQIVGWGRDNATCRHLITIPGYGPILSSAMAAMTVNPAAFGSGRHFSASLGLVPRQDGTGGKVKLGPISKRGNGYLRRLLVNGAMSVLCSKRAKEDPWLVKLLETKERKVAACALANKMARIGWAVMRRQEDFRGRRHNQPCPDGETAL

SEQ ID NO: 14586 - protein, 391 aa, unidentified
  source 1..391: note = protein_268304d
  REGION 4..163: note = RuvC_domain
  SITE 7: note = RuvC_P1
  SITE 60: note = RuvC_P2
  SITE 101: note = RuvC_P3
  SITE 103: note = RuvC_P4
  SITE 106: note = RuvC_P5
  REGION 266..353: note = Tnp_domain
  SITE 274: note = Tnp_P1
  SITE 304: note = Tnp_P2
  SITE 312: note = Tnp_P3
  SITE 313: note = Tnp_P4
  SITE 326: note = Tnp_P5
MIFVGIDVAKDKHDCFITNTEGESLFKPFTISNNLNGFNELYLKIESVMEDVSKVKVGLEATGHYSYNLLGYLLDKGFPTYVINPLHTNLYRKSLSLRQTKTDKVDSRTIASMMMSDVNLKSYSDTSYHNEELKSLTRYRFDKVKERSALKVSLARLVCILFPELEKLVPTLHIASVYALLYEFPSAKHVASAHLTRLTNLLETASKGRYRKDVAITFRNAARNSIGSNMPAKSLELKHTIKLIQELDAEISEIENEIQSIMDEINSPILSIPGISYKMGAMIIAEIGDFSRFDSPDKILAYAGLSPTTYQSGQLDSSHSRMEKRGSRYLRYALFNATKYVCLWDPTFASYLSKKRAEGKHYNVAISHAAKKLVRVIFQLEKSGKQYIKAI

SEQ ID NO: 14587 - protein, 334 aa, unidentified
  source 1..334: note = protein_dfeb33d
  REGION 5..160: note = RuvC_domain
  SITE 8: note = RuvC_P1
  SITE 61: note = RuvC_P2
  SITE 99: note = RuvC_P3
  SITE 101: note = RuvC_P4
  SITE 104: note = RuvC_P5
  REGION 244..292: note = Tnp_domain
  SITE 251: note = Tnp_P3
  SITE 252: note = Tnp_P4
  SITE 265: note = Tnp_P5
MEHWIGIDVSSATLDFALLDGKGTHLESVQIENDRKAVMKLMGQWSKRHGVEVGKSLICLEATGHYTLMMLNLIVGQQWHAWLAHPNDIQQSMGIKRVKNDKVDALRIAQYARTFHEKARLFTAQNLKLDRLKHLITRRNHLVRSRARHRTHITDLNRYMDRQLRTEFDRIDKRQIKLEDQLVAHVDALILAEIRTDPQTERQYDLLRTIPGVGPQARRIPGGLHRWLCTLQHAAPGSRAMPVSHPSSAGSGSSVRGRTQVSHQADKSLKTLLHMSALVSVREPGELRQYFERKRAEGKKPILVVNAVRNKLVHRVCAVIRNNRPYERRPITTT

SEQ ID NO: 14588 - protein, 316 aa, unidentified
  source 1..316: note = protein_a73cbd5
  REGION 6..152: note = RuvC_domain
  SITE 9: note = RuvC_P1
  SITE 57: note = RuvC_P2
  SITE 97: note = RuvC_P3
  SITE 99: note = RuvC_P4
  SITE 102: note = RuvC_P5
  REGION 192..276: note = Tnp_domain
  SITE 200: note = Tnp_P1
  SITE 229: note = Tnp_P2
  SITE 237: note = Tnp_P3
  SITE 238: note = Tnp_P4
  SITE 249: note = Tnp_P5
MDIKVVGIDVSKNTLDLDSLPDSASLQFINDEAGIASLLAYLAEHNDEGQIDRIVLEATGGYETSVSIALAGAGLPVAVVNPKQVRDFAKACGILAKTDRLDARVLARFAQQIRPPVRPLPDEAQREFADLLDRRSQLVVMRAQEKARVATAPPLAIKSLKEHIEWLDARIKSLDIDMTHKLRTSDVWKQKVELLSSVPGIGKVSVFTLLGRLPELGKLNRQQIAALVGVAPFNDDSGKRRGQRYIRGGRAEVRNVLYMATVTAIRHNPAIRSFYERLSLTGKPFKLAVTACMRKLLTVLNTMAKTGQPWENKLPA

SEQ ID NO: 14589 - protein, 410 aa, unidentified
  source 1..410: note = protein_8dfb6d4
  REGION 7..170: note = RuvC_domain
  SITE 10: note = RuvC_P1
  SITE 64: note = RuvC_P2
  SITE 110: note = RuvC_P3
  SITE 112: note = RuvC_P4
  SITE 115: note = RuvC_P5
  REGION 282..368: note = Tnp_domain
  SITE 289: note = Tnp_P1
  SITE 319: note = Tnp_P2
  SITE 327: note = Tnp_P3
  SITE 328: note = Tnp_P4
  SITE 341: note = Tnp_P5
MSNSLLVGIDVSLNDNKVRILHPDGTSLAKFVVLNSVPGAKTLSQKVTGIASKNNFDSIVIGLEATSVYGDPLVYFLKEDATVNSFNTKIHVLNPTQVHKFKMMYPDLPKTDDIDAWVIAEHLRFGRINKEVYMDDRYKALQKLTRARFHTVQNLAREKNWFLNNLFLKFSSLTQQKIFSDKFGATSSSIIEEFFSVDEISYMPIEELVDFINEKGKGHFENPAEIAAAVQKAARSSYRLPKAVTDSVNQVLAVSFLAIKAYKEQLKIFDKAIEDQIKLIPNTLTSVKGIGPVYSAGIVAEIGDIHRFKDQAALAKFAGIAWTKHQSGNFTAAHTQLIKFGNRYLRYYIMEATNKVRLHDHELKRFYDKKYSQTPKTPHKRALALTARKFVRLVYALLHSNRLYTPPKGI

SEQ ID NO: 14590 - protein, 339 aa, unidentified
  source 1..339: note = protein_b86073e
  REGION 6..147: note = RuvC_domain
  SITE 9: note = RuvC_P1
  SITE 52: note = RuvC_P2
  SITE 87: note = RuvC_P3
  SITE 89: note = RuvC_P4
  SITE 92: note = RuvC_P5
  REGION 210..293: note = Tnp_domain
  SITE 218: note = Tnp_P1
  SITE 248: note = Tnp_P2
  SITE 256: note = Tnp_P3
  SITE 257: note = Tnp_P4
  SITE 269: note = Tnp_P5
MKYIPVGVDIAKHLIQVHFINEHTGEVVDKQLRSKDFLAFFSNRERCLIGMEACGGSQYWARELEKLGHKVRLMQGRFVKAFVMGNKNDVMDARAIWMAVQQPGKEIAIKTEEQQSVLVLHRARRQLVKFRTAQINSLHGTLLEFGETIHKGRAAMDRELPVALERMKATLPPYLITVLEDQYNRLNELDSLIDGIEKQLNSVARQSEICKRLMEIPGVGPLIATAAVATMGEAAAFKSGREFAAYVGLVPKQTGSGGKIRLLGISKRGDTYLRTLFIYGARAASLCAKEPGLWITELRKRRPTGVAIVAMANKLARTVWALAAYDRKYEKNHVSIRPC

SEQ ID NO: 14591 - protein, 341 aa, unidentified
  source 1..341: note = protein_b003356
  REGION 7..149: note = RuvC_domain
  SITE 10: note = RuvC_P1
  SITE 53: note = RuvC_P2
  SITE 88: note = RuvC_P3
  SITE 90: note = RuvC_P4
  SITE 93: note = RuvC_P5
  REGION 209..296: note = Tnp_domain
  SITE 217: note = Tnp_P1
  SITE 247: note = Tnp_P2
  SITE 255: note = Tnp_P3
  SITE 256: note = Tnp_P4
  SITE 268: note = Tnp_P5
MQDVTLIGIDLGKHSFHVHGQDRHGKALLRMKFNRKQLIEFFAKFHTCTVVMEACAGAHHMARRLAGYGYEVKLISPQFVRPFVKSNKNDFIDAEAICEAACRPSMRFVTPKTESQQCLSALHRVRESLVRERVMASNQIHGFLLEFGISLPVGHAVIRRLPSVLAEQALPARLRVLLERLHSHFSYLEERIADIEKELNLQLQDDDLGQRLMTIPGVGPLTASVLAAEVGDGKQYRCGRDFAASVGLVPRQYSTGGKNNLLGISKRGDKHMRHLLVQCARAYMLRLERQTDGLAQWVRSMLTRRHSNVVACALANKLARMAWAIAAHHTEFKRQEAARVT

SEQ ID NO: 14592 - protein, 297 aa, unidentified
  source 1..297: note = protein_a3f02d6
  REGION 6..148: note = RuvC_domain
  SITE 9: note = RuvC_P1
  SITE 52: note = RuvC_P2
  SITE 87: note = RuvC_P3
  SITE 89: note = RuvC_P4
  SITE 92: note = RuvC_P5
  REGION 170..252: note = Tnp_domain
  SITE 174: note = Tnp_P1
  SITE 204: note = Tnp_P2
  SITE 212: note = Tnp_P3
  SITE 213: note = Tnp_P4
  SITE 225: note = Tnp_P5
MKITTIGIDLAKSVFQVHGVDQRGKPVVLKRLRRKQMLPYFAQLSPCLVGMEACGGARYWARKLRAQGHSVKLMAPQFVKPYVKANKTDAADAEAICEAVTRPSMRFVPIKNGDQQAVLSLHRVRQGFVKARTAQANQIRGLLAEYGITLPQGISHVANRLPEIVEDAENDLPGIGPLTASALSASIGDAKCFNNGRELAAWLGLVPRQHSSGGKSILLGISKRGDAYLRTLMIHGARSVIRVAERKTAPTDSWSTAMMKRRHSNVAAVARANKNARVVWVLLVHGREYSPDYKQLA

SEQ ID NO: 14593 - protein, 401 aa, unidentified
  source 1..401: note = protein_7a1ea2e
  REGION 7..172: note = RuvC_domain
  SITE 10: note = RuvC_P1
  SITE 63: note = RuvC_P2
  SITE 103: note = RuvC_P3
  SITE 105: note = RuvC_P4
  SITE 108: note = RuvC_P5
  REGION 272..357: note = Tnp_domain
  SITE 280: note = Tnp_P1
  SITE 310: note = Tnp_P2
  SITE 318: note = Tnp_P3
  SITE 319: note = Tnp_P4
  SITE 330: note = Tnp_P5
MEPHLCVGIDVGCKAHRVGIAHPDGSILEEFDISHNDVGFQEFFRRVEVHRQRVNLPVAVAMEGFNGYARPLDRLVLDNHYRLYNVNNMKLARFKEVFPGAAKTDVIDARKILQLFILKEHLPMAKDALQEVVAAPAVNEKLKRLSRRRRRLVNEKVRVVNNMQADLQAVCPELLAATHDADNLWFLRFLTFRDDLPQLARLRRATILQIPGIGQKYSAIIREWQRQAKFSSEVEYVGPMIIEDARRILELHQQIRVLDEAMTELAGDSEIARRLSTIDGFGKTSIAELAGEIGTQRRFAAEASLALYVGMSPLTHQSGQTSSARSPRQVNCRAKAAMMTAVAHHIRCVPQSKAYYDRKRAQGKTHNQAVRALGRHMVRVIWAMLRDERDYEIREDTHPMP

SEQ ID NO: 14594 - protein, 343 aa, unidentified
  source 1..343: note = protein_e526e82
  REGION 6..147: note = RuvC_domain
  SITE 9: note = RuvC_P1
  SITE 52: note = RuvC_P2
  SITE 87: note = RuvC_P3
  SITE 89: note = RuvC_P4
  SITE 92: note = RuvC_P5
  REGION 211..296: note = Tnp_domain
  SITE 219: note = Tnp_P1
  SITE 249: note = Tnp_P2
  SITE 257: note = Tnp_P3
  SITE 258: note = Tnp_P4
  SITE 270: note = Tnp_P5
MQIRSVGIDLGKTTFHLGALGDGGQVLLRRKFTQKQLIHFTAKMQTCLIGMEACSGAHFLGRVLRGQGHDVKLIPAQFVKPFVKSNKNDFIDAEAIAEAVDRQNMRFVPIKTEDQSDLQAMHRVRDRLISRRTAVINQLRAFLLERGMVFAKTPSKLRQQMPYVLEDADQNFTPRMRNLLGLLWSEWKELEQQLEGLDREVEQIASGDAACQRLRQIPGIGPLIATAMIAAIGNGAAFHKGREFAAWLGLVPRQYSTGGKAKLCGISKRGNSYLRKILIHGARAAVTRMKRERAPMGSWMTALEARAPHNVLVVAMANKLARIAWAVLSSGENYRALPSLAPA

SEQ ID NO: 14595 - protein, 342 aa, unidentified
  source 1..342: note = protein_e37f2e9
  REGION 6..148: note = RuvC_domain
  SITE 9: note = RuvC_P1
  SITE 52: note = RuvC_P2
  SITE 87: note = RuvC_P3
  SITE 89: note = RuvC_P4
  SITE 92: note = RuvC_P5
  REGION 210..293: note = Tnp_domain
  SITE 218: note = Tnp_P1
  SITE 248: note = Tnp_P2
  SITE 256: note = Tnp_P3
  SITE 257: note = Tnp_P4
  SITE 269: note = Tnp_P5
MKDMMIGVDLAKNVFQVHGALRTGEVQFRKKLTRKQFPAFMAQQEPCLVIFEACGGAHYWAHEMTEMGHEVKLIAPQYVRPFVKRQKNDAADAEAIVIAARQPEMRFVAPKTVEQQSRAAVFRGRERLVHQRTADVNALRALLHEHGHVFPQGIQRLSGMKALVEDESSNLHPLIREECADLLAQIAEKTARIIERTAKLKVLAAQSDRARQLQTMPGVGSLTAIAVEAFGPDMAQFKTGRDFAAWLGLVPKQHSSGGKERLGRMTKAGQADIRRLLIIGAMSRLTWIGQRTIVEGSWLSRMLARKPKMLVAIALANKMARQIWAMLMKNEDYTDPALVVAA

SEQ ID NO: 14596 - protein, 343 aa, unidentified
  source 1..343: note = protein_9cc164a
  REGION 7..149: note = RuvC_domain
  SITE 10: note = RuvC_P1
  SITE 53: note = RuvC_P2
  SITE 88: note = RuvC_P3
  SITE 90: note = RuvC_P4
  SITE 93: note = RuvC_P5
  REGION 211..299: note = Tnp_domain
  SITE 219: note = Tnp_P1
  SITE 249: note = Tnp_P2
  SITE 257: note = Tnp_P3
  SITE 258: note = Tnp_P4
  SITE 271: note = Tnp_P5
MLRTNVIGIDLAKNVLQVCHISRQGELLSNKAVSRQKLKELLAKSKPSLVALEGCASCHYWGRYAESFGHEVRIINPKKVKAYVDGHKTDANDALAIANAALQIGIKYSKPKSMEQQTLMSLEANRQFLSKTIVSLGLHIRGIINEYGIVKAKGTKGLAELVTSTLYESDVLPASLVTTLSMLWQQYLNLKDELSKLQKSMNSTTHQIEPCKRLMALEGVGETTASMLYATLGNGTQFTNGRQASAFVGLTPKQYSSGGKVTMLGIDKFGGVKDLRSMLYLGAMAYIYRLPESPKNQKQAWLIKLVDRVGFKRACIALANKTVRTAWAMLHYETAYQPKPLSI

SEQ ID NO: 14597 - protein, 392 aa, unidentified
  source 1..392: note = protein_1532e66
  REGION 4..164: note = RuvC_domain
  SITE 7: note = RuvC_P1
  SITE 62: note = RuvC_P2
  SITE 103: note = RuvC_P3
  SITE 105: note = RuvC_P4
  SITE 108: note = RuvC_P5
  REGION 267..354: note = Tnp_domain
  SITE 275: note = Tnp_P1
  SITE 305: note = Tnp_P2
  SITE 313: note = Tnp_P3
  SITE 314: note = Tnp_P4
  SITE 327: note = Tnp_P5
MLYIGIDVAKSKHDCFIIDSDGVVYTDNLRITNDRIGFNKLLETILNALDGEPATNAKVGLEHTGHYSINIKRFLESQGFVVTCFNPLETSAFRKASTLRRTKTDKCDAKIIATMLFSDESIPTSSPSYQIRELKSLTRHRFRLIGYRGKLKVSFARIIDVVFPEFPGFVWSVNQKSSHQLLLELPTPDTIAACHLTRLTNLIRKSSHGRYGREKAVALRDLAASSIGLSDEALAFELQQTIRMIQNVQTEIDALDRKIKSIVRELHTPLLTIPGISYTLAAIILAEIGDINNFSNPSKLQAFAGLDPSTYQSGKYTASYAAMVKRGSTYLRWAMFQAARLVAMRDKTFADYLAKKRSEGKHFNVAISHVSKKLLRTIFYMLKHNEAFVPQS

SEQ ID NO: 14598 - protein, 396 aa, unidentified
  source 1..396: note = protein_b6e3100
  REGION 10..163: note = RuvC_domain
  SITE 13: note = RuvC_P1
  SITE 61: note = RuvC_P2
  SITE 102: note = RuvC_P3
  SITE 104: note = RuvC_P4
  SITE 107: note = RuvC_P5
  REGION 225..310: note = Tnp_domain
  SITE 233: note = Tnp_P1
  SITE 263: note = Tnp_P2
  SITE 271: note = Tnp_P3
  SITE 272: note = Tnp_P4
  SITE 283: note = Tnp_P5
MEQDGQRVVIGMDPHKRSVTIEVMTGEETVVGGGRFGTDIAGYRSMLEVVRRWPDRVWAVEGCRGIGRHVALRLLADGQEVVDVPPKLSARARVFSTGQGRKTDATDAHSIALVGTRMAGLRPVVDDQQLTVLRVLGDRRRSLGEDHTRMVSQLHHLLLELIPGGAKKDLSAAQAKALLAKVRPRDAAGKTRRRVAAELIADLERIYVRKKAADKELKELVAATGTSLMDLNGIGPSGAARLLVEVGDITRFPDRDHFASWNGTAPIDASSGDQVRHRLSRQGNRQINRTLHIMATVQLRNPTEGRAYYDRRKADGKTSMEAMRALKRRLSNIVYRTMLDDAIAQAANGMRTGPGGQTGHDSDSSATGSHPNAGSSDKPLPGPVTTNPRTPLPAAS

SEQ ID NO: 14599 - protein, 403 aa, unidentified
  source 1..403: note = protein_e9013d5
  REGION 4..160: note = RuvC_domain
  SITE 7: note = RuvC_P1
  SITE 57: note = RuvC_P2
  SITE 97: note = RuvC_P3
  SITE 99: note = RuvC_P4
  SITE 102: note = RuvC_P5
  REGION 274..361: note = Tnp_domain
  SITE 282: note = Tnp_P1
  SITE 312: note = Tnp_P2
  SITE 320: note = Tnp_P3
  SITE 321: note = Tnp_P4
  SITE 334: note = Tnp_P5
MNAVGIDVSKGKSMVTILRPFGEIVIKPFEVKHTSSEMNALISRIKNIQGESRIVMEATGHYYEPIAHALTQAGFYVALVNPKLIKDFSNNSLRKVKSDKADSSKIARYTLNNWNNLDQYTYMDHLRAQLKLLNRQFHFYIKEKTASKNNLISLLDETFPGCNKFFDSPTRDDGHQKWVDFAETYWHVDCVRTMSLSAFIEHYQKWCKCKGYNFSSNKAKEIYAASKEIIAVLPKDNLTKLLVKQAIEQLNATSKVVEDIRIQMNETASQLPEYPVVMAMKGIGSSLGPQIMAEIGDITRFTHRGALTAFAGVDPGVNESGEYTQRSVPTSKHGSPYLRKALFQVMDVLIKTTPSDDAVYAFLDKKRAEGKPYYVYMTAGANKFLRIYYGRVKEYLRSLPDTE

SEQ ID NO: 14600 - protein, 417 aa, unidentified
  source 1..417: note = protein_8f49fda
  REGION 18..170: note = RuvC_domain
  SITE 21: note = RuvC_P1
  SITE 69: note = RuvC_P2
  SITE 107: note = RuvC_P3
  SITE 109: note = RuvC_P4
  SITE 112: note = RuvC_P5
  REGION 277..363: note = Tnp_domain
  SITE 285: note = Tnp_P1
  SITE 316: note = Tnp_P2
  SITE 324: note = Tnp_P3
  SITE 325: note = Tnp_P4
  SITE 336: note = Tnp_P5
MKSASNTLPDQPINDVTAGLDWAMHDHAVSIVDGRGRELARTMVEHTAAGLRELVTFLNRHGAGEVAIERPDGPIIDTLLEANLTVVVISPNQVKNLRSRYGSAGNKDDRFDAFVLADTLRTDRPRLRHLQPDTPETIALRRTCRARKDLVADRVATTNQLRSHLRNVFPGAIGLFAHLDSEIALAFLTRFPTQDRADWLTPKRLGDWLAKQGYSGRSDPALLHARLTAAPRGITGHDATTQAHITTAYLVVLTTLVEQIKNLAVQIDQQLTAHADSHIFTSLPRSGRVRAARLLAEIGDCRAKYPTPASLACLAGVAPSTRQSGKLRAVTFRWACDKQLRDAVTDFAGDTRHDNPWAADLYQRARDRGHDHAHAVRILARAWLFVIWHCWQDGLAYDPTKHGALQRFLQATENEGA

SEQ ID NO: 14601 - protein, 391 aa, unidentified
  source 1..391: note = protein_f82bb98
  REGION 12..164: note = RuvC_domain
  SITE 15: note = RuvC_P1
  SITE 61: note = RuvC_P2
  SITE 101: note = RuvC_P3
  SITE 103: note = RuvC_P4
  SITE 106: note = RuvC_P5
  REGION 269..354: note = Tnp_domain
  SITE 277: note = Tnp_P1
  SITE 306: note = Tnp_P2
  SITE 314: note = Tnp_P3
  SITE 315: note = Tnp_P4
  SITE 327: note = Tnp_P5
MGKKEKASAAVVGFDVGKSSHRACAVAPDGAALFNREVANRPGEIDRALADAGPGARVVVDQKRNIGALVVARARAAGNPVFYLPGIAMKKARDMFPATAKTDEIDAEVIARTAMGMPWTLREVAEEAPATTALRMLASQRDFAVRSRTKAANRLRAVLLEADPAFEAAVDPSSRWQLAVLAELGGAFGIRAAGLRRFRSVAERSCGARREASDRLWAAAVASASSGRPELAAESELVRSLAARILSDGGEAARLDGLISDSLAGDETYEALLTVPGVGPRTAAALVTLVDASLFRSHDELAAYTGLAPCNRQSGTSLNSTSPSRGGNRALKNLLVYSCTSLVGTKGRFGRYYAECRARGMRHNKALKAVARKRLKVIFAVMRDRVPYREG

SEQ ID NO: 14602 - protein, 325 aa, unidentified
  source 1..325: note = protein_ac87ee2
  REGION 4..150: note = RuvC_domain
  SITE 7: note = RuvC_P1
  SITE 52: note = RuvC_P2
  SITE 92: note = RuvC_P3
  SITE 94: note = RuvC_P4
  SITE 97: note = RuvC_P5
  REGION 191..278: note = Tnp_domain
  SITE 199: note = Tnp_P1
  SITE 229: note = Tnp_P2
  SITE 237: note = Tnp_P3
  SITE 238: note = Tnp_P4
  SITE 251: note = Tnp_P5
MKYIGIDVSKTTFVVAYSSEKSSKTCVFANTAVGIKKFMKTIDPSVHHCVMEATGNYSMLLVYLLSKAGYVVSMENPLKVKNFARTILSVIKTDEVDARLIAMYGERMQPAPYKIKDDALLKLKQKRTILRQLKKQLTANKNILESFDVLPVKDRSCERALKRTIEFLEKQIKAMTTELEAFSNEKFKEQLDLLTSIKGVGVTIATALIVATGAFTYFNSAKQLTRYLGLSPTYQQSGTSVKFRGHINRNGDPYLRSNLYLAACSSLRSNKECMAFYNRMKAKGKPAKLAVVAVANKLVRQAFAVVTNNTPYEDGFISKNNKSSC

SEQ ID NO: 14603 - protein, 334 aa, unidentified
  source 1..334: note = protein_d5d296c
  REGION 7..149: note = RuvC_domain
  SITE 10: note = RuvC_P1
  SITE 53: note = RuvC_P2
  SITE 88: note = RuvC_P3
  SITE 90: note = RuvC_P4
  SITE 93: note = RuvC_P5
  REGION 209..301: note = Tnp_domain
  SITE 217: note = Tnp_P1
  SITE 247: note = Tnp_P2
  SITE 255: note = Tnp_P3
  SITE 256: note = Tnp_P4
  SITE 268: note = Tnp_P5
MQNVTLIGIDLGKHSFHVHCQDKHGNALLRKKFSRTQLIHFLGSYQAATVVMEACGGAQFMARRIADLGHEPKLIYPQFVRPFVKSNKNDFVDAEAICKAASRPSMRFVKPRTQDPQAMAALHRVRDSLIRQRVKTTNQMHAFLLEFSVSLPRGIAVIRRLSAVLEENDFPPYLARVLSRLHRHYVYLCGEIDEVDKELKTHLAEDENAQRLLTIPGVGPVTASLLATRLGDGKNYASSRDFAASTGLVPRQYSTGGKTTLMGISKRGDKNLRRLLVQCARVFIQRLEHNPGRLAEWVRKQLANHHSNVVACALANKLARIAWAVTAHQAAFSQ

SEQ ID NO: 14604 - protein, 243 aa, unidentified
  source 1..243: note = protein_3736c00
  REGION 2..87: note = RuvC_domain
  SITE 29: note = RuvC_P3
  SITE 31: note = RuvC_P4
  SITE 34: note = RuvC_P5
  REGION 122..205: note = Tnp_domain
  SITE 129: note = Tnp_P1
  SITE 158: note = Tnp_P2
  SITE 166: note = Tnp_P3
  SITE 167: note = Tnp_P4
  SITE 178: note = Tnp_P5
MLLWMYCTPLAINPARARRFAQGTGRAAKTDRLDATVLAQMAHLLPLTRYVPPAPWQQRLAEFAQCRRQLVQMRVSEMQRLRRLVDPDLIAMKQRHIAQLSDDLKQLDKAIAEQLEGQPGWKNIGALKGVGPILISTLACELPELGSLGSKAIASLVGLAPMNRESGTWQGQRRISGGRAVVREALYMAALTAIRYEPRLRAFYAGLKAKGKASKVALVAVMRKMLVILNARKRDAEVALGCP

SEQ ID NO: 14605 - protein, 344 aa, unidentified
  source 1..344: note = protein_3f6d465
  REGION 5..152: note = RuvC_domain
  SITE 8: note = RuvC_P1
  SITE 55: note = RuvC_P2
  SITE 92: note = RuvC_P3
  SITE 94: note = RuvC_P4
  SITE 97: note = RuvC_P5
  REGION 212..314: note = Tnp_domain
  SITE 220: note = Tnp_P1
  SITE 250: note = Tnp_P2
  SITE 258: note = Tnp_P3
  SITE 259: note = Tnp_P4
  SITE 271: note = Tnp_P5
MEHYAGLDVSLELTSVCIVDTQGGMVCEAKVASEPEALIQFLLEQELEFGRVGLEAGPLSQWLHTGLIAAGFDTVLLETRHVKAALSAMTVKTDRRDARGIAQLLRLGWYRPVHAKSINAQEVRALLTARKLIQAKLLDVESGMRGVLRGFGLKVGAISRGRFETRIRELVEGNATLETVIGSMLAARASLACEFKRLHRELLALVRADPVCRQLMSVPGVGAIVAITFKSGVDDPTRFRRSRDVGSHFGLTPRKYQSGELDVTGSITKVGDRMVRTALFEAASVMLTRTVRFSPLKSWAMAVARRRGTKKAKVALARKLGVILHRMWVDGTTFRWSNEETAIA

SEQ ID NO: 14606 - protein, 315 aa, unidentified
  source 1..315: note = protein_ef553ce
  REGION 6..161: note = RuvC_domain
  SITE 9: note = RuvC_P1
  SITE 56: note = RuvC_P2
  SITE 96: note = RuvC_P3
  SITE 98: note = RuvC_P4
  SITE 101: note = RuvC_P5
  REGION 192..276: note = Tnp_domain
  SITE 200: note = Tnp_P1
  SITE 229: note = Tnp_P2
  SITE 237: note = Tnp_P3
  SITE 238: note = Tnp_P4
  SITE 249: note = Tnp_P5
MTKDTIGVDISKDHLDAHRMSDGAARRFANDTAGHSSFIDWLGQAGPAHDIRVVYEPTGPYHRAFERQVDRAGAALVKVNPRQGRRFAEATGKLAKTDRTDAAMLARMGAILELEARPVRGPLLNDLKDLHMAREALVKNRTAARNRAKNLTLAILKRHNAEQLRQIERQMIAVEKEIMLIIKHDPDLVGRFDILVSIPGVSAVTAFALLIDMPELGTLEHGQVASLAGLAPVARQSGTWTGRAFIRGGRANVRHALYMPALVAMRFNPDLKTKYDQLKAAGKAPKVAITAIMRKLIVLANALLKHGRKWLPSLA

SEQ ID NO: 14607 - protein, 343 aa, unidentified
  source 1..343: note = protein_c42a596
  REGION 6..148: note = RuvC_domain
  SITE 9: note = RuvC_P1
  SITE 52: note = RuvC_P2
  SITE 87: note = RuvC_P3
  SITE 89: note = RuvC_P4
  SITE 92: note = RuvC_P5
  REGION 210..292: note = Tnp_domain
  SITE 218: note = Tnp_P1
  SITE 248: note = Tnp_P2
  SITE 256: note = Tnp_P3
  SITE 257: note = Tnp_P4
  SITE 269: note = Tnp_P5
MSIKVIGIDLGKSIFHLVAHDQFGKIEFRKKLSRQKLKEFLSNHPLTTIAFEACGGAHWLGRYCQQVGHRVKLIPPQYVRPYVKGNKNDFIDADAIAEASGRPSMRFVEVKSESAQVINAIHRIRSAYIKERTACMSRIGALLLEFGMSLPKGHASMKRLFAWLATQRQSLPPLLMDELLSIHEHYTGLCTRIRQQDDKLLRLVADHPNGRLLKSIPSVGDMTASQCLADLGSVKQFKNGRNLAAWLGLVPRQHSTGGKHTLLGISKRGNKHLRTLFIHGARAILSKPDKTGVPFGDWLIRLRKEKPFNVACVALANKLARIAWAVLHYQQPFNAAMLHSESA

SEQ ID NO: 14608 - protein, 348 aa, unidentified
  source 1..348: note = protein_16cf76b
  REGION 12..152: note = RuvC_domain
  SITE 15: note = RuvC_P1
  SITE 58: note = RuvC_P2
  SITE 93: note = RuvC_P3
  SITE 95: note = RuvC_P4
  SITE 98: note = RuvC_P5
  REGION 217..302: note = Tnp_domain
  SITE 225: note = Tnp_P1
  SITE 255: note = Tnp_P2
  SITE 263: note = Tnp_P3
  SITE 264: note = Tnp_P4
  SITE 276: note = Tnp_P5
MSQNLDRAIAVIGIDIGKNSFHIVGLDGRGAIVLRQKWSRGQVEARLVNMPPCLIGMEACVGAHHLSRKLKAFGHDARLMPAKYVRPYSKGQKNDFRDAEAIAEAVQRPTMKFVATKTADQLDLQALHRVRERLVSQRTGIINQIRAFLLERGVAVRQGLRFLRAELPRILATPPDVLSPRMVRVIEGLAEDWRRLDERVDHLSGEITALARQDVGCERLMSVPGIGPIISSAMVAAIGTGDAFSKGRDFAAWLGLVPKQISTGDRTILGKISKRGNRYLRVLFVQAAWVVLIKPKSWERHGLKHWIEAAKKRLHRNVLAIALANKLARIAWSVLANGRIFEARLQAA

SEQ ID NO: 14609 - protein, 400 aa, unidentified
  source 1..400: note = protein_0d0ae09
  REGION 8..163: note = RuvC_domain
  SITE 11: note = RuvC_P1
  SITE 60: note = RuvC_P2
  SITE 101: note = RuvC_P3
  SITE 103: note = RuvC_P4
  SITE 106: note = RuvC_P5
  REGION 269..355: note = Tnp_domain
  SITE 277: note = Tnp_P1
  SITE 307: note = Tnp_P2
  SITE 315: note = Tnp_P3
  SITE 316: note = Tnp_P4
  SITE 328: note = Tnp_P5
MTGSHLWAGVDVGKEHHWICVLDTSGTVVLSRRCDNDEATIRAVITEVDALGETVSWTVDLTTVYVTLLLTVLADTGKPVRYLSGRSVWQASSVYRGGEAKTDARDARVIADQSRMRSDLPVLHPDDELIRELQMLTGHRTDLVADRTRAINRLRQQLVAVCPGLERVAQISSDRGWVVLLARYQRPQAIRRAGVARLTTMLVAAGVRNAESIAHAAVTAAKAQTVRLPGEDVAADLVAELAQGVTDLDARIAAVDAAIEARFRRHPLAEVITSLPGIGFRLGAEFLAAVGDPTLIGSADQLAAWAGLAPRPKDSGKRTGRLHTPQRYSRRLRRVMYMSALTAARCDPVSRAYYTRKRAEGKRPIQATICLARRRVDVLYALIRDNRTWQPDAPVATVAA

SEQ ID NO: 14610 - protein, 343 aa, unidentified
  source 1..343: note = protein_4fe83c3
  REGION 7..149: note = RuvC_domain
  SITE 10: note = RuvC_P1
  SITE 53: note = RuvC_P2
  SITE 88: note = RuvC_P3
  SITE 90: note = RuvC_P4
  SITE 93: note = RuvC_P5
  REGION 211..296: note = Tnp_domain
  SITE 219: note = Tnp_P1
  SITE 249: note = Tnp_P2
  SITE 257: note = Tnp_P3
  SITE 258: note = Tnp_P4
  SITE 270: note = Tnp_P5
MMKDTMIGVDLAKSVFQLHAASMTGELKFRKKLSRQSFLKFMAELPPAAVVMEACGSAHYWAREMIRLGHEVKLIAPHYVKPFVKRQKNDAADAEAIVIAAQRAEMRFVDPKSAEQQSRAVLFRARERLVHQRTELVNALRACLYEYGYVVPQGIHQLKRIEEILAAASGDLPDLVREECLDLMEQIGEKTAHINVRTGKIKALAAEADTARRLQTIPGVGSLTAMAVEAFAPSMESFRCGRDFAAWLGLVPRQFSSGGKERLGRTSKAGQTDIRRLLIIGAMSRLSWLGRKSIPEGSWLARIAARKPRMLVAIALANKMARTIWALITKNQDYRVPAQVAAA

SEQ ID NO: 14611 - protein, 327 aa, unidentified
  source 1..327: note = protein_91d659c
  REGION 6..140: note = RuvC_domain
  SITE 44: note = RuvC_P2
  SITE 80: note = RuvC_P3
  SITE 82: note = RuvC_P4
  SITE 85: note = RuvC_P5
  REGION 208..294: note = Tnp_domain
  SITE 216: note = Tnp_P1
  SITE 247: note = Tnp_P2
  SITE 255: note = Tnp_P3
  SITE 256: note = Tnp_P4
  SITE 267: note = Tnp_P5
MSRLRLTRSAGLLGVQEFPATPAGYAQLLSWLHGFGTVCLVGVEGTGSYGAGLARHITAAGVRVVEVDRADRQDRRRQGKSDPLDAVSAARAAQSGRAAGAPKGRDGAVEAIRALMVVKRSARAGRTQAINQARALILTGPDDLRIRFCGHTPAELVAELATLRPRPGAPVGYPTRIALRELGRRAQFLGCQLERLNELMVPLVTARAPRLLALYGVGADTAAMLLIAAGDHPERLRSEAAWAHLCATAPIPASSGKVTRHRLNPGGDRQANHALWRIVITRMSAHPATRAYVARRTKEGLPRKEIIRCLKRYAAREVYPHLRAPAG

SEQ ID NO: 14612 - protein, 341 aa, unidentified
  source 1..341: note = protein_18caef2
  REGION 7..149: note = RuvC_domain
  SITE 10: note = RuvC_P1
  SITE 53: note = RuvC_P2
  SITE 88: note = RuvC_P3
  SITE 90: note = RuvC_P4
  SITE 93: note = RuvC_P5
  REGION 212..297: note = Tnp_domain
  SITE 220: note = Tnp_P1
  SITE 250: note = Tnp_P2
  SITE 258: note = Tnp_P3
  SITE 259: note = Tnp_P4
  SITE 271: note = Tnp_P5
MTKITTIGLDLAKRVFQVHGVDATGAVVLRKRLRREDVLVFFTQLPPCRIGMEACSTAHHWARELRTLGHEVLLMPPQYVKPYVKRNKNDAADAEAICEAVGRPNMRFVPVKTVEQQSVLALHRSRDLLVRQRTALANAIRAHLAEFGIIEAQGLHKLERLTQIVQDETDNRVPAEARDALTALVALVDELNTRIDAIEKQIRTWHTASKASRRLATIPGIGPIIASALTATVADASAFANGRAFAAWLGLVPRQNSSGGKDRLGRVSKQGNGQLRRLLIIGAQAALQCSKSLRTHPWVATLLARKPRLVAAVALANKIARIAWAVMSKQEDFRGLAATPA

SEQ ID NO: 14613 - protein, 369 aa, unidentified
  source 1..369: note = protein_da51f71
  REGION 9..157: note = RuvC_domain
  SITE 12: note = RuvC_P1
  SITE 60: note = RuvC_P2
  SITE 97: note = RuvC_P3
  SITE 99: note = RuvC_P4
  SITE 102: note = RuvC_P5
  REGION 222..306: note = Tnp_domain
  SITE 230: note = Tnp_P1
  SITE 260: note = Tnp_P2
  SITE 268: note = Tnp_P3
  SITE 269: note = Tnp_P4
  SITE 281: note = Tnp_P5
MSKPITSFVGLDVHKDSTAIGEAEAGRENPRFIGTVGSDLGQLLKALKSLGKPETMLVVYEAGPCGYGLARQLRSRGYSCEVVAAGKIARRPGERIKTDRRDALTLARLARSGDLVKVMVPDERDEAMRDLSRTREDAVKARLKARQQLKALLLRHGHRYGGKSSWTLAHERYLATVGFAHPAQDIAFAEYRQAVREGHERVERVTQALRTQTEQWRLQPLVAALSSLRGIDFVAAVTLAAEIGDFGRFAHPTELMGFLGLVPSEYSTGDTRRQGDITKTGNSHARRVLVEAAWNYRFPARISRVLQIRQEGQPKAVREIAWRAQLRLAHRYRRLSSRKLHPNKICVAIARELAGFLWDIARQVKVAEA

SEQ ID NO: 14614 - protein, 407 aa, unidentified
  source 1..407: note = protein_20576b5
  REGION 9..157: note = RuvC_domain
  SITE 12: note = RuvC_P1
  SITE 62: note = RuvC_P2
  SITE 96: note = RuvC_P3
  SITE 98: note = RuvC_P4
  SITE 101: note = RuvC_P5
  REGION 251..338: note = Tnp_domain
  SITE 259: note = Tnp_P1
  SITE 290: note = Tnp_P2
  SITE 298: note = Tnp_P3
  SITE 299: note = Tnp_P4
  SITE 310: note = Tnp_P5
MDVLHPKCAGLDVHQQTVVACARTGAGKAVTYDVRTFGTTTAELLALSDWLTAHGCTHVAMESSGVYWKPVWHVLEGHFELVLANARHIRNIPGRKSDVNDAPWIADVLAHGLIRGSFVPPEPIQELRDLTRTRQQLVREIAQHTLRIQKTLENANINLTAVLADVLGSSGRAILRALARGERDPERLAELASDRVKASRAELVAALHGRVPPHHRFMLTLHLTQIEALEAAVREVEARLGDALAPFRAALDRLITMPGVSETVARVIVAEIGFDMTRFPSAGHLVSWAGLCPRLHESAGKRLSNRTRSSNPWLKTTLVQAAWAAARKKDSYCRAQFLRIKSRRGPKKAVLAVAASMLTAAYYMLKHGVDYRDLGADHFDRRDKAKLAKRLIARLHDLGLTVEVRAA

SEQ ID NO: 14615 - protein, 324 aa, unidentified
  source 1..324: note = protein_d40940d
  REGION 5..159: note = RuvC_domain
  SITE 8: note = RuvC_P1
  SITE 58: note = RuvC_P2
  SITE 98: note = RuvC_P3
  SITE 100: note = RuvC_P4
  SITE 103: note = RuvC_P5
  REGION 196..282: note = Tnp_domain
  SITE 204: note = Tnp_P1
  SITE 234: note = Tnp_P2
  SITE 242: note = Tnp_P3
  SITE 243: note = Tnp_P4
  SITE 255: note = Tnp_P5
MGVVVGIDIAKHTFDIATLQANGKYRTKAKLGNDQGGFEVLQQWLSKYAEPQAWVVMEATGIYHEALAQWLYERGYKVCVLNPSQTARYASSQLQRVKTDKVDAKMIAEYGRRHQDKLRAWEPEKPKIRRLRALTHRLKDLQELEQMEQNRLDVTHDDKAIELIQSMLKHIRQQIQDTLAAIEKHFDDNDDLKGQRNLLKSIDGIADRTAGLLLAELGDIQRFEDSRAVTAFAGLNPKLQDSGTLKGHVRISRMGSARLRAGLYLPAVVSLTYNPAIRALAERMRSAGKAGKQIVCAAMRKLLCIAYGVLKSGEPFDPKLAIAK

SEQ ID NO: 14616 - protein, 390 aa, unidentified
  source 1..390: note = protein_7b0b9f4
  REGION 4..163: note = RuvC_domain
  SITE 7: note = RuvC_P1
  SITE 60: note = RuvC_P2
  SITE 101: note = RuvC_P3
  SITE 103: note = RuvC_P4
  SITE 106: note = RuvC_P5
  REGION 266..353: note = Tnp_domain
  SITE 274: note = Tnp_P1
  SITE 304: note = Tnp_P2
  SITE 312: note = Tnp_P3
  SITE 313: note = Tnp_P4
  SITE 326: note = Tnp_P5
MIYAGIDVAKDKHDCFLCNSNGEVLFDAFTFPNNMQGFEELYQRIKSVSEDLSKVKVGLEATGHYSYNLLGFLLDKGLATYIINPLHTNLYRKSLTLRKTKTDKVDAHTIAMMLMSDVNLKSYSNTLYHNEELKSLTRYRFDKVQERAKLKQSVARLVNILFPELEKIVPTLHMKSVYTLLSEFPSAHHIADAHLTRLVNLLYEASKGRYNRDIAIRFRDAARNSIGSVMPAKSLELKHTIKLISELDTEIREVEDAIKSIMDEINSPILSIPGISYRMGAMIIAEIGDFDKFSSPDKILAYAGLSPSTYQSGQMQNCYSHMEKRGSRYLRYALFNATKFVCNWDSSFGEYLSKKRNEGKHYNVAVSHAAKKLVRLIYHLEKTGQFYKSF

SEQ ID NO: 14617 - protein, 314 aa, unidentified
  source 1..314: note = protein_45cd6fc
  REGION 8..153: note = RuvC_domain
  SITE 11: note = RuvC_P1
  SITE 55: note = RuvC_P2
  SITE 95: note = RuvC_P3
  SITE 97: note = RuvC_P4
  SITE 100: note = RuvC_P5
  REGION 190..274: note = Tnp_domain
  SITE 198: note = Tnp_P1
  SITE 227: note = Tnp_P2
  SITE 235: note = Tnp_P3
  SITE 236: note = Tnp_P4
  SITE 247: note = Tnp_P5
MTGDAIVLGIDVAKDWLDVAVLASGEGFRLDNDRAGWSELVRRLKGRAVAAIGVEPSGGYERGLAKALHKAGLPVRNVNPHKLRHYARAHGRLAKNDAIDARMIARFAAEMPTRPLHRDPVTEQLADLVTARRQLSDDKVSLANQLEQVRDPTVRRIFQARCRRIEADMLLLDKRMADLVASQSQLAERDRLIQSFPGAGPVLSRTLIALAPEIGSATRRQIAALVGVALYDHDTGVFRGKRSIQGGRAEVRKVLYMAALAASRSNPTLKAFHQRLLAAGKPPKVALVAVARKILTILSAMLRKDQPWTPHHQA

SEQ ID NO: 14618 - protein, 346 aa, unidentified
  source 1..346: note = protein_332383d
  REGION 5..157: note = RuvC_domain
  SITE 8: note = RuvC_P1
  SITE 56: note = RuvC_P2
  SITE 97: note = RuvC_P3
  SITE 99: note = RuvC_P4
  SITE 102: note = RuvC_P5
  REGION 220..306: note = Tnp_domain
  SITE 228: note = Tnp_P1
  SITE 258: note = Tnp_P2
  SITE 266: note = Tnp_P3
  SITE 267: note = Tnp_P4
  SITE 278: note = Tnp_P5
MSVIIGVDPHKASHTAVALDDREKPLGQRRIRAGQNQAEELLKWAVEFPERSWAIESAGGLGYLLSQQLVAAGEAVFDVPATLASRVRVLGTGRSNKNDPNDATSVAVAALRSPGLRQVSAVGHSEILRLLAKRNTDIGNLRCQAVERVHALVAELSGGGIDKELYASDLQRFLDHFVPATEAERIRVELVAELLEDIRRLDAQLKASRRRIRDAVRASGSSVTEIFGVGPIIAAMLIGYSGEIRRFASGDRYAAYNGTAPVEFSSGGRVAHRLSRRGNRHLNHAIHMAAICQLRQSHSEGRAYFDRRVAEGKTKREALRALKRHLSNAVYRHLVADAGRVAAAAR

SEQ ID NO: 14619 - protein, 310 aa, unidentified
  source 1..310: note = protein_e12f685
  REGION 8..149: note = RuvC_domain
  SITE 11: note = RuvC_P1
  SITE 54: note = RuvC_P2
  SITE 94: note = RuvC_P3
  SITE 96: note = RuvC_P4
  SITE 99: note = RuvC_P5
  REGION 190..274: note = Tnp_domain
  SITE 198: note = Tnp_P1
  SITE 227: note = Tnp_P2
  SITE 235: note = Tnp_P3
  SITE 236: note = Tnp_P4
  SITE 247: note = Tnp_P5
MTIQPGFVGCDISKDHLDIFDEALGRPERIANEATALAPLIERWKNKDMLVLFEATGPYDACLRRALTTAAIPFARVNPARARDFARATGRLAKTDAIDAQMLAAMARSLRPACEPAPSPEREALARLHKRRDQLVAMRKQERTRLAAIDDPAIVEDIEAHIAWLGTRIVEIERQTRDLIAATDRLSEDRRLLRSVPGIGPIAAATLIALMPELGTRSPKTIAALAGLAPFNVDSGQFRGKRVIKGGRRRIREALYMAAITAVRSKHRFARIYKAMVDAGKPPKVALIAIARRILVTANAILRDRTVFQT

SEQ ID NO: 14620 - protein, 408 aa, unidentified
  source 1..408: note = protein_7d8fbc0
  REGION 6..162: note = RuvC_domain
  SITE 9: note = RuvC_P1
  SITE 59: note = RuvC_P2
  SITE 99: note = RuvC_P3
  SITE 101: note = RuvC_P4
  SITE 104: note = RuvC_P5
  REGION 269..356: note = Tnp_domain
  SITE 277: note = Tnp_P1
  SITE 309: note = Tnp_P2
  SITE 317: note = Tnp_P3
  SITE 318: note = Tnp_P4
MKRYYLGVDWADEFHQVWVSDPEGKKIAEMKVVQSTAGLGELGRWLHERKAEEIELWAAIEKPHGRIVDFLLDHGAVVYPVNPKALDRARDRFRMSQSKSDLFDAYVLAEFVRTDHVHLRALEPNSEPAQELKMLTRDHDRLTRQKTRLLNQIEITLKEYYPRPLEVFSDLETHIARDFLKEYPTPQALSKLNRRRWNHFARRDHHLSEARCDELWEKIDKPQLTSPPYVIRAKAKLLLALVVQLEALLPAVESYSEEIKRFFDSMPAAELVKSLPGGKSGTTIPKLWAELGDAKNRWQSFRHLQAEGGGVPVTKSSGKSHVVHFRFACNKYLRHAIYWVSFNSLNRCEWANKYYRDQRAKGHSHPRALRALGAKWLKIIFVMWRDHKPYDENYHLANMARQRMRQAT

SEQ ID NO: 14621 - protein, 279 aa, unidentified
  source 1..279: note = protein_2c888ce
  REGION 1..49: note = RuvC_domain
  REGION 154..241: note = Tnp_domain
  SITE 162: note = Tnp_P1
  SITE 192: note = Tnp_P2
  SITE 200: note = Tnp_P3
  SITE 201: note = Tnp_P4
  SITE 214: note = Tnp_P5
MSFGEFSSSTISDENIFAIRQLSRYRSSLVDECSNWKRKVITILDQVFPEYSDLFSDTFGVTSKELLSKYPLPENMLEVSTKELTSLLNKASKGRFGIEKAQEIKEYATKSFGISFAKETFSFQIKQIINQISFIESQLKELEEKITNILKTLNSEITTITGIGDILGASILGEIGDISRFEKASQLVAFAGLDVAINQSGEFTGTEMKITKRGSPYLRRSIWIAATVACFKDPALSVYYKKLIDRGKKHLTAVGAVARKMCNIIFSVLKNKKPYTPNI

SEQ ID NO: 14622 - protein, 311 aa, unidentified
  source 1..311: note = protein_ec008f5
  REGION 10..148: note = RuvC_domain
  SITE 13: note = RuvC_P1
  SITE 55: note = RuvC_P2
  SITE 95: note = RuvC_P3
  SITE 97: note = RuvC_P4
  SITE 100: note = RuvC_P5
  REGION 192..276: note = Tnp_domain
  SITE 198: note = Tnp_P1
  SITE 227: note = Tnp_P2
  SITE 235: note = Tnp_P3
  SITE 236: note = Tnp_P4
  SITE 248: note = Tnp_P5
MTILTSQTVVGIDIAKAEIVVYRADLETIEAVKNDRAALKRWLKTLPAQSAIAVEATNIYHLETVDLAHAMGHQVYVVDAYRVSHYRRGVGQRAKNDPCDARVLARYLTNEQSKLRLWNPPPKAYTVLKSLLHRRATLIQNHTGLMLSWADEPLLKKERTAQQKAFERSDKVIQNLLRKVSKEAGIDDNIGRCKAIEGVGELTATGLATTYMRGDFANSDAFIAFLGMDLTVDDSGKKNGPRFLSKKGDPEIRRLAYNAAMAACRSTKWKPFYESYLARGFSKTQALVALARKLCRVAFTLMKNQGEYRSV

SEQ ID NO: 14623 - protein, 310 aa, unidentified
  source 1..310: note = protein_da88f47
  REGION 6..152: note = RuvC_domain
  SITE 9: note = RuvC_P1
  SITE 53: note = RuvC_P2
  SITE 93: note = RuvC_P3
  SITE 95: note = RuvC_P4
  SITE 98: note = RuvC_P5
  REGION 187..271: note = Tnp_domain
  SITE 195: note = Tnp_P1
  SITE 224: note = Tnp_P2
  SITE 232: note = Tnp_P3
  SITE 233: note = Tnp_P4
  SITE 244: note = Tnp_P5
MFSYPAGIDVSSGSLEIRVDQLDVAMSCSNSQSDFPGLIGWLTLHRVGRVLLEATGGYERKVMKALQAAGFEVIRINPCRAKSFARAMGQQAKTDPIDARLLAQFAAVIKSPDSRVTSAEQDDLRALVQQREHFVQQRDDDKRRLKTTSSDVVKPALQSHIDYLQKVLKELESLIRQSAERLDRKKVALLCSVKGIGLVTAASLMSYLPELGEVGRHQIAALSGTAPYNDDSGKHKGKRHISGGRFAARRSLYMACWSVIRFQPEFAARYKALREKGKCAKVALIACMRVLLVRLNAMIRDGSEWKEHAA

SEQ ID NO: 14624 - protein, 391 aa, unidentified
  source 1..391: note = protein_d326399
  REGION 4..163: note = RuvC_domain
  SITE 7: note = RuvC_P1
  SITE 60: note = RuvC_P2
  SITE 101: note = RuvC_P3
  SITE 103: note = RuvC_P4
  SITE 106: note = RuvC_P5
  REGION 266..353: note = Tnp_domain
  SITE 274: note = Tnp_P1
  SITE 304: note = Tnp_P2
  SITE 312: note = Tnp_P3
  SITE 313: note = Tnp_P4
  SITE 326: note = Tnp_P5
MIYVGIDVAKDKHDCFVTSSDGKVLFPVFTIQNNREGFDDLFSKIQSVSSEVSNIKVGLEATGHYSYNLLGYLIDKGLPTYVINPLHTNLYRKSLSLRKTKTDKVDARTIAMMLMSDVNLKSYSDTSYHNEALKSLTRYRFDKVQERARLKQSVSRLVTILFPELEKLVPSLHSASVYALLSELPSAEKIASCHLTHLTKLLENASKSRYRREKAIEIRDAARISIGSNMPAKSLELRHTLRLIGELDSEITEIESEIKQIMDQISSPILTIPGISYRMGAMILAEIGDFSRFDSPDKILAYAGASPSTYQSGQLKSSYSHMEKRGSRYLRFALINAAKYVCHWDETFGAYLQKKISEGKHYNVAITHAAKKLVRLIYAMEKSGMPYIKTA

SEQ ID NO: 14625 - protein, 390 aa, unidentified
  source 1..390: note = protein_becc327
  REGION 4..160: note = RuvC_domain
  SITE 7: note = RuvC_P1
  SITE 58: note = RuvC_P2
  SITE 99: note = RuvC_P3
  SITE 101: note = RuvC_P4
  SITE 104: note = RuvC_P5
  REGION 265..352: note = Tnp_domain
  SITE 273: note = Tnp_P1
  SITE 303: note = Tnp_P2
  SITE 311: note = Tnp_P3
  SITE 312: note = Tnp_P4
  SITE 325: note = Tnp_P5
MFFLGIDIAKHNHVASLIDDNGNSIFKAYSFSNSSNGADSLIDKLKKYSTDDIIIGMEATGHYWLALYSYLLEKDFNIIVINPIQTDAWRHATDIRKRKTDSSDSVLIADFIRFGNFKTSSIADEKYLNLRNMTRFRHSLIEQIGDLKRKIIANLDLVFPEYSSYFSDIFGQTSKEILLNFNTAEDFKNLKTRDFEKVLRNITLKKSATIKLNSLKQMSQSSFGVKFALSSYSIQIKCLIEQIKVIEDQTKLIENEIESIVKDLNTPIFTIPGIGYVTGAVILAELGDINKFSSDKKIVAYAGLDATVNQSGQSDGQHGHLSKRGSTHLRKALFQAAFVASTNDTIFKDFYDKKRKEGKHHLVAVNAVARKMCHVIYAVLKKNEPYVEQK

SEQ ID NO: 14626 - protein, 342 aa, unidentified
  source 1..342: note = protein_bb6866b
  REGION 6..148: note = RuvC_domain
  SITE 9: note = RuvC_P1
  SITE 52: note = RuvC_P2
  SITE 87: note = RuvC_P3
  SITE 89: note = RuvC_P4
  SITE 92: note = RuvC_P5
  REGION 210..295: note = Tnp_domain
  SITE 218: note = Tnp_P1
  SITE 248: note = Tnp_P2
  SITE 256: note = Tnp_P3
  SITE 257: note = Tnp_P4
  SITE 269: note = Tnp_P5
MKDTMIGIDLAKNAFQVHVASMTGHVKCRKKLSRGQFFRFITEQPPALVIIEACGSAHYWARELAKAGHDVKLIAPQYVRPFVKRQKNDAADAEAIVIAARQPEMRFVQPKTSDQQARAALFRARERVVRQRTELVNALRSMLYEYGQVIPLGIGRIKQIKAVIEGDEIDLPELVREECHDLLAQIGEQTARIEKKTKRLTELSRHSKSARRLQTMPGVGPVTALAIEAFAPAMENFRCGRDFAAWLGLVPRQFSSGGRERLGRVSKAGQADIRRLLIIGAMACVNWASRKPPKSGSWLARILSRKPRMLGAVALANKMARTIWAMLIKNEDYRDPALAAAM

SEQ ID NO: 14627 - protein, 398 aa, unidentified
  source 1..398: note = protein_9351056
  REGION 6..162: note = RuvC_domain
  SITE 9: note = RuvC_P1
  SITE 60: note = RuvC_P2
  SITE 100: note = RuvC_P3
  SITE 102: note = RuvC_P4
  SITE 105: note = RuvC_P5
  REGION 267..354: note = Tnp_domain
  SITE 275: note = Tnp_P1
  SITE 306: note = Tnp_P2
  SITE 314: note = Tnp_P3
  SITE 315: note = Tnp_P4
  SITE 327: note = Tnp_P5
MSRIWAGIDSGKGHHHGLALDAEGKTLLSRRVANDEPELLQLVGDVLALADGREVTWAIDMTGGEPALLLSLLIAHGQDVLYLPGRLVNRAADGYRGEGKTDARDAYVIADQARMRRDLQPIRPGDEAAIELRLLTGRRADLVEDRTRTVNRLRGTLLSMFPALERALDVTNVGPLKLLTGYRTPAAIRRAAVTRLSKWLANRKVRNARALAETAVEAAERQYTSIPGEKTIARLVHTLAEGVMTLNEHIAEIDKLIEGRFREHELAEIVESVPGIGTVLGAEFLAGVGGSLDGFASPDALAAFAGVAPAPRDSGKVSGDLHRPSVYHRRLQRVFYTSALVSIRCDPNSRTFYDRKRAEGKRHVQAVMALARRRVNVLWALIRDRRCYQVAPPVTEAA

SEQ ID NO: 14628 - protein, 344 aa, unidentified
  source 1..344: note = protein_6f59151
  REGION 6..148: note = RuvC_domain
  SITE 9: note = RuvC_P1
  SITE 52: note = RuvC_P2
  SITE 87: note = RuvC_P3
  SITE 89: note = RuvC_P4
  SITE 92: note = RuvC_P5
  REGION 212..298: note = Tnp_domain
  SITE 219: note = Tnp_P1
  SITE 249: note = Tnp_P2
  SITE 257: note = Tnp_P3
  SITE 258: note = Tnp_P4
  SITE 270: note = Tnp_P5
MEITTVGIDLAKTWFRLHAVGKSGKTVLKKKLNRGQMIEFFANLPTCLIGMEACGSAHHWARKLQSLGHTVKLMAPQFVKPYVKTNKNDMADAEAICEAVSRPNMRFVPIKNLEQQAVLSLHRVRQGFVKARTAQANQIRGLLGEFGIILPQSIGYIKTRVPELIEDASNELPGAFRLLVQRLLDHFKELDRQVSELEGQIQSWHRNNTVSCKLAQIPGIGPITASALAASIGDAKNFKSGRQVAAWLGLVPKQHSSGGKQNLLGISKRGDSYLRSLLIHGARSVIYHASKKPQLHPWINGVVNRRNNNVAAVALANKNARIVWALLAHERQYEVNYSSLRAAA

SEQ ID NO: 14629 - protein, 385 aa, unidentified
  source 1..385: note = protein_99aa16a
  REGION 4..159: note = RuvC_domain
  SITE 7: note = RuvC_P1
  SITE 58: note = RuvC_P2
  SITE 98: note = RuvC_P3
  SITE 100: note = RuvC_P4
  SITE 103: note = RuvC_P5
  REGION 262..349: note = Tnp_domain
  SITE 270: note = Tnp_P1
  SITE 300: note = Tnp_P2
  SITE 308: note = Tnp_P3
  SITE 309: note = Tnp_P4
  SITE 322: note = Tnp_P5
MIYVGIDIAKLNHFASVLSSDGKVLVEPFKFTNDNDGFCMLLSVLDSFDKDGLIIGLESTAHYGNNLVEFLVSRHFHVSVLNPIQTSSMRKNRIRKTKTDKVDTAIIAQTLMSQPYRLFTQYDIDLLHLKNLGRFRQKLMKQRTRNKIMLTSYLDQAFPELQYFFNGIHHKSVYAVLKEAPSPEMITSMHMTHLAHLLESASHGRFRKDKAQELRVLAQKSVGSSDSSISIQITQTVEQIELLDSQIIDVESKMQNILLAMDSVILTIPGISYLEAGMILGEVGDVHRFASPHKLLAFAGLDPTIHQSGNFNASHTRMSKRGSRYLRFALVYAAHNAVKNNSVFKQLYDQKRNNGLNHYGALGHCAGKLVRIVYKMLTDNVAFNL

SEQ ID NO: 14630 - protein, 355 aa, unidentified
  source 1..355: note = protein_8102585
  REGION 3..109: note = RuvC_domain
  SITE 6: note = RuvC_P2
  SITE 46: note = RuvC_P3
  SITE 48: note = RuvC_P4
  SITE 51: note = RuvC_P5
  REGION 218..304: note = Tnp_domain
  SITE 226: note = Tnp_P1
  SITE 257: note = Tnp_P2
  SITE 265: note = Tnp_P3
  SITE 266: note = Tnp_P4
MADVVGIETDRGPWVAALLGAGYQVYAINPMQVARYRERHSTSGAKSDRGDAHVLAEIVRLDRAHHRVLTPDSELVEAIKVLARVHQNLIWIRQRHANQLRSMLREFYPAALAAFDDLAGRDALAVLAAAPTPAAGRALSVETITELLRQAGRRRYLTTTAVKIYQALHAEYLQALPQIADAYGASTSALVSILIEMSRQITTVEDRVVTHLSRHPEDKIYLSQPGLGHVLAARVLAEFGDAPGRYTTSKARRNYAGTSPITRASGKKTLVLSRYVHNKRLTNALYQQAFAALTGSPGARAYYDSLRARDIGHHDALRRVSNRLVGILHGCLRHGTVYDEATAWPPPKKDQQAGS

SEQ ID NO: 14631 - protein, 374 aa, unidentified
  source 1..374: note = protein_ec08e72
  REGION 5..164: note = RuvC_domain
  SITE 8: note = RuvC_P1
  SITE 61: note = RuvC_P2
  SITE 101: note = RuvC_P3
  SITE 103: note = RuvC_P4
  SITE 106: note = RuvC_P5
  REGION 272..358: note = Tnp_domain
  SITE 280: note = Tnp_P1
  SITE 311: note = Tnp_P2
  SITE 319: note = Tnp_P3
  SITE 320: note = Tnp_P4
MRLFVGDDWAEDHHDVELMDAAGRVLARRRLPEGVAGMARLHELIGQYLGEDDQDAEVVIGIETDRGPWVAALVAAGYVVHAVNPLQASRYRERHGVSGAKSDQGDSHMLTGMVRTDSHQIRVVAGDSADAAGIKVLARTHKTLIWERTRHTQRLRHQLREYFPAALEAFGDLAADGTLELLGKAPDPARAGKLTRAQVSAALRRARRRDIAGKTTAILAALRGPQLGRAPAVTAAYAATIGSLIAVITTLNEQVKALQRQVEEYFGQHPDAEIYLSQPGMGAILGARVLGEFGDDPHRYADGKARRNYAATSPVTRASGKKKVVAARFIHNDRLMDALMAQAFTALNASPGARACYDQFRAKREKSPQSAVAA

SEQ ID NO: 14632 - protein, 412 aa, unidentified
  source 1..412: note = protein_fc52da6
  REGION 37..191: note = RuvC_domain
  SITE 40: note = RuvC_P1
  SITE 88: note = RuvC_P2
  SITE 128: note = RuvC_P3
  SITE 130: note = RuvC_P4
  SITE 133: note = RuvC_P5
  REGION 299..370: note = Tnp_domain
  SITE 307: note = Tnp_P1
  SITE 337: note = Tnp_P2
  SITE 345: note = Tnp_P3
  SITE 346: note = Tnp_P4
  SITE 358: note = Tnp_P5
MGARNECRDASDWNNDIPISFSRSSPCRRNTPSTYFLGLDVGKSEHHACALNRDGNKVFDKPSPQLESDLAGVFHQLQELGSVLVVVDQPNSIGALPITVARDCGCEVGYLPGLAMRKAADLYPGRVKTDKRDAFIIADTARTMPHTLRAVDRNDEVLSALKMLSGFDDDIARDCTRTVSRLRSILTQIYPSLERVFAGSTLTRAPILDLLIHYNGPQGLKRAGYQRMLNWMIKHTRKDPTPLVDEIFAALKAQTVTVLRSDASELVIPQLATNIKALKEQRNTIAEQVEEMLADFPFCEVLMSMPGVGIKTAAQILLVIDDGSDFGSVGHLAAYAGIAPVTRRSGSSIRGGFPARSGNKRLKTLCSIPFSPLSAAINRHGTTTNANVLKVNATTRRSSAWHDADATSSTRC

SEQ ID NO: 14633 - protein, 343 aa, unidentified
  source 1..343: note = protein_0bbb06c
  REGION 6..148: note = RuvC_domain
  SITE 9: note = RuvC_P1
  SITE 52: note = RuvC_P2
  SITE 87: note = RuvC_P3
  SITE 89: note = RuvC_P4
  SITE 92: note = RuvC_P5
  REGION 211..297: note = Tnp_domain
  SITE 219: note = Tnp_P1
  SITE 249: note = Tnp_P2
  SITE 257: note = Tnp_P3
  SITE 258: note = Tnp_P4
  SITE 270: note = Tnp_P5
MQVVRIGLDLAKYVFEVHGVDSHGKVVTRKTLRRDAVTQFFANLPRCLVGMEASNGAHYWARVLSGLGHEVRLISPQFVTPYVKSNKNDRNDAEVICEAVGRPSMRFVPPKSVDQLAVQAVHRIRRRLVADRVRFVNQVRGLLSEHGIVIARDITQQRRGLAVIVGNEADGLSDMVRSLMRDLQTELTELDRRIRTYDRRIREIFRTNEQCQRLGRIEGIGPVTATALIAAVGDRTCFKNGRQFAAWLGLVPKQRSSGGRARLFGISKRGDRYLRTLMIHGARAALGKAAGKQDPRSLWLTKLRARRHPNVAAVALANKNARVVWAMLSTGTFYEPALALETA

SEQ ID NO: 14634 - protein, 404 aa, unidentified
  source 1..404: note = protein_d3fe464
  REGION 4..160: note = RuvC_domain
  SITE 7: note = RuvC_P1
  SITE 57: note = RuvC_P2
  SITE 97: note = RuvC_P3
  SITE 99: note = RuvC_P4
  SITE 102: note = RuvC_P5
  REGION 270..356: note = Tnp_domain
  SITE 278: note = Tnp_P1
  SITE 309: note = Tnp_P2
  SITE 317: note = Tnp_P3
  SITE 318: note = Tnp_P4
MIFVGVDWAEDHHDVCVMNLNGTVLGKRRVPDSVAGIRELHELVAEHTADDEVVVVGIEIDRGLVVTSLVAAGYEVFAINPMASSRYRERHGTSGAKSDPGDAKVLADLVRTDRHNHRPVAGDTDLVEGVKLLARVHQSAIWGRQRQLNALRSALREYYPAALVAFGTDLSHGDATAVLSLAPTPELGRTLSRSKIASALRRGGRIRNVERRTDEIQAALRADYLEAPEVIANAYGTITRSALRLIETYTAEITSLEGALSEHFEQHPDAKIVHSLPGMGTVLGARVLGEFGDDQTRFSSPQSRKNYAGTSPITKASGRSRVVLARFARNRRLGDACDQWAFCSITRSPGSRRYYDELRARGKTHRQALRQLANRLVGILHACLEDGSLYDETIAWREVEQPAA

SEQ ID NO: 14635 - protein, 266 aa, unidentified
  source 1..266: note = protein_a4a4f31
  REGION 2..117: note = RuvC_domain
  SITE 58: note = RuvC_P3
  SITE 60: note = RuvC_P4
  SITE 63: note = RuvC_P5
  REGION 183..259: note = Tnp_domain
  SITE 191: note = Tnp_P1
  SITE 221: note = Tnp_P2
  SITE 229: note = Tnp_P3
  SITE 230: note = Tnp_P4
  SITE 242: note = Tnp_P5
MQIKKFINRLKLEWDEIDCCYEAGVTGYPLYRYLKSLGVNCILVAPGKIPRQSSDKIKTDKRDAIKLARLMRSGELESIHVPSEEDEAVRDYLRSRDSLRLDLGRNRQRLMKFLLRKDIKYSTTKYWTVSHYKWLNNLHFNNEILQETFNDYYSRVRVQEENLKAMDKKIQEVAESEPYREKVGILRCFRGVDYLTAMFLLCEVNDFKRFKTAGSFMSFLGLVPGEYSSGSKRKQTGITKTGSPRLRRILTEAAWQHRFPGTGSKS

SEQ ID NO: 14636 - protein, 421 aa, unidentified
  source 1..421: note = protein_7f6c78a
  REGION 10..158: note = RuvC_domain
  SITE 13: note = RuvC_P1
  SITE 62: note = RuvC_P2
  SITE 98: note = RuvC_P3
  SITE 100: note = RuvC_P4
  SITE 103: note = RuvC_P5
  REGION 225..311: note = Tnp_domain
  SITE 233: note = Tnp_P1
  SITE 264: note = Tnp_P2
  SITE 272: note = Tnp_P3
  SITE 273: note = Tnp_P4
  SITE 284: note = Tnp_P5
MTPPNGMVWAGIDTHTDTHTIALLDERGRPLGSETFAANPDGYDRLIDMLPGPGAVAAVGVEGTNSFGAALARRLAAAGYEVREVLRPKRNVRRRNGKSDPIDAVAAARSVMAGDDAGPPKNSDGWVEALRHLNAQRAQLVSSMTAISNSTNGLLVTAPEPVRERYRGLKGGARMNRLAECRPAGGLVEHSALVALKSAAKAWKALKRQSGLLEERMRAILEEHARPLLDMYCVGTVTAAALAIVAGDNPERIRSEAAFAKLCGACPLPASSGRTSRHRLNKGGNRQGNVALHRIAIVRLRYHQPTRDYAARKTREGKGKLEIIRCVKRFIAREAYRALIAIRNGGNGRGTSGERGARLRELRMNHGITQQQVGEALCVPSSRISEIERGRRDLPELEQRAIQWIHSITDPKQHAQTLDNV

SEQ ID NO: 14637 - protein, 397 aa, unidentified
  source 1..397: note = protein_8dc1d02
  REGION 9..163: note = RuvC_domain
  SITE 12: note = RuvC_P1
  SITE 60: note = RuvC_P2
  SITE 100: note = RuvC_P3
  SITE 102: note = RuvC_P4
  SITE 105: note = RuvC_P5
  REGION 270..355: note = Tnp_domain
  SITE 278: note = Tnp_P1
  SITE 308: note = Tnp_P2
  SITE 316: note = Tnp_P3
  SITE 317: note = Tnp_P4
  SITE 329: note = Tnp_P5
MNTDYAVFCGIDVGKSEHHAVALTADGARVYDKALPNDDRRLRAVFDRLTGHGPMLIVVDQPNTIGALPVTVARACGHDVGYLPGLSMRRVADLYPGQAKTDARDAFIIADTARTMPHTLRHVDTGDETLAELGVLVGFDDDLAGEATRISNRIRGLLTSIHPALERVLGPRVTHPAVLEMLSRHGGPQGLRKAGRRKPTTIATKHAPRMGARLVDDIFTALDTQTVTVPGTTAADTVLPKLADTLKETLLQRKSIADQIEEMLDAHPLSEVLTSMPGIGVRTAARILLEVGDGSAFATAGHLAAYAGIAPVTHRSGTSIRGEHPARFGNRKLKRAFFLSAFAALHDPTSRAYYDRKRAEGKKHNAALICLARRRCDVLHAMLRNREPYRQPSPAAA

SEQ ID NO: 14638 - protein, 258 aa, unidentified
  source 1..258: note = protein_bd10035
  REGION 1..76: note = RuvC_domain
  SITE 15: note = RuvC_P3
  SITE 17: note = RuvC_P4
  SITE 20: note = RuvC_P5
  REGION 139..229: note = Tnp_domain
  SITE 147: note = Tnp_P1
  SITE 177: note = Tnp_P2
  SITE 185: note = Tnp_P3
  SITE 186: note = Tnp_P4
  SITE 198: note = Tnp_P5
MIPPAYVKPYVKRGKTDAADAEAICEAVTRKTMRFVPVKSADQQAAAMVLKTRELLVRQHTQAINALRAHLAELGIIAAAGTTKVASLIDIVRDETDNRLPQAARFALSEIADQIEGLNRKIGKLEHAIVMEAKRDADMRRLCTIPGVGAIIAASIKATVPDPGGFTSGRHFAAWLGLTPKPHSSGGKERLGGISKMGNPMLRSLLVLGATSVLRHVKGNASAPPWLSALLVVKIKRESPLPYESFQRFARSLRVPSV

SEQ ID NO: 14639 - protein, 353 aa, unidentified
  source 1..353: note = protein_566fe07
  REGION 18..159: note = RuvC_domain
  SITE 21: note = RuvC_P1
  SITE 64: note = RuvC_P2
  SITE 99: note = RuvC_P3
  SITE 101: note = RuvC_P4
  SITE 104: note = RuvC_P5
  REGION 222..305: note = Tnp_domain
  SITE 230: note = Tnp_P1
  SITE 260: note = Tnp_P2
  SITE 268: note = Tnp_P3
  SITE 269: note = Tnp_P4
  SITE 281: note = Tnp_P5
MLKSPQREEASIDEVSIVGVDLAKQVFQLHGAGPDGCAIFRKKLSRAQFARFMAALPPCIVAMEACGSAHYWGREMARHGHDVRLIPPIYVKPFVKRQKNDMADAEAIAEAALRPTMRTVPVKTAEQQSRAMLFRTRELRVAQRTQLVNALRGHLAEHGVIVAKGLGNIERLAAVIRDEASAVPDLVRDLGAVYLGQIEEVSGQIAALERRIAVAARDSDVVRRLQKMPCIGPICAMAVETFAPAMQTFQRGRDFAAWLGLVPRQHSSGGKQRLGRTSKMGQRDIHRLLIVGAMSVVHWKGRGGGRPGSWLARMLAKKSKMLVAIALANKMARTIWALLVRDEDYRDPKGAVC

SEQ ID NO: 14640 - protein, 404 aa, unidentified
  source 1..404: note = protein_fc2001a
  REGION 4..159: note = RuvC_domain
  SITE 7: note = RuvC_P1
  SITE 59: note = RuvC_P2
  SITE 96: note = RuvC_P3
  SITE 98: note = RuvC_P4
  SITE 101: note = RuvC_P5
  REGION 267..353: note = Tnp_domain
  SITE 275: note = Tnp_P1
  SITE 306: note = Tnp_P2
  SITE 314: note = Tnp_P3
  SITE 315: note = Tnp_P4
MWYTGIDWADEHHDALAIDEKGHQAGLIRVDHNPQGFAKLDLFLMQIIGSASKEQMACIIETTHGLLIVHLLEAGWPVYPVNPRTVDRRRSASGAKTDLIDAYLLAKTGRADFVDLRRLTPDSEKVAELKQLTRDQDTLIHMQTRLVNQLTACLKAYYPVALDLFSKLQQKSTLLFLQAYPTPQAAMAASVKEIQQQLKQTKHPRPADGAASIVERLHQPHLQADAVLTRTKSRLMLVLVSQLLPLIEQIAQYNKEIDTLFLTHEDHEIFESLPRAGQRLAPRLLAEIGDDRQRYQDASSLQALGGTSPVLYQSGVYSKAHRRLGCIKPLRNALHQFAWQTTQSEAWAKDYYQRKRTEGKSHTVAIRALSNVWARIIFAMWIHRECYRAATFEQAQQQHARRAA

SEQ ID NO: 14641 - protein, 326 aa, unidentified
  source 1..326: note = protein_176a64d
  REGION 4..156: note = RuvC_domain
  SITE 7: note = RuvC_P1
  SITE 61: note = RuvC_P2
  SITE 101: note = RuvC_P3
  SITE 103: note = RuvC_P4
  SITE 106: note = RuvC_P5
  REGION 201..287: note = Tnp_domain
  SITE 209: note = Tnp_P1
  SITE 238: note = Tnp_P2
  SITE 246: note = Tnp_P3
  SITE 247: note = Tnp_P4
  SITE 260: note = Tnp_P5
MNMIGMDVSKAKLDCAWINDTASSKVKNKVFLNTPKDHQALMDWAMKQCQAPIDAIHFVMEATGIYHEAVAYALEQAGALVSVVNPAQIRNYARSLGTRNKTDKKDSVVITRFGLTQRPRLWQPEPEEVRVLKALISRLEAVEKDIQREKNRREKAEIAYASDEVIISIQTVLAQLEKEKQRLEDLINRHIDGHPHLKQDRQLLESIPGVGPVISRMMVGMIRSRDFDSAPQCAAFIGLTPVQHESGASVRGRAHLSKTGNPVIRAKLYMAAVVAIQHNPDIKRQYERLLKRGKVKMSALCAAMRKLVHICFGVLKHQQPYQPQGG

SEQ ID NO: 14642 - protein, 392 aa, unidentified
  source 1..392: note = protein_9127cfd
  REGION 4..164: note = RuvC_domain
  SITE 7: note = RuvC_P1
  SITE 62: note = RuvC_P2
  SITE 103: note = RuvC_P3
  SITE 105: note = RuvC_P4
  SITE 108: note = RuvC_P5
  REGION 267..354: note = Tnp_domain
  SITE 275: note = Tnp_P1
  SITE 305: note = Tnp_P2
  SITE 313: note = Tnp_P3
  SITE 314: note = Tnp_P4
  SITE 327: note = Tnp_P5
MIFVGIDVAKSKHDCCIIDSDGVLYTDSLRINNDKEGFDKLYNTILSILDSNKVNNVKIGLESTGHYSNNITNYLHSKGFQISILNPLATNLFRKASTLRKTKTDKTDAKVIATMLLSDESKSYSPLSYQIQELKSLTRHRYRMVGYRSKLKISITRLLDIIFPELEGFIWSIHQNSSYALLLELPTPQEISSCHLTKLTTILKKASRGRYGKDKAIALKELASNSIGSSNRSTSFELQQTIRLVQSVQSEIDTLDKQIKIVVDELNTPLLTIPGISYTLASIMLAEIGEIERFSTPAKLLAFAGMEPSTYQSGKFTASRTPMVKRGSTYLRWAIIQATRLVSMRDTTFSEYMNKKRSEGKHYLVAQSHVGKKLIRVIFYLLKNNVAFVPQN

SEQ ID NO: 14643 - protein, 398 aa, unidentified
  source 1..398: note = protein_d1dc4d2
  REGION 11..169: note = RuvC_domain
  SITE 14: note = RuvC_P1
  SITE 68: note = RuvC_P2
  SITE 108: note = RuvC_P3
  SITE 110: note = RuvC_P4
  SITE 113: note = RuvC_P5
  REGION 273..362: note = Tnp_domain
  SITE 281: note = Tnp_P1
  SITE 311: note = Tnp_P2
  SITE 319: note = Tnp_P3
  SITE 320: note = Tnp_P4
  SITE 333: note = Tnp_P5
MIQEVVMEPVVGVDVAKGFSVVQAFLKRDEPWKKAISISHEKSGLEQLGEMLTELQTQTAQMPVVVLEATGHYHRGLVAYLERSGWTYFIVNPLQAKRAKGTHLRKVKTDAADAWHLAEMYYRGDVNPHRMWEEGYTELQHVTRQHAFVTGRFVQAKLNMRALLDQVFPEYEKVFSNLFSVTSLHVLASCLEHDVEDLHGVIQKHAGKSHSKKWAEAKTESLREVLFRWSEEPRSLAQTSVLSGMVNLVLAFTEQLSVLEKQMDELAMGLPEVELVKSIPGIGDKLAAAIVAEIGDIRQFNEAKQLVAFAGLDPSIFSSGKFTATHSRITKRGSKRLRRALYLAVQCGIRRRVNPRIRDYYEKKRKEGKPYKVVVIACANKLLHHVYAILSKQQPFQL

SEQ ID NO: 14644 - protein, 343 aa, unidentified
  source 1..343: note = protein_230ea1b
  REGION 6..147: note = RuvC_domain
  SITE 9: note = RuvC_P1
  SITE 52: note = RuvC_P2
  SITE 87: note = RuvC_P3
  SITE 89: note = RuvC_P4
  SITE 92: note = RuvC_P5
  REGION 211..299: note = Tnp_domain
  SITE 219: note = Tnp_P1
  SITE 249: note = Tnp_P2
  SITE 257: note = Tnp_P3
  SITE 258: note = Tnp_P4
  SITE 270: note = Tnp_P5
MQVVRIGLDLAKYVFEVHGVDGQGNVVIRKTLRRGSMSTFFANLPPCLVGMEASNGAHYWARVLTELGHKVRLISPQFVAPYVKSNKNDRNDAEAICEAVGRPTMRFVPPKSPEQLAIQALHRIRQRLVQSRTRLVNQIRGILAEQGIVIARDIWRLRRALAEITGHATDDLNKLVRVLILETQAELMELDRRIASCDRRIRELYRTSELCQRLGEIEGIGLVTATALVAAVGDRSCFKNGRQFAAWLGLVPKQRSSGGRHRLFGISKRGDRYLRTLMIHGARAALGKARGKQDPRSRWLASLRQRRHANVAAVALANKNARIVWAMLAGNVSYEPERSVQAA

SEQ ID NO: 14645 - protein, 407 aa, unidentified
  source 1..407: note = protein_38c37a2
  REGION 4..160: note = RuvC_domain
  SITE 7: note = RuvC_P1
  SITE 57: note = RuvC_P2
  SITE 97: note = RuvC_P3
  SITE 99: note = RuvC_P4
  SITE 102: note = RuvC_P5
  REGION 269..355: note = Tnp_domain
  SITE 277: note = Tnp_P1
  SITE 308: note = Tnp_P2
  SITE 316: note = Tnp_P3
  SITE 317: note = Tnp_P4
MIFVGVDWAEAHHDVHVEDGDGTRLGKARLPEGVEGIARFHDLVAPFADDPAEVVIGIETDRGLFVAALVAAGYDVYAVNPMSTSRYRDRHSAGGAKSDAGDAKVLADMVRTDRHNHRPVAGDTEGVEALKVLARAHQRMVWSRGRQTNLLRSTLREFYPAALVAFDDLSSSDALEVLRIAPTPTLGAGLSRSKIAAALRRGGRQRRIDENAEKIQTALRSEQLQAPAVVATAMGASVAANVAVIAEMGAQIAQLAVELEANFEQHPDAEVVRSLPGLGTILGARVLGEFGDEPNRYATAKSRKNYAGTSPITRASGTKRAVLARHVRNQRLADALYLWAFASITASPGARLYYDQRRSAGDTHHQALRALGNRLVGILHGCLAHRAAYDETIAWGHRSEGDLQQAA

SEQ ID NO: 14646 - protein, 345 aa, unidentified
  source 1..345: note = protein_ada86db
  REGION 6..147: note = RuvC_domain
  SITE 9: note = RuvC_P1
  SITE 52: note = RuvC_P2
  SITE 87: note = RuvC_P3
  SITE 89: note = RuvC_P4
  SITE 92: note = RuvC_P5
  REGION 211..297: note = Tnp_domain
  SITE 219: note = Tnp_P1
  SITE 249: note = Tnp_P2
  SITE 257: note = Tnp_P3
  SITE 258: note = Tnp_P4
  SITE 270: note = Tnp_P5
MEITTIGVDLAKNVFQVHGVDQRGKVVLRKQLRREQMVEFFARLTPCLIGMEACGSAHHWARVLQGQGHTVRVIASQFVKPYVKSNKNDAADAEAICEAVARPNMRFVPVKSVEQQAVLAAHRARQGFVKARTAQANQIRGLLAEFGLVIPRGLWHIHQRVPALLERAADTLPLALRHLIERLLAHLRELDRQVAELETQIQAWHRSSELSRRLEKIPGIGPLTASALVASIADARSFNNGRQLSAWLGLVPRQSSSGGKPLLLGMSKRGDVYLRTLLIHGARSAILAAQRKAATTDSWLGKLLQRRHLNVATVALANRNARTAWALLAHDREFQPDYRPSLATA

SEQ ID NO: 14647 - protein, 401 aa, unidentified
  source 1..401: note = protein_e7e61b0
  REGION 9..163: note = RuvC_domain
  SITE 12: note = RuvC_P1
  SITE 60: note = RuvC_P2
  SITE 100: note = RuvC_P3
  SITE 102: note = RuvC_P4
  SITE 105: note = RuvC_P5
  REGION 270..355: note = Tnp_domain
  SITE 278: note = Tnp_P1
  SITE 308: note = Tnp_P2
  SITE 316: note = Tnp_P3
  SITE 317: note = Tnp_P4
  SITE 329: note = Tnp_P5
MTSGYGVFLGLDVGKGEHHAVGLGATGRRLHDAPLPNSEAKLRAVFDKLAQHGRLLVVVDQPAAIGALPVAVARACGHQVACLPGLAMRRIADLYPGSAKTDARDAFIIADAARTLPHTLRQVDVGDDALAELEVLVGFDDDLAGEATRSGNRIRGLLTGIHPALERAIGARIAHPAVLEILSRCGGPAGIRAAGRRKLVSIATAHAPRMGEKLATAIWAALEEQTVTVPGTAAADIVLPRLADSLKTVLQQRNAVAAQVEGILDAHPLAQVLTSMPGIGVRTAARILLEIGDASAFKSSGHLAAYAGIAPVTHSSGSSIKGEYPARTGNRKLKRAFFLAAFAALHDPTSRAYYDRKRGEGKKHNAALICLARRRCDVLYAMLRDHTRYQHPHPGAAPAAA

SEQ ID NO: 14648 - protein, 421 aa, unidentified
  source 1..421: note = protein_6b39604
  REGION 23..179: note = RuvC_domain
  SITE 26: note = RuvC_P1
  SITE 76: note = RuvC_P2
  SITE 116: note = RuvC_P3
  SITE 118: note = RuvC_P4
  SITE 121: note = RuvC_P5
  REGION 294..378: note = Tnp_domain
  SITE 302: note = Tnp_P1
  SITE 332: note = Tnp_P2
  SITE 340: note = Tnp_P3
  SITE 341: note = Tnp_P4
  SITE 354: note = Tnp_P5
MNGNKCGWNNCKNTLGGELMLSVGIDVSKEKSMVCIMKPMGEIVAGPYEIEHTESDLSELARMIKRLDSDVRIVMEATGIYHLPVATTLKDAGLFVSVINPLEMKNYRSQDMRKVKTDKRDSISIANYGIEKWFTLRPFDCQEGVYAELKLLGRQYRFFMESRIELLLNLTHLLDYTMPGVKACFGGWSEYSGKDKLCDFAEEYRHYDNITKRSETKFIEHYQKWAKKKGYHQSESKASQIYRLAKDGIPTIPSNAPSTKMLVLEAVKALREVNSALFAILTRMQELARTLPEYPTVRAMGGVGDILSVKLIAEIGDVRRFHSSKGLIAYAGIDPPPYESGKLIGTNRHITKRGSATLRKIGYEVMRCVKAGGRSEEDPAVYDFMIKKEDEGKAKRVAKIAALNKFLRIYYARVMEVYSAN

SEQ ID NO: 14649 - protein, 349 aa, unidentified
  source 1..349: note = protein_74ce447
  REGION 10..152: note = RuvC_domain
  SITE 13: note = RuvC_P1
  SITE 56: note = RuvC_P2
  SITE 91: note = RuvC_P3
  SITE 93: note = RuvC_P4
  SITE 96: note = RuvC_P5
  REGION 217..303: note = Tnp_domain
  SITE 225: note = Tnp_P1
  SITE 255: note = Tnp_P2
  SITE 263: note = Tnp_P3
  SITE 264: note = Tnp_P4
  SITE 276: note = Tnp_P5
MQSTANLPVIGLDLAKTVFQLHIVDIESGEIQRRQIKRAKLAEFFAKCQRSLVAMEACGTSHHWARVIRSLGHEVKMLPAQHVKAFLLRDKTDAMDAQAIWVAAQQPHIKPVPVKTERQQTCMALHGMRRQLMKMRIMQTNALRGILAEFGIALPVGYKQLLKTVQVELAKAQQADQLSADLVVSVQEQLKRIDSLQDDIDLLGQRLRIMIRQDRQMQAIEQIPGVGDLTASALVAAVGDFTTFKSGRQFASWVGLVPRQVGTGGKTQQLGISKRGDTYLRTLLIAGARAVVTRTEKSCWITQLLERRHFNVVVVALANKMARTAWAILAKGVAFDKVKWNPLETVSAR

SEQ ID NO: 14650 - protein, 319 aa, unidentified
  source 1..319: note = protein_d9f981e
  REGION 1..104: note = RuvC_domain
  SITE 2: note = RuvC_P2
  SITE 41: note = RuvC_P3
  SITE 43: note = RuvC_P4
  SITE 46: note = RuvC_P5
  REGION 218..305: note = Tnp_domain
  SITE 226: note = Tnp_P1
  SITE 256: note = Tnp_P2
  SITE 264: note = Tnp_P3
  SITE 265: note = Tnp_P4
  SITE 278: note = Tnp_P5
MEATGRYHEPVAAALHEYGIHVMVMNPLFIKQSGGSIRKVKTDKADARKIAKYALDNWADLREYIPMDTIREQLKLYSRQYNLYMKNVVAFQNNLISLTDKVFPGVNELFSSPDRADGSQKWVDFIMTFWHYECVNLASEATFTERYRKWCKRKGYHFNQGKAAELYMDSMGHITTLPRNNNTKLLISTASKELASAKATLAVLRAEMDRLARQFPKYDTVRAMYGVGERTVLQLMAEIGDVRCFPRRSSIVSFAGVDLAVDESGKHVSKSNPTTKRSSPHLRKTLYQIVCTYLKKSPSKEPVYQFLDKKRAEGKPYFV

SEQ ID NO: 14651 - protein, 400 aa, unidentified
  source 1..400: note = protein_ae079aa
  REGION 11..166: note = RuvC_domain
  SITE 14: note = RuvC_P1
  SITE 63: note = RuvC_P2
  SITE 103: note = RuvC_P3
  SITE 105: note = RuvC_P4
  SITE 108: note = RuvC_P5
  REGION 273..358: note = Tnp_domain
  SITE 281: note = Tnp_P1
  SITE 311: note = Tnp_P2
  SITE 319: note = Tnp_P3
  SITE 320: note = Tnp_P4
  SITE 332: note = Tnp_P5
MIDTGDIDVYLGVDVGKGEHHATALTPAGKRVFDKRLPNTEPKLREVFAKLQAKHGTVLVVVDQPASIGALPLAVARDTGCSVAYLPGLTMRRIADLYTGEAKTDARDAAIIADAARTIPHTLRNLAPSDETVAELEMIVGFDDDLAAESTRIKNRLRGLLTQIHPSLERVLGPRLDHPAVLALLERHGSPAHLRKAGRRRLVTLLRPKAPRLAERLVEDVFDALDEQSVVVPGTDAASLIVPSLASSLTSVLDQRKHLASRIEELLEAHPLSPVLTSMPGIGVRTAARILIDVGDASAFPTAGHLAAYAGLAPVTRSSGSSIRGEHPSRRGNKQLKRAFYLAAFASLSQPESRTYYDKKRRQGKHHVAALVCLARRRIDVLFAMLRDGTFYEPPTAIAA

SEQ ID NO: 14652 - protein, 276 aa, unidentified
  source 1..276: note = protein_705d5df
  REGION 1..120: note = RuvC_domain
  SITE 17: note = RuvC_P2
  SITE 57: note = RuvC_P3
  SITE 59: note = RuvC_P4
  SITE 62: note = RuvC_P5
  REGION 153..237: note = Tnp_domain
  SITE 161: note = Tnp_P1
  SITE 190: note = Tnp_P2
  SITE 198: note = Tnp_P3
  SITE 199: note = Tnp_P4
  SITE 210: note = Tnp_P5
MLRWIGDVKTVARAVFEPTGPYHRTLEERLASLGIPLVKVNPRQARRFAEATGRLAKTDRVDALMLARYGALLEPVAHPVRSEIQIRLAELVAARRSLMRDRTATLNRLKTLTIGLLQRHARHRLRQIEAQVASLDAAIDALVVEDAHLSRRRDVLASIPGLGIVTAHALLADMPELGTMEEGQAAALAGLAPITRQSGTWRGRSFIQGGRATLRQALYMPAIVAMRFNPDLKGVYDRLIAKGKHAKIAITAIMRKLVVLANALLRKDRLWPPKTA

SEQ ID NO: 14653 - protein, 259 aa, unidentified
  source 1..259: note = protein_dab0509
  REGION 1..65: note = RuvC_domain
  SITE 5: note = RuvC_P3
  SITE 7: note = RuvC_P4
  SITE 10: note = RuvC_P5
  REGION 129..216: note = Tnp_domain
  SITE 137: note = Tnp_P1
  SITE 167: note = Tnp_P2
  SITE 175: note = Tnp_P3
  SITE 176: note = Tnp_P4
  SITE 188: note = Tnp_P5
MKSNKNDARDAEAICEAMSRPNMRFVTVKTVEQQDIQATHRIREELKVRRTAKANQIRGLVAEYGLVAPLTLRALQAVIPYWLEDAENGLTHYFRSLLHGLWDDLLALDDRMGEMDKTIKGLAKGNEDCVRLEQLRGIGPMTSTAMIATVGDARQYHKSRQMAAAIGLTPRQHSSGDKHRLLGISKRGDVYLRMLMVHGARSVVTRAKHKDDPLSRWVTEIAKRRHPNVAAVALANKNARMAWAMLRNKTDYDPEYAIS

SEQ ID NO: 14654 - protein, 393 aa, unidentified
  source 1..393: note = protein_df5f6ea
  REGION 4..163: note = RuvC_domain
  SITE 7: note = RuvC_P1
  SITE 60: note = RuvC_P2
  SITE 101: note = RuvC_P3
  SITE 103: note = RuvC_P4
  SITE 106: note = RuvC_P5
  REGION 266..355: note = Tnp_domain
  SITE 274: note = Tnp_P1
  SITE 304: note = Tnp_P2
  SITE 312: note = Tnp_P3
  SITE 313: note = Tnp_P4
  SITE 328: note = Tnp_P5
MICVGIDVAKDKHDCFILSSEGEALADVFTIQNNAEGFDRLLQTIRRCTRPEDKIKVGLEATGHYSYNILGFLLDKGLPTYVINPLHTNLYRKSLSLRKTKTDRVDARTIAAMLMSDVDLKSYTDTAYHNEELKSLTRYRFDKVRERAKLKQSVSRLVTILFPELEKLVPTLHLASVYALLSEFPGAKQVAEAHLTHLKAVLSDASKGRYGRDMATTLRDAARCSVGSVMPAKSLELQHTIRLIRELDAEIEDIETAIQSMMDEIQSPITTIPGIGVRMGAMILAEIGDFTRFDSPDKILAYAGMSPSTYQSGQLSLSGTYSHMEKRGSRYLRYALYNATKYVCLWDTTFAAYLAKKRAEGKHYNVAISHAAKKLVRLIYAMEKSKQSYRNAA

SEQ ID NO: 14655 - protein, 344 aa, unidentified
  source 1..344: note = protein_2d69c17
  REGION 5..152: note = RuvC_domain
  SITE 8: note = RuvC_P1
  SITE 55: note = RuvC_P2
  SITE 92: note = RuvC_P3
  SITE 94: note = RuvC_P4
  SITE 97: note = RuvC_P5
  REGION 212..301: note = Tnp_domain
  SITE 220: note = Tnp_P1
  SITE 250: note = Tnp_P2
  SITE 258: note = Tnp_P3
  SITE 259: note = Tnp_P4
  SITE 271: note = Tnp_P5
MDHFAGLDVSVKETSVCIVDDTGRIVREVKVASEPGALLQELAKSAYRFKRIGLEAGPLSQWLFSGLAEAGLPVICVETRHMRAVLKAQINKTDRNDARGIAQMMRAGLYRPVYVKTLRSQKLRMLLTHRKLLQSKAIAIDNDLRGTLRNFGLKVGVAGAVKFEARIRELLGNLPDLAALVEPLLIVRRVLRQQLGILHRRLLAIVRDDEVCRRLMTIPGVGPVVALTYRATVDVPARFRNSKAVGAVFGLTPSTHQSGESERTGGISRCGDEMMRVMLYEAAQILLTRSAKWSWLKAWAMQIARRRGLKKAIVALARRLAVIMHRIWVDGTEFCWTRQEPAAA

SEQ ID NO: 14656 - protein, 347 aa, unidentified
  source 1..347: note = protein_74244ad
  REGION 7..149: note = RuvC_domain
  SITE 10: note = RuvC_P1
  SITE 53: note = RuvC_P2
  SITE 88: note = RuvC_P3
  SITE 90: note = RuvC_P4
  SITE 93: note = RuvC_P5
  REGION 212..301: note = Tnp_domain
  SITE 220: note = Tnp_P1
  SITE 250: note = Tnp_P2
  SITE 258: note = Tnp_P3
  SITE 259: note = Tnp_P4
  SITE 271: note = Tnp_P5
MKQVSTIGLDLAKHIFQVHGAGADGSPVFNRRLRRSEVLHFFSKQPACLVGIEACGSAHYWAREIATLGHEVRLIPPAYVKPFVKRGKTDAADAEAISEAVTRKTMRFVPIKTAEQQAGTMVLKSRALLVKQQTQTINALRSHLAELGIIAAAGRTKVEALVAIVRDVADIRLPAAARFALTAVADQIEAQADQIDKLERAIVAAARTDKDMRRLTTIPGIGAITAATIKALVPDSGGFKSARHFAAWLGLTPRQHSSGGKERMGRISKMGNPELRSLLVLGATSVLRIARKADRAPPWLKSLLARRPYKVAAVALANKTARIAWALLNRGGIYRHPETLATTTPAA

SEQ ID NO: 14657 - protein, 398 aa, unidentified
  source 1..398: note = protein_a21c135
  REGION 6..162: note = RuvC_domain
  SITE 9: note = RuvC_P1
  SITE 60: note = RuvC_P2
  SITE 100: note = RuvC_P3
  SITE 102: note = RuvC_P4
  SITE 105: note = RuvC_P5
  REGION 267..354: note = Tnp_domain
  SITE 275: note = Tnp_P1
  SITE 306: note = Tnp_P2
  SITE 314: note = Tnp_P3
  SITE 315: note = Tnp_P4
  SITE 327: note = Tnp_P5
MSRIWAGTDCGKAHHHTLVVDAEGKKLLSRRVSNDEPELLQLVADVLDLAGGREVVWAMDMTGGEPSLLINLLTAHGQSLVYIPGFAVNRATDSYRGQGKTDARDAHVIADQARMRTDLQPIRLDEEVVIELRLLTEYRSDLVADRTRTINRLRALLNSMFPALERALDLGNVGPLKLLTGYQTPAAIRRTGVKRLTAWLRNRKVWGAQALAETAVEAAERQHTAVAGEKTIAKMVHTLVEEVTALNVKIAETEKLIESRFREHELAQVITSLPGIGPIFGAEFLAAVGGSLDAFPTADRLAAFAGVSPAPRDSGKVSGNLHRPTRYHRRLQRVFYQSALQSIQRDPNSRAFYDRKRAEGKRHTQAVIALARRRVNVLWALIRDRRCYQVTPPVTTAA

SEQ ID NO: 14658 - protein, 342 aa, unidentified
  source 1..342: note = protein_12b41dd
  REGION 6..148: note = RuvC_domain
  SITE 9: note = RuvC_P1
  SITE 52: note = RuvC_P2
  SITE 87: note = RuvC_P3
  SITE 89: note = RuvC_P4
  SITE 92: note = RuvC_P5
  REGION 211..297: note = Tnp_domain
  SITE 219: note = Tnp_P1
  SITE 249: note = Tnp_P2
  SITE 257: note = Tnp_P3
  SITE 258: note = Tnp_P4
  SITE 270: note = Tnp_P5
MQITTIGLDIAKNVFQVHGIDASEKVFVRKQLRRSQVLAFFKALPPCLVGMEACGTAHYWARELKKLGHQVRLMPAKDVKAYVKRNKNDAADAEAICEAVRRPTMRFVQVKSAEQQGRLMQHRTRDLLMRQRTQVINALRAHMAELGIVATQGREGIKELLTIIASEEDARLPVDAHASLVVLAAGLQAVQTMIGSIEKRIIVQHRSNEASKRLETIPGIGVIGATAIAATVPDPKAFRSGRDLAAWIGLVPRQDSTGGKQKLGPISKQGDQYLRRILVVGAHAVLRRARQQPEKYPWLTQLLARKPFKVVAVALANKMARIAWALLAKGGTYRAPALAAGA

SEQ ID NO: 14659 - protein, 283 aa, unidentified
  source 1..283: note = protein_0d90075
  REGION 1..136: note = RuvC_domain
  SITE 43: note = RuvC_P2
  SITE 81: note = RuvC_P3
  SITE 83: note = RuvC_P4
  SITE 86: note = RuvC_P5
  REGION 181..267: note = Tnp_domain
  SITE 189: note = Tnp_P1
  SITE 218: note = Tnp_P2
  SITE 226: note = Tnp_P3
  SITE 227: note = Tnp_P4
  SITE 240: note = Tnp_P5
MLTAEADKRKTKVVVNTAAGVQALLAWCAKHGAQPAQLHAILEPTGLYHEQAATALPQVRVSLVNPAQARDFAKALALRSKNDALDSYVLARYGQTLSPALWHPAPLHARQLRALLTRREALSKDLLRELNRKEKSQFSPSAPVVDGSIDKAIAFLREQIKQIERAIDQHIDNHPDLKQDCELLNSIPAIGPQAGNAILAVMHNRHIDSAQSLAAYLGVVPVQRQSGSSLNSCARLSKAGPSQVRATLYMAALVGTRHNPHIRALYQRLLKAGKAKRPRWARP

SEQ ID NO: 14660 - protein, 276 aa, unidentified
  source 1..276: note = protein_b6571b6
  REGION 6..148: note = RuvC_domain
  SITE 9: note = RuvC_P1
  SITE 52: note = RuvC_P2
  SITE 87: note = RuvC_P3
  SITE 89: note = RuvC_P4
  SITE 92: note = RuvC_P5
  REGION 210..272: note = Tnp_domain
  SITE 218: note = Tnp_P1
  SITE 248: note = Tnp_P2
  SITE 256: note = Tnp_P3
  SITE 257: note = Tnp_P4
  SITE 269: note = Tnp_P5
MKVTTIGLDLAKNVFQAHGADACGSVVFRKQLRRDKVLHFLAGYSPCTVAMEACGGAHHWAREIGKLGHTVKLIPPAYVKPFVKRQKNDAADAEAICEAAQRPTMRFVAVKSETAEASAVVFRARDLLVRQRTQIINALRGHLAEYGFVCAQGPSHVARLIEHVASSGNSLPDAARTVLGMMIDTLQILEEKVKTLDMEIARRAREDETARRLVTVPGVGPVTATAFAALAPDAGGFAKGRDFAAWLGLTPLQRSTGGKQKLGSTSKWANEPCGDF

SEQ ID NO: 14661 - protein, 401 aa, unidentified
  source 1..401: note = protein_40fdb92
  REGION 4..161: note = RuvC_domain
  SITE 7: note = RuvC_P1
  SITE 57: note = RuvC_P2
  SITE 98: note = RuvC_P3
  SITE 100: note = RuvC_P4
  SITE 103: note = RuvC_P5
  REGION 276..364: note = Tnp_domain
  SITE 284: note = Tnp_P1
  SITE 314: note = Tnp_P2
  SITE 322: note = Tnp_P3
  SITE 323: note = Tnp_P4
  SITE 336: note = Tnp_P5
MTSVGVDVSKGKSTICILKPYGEIVCSPFEVQHEEGAMEAFVDLLAKLDGEIRVVMEATGIYHLPILTFLHDKGYFVSVINPFAMKKYAKNNSIRGAKTDKLDSMMIANYGIEKWYKLQKYEGDEETYAELKLLGRRYRYYMELHVKALQELTHILDYVMPGIKKMFNSWNEANGKDKLSDFVEKFWHFDLITSKNLEEFTEEYLVWAKEKKYHCSRSKAEAVYELACNGIPTLSSDTPSTKMLVQEAVSVLRAIDSSLTLILARMQSLAKSLPEYSTVREMGGVGDVLAPKLIAEIGDVRRLHSAKALIAWAGIDPPPYESGQFIGSKRRITKRGSSTLRKVGYEVMRVLKSHPAPKDDAVYNYILKKEAEGKSKKHAKIAGLNKFLRIYYSRVMEVYQK

SEQ ID NO: 14662 - protein, 339 aa, unidentified
  source 1..339: note = protein_fd23376
  REGION 6..148: note = RuvC_domain
  SITE 9: note = RuvC_P1
  SITE 52: note = RuvC_P2
  SITE 87: note = RuvC_P3
  SITE 89: note = RuvC_P4
  SITE 92: note = RuvC_P5
  REGION 211..298: note = Tnp_domain
  SITE 219: note = Tnp_P1
  SITE 249: note = Tnp_P2
  SITE 257: note = Tnp_P3
  SITE 258: note = Tnp_P4
  SITE 270: note = Tnp_P5
MNRIVIGVDIAERVFQLHWVEPATGEIVALQLKREKFLEHFANRASCVIGMEACGGSQHWARSLQKLGHEVKLLSARMVKPFVGGNKNDAADARGIWTAMQQPGIKVVAVKSEEQQAVLALHRMRQQLVKFRTAQINGLRGLLSEYGEVMPQGRAGIKKDIAAALQRIAERLPAVLIDTLREQYARLGELDQQILEIERRLRQWHHQDVDSQRIAEIPGVGLLTATAAVAMMGDAKAFKSGREFAAWLGLVPRQSGTGGRVRLLGISKRGDTYLRTLLIHGARAILTHSKSPPEWLSELVKRRPRNVAVVAMANKMARTIWALTAHERTYQKGYVSQRA

SEQ ID NO: 14663 - protein, 401 aa, unidentified
  source 1..401: note = protein_dc8fcb4
  REGION 4..160: note = RuvC_domain
  SITE 7: note = RuvC_P1
  SITE 57: note = RuvC_P2
  SITE 97: note = RuvC_P3
  SITE 99: note = RuvC_P4
  SITE 102: note = RuvC_P5
  REGION 275..361: note = Tnp_domain
  SITE 282: note = Tnp_P1
  SITE 312: note = Tnp_P2
  SITE 320: note = Tnp_P3
  SITE 321: note = Tnp_P4
  SITE 334: note = Tnp_P5
MNSVRIDVSKGKSTVAALRPMGEVALPPTEYLHTELELEKLAYTILALGEDTRVVMEATGRYHKPVAKALHEYGIYVCVLNPILIHQSGGGSVIKVKSDKKDAIKIAKYGLDNWVDLREYTPVDALRQQLKLFSRQYNLYMKNSVALSNNLISLTDKFFPGVNELFSSPEKADGHRKWVDFVETFWHCDCISLVSEKAFIERYRKWCKRKGYHFSVEKAFNLYASSCGNTVTLSKNDTTKRLITTAAKQLTSFNCQLAVFRNEMISIARQLPEFDTVLNMFGVGEISAVNLIAEIGDVRRFPNRNSLVGFAGVDPCVDQSGKHFSKSNPTTKRGSAILRKTLFQVISTYVKRSPVDEPVYQFICKKRAEGKPYYVCTTAAANKFLRIYYARVKECLNDYLF

SEQ ID NO: 14664 - protein, 312 aa, unidentified
  source 1..312: note = protein_e6a2386
  REGION 6..157: note = RuvC_domain
  SITE 9: note = RuvC_P1
  SITE 55: note = RuvC_P2
  SITE 93: note = RuvC_P3
  SITE 95: note = RuvC_P4
  SITE 98: note = RuvC_P5
  REGION 197..284: note = Tnp_domain
  SITE 205: note = Tnp_P1
  SITE 235: note = Tnp_P2
  SITE 243: note = Tnp_P3
  SITE 244: note = Tnp_P4
  SITE 257: note = Tnp_P5
MEKVFIGIDISKLTLDIYVKSYSSAQHYQIENNTKAIAKFFKSFNNTSNIIVTMENTGRYNFSLYAVLSTMNISLYVLNPLHLKRSIGLLRGKNDKLDSQRICGFIEKYYMDLEPWKSSSLAIQKLSVLRAERRHRIKIKSGLMAQQKDKELLKDIVDKEMIKLNKAMITLIDKQIKVIEEKMMSIINASIELKDQYKRLQSIPGVGKVLATLMIIKTKGFTEIKSARKMACYSGIAPFEHQSGSSIYYKPRVSTMADMELKKILHLAAMSAIRLKNDLAVYYHRKVQEGKNKMAVLNAVRNKIIHRIYAII

SEQ ID NO: 14665 - protein, 316 aa, unidentified
  source 1..316: note = protein_e1c510a
  REGION 5..148: note = RuvC_domain
  SITE 8: note = RuvC_P1
  SITE 52: note = RuvC_P2
  SITE 92: note = RuvC_P3
  SITE 94: note = RuvC_P4
  SITE 97: note = RuvC_P5
  REGION 188..274: note = Tnp_domain
  SITE 196: note = Tnp_P1
  SITE 226: note = Tnp_P2
  SITE 234: note = Tnp_P3
  SITE 235: note = Tnp_P4
  SITE 247: note = Tnp_P5
MTCYVGVDIGKNQFDVHLHHQARGQSFSNSPEGFTAFLSILPAPQTCHIAMEATGKYFFNLAQFLFNHQIKVSVVNPASIKYYAQSQLKRTKTDLQDAKLIAHYCQSQQPKLWQPPSQVIVELQEWQQFQALLIKQKTQLTNQMQTTECERLKQLQLEQIVQLEQEINEVSEQIKTLISQDEKLNEQTSLLTSIKGVGEKTAIQVLTLIKDIDGFDNAKQLASFAGVVPQIKQSGSSVNSSSLSKIGHSELRKCLYMPALAAIKFNPVIQTFAQNLQSRGITGKKKVVAVMRKLLHIMFAVLKHGKPFDPCYKIST

SEQ ID NO: 14666 - protein, 404 aa, unidentified
  source 1..404: note = protein_bbc8ece
  REGION 4..160: note = RuvC_domain
  SITE 7: note = RuvC_P1
  SITE 59: note = RuvC_P2
  SITE 97: note = RuvC_P3
  SITE 99: note = RuvC_P4
  SITE 102: note = RuvC_P5
  REGION 270..356: note = Tnp_domain
  SITE 278: note = Tnp_P1
  SITE 309: note = Tnp_P2
  SITE 317: note = Tnp_P3
  SITE 318: note = Tnp_P4
MLFVGVDWAEEHHDVCVMGESGEVLSRRRVAHSVRGVGELHELVSEFADEDEQVVVGIEIDRGLLVSALIGAGYQVYAVNPMAASRYRDRHGVSGAKSDPGDAKVLADLVRTDRHNHRPVGGDSELVDAIRVLARSHQSAIWGRQRQINSLRSGLREYYPGAQEAFGTDLGSPDALAVLAIAPTPELGRTLSRAKIISALRRGGRERNLETRAEEIQGALRAEHLGAGATLSRAHGIVTSSWVELIKALNREIALLEEALSEHFERHPAAKVVRSLPGMGTTLSSRVLGEFGDDPNRYADAKSRKNYAGTSPITKASGKSHVVLARFTRNRRLADALDMWAFCSLTCSPGARAYYDKLRGRGKTHRQALRQLANRWVGILHHCLETGSLYDEPSAWPMGESVAA

SEQ ID NO: 14667 - protein, 317 aa, unidentified
  source 1..317: note = protein_3791536
  REGION 10..160: note = RuvC_domain
  SITE 13: note = RuvC_P1
  SITE 55: note = RuvC_P2
  SITE 95: note = RuvC_P3
  SITE 97: note = RuvC_P4
  SITE 100: note = RuvC_P5
  REGION 192..277: note = Tnp_domain
  SITE 198: note = Tnp_P1
  SITE 227: note = Tnp_P2
  SITE 235: note = Tnp_P3
  SITE 236: note = Tnp_P4
  SITE 248: note = Tnp_P5
MAMQVVKSIIGADVAKAELVIHHEERDEIIKLKNSKSEINKWLRQQPLNTAIAVEATNIYHLDLVELAHGMGFDVYVIDGFQLSNYRKSVGGRVKTDPSDARLLSRFLKNEGEDLRPWTPPPAVYGKLQSLLRRRAALVSARTAMTQSWANEGLLKAAFETFVKSIERLDLLIQKKIKEVLREAGLLEQVIRCQAVEGIGFLTASALVMAFIRGEFKSSDAYIAFLGMDLRVNDSGQKNGRRRLTKRGCSEIRRLLHNAAMSASRSATWKDVYEQYRSNGKATTQALVILARKLARVAFALMRDQGEYVTKSRKLAC

SEQ ID NO: 14668 - protein, 405 aa, unidentified
  source 1..405: note = protein_f452e6f
  REGION 12..166: note = RuvC_domain
  SITE 15: note = RuvC_P1
  SITE 63: note = RuvC_P2
  SITE 103: note = RuvC_P3
  SITE 105: note = RuvC_P4
  SITE 108: note = RuvC_P5
  REGION 273..359: note = Tnp_domain
  SITE 281: note = Tnp_P1
  SITE 311: note = Tnp_P2
  SITE 319: note = Tnp_P3
  SITE 320: note = Tnp_P4
  SITE 332: note = Tnp_P5
MAPAVTEIDVFVGIDMAKQDHYAQAISRDGTELFKRPVLNDQATIEQLLSDAAVHGRIVVVVDQPASGAQLLLSLAAQHQVPVAYVTGLQMRRAADLYAGSAKTDPIDAFVLADFARRNADRLTWLSVTDDLLVELRILNGRDVDLAADATRTINRCRDALTAISPALERVVGSRLGQAGVRDVLAKWATPTALRSAGQARIRARMAKRSPRIAAKVTEEVWAALDAQTITLPGEAAWGRIIADLCSDLDRVISQRDQLAVEIEEVFMAHPLGKVLVTLCGFGPRTGARTLAEIGDPQRFADGGRLAAYAGLAPVDRRSGRSINSSSQSRSGNHRLKNAMFLAAFVAAQHDAAAKAYYQRKRAEGKKHNAAVICLARKRCDIILAMLKTASPYDLSRHTALPEAA

SEQ ID NO: 14669 - protein, 357 aa, unidentified
  source 1..357: note = protein_06d6eff
  REGION 14..156: note = RuvC_domain
  SITE 17: note = RuvC_P1
  SITE 60: note = RuvC_P2
  SITE 95: note = RuvC_P3
  SITE 97: note = RuvC_P4
  SITE 100: note = RuvC_P5
  REGION 223..311: note = Tnp_domain
  SITE 231: note = Tnp_P1
  SITE 261: note = Tnp_P2
  SITE 269: note = Tnp_P3
  SITE 270: note = Tnp_P4
  SITE 282: note = Tnp_P5
MGKSIIDTSSVTRVALDLAKRVFRIHAVDATGSIVIARSVNRRTLLKFFDALPRCVVAMEACSSAHRWGRQLLELGFAARLIPPAHVKPYVRRNKNDAADAAAICEAAERQGQRFVPVRSVENQAALMRHRVRELMVGQRTAALNALRGHLSEIGVVAAQGVQNAYALKEMAAEGFDENGEIVVPDCVRLALAPLVRQIDALDKAIEAIDRELEASARTDEAARWLMTIPGVGPVTATALLATIQDFAAFSSGREFAAFVGLTPREHSSGGKPRLGRITKMGDRYLRKLLVVGACSTLGARKGHNDAQRRWASGMLERKTVKYKFKLTAVALANKLARIVYALATKGGHYDDHPVAA

SEQ ID NO: 14670 - protein, 331 aa, unidentified
  source 1..331: note = protein_1f162fc
  REGION 7..158: note = RuvC_domain
  SITE 10: note = RuvC_P1
  SITE 59: note = RuvC_P2
  SITE 97: note = RuvC_P3
  SITE 99: note = RuvC_P4
  SITE 102: note = RuvC_P5
  REGION 202..289: note = Tnp_domain
  SITE 210: note = Tnp_P1
  SITE 240: note = Tnp_P2
  SITE 248: note = Tnp_P3
  SITE 249: note = Tnp_P4
  SITE 262: note = Tnp_P5
MKIKDVIGIDASKLTLDCCLHKSGAQEVFENTPEAIVFLVDWSIKISGLAKNELLFVFEHTGLYTHQLVRYLSEQGYYFLLVPGLEIKRSLGIARGKDDRADAKRIALYGYRIREEARPYQMPKESLISLKRLMSMRRKLVSQRAGHIATLGEQIRVLNNDLGPILLQVQRDIIGVLDVQITKIEKELDRLIEQDPELQIIYRLLVSIKGIGAVTARFMIVHTVGFTAFKSWRKFASYCGIAPFPNRSGTSIRGRTKVSQLANKEGKTLLNLCAGSAIQCNPEMKAYYTRRIDAGKNKMSTLNIIRNKLLARAFAVVVRGTPYVNTMGYIS

SEQ ID NO: 14671 - protein, 334 aa, unidentified
  source 1..334: note = protein_1bf3f29
  REGION 7..149: note = RuvC_domain
  SITE 10: note = RuvC_P1
  SITE 53: note = RuvC_P2
  SITE 88: note = RuvC_P3
  SITE 90: note = RuvC_P4
  SITE 93: note = RuvC_P5
  REGION 208..294: note = Tnp_domain
  SITE 216: note = Tnp_P1
  SITE 246: note = Tnp_P2
  SITE 254: note = Tnp_P3
  SITE 255: note = Tnp_P4
  SITE 267: note = Tnp_P5
MDKVTTIGIDLAKRVFALHGVDAAGRVVLRKTVRREQFVETVAKLPPCLIGMEACSGSHEWARRFQGLGHTVRLMAPVFVAPYRKSGKNDGNDAEAICEAVSRPNMRFVPVKSAEQQALLALHRVRQGFIEERTATINRLRAVLTEFGVVLPNRTQWVRRGALAAAEALPVLARQAIEDLRAHLTQLDERIGAYDRQIEQQAGQSEAAKRLMQIRGIGPLTAVAIVATVGNARDFESGRQFAAWLGLVPRQNSSGGKARLGHISRRGDAYLRMLLVQGARSVLNTAARHTDRLSLWALSLQARRGMHKALVGIAAKNARIAWALLSKEQTLRTV

SEQ ID NO: 14672 - protein, 391 aa, unidentified
  source 1..391: note = protein_129ae6e
  REGION 4..163: note = RuvC_domain
  SITE 7: note = RuvC_P1
  SITE 60: note = RuvC_P2
  SITE 101: note = RuvC_P3
  SITE 103: note = RuvC_P4
  SITE 106: note = RuvC_P5
  REGION 267..353: note = Tnp_domain
  SITE 274: note = Tnp_P1
  SITE 304: note = Tnp_P2
  SITE 312: note = Tnp_P3
  SITE 313: note = Tnp_P4
  SITE 326: note = Tnp_P5
MICVGIDVAKDKHDCFILSSEGEILADVFTIPNNSVGFDTLLQTIRSCTSPQEKIKVGLEATGHYSYNILGFLLDNGLTTYVLNPLHTNLYRKSLSLRKTKTDRIDARTIATMILSRVDLKSYTDLSYHNEELKSLTRYRFTKVNERAKLKQSVSRLVTILFPELEKLVPSLHMASVYALLSEFPGAHQIANSHLTRLKTVLSNASHGRYGKEKAIEIREAARNSIGSRRRAASMELQHTLLFLATMDVVIEEIEVQIQEILEEIQSPMTTIPGIGFRMGAMILAEVGDFSQFSSPDKILAYAGLSPSTYQSGQLTNAHSRMEKRGSKYLRYALFNATKLVCQHNPIFTDYLSKKIAEGKHYYVAISHAAKKLVRLIYAMELSGESYRKVA

SEQ ID NO: 14673 - protein, 349 aa, unidentified
  source 1..349: note = protein_280e170
  REGION 6..148: note = RuvC_domain
  SITE 9: note = RuvC_P1
  SITE 52: note = RuvC_P2
  SITE 87: note = RuvC_P3
  SITE 89: note = RuvC_P4
  SITE 92: note = RuvC_P5
  REGION 211..297: note = Tnp_domain
  SITE 219: note = Tnp_P1
  SITE 249: note = Tnp_P2
  SITE 257: note = Tnp_P3
  SITE 258: note = Tnp_P4
  SITE 270: note = Tnp_P5
MKITTIGIDLAKNVFQVHGVDEHGKAVFNKPLKREQMAAFFVNLPPCLIGMEACGSAHHWARKLQGMGHTVRLMAPQFVKPYVKTNKNDAADAAAICEAVTRPSMRFVPIKNVEQQGVLALHRVRQGFVKARTAQANQIRGLLAEFGVIVPQGIGHITQRVPMLIEDAANELPGVFRLLIQRLLEHLKELDCQVQELEAQIVAWHRQSDLSRKLGQIPGIGPITACALVASLGDAKNFKDGRQVAAWLGLVPRQHSSGGKQNLLGISKRGDTYLRTLLIHGARSVIYHAQKKDQHQGQGSAQCGWLNGVLQRRNKNVAAVALANKNARIVWALLAHDRSYEPGYVRESV

SEQ ID NO: 14674 - protein, 431 aa, unidentified
  source 1..431: note = protein_711f43d
  REGION 25..183: note = RuvC_domain
  SITE 28: note = RuvC_P1
  SITE 82: note = RuvC_P2
  SITE 122: note = RuvC_P3
  SITE 124: note = RuvC_P4
  SITE 127: note = RuvC_P5
  REGION 293..393: note = Tnp_domain
  SITE 301: note = Tnp_P1
  SITE 331: note = Tnp_P2
  SITE 339: note = Tnp_P3
  SITE 340: note = Tnp_P4
  SITE 353: note = Tnp_P5
MILQEGLGAPANIFSRRRFCMNPVVGLDVSKGESQVQAFLDKKKPYRKSFKVEHTSDGLAILHEFLKYLKEITGQNPAIVLEATGHYHASVVQFLEDHHYLLIIVNPLISYRAKSSSLRKVKTDAVDAYLLCELYYKEDLEPYKRRGVRLLNLRNLTRQHENITGNFIQTKLQFQAVLEQVFPEYRGVFGELYSYVSLRILQEYKASEDILKTSEDKLTNRIADLCTSRSKKWAYEKAQKLKTAAARNPFKKTLYQSHLLSMGMYIDMLLQFKEHLSKLEAEIDTLAKGIEEYKIIKSIPGIGEKIAATILSEIGEIDRFNHPKKLVAFAGVDPSVFESGRFTASINRITKRGSSRLRHALYLAIRCAIRDKRKKKTSDKIIPRNKKMREFYDKKRSEGKPFRVAVIACVNKLLHWIYALLKNKTTFQDIA

SEQ ID NO: 14675 - protein, 341 aa, unidentified
  source 1..341: note = protein_9a1a23b
  REGION 7..147: note = RuvC_domain
  SITE 10: note = RuvC_P1
  SITE 55: note = RuvC_P2
  SITE 88: note = RuvC_P3
  SITE 90: note = RuvC_P4
  SITE 93: note = RuvC_P5
  REGION 212..297: note = Tnp_domain
  SITE 220: note = Tnp_P1
  SITE 250: note = Tnp_P2
  SITE 258: note = Tnp_P3
  SITE 259: note = Tnp_P4
  SITE 271: note = Tnp_P5
MNKFNTISIDLAKSVFQVAVFNRYGKLTLNQAMTKKKMLTVISQHPGATICIEACAASHYWGRTFQSRGHTVKVIPPQKVKPYRNGNKNDANDAIAIYEASLRSDIHAVPVKTLEQQDIAMLLSLRQSYIKQRTAVSLRIRGYAAECGITFPQGANKLREMLPLVIEDAENELTPVARFVLRELYAQLLSIDEPIERVESELIEFAKQIPACQLLITLRGVRWIIASAIFARMGDASAYRNGRGASASLGLVPTHTGSGGKNKNHGISKSGDKTLRSLIVHGARAVVANIRDKKDRLSCWLRNLLERKPFNQVVIALANKTIRMACAMLKSNQSYNEALIA

SEQ ID NO: 14676 - protein, 411 aa, unidentified
  source 1..411: note = protein_c5048f7
  REGION 5..164: note = RuvC_domain
  SITE 8: note = RuvC_P1
  SITE 61: note = RuvC_P2
  SITE 101: note = RuvC_P3
  SITE 103: note = RuvC_P4
  SITE 106: note = RuvC_P5
  REGION 272..358: note = Tnp_domain
  SITE 280: note = Tnp_P1
  SITE 311: note = Tnp_P2
  SITE 319: note = Tnp_P3
  SITE 320: note = Tnp_P4
MRLFVGDDWAEDHHDVELMDEAGRVLARRRLPEGVAGMARLHALIGQQLGDDGDDAEVVIGTETDRGPWVAALVAAGYTVYGVNPLQASRYRERHGVSGAKSDTGDAHMLTDMVRTDSHQLRVVAGDSPDAGAVKVAARMHKTLIWERTRQVQRLRYQLLGYFPGALEAFDDLDAPDALELLGKAPDPARAARLTRAQVSAALKRARRRDIPGKATAILAALRSAQLGQPPAVTAAYAVTVRALIALITVLNEQVTVLEEQVGAHFGRHPDAEIYLSQPGIGLVLGARVLGEFGDDPDRYASGKARKNYAATSPITRASGKKKVVAARFIRNQRLTDALMAQALSALTASPGARALYDAERARGTEHNPALRKLANRRVGILHGCLTTRTPYDEATAWPQQENIHQSDLAA

SEQ ID NO: 14677 - protein, 402 aa, unidentified
  source 1..402: note = protein_83fe252
  REGION 4..160: note = RuvC_domain
  SITE 7: note = RuvC_P1
  SITE 57: note = RuvC_P2
  SITE 97: note = RuvC_P3
  SITE 99: note = RuvC_P4
  SITE 102: note = RuvC_P5
  REGION 275..362: note = Tnp_domain
  SITE 283: note = Tnp_P1
  SITE 313: note = Tnp_P2
  SITE 321: note = Tnp_P3
  SITE 322: note = Tnp_P4
  SITE 335: note = Tnp_P5
MNAVGIDVSKGKSTVAVLRPFGEVVASPFDVAHTGSDLTALVDFLKKLRGETKVVMEATGNYFEPIARYLHEQNIFVSVVNPVLISDFGGNTLRKPKTDKKDSLKIASYALSYWVDLKEYVPQKDLRKSLKLLNRQYQHASKLKTMMNNNLISLLDLTYPGINKLFTSPPRDSDGHEKWVDFVLSFPHCDMISKLTIKAFSRKYKKWCNNNSYHFTETACKKIYDFSKDCISGVPSEESTVFAVIQAATMLNSATEYCHAIQLEMNRAAAQLPEYDTVMSMYGVGKAVGPQLIAEIGDPRRFHSRKAITAYFGYDSEDDDSGQKISKTNPMTKKGSGALRRTIFIIMQVLLQTKPVDNPVYDFLIKKQSEGKHYYSYMNAAANKFLRIYYARVKEVLIAAEP

SEQ ID NO: 14678 - protein, 341 aa, unidentified
  source 1..341: note = protein_b3aee1c
  REGION 7..149: note = RuvC_domain
  SITE 10: note = RuvC_P1
  SITE 53: note = RuvC_P2
  SITE 88: note = RuvC_P3
  SITE 90: note = RuvC_P4
  SITE 93: note = RuvC_P5
  REGION 211..296: note = Tnp_domain
  SITE 219: note = Tnp_P1
  SITE 249: note = Tnp_P2
  SITE 257: note = Tnp_P3
  SITE 258: note = Tnp_P4
  SITE 270: note = Tnp_P5
MSEVHTIGLDLAKSVFQAHGADGSGEVVFRKRLRRKQVLAFFADQPRCLVAMEACGSAHYWGRELARLGHKVKLIPPIYVKPFVKRQKNDAADAEAICEAANRPTMRFVPVKSEERQGIAVLLRTREILIRQRTQTINALRGHLAEFGVIVPKGASNVAKLIERIASPEISLPEVARAALSYLTDSLLRLEDQVRELDREIAGLARANETARRLMTIPGIGPLIAVAMVALAPPPETFRRGRDFAAWLGLTPRQNSTGGKQRLGATTKMGERSLRRLLIIGANSVVMWRSKKGAAPGTWLEGMLARKPAMLVRVAQANKMARIVWAIMSGNQTYQAPVAQA

SEQ ID NO: 14679 - protein, 334 aa, unidentified
  source 1..334: note = protein_77ae454
  REGION 7..149: note = RuvC_domain
  SITE 10: note = RuvC_P1
  SITE 53: note = RuvC_P2
  SITE 88: note = RuvC_P3
  SITE 90: note = RuvC_P4
  SITE 93: note = RuvC_P5
  REGION 209..301: note = Tnp_domain
  SITE 217: note = Tnp_P1
  SITE 247: note = Tnp_P2
  SITE 255: note = Tnp_P3
  SITE 256: note = Tnp_P4
  SITE 268: note = Tnp_P5
MQTATLIGIDLGKYSFHVHCQDRQGNALLRKKFSRSQLATFLATYPACTVVMESCAGAHYMARTVSQLGHRVKLIAPQFVRPFVKSNKNDFVDAEAICEAASRPSMRFVTPRTEDQQAMSALHRVRSSLIRKRVKTTNQMHAFLLEFGISLPRGSAVIKRLPSVLEENGIPPYLERLLARLHTHYGYLSEQIKEIDNELKTHLNEDETAQRLLTIPGVGPVTASLLATRLGDGKNYASSRDFAASTGLVPRQYSTGGKPTLMGISKRGNKVLRSLLVQCARAFMRRLEHNSGRLAEWVKKQLASHHSNVVACALANKLARIAWAVTAHQTEFSK

SEQ ID NO: 14680 - protein, 345 aa, unidentified
  source 1..345: note = protein_51e01b2
  REGION 7..147: note = RuvC_domain
  SITE 10: note = RuvC_P1
  SITE 53: note = RuvC_P2
  SITE 88: note = RuvC_P3
  SITE 90: note = RuvC_P4
  SITE 93: note = RuvC_P5
  REGION 210..295: note = Tnp_domain
  SITE 218: note = Tnp_P1
  SITE 248: note = Tnp_P2
  SITE 256: note = Tnp_P3
  SITE 257: note = Tnp_P4
  SITE 269: note = Tnp_P5
MDQISRIGMDTSKHVFQLHGVNAAEELVLRRKLRRKEMVSFFEKLAPTVIAIEACGASHHWARLLQSFGHTVKMIPPQLVKPYVKRGKNDAADAEALCEAMSRPTMRFVPVKTAEQQAALMLVGVRDQMIRHRTQLANAIRGYAAEFGLTAAKGMAHLVPLLERIQTDESLPASARELFAIQAKEYAQLQAQIAEIDVQLMVRHRADECSRRLAKIPGIGPVGATLLRMKTPTPELFRSGRQFAAWIGLTPRDHSTAGKVRLGVITRAGDEGLRNVLVVGATAVIQQARRHGRASPWLAGLLKRKSPKLAAVALANKMARIAWKLMLTGEAYTATPAPAALAGAA

SEQ ID NO: 14681 - protein, 308 aa, unidentified
  source 1..308: note = protein_40626b1
  REGION 5..111: note = RuvC_domain
  SITE 16: note = RuvC_P2
  SITE 51: note = RuvC_P3
  SITE 53: note = RuvC_P4
  SITE 56: note = RuvC_P5
  REGION 174..261: note = Tnp_domain
  SITE 182: note = Tnp_P1
  SITE 212: note = Tnp_P2
  SITE 220: note = Tnp_P3
  SITE 221: note = Tnp_P4
  SITE 233: note = Tnp_P5
MPGLFVNLPPCLIGMEACASAHYWARTLQSYGHTVRLIAPHFVKPYVKTHKTDATDAEAICEAVSRPNMRFVPIKSIEQQSALSLHRVRQGFVRARTAQACQIRGLLAEFGLVIPRGIANIKQVPKLLQVAGKELPAPFCRLIERLLAHLKELDRQARELEEQIVDWHERSEPSRRLAKIPGIGPITASALVASISDVRSFKNGRELAAWMGLVPRQHSSGGKPTLLGISKRGDRYLRTLLVHGARSVIVRVLKRDDQKGSWLNRLLERRHVNVATVALAHKTVRTVWAMLAHDREYCPNYRSLPVAA

SEQ ID NO: 14682 - protein, 311 aa, unidentified
  source 1..311: note = protein_4275d8f
  REGION 8..171: note = RuvC_domain
  SITE 11: note = RuvC_P1
  SITE 55: note = RuvC_P2
  SITE 94: note = RuvC_P3
  SITE 96: note = RuvC_P4
  SITE 99: note = RuvC_P5
  REGION 189..273: note = Tnp_domain
  SITE 197: note = Tnp_P1
  SITE 226: note = Tnp_P2
  SITE 234: note = Tnp_P3
  SITE 235: note = Tnp_P4
  SITE 246: note = Tnp_P5
MTPEKTWVGIDVSKASLDVYLLPQATSLQVPNTAAGVQLLIEQWSATPPHLVVVESTGGLERTLVEGLQQANIAVAIANPRKVKGFAIALGKAKTDKLDAQVIARFAQSIPLQPRAVVDAASQQLSELMHRRQQLVEIQVAEKNRLSRVAPTVRSNIEQHLQQLRQHLDNLDQQIQALGEQQADWQRKDQILQSVKGIGRVTAALCLVELPELGKLSEKQIARLVGVAPINHDSGKHQGKRMISGGRTRVRCGLYMATLVASRHNPVIRNFYQHLLARGKLKQVALVACMRKLLVILNAMMRDNKTWQPPA

SEQ ID NO: 14683 - protein, 347 aa, unidentified
  source 1..347: note = protein_be5cc52
  REGION 4..149: note = RuvC_domain
  SITE 7: note = RuvC_P1
  SITE 52: note = RuvC_P2
  SITE 92: note = RuvC_P3
  SITE 94: note = RuvC_P4
  SITE 97: note = RuvC_P5
  REGION 191..278: note = Tnp_domain
  SITE 199: note = Tnp_P1
  SITE 229: note = Tnp_P2
  SITE 237: note = Tnp_P3
  SITE 238: note = Tnp_P4
  SITE 251: note = Tnp_P5
MQYIGIDVSKATFVVAYSSEKSRKTSTFANTAAGIKKFMKTIDPSKHHCVMEATGNYSLLLVYLLSKAGYTVSMENPLKVKNFARTMLTVIKTDEVDARLIALYGERMEPAPYKIKDDSLLKLKQKRTILRQLKKQLSANRNIQESFNALPVKDQSCEKALKKTIEFLEKQVKAMTAELETYSNEEFKKQLNLLTSVKGIGITVATALIVATGAFTYFSSAKQLTRYLGLSPTYQQSGTSVRYRGHINRNGDPYLRSNLYIAACSSLRCNKECKAFYERLRANGKPAKLAVVAVANKLVRQAFSVVMNNTPYEDGFVSNRPNGSCGGSAMRQGTAQSGPTSTVKQVS

SEQ ID NO: 14684 - protein, 344 aa, unidentified
  source 1..344: note = protein_147c029
  REGION 6..148: note = RuvC_domain
  SITE 9: note = RuvC_P1
  SITE 52: note = RuvC_P2
  SITE 87: note = RuvC_P3
  SITE 89: note = RuvC_P4
  SITE 92: note = RuvC_P5
  REGION 211..302: note = Tnp_domain
  SITE 219: note = Tnp_P1
  SITE 249: note = Tnp_P2
  SITE 257: note = Tnp_P3
  SITE 258: note = Tnp_P4
  SITE 270: note = Tnp_P5
MKITPIGIDLAKEVFQIHGVDERGKVVVRKQLKRNEMAKYFASLESCLIGMEACGSAHHWARKLGGYGHTVKLMAPQFVKPYVKTNKNDMADAEAICEAVRRPNMRYVPQKMIEQQAILSVHQARQGFVKARTAQGNQIRGLLSEFGIVIPKSIDALAKRVPEILEDAENGLPGVMRRLLERLTDNLKEMNRHVNELEKQIQLWHRENEASRKLTEIPGLGPITASAIIATVGDAREFKNGRQLAAWLGLVPRQHSSGGKQTLLGISKRGDTYLRTLLIHGARAVIRYAQNKAEPDSWLRKLMARRNKNVAAVVLANKNARIIWALLTKDSLFRADYTSAVAVA

SEQ ID NO: 14685 - protein, 301 aa, unidentified
  source 1..301: note = protein_69a2d9e
  REGION 5..137: note = RuvC_domain
  SITE 39: note = RuvC_P2
  SITE 79: note = RuvC_P3
  SITE 81: note = RuvC_P4
  SITE 84: note = RuvC_P5
  REGION 175..259: note = Tnp_domain
  SITE 183: note = Tnp_P1
  SITE 212: note = Tnp_P2
  SITE 220: note = Tnp_P3
  SITE 221: note = Tnp_P4
  SITE 232: note = Tnp_P5
MFVHPTAERFGVPNDDSGVEELLARLKASSSPAALVVLEATGGFERPVAAAIAASGLAVAVVNPRQVRDFARAMGRLAKTDRIDAESLARFAEAVSPAPRAIPDEEALVLGEILARRRQLVGMLTAERNRLVTATTKRVNKRIEAHLRWLEKELARTERDLEEAIEESPVWRENETLLRGVPGVGPILAKTLLAELPELGELKNKQLAALVGVAPLNRDSGILRGKRAIWGGRGGVRAALYMGALVATRCNPSIKVFYERLLAAGKPKKVALVACMRKLLVILNAILRNRTPWRPSHALTP

SEQ ID NO: 14686 - protein, 340 aa, unidentified
  source 1..340: note = protein_918f45b
  REGION 7..149: note = RuvC_domain
  SITE 10: note = RuvC_P1
  SITE 53: note = RuvC_P2
  SITE 88: note = RuvC_P3
  SITE 90: note = RuvC_P4
  SITE 93: note = RuvC_P5
  REGION 211..303: note = Tnp_domain
  SITE 219: note = Tnp_P1
  SITE 249: note = Tnp_P2
  SITE 257: note = Tnp_P3
  SITE 258: note = Tnp_P4
  SITE 270: note = Tnp_P5
MNTMTLLGIDIGKHSFHLHGQDAKGHQVLRKKTSRSQLLGTLAQLPACTVVMESCGGAHWLARQVEALGHEVKLIAPQYVKPFVKGNKNDFIDAEAICEAASRPAMRFCSIKTAEQQTLSALHRVRDSLIGHRTVATNQIHGFLLEFGISLPIGATALNRVPALLDDPQHPVPLRLKSVVMRLHRQIQQLNDEIKDIESDLKQQLKEDDAGNRLQSIPGIGPITASAVLADVGDASNYRSGRDFAASLGLVPRQYSTGGKTVLLGISKRGDKHIRQLLVQGARSVIQHIDKREDALGPWVRELLTRRHSNVVACALANKLARIVWAVLAKGGQYDPHPNA

SEQ ID NO: 14687 - protein, 342 aa, unidentified
  source 1..342: note = protein_d2f0016
  REGION 6..148: note = RuvC_domain
  SITE 9: note = RuvC_P1
  SITE 52: note = RuvC_P2
  SITE 87: note = RuvC_P3
  SITE 89: note = RuvC_P4
  SITE 92: note = RuvC_P5
  REGION 210..295: note = Tnp_domain
  SITE 218: note = Tnp_P1
  SITE 248: note = Tnp_P2
  SITE 256: note = Tnp_P3
  SITE 257: note = Tnp_P4
  SITE 269: note = Tnp_P5
MKDTIVGVDLAKNVFQLHGASMTGEIKFRRKLARGQFLRFMASQSPALVAMEACGSAHYWARELVALGHEVKLIAPQYVRPFVKRQKNDMADAEAIAIATRQPEMRFVEPKTPEQQARAVLFRARERIVHQRTELVNALRAVLYEYGQVVPLGIGHVKRIEQMIEDDSIDLPEIVREECRDLLTQINEQTVRIEQKMKKLTTLSQQSDAARRLQTMPGIGPMIALAVEAFAPAMESFRCGRDFAAWLGLVPRQFSSGGKERLGCVSKAGQADIRRLLIIGAMARVNWASRKPPVQGSWLARMLGKKPKMLVAIALANKMARKIWAMLTKQEDYRDLAAGVAA

SEQ ID NO: 14688 - protein, 391 aa, unidentified
  source 1..391: note = protein_b87bda6
  REGION 4..163: note = RuvC_domain
  SITE 7: note = RuvC_P1
  SITE 60: note = RuvC_P2
  SITE 101: note = RuvC_P3
  SITE 103: note = RuvC_P4
  SITE 106: note = RuvC_P5
  REGION 266..353: note = Tnp_domain
  SITE 274: note = Tnp_P1
  SITE 304: note = Tnp_P2
  SITE 312: note = Tnp_P3
  SITE 313: note = Tnp_P4
  SITE 326: note = Tnp_P5
MICVGIDVAKDKHDCFILSSEGEVLADVFTIPNNMEGFGNLLQAIRSCSRPGDKIKVGLEATGHYSYNILGFLLDKGLPTFVINPLHTNLYRKSLTLRKTKTDRVDARTIAAMLLSDVDLKPYTGTSYHNEELKSLTRYRFDKVRERAKMKTAVSRLVCILFPELEKLFPNLHIASVYALLREFPGAKQVAGANLTRLKNLLHEVSRGRYGRENAVEIRNIARNSIGSFMPAKSLELKHTISLIHVLDEEIAEVEAEIDCIMDEIQSPITSIPGIGSQMGAMILAEVGDFSCFDSPDKILAYAGLSPSVHQSGQMKNCYAHMEKRGSRYLRYAIFNATRFVCNWNPIFAAYLAKKRSEGKHYNVAISHAAKKLVRLIYAMEKSGQAYRPAV

SEQ ID NO: 14689 - protein, 329 aa, unidentified
  source 1..329: note = protein_3f42f19
  REGION 9..153: note = RuvC_domain
  SITE 12: note = RuvC_P1
  SITE 58: note = RuvC_P2
  SITE 98: note = RuvC_P3
  SITE 100: note = RuvC_P4
  SITE 103: note = RuvC_P5
  REGION 197..283: note = Tnp_domain
  SITE 205: note = Tnp_P1
  SITE 235: note = Tnp_P2
  SITE 243: note = Tnp_P3
  SITE 244: note = Tnp_P4
  SITE 256: note = Tnp_P5
MSNLLKKVIGVDVGAKFLTVSFNDDSNQNQVQNIENNQRSILAFLKKISREDYCFVIEATGNYSSRLLHLSLSKGFESSLINCMSVKHFSRMKNIIIKTDAEDAKLIKLYGEMFRPEIYVPKSIQIEHLDQEIKLLNDLEEEKRRYAVKLKALRYNPHLNPNTEKHYEKRLKQLEKEVQEVELRLPQLQDEEFKEIKNLIQSVSGIGEKTSLQLMTATSGFKNFDSAKSLVKYFGLAPRIYQSGKKSYSPGKCRTSKTHIRGMLYVCSWTAMKHNIPCKELYLRLLAKGKPKKVALIAVCNKLLRICFGVVKNKIAYQQDYQKNLKILT

SEQ ID NO: 14690 - protein, 345 aa, unidentified
  source 1..345: note = protein_fd04eb2
  REGION 6..150: note = RuvC_domain
  SITE 9: note = RuvC_P1
  SITE 54: note = RuvC_P2
  SITE 89: note = RuvC_P3
  SITE 91: note = RuvC_P4
  SITE 94: note = RuvC_P5
  REGION 213..299: note = Tnp_domain
  SITE 221: note = Tnp_P1
  SITE 251: note = Tnp_P2
  SITE 259: note = Tnp_P3
  SITE 260: note = Tnp_P4
  SITE 272: note = Tnp_P5
MNIIRVGVDIAKSVFHVHGVDRHGKTVWQAKYTRTKWLNALSRKVPAGCPVGMEACASAHHWGRKLQKLGYHARLIPAQFVKPYVKSNKNDKVDAEAICEAMSRPNMRFVALKTAEQQDIQAAHRIREELVGQRTAKANQIRGLVGEYGVISPVGIHQLRRALPKWLEDAENGLSDTFRTLLNSLAEDLRYLDDRIKSLDENITENVQKDPVARRLMTLRGVGPLTASALSGALGDGKAFRKGRDFAASLGLTPRQHSTGGRERLLGISKRGDGYLRKLLVHGARAVLRHVDRKSDGLSHWLKCLVNRKHINVATVALANKTARIAWALVANETAYDETLAAASR

SEQ ID NO: 14691 - protein, 345 aa, unidentified
  source 1..345: note = protein_4f24ae3
  REGION 5..152: note = RuvC_domain
  SITE 8: note = RuvC_P1
  SITE 55: note = RuvC_P2
  SITE 92: note = RuvC_P3
  SITE 94: note = RuvC_P4
  SITE 97: note = RuvC_P5
  REGION 212..300: note = Tnp_domain
  SITE 220: note = Tnp_P1
  SITE 250: note = Tnp_P2
  SITE 258: note = Tnp_P3
  SITE 259: note = Tnp_P4
  SITE 271: note = Tnp_P5
MKHYAGLDVSVKETAVCIVDEGGRICREMKAASHPDDLVEALKNPAWNLARIGLEAGPLSQWLFSGLAGAGLPAICIETRHAKAFLKAQVNKTDRNDARGIAQMMRVNLFRPVHVKTLMSQERRALLTARKLLQEKAIAIENDIRGLLRNFGLKVGIVGAAKFADRIQDLSSDLPELRDIMEVLLAARQKLREQFTVLHERLLSIVKGDTVCRRLMTVPGVGPVVALAFKATGDIPARFKNSKAVGPALGLTPRLHQSGEDHRVGRVSLCGDAMKRTLLYDAAQVLLTVVKKWSWLKAWAMNVAKRRGRQRATVALARRLAVIMHRIWSDGSEFRWAREEATAVI

SEQ ID NO: 14692 - protein, 257 aa, unidentified
  source 1..257: note = protein_bb0a9d8
  REGION 1..65: note = RuvC_domain
  SITE 32: note = RuvC_P3
  SITE 34: note = RuvC_P4
  SITE 37: note = RuvC_P5
  REGION 127..212: note = Tnp_domain
  SITE 135: note = Tnp_P1
  SITE 164: note = Tnp_P2
  SITE 172: note = Tnp_P3
  SITE 173: note = Tnp_P4
  SITE 184: note = Tnp_P5
MIAYLHQRGFEVVLLQPRQVRAFGLYKLRRAKNDQLDAALIAECAARSDARCHAPDSRLIAFGEWLLFIEQIEADIACLKTRRERFTDRRILEEIDRSIGELKSRCKAQLALLQAAVREHDDLARKLDLIESIDGIGIRTALTLVILMPELGRVDREEIAALTGVAPYDDQSGKREGERHIAGGRARVRRALFNAALPASQRWNETLVELYDRLTAKGKSHKAALIACVRKLIIFANTVVKRQTPWTKSAPQQNSCA

SEQ ID NO: 14693 - protein, 288 aa, unidentified
  source 1..288: note = protein_71f3d6b
  REGION 8..150: note = RuvC_domain
  SITE 11: note = RuvC_P1
  SITE 52: note = RuvC_P2
  SITE 92: note = RuvC_P3
  SITE 94: note = RuvC_P4
  SITE 97: note = RuvC_P5
  REGION 191..278: note = Tnp_domain
  SITE 199: note = Tnp_P1
  SITE 229: note = Tnp_P2
  SITE 237: note = Tnp_P3
  SITE 238: note = Tnp_P4
  SITE 251: note = Tnp_P5
MNKDITYFGIDISKSVFDVTDSQGNYYQFDNKVSGFKKFLKSLDSTSHCVMEATGYYHYQLAYYLVENAVQVSVENPLSVKRFIQMKLSKIKTDKSDSKMICEYAKHVELKLWYGDSKEQQESLQITRLLSVYTKQRTMLKNKIHGEEVLGIPSMSVLRSIKRSLKSVQKEIETIERKLLILVKKEHQDLLTRLETIPGIGKKTSLMLVVLTDGFKRFTSGSELCSYSGLTPMIRQSGSSVRGRARISKIGNAKLRNLLFMCSFNACKYNKACKAIYDRIVAKGKSKN

SEQ ID NO: 14694 - protein, 346 aa, unidentified
  source 1..346: note = protein_9915b6f
  REGION 8..165: note = RuvC_domain
  SITE 11: note = RuvC_P1
  SITE 67: note = RuvC_P2
  SITE 107: note = RuvC_P3
  SITE 109: note = RuvC_P4
  SITE 112: note = RuvC_P5
  REGION 208..296: note = Tnp_domain
  SITE 216: note = Tnp_P1
  SITE 246: note = Tnp_P2
  SITE 254: note = Tnp_P3
  SITE 255: note = Tnp_P4
  SITE 268: note = Tnp_P5
MNTLKQVIGIDVGSKELVVCLGKIFANLDKKLCHYGNFRNTDKGLVKLQEWVQAHTSAESAIHFVMEATGVYHEKLAYFLESKGYTISIILPNKISNYFRTLEIKTITDRTCSEAITLFGLERHLEFWRRPDPTYKRLKQLTRERDQLVQERTAVKNQLHAEQTEAEPNTNSLNRIKERIAVLQKQEKEVLTEIKLIVKENSVLKQETDNLISIPGIGLLTAVTVLAETNGFEMIRNKKQLVSYAGLDVKEKQSGTSILGKPTISKRGNRYLRKSLHLPALAAIRHDEHYSNTFTRLVSKHGIKMKAAVAVQRKLLELMFIIFKSKQRYDSQYHIQKQTYNQVATK

SEQ ID NO: 14695 - protein, 341 aa, unidentified
  source 1..341: note = protein_06303cf
  REGION 7..147: note = RuvC_domain
  SITE 10: note = RuvC_P1
  SITE 53: note = RuvC_P2
  SITE 88: note = RuvC_P3
  SITE 90: note = RuvC_P4
  SITE 93: note = RuvC_P5
  REGION 211..296: note = Tnp_domain
  SITE 219: note = Tnp_P1
  SITE 249: note = Tnp_P2
  SITE 257: note = Tnp_P3
  SITE 258: note = Tnp_P4
  SITE 270: note = Tnp_P5
MSEVSMIGLDLAKQVFHVHGSDVTGATVFSRRITRQKLLEFFASQPRCVVAMEACGGAHHWGRELIKLGYEVRLIAPAYVKPFVKRQKNDAADAEAICEAAQRPTMRFVPVKSEQQQASAAVFRARDLFVRQRTQFINALRGLAAEHGWVVPKGLFHARLLMAKIEDSSCPLPQGARQAFLAMIASIRALDEQIVTLDREITTRAREVADARRLMTIPGIGPITATAILALAPPAENFRKGRDFAAWLGLTPRQRSTGGKQKLGQISKMGERTLRRLLIIGSSAVVLQAARRGAPRGSWLEQMMARKPRMLVTVALANKTARIVWAVLASHENYKAPVAAA

SEQ ID NO: 14696 - protein, 338 aa, unidentified
  source 1..338: note = protein_286a3c2
  REGION 6..148: note = RuvC_domain
  SITE 9: note = RuvC_P1
  SITE 52: note = RuvC_P2
  SITE 87: note = RuvC_P3
  SITE 89: note = RuvC_P4
  SITE 92: note = RuvC_P5
  REGION 211..298: note = Tnp_domain
  SITE 219: note = Tnp_P1
  SITE 249: note = Tnp_P2
  SITE 257: note = Tnp_P3
  SITE 258: note = Tnp_P4
  SITE 270: note = Tnp_P5
MKITTVGLDIAKSVFHFVGVNKAGKLVKKKMIKRKDLLHFLAQIEPCLVVMEACGGANYWAREFEKVGHQVKLIAPQYVVPYRQGNKNDYNDALAIAEAAQRPNMRFVQPKPAEQQDIQMLHRMRERLSKQSTALVNQVRGMLAEYGIVITKGKASFRSKLPDILENADNELTAKGRSIFYQLYEEFNGIEERLKRCDNQVQQETKNNHVCQRLESVPGIGPVTATAFYAAVGEGKDFTNGRHFSAWCGLVPKQHSSGGKDNLLGISKRGNAYLRTLFIHGARAVLYHSDGKGDRFSRWAIALAERRGFNRACVAVANKLARIAWVIAAREDEYRMAV

SEQ ID NO: 14697 - protein, 346 aa, unidentified
  source 1..346: note = protein_32a6a15
  REGION 7..149: note = RuvC_domain
  SITE 10: note = RuvC_P1
  SITE 53: note = RuvC_P2
  SITE 88: note = RuvC_P3
  SITE 90: note = RuvC_P4
  SITE 93: note = RuvC_P5
  REGION 212..301: note = Tnp_domain
  SITE 220: note = Tnp_P1
  SITE 250: note = Tnp_P2
  SITE 258: note = Tnp_P3
  SITE 259: note = Tnp_P4
  SITE 272: note = Tnp_P5
MSYSTTVGVDLAKNVIQVSVVSSHGKETFNRSLTRKKFAEFLGKQVLSLVAFESCASAHYWARMAQRHGHETRIIPAKAVVPFRQGHKTDANDALAVAEAARRPKIKDAPMKTVEQQGLQAIQRARELLIQECVALSNHMRGILLEFGITIPQGFASLLRTLPEVLEAGDNELPDFYRPTLHRLYGRMLELREDIEALTKETEVLVKDHPVCNRLTALEGVGPIGATSLYATLGSGQAFARGREFSAYLGLTPRQLSSGGKTNIIGISKKVGNRRLRSILIQGALAYVYRMKEPRSAKDRWLKELIERAGPRRAAVALANKNARTAWALVTQGTEYQRQAKLEVAA

SEQ ID NO: 14698 - protein, 389 aa, unidentified
  source 1..389: note = protein_3f23656
  REGION 4..167: note = RuvC_domain
  SITE 7: note = RuvC_P1
  SITE 63: note = RuvC_P2
  SITE 104: note = RuvC_P3
  SITE 106: note = RuvC_P4
  SITE 109: note = RuvC_P5
  REGION 265..351: note = Tnp_domain
  SITE 273: note = Tnp_P1
  SITE 303: note = Tnp_P2
  SITE 311: note = Tnp_P3
  SITE 312: note = Tnp_P4
  SITE 324: note = Tnp_P5
MIFVGIDVASKKHDCFLMQDETGMIYSKPFSIENDEEGYKKLHTAITNFVEQTNDSNVRIGLESTGHYSNNILNYFYKAGYQVALINPLLTNMDRKATSVRKTKTDKVDSQAICMFLQRNKYDFQPYTPSLYHIEALKSLTRQRFQLVKAKSKYKVILNRLITIVFPEYLNLFSELYGVSSLNILLNYPTPKKLSKAKLSSISKHLHSRCAISAFEIQEIAKKSVGQSNDFYAFQIKQTIETILFFDKQIEVYEKEIASIMKEYGQVILSISGIGEITGAMILSEIGNINKFSSVDKLLAFAGLDPSVYQSGQYEANLKISKRGSKYLRWAIHQASFIIWQHDKTFNDYYHKKINEGKVHNVIIGHIEKKLVRVIYSLLKNNKSFVPQK

SEQ ID NO: 14699 - protein, 330 aa, unidentified
  source 1..330: note = protein_1b35686
  REGION 5..162: note = RuvC_domain
  SITE 8: note = RuvC_P1
  SITE 62: note = RuvC_P2
  SITE 102: note = RuvC_P3
  SITE 104: note = RuvC_P4
  SITE 107: note = RuvC_P5
  REGION 204..289: note = Tnp_domain
  SITE 212: note = Tnp_P1
  SITE 241: note = Tnp_P2
  SITE 249: note = Tnp_P3
  SITE 250: note = Tnp_P4
  SITE 262: note = Tnp_P5
MRVNVGIDISKDSLDFCLLLNQTKSGRKFRSFKNRKIDYFIINDWLLKQAKCQPHEIVITMESTGVYHEAIALFLHSSGFQIIISNPGKAKKFSQSLGLVHKTDKLDSYMLARYGDAQYEHVSFWKPDAENIRSIKVLVRRLSALEKDRLRENNRLEASIISGSYERVLLSIKRMIHILDDEIKEIEHEIDCIISACPVMSKNHNLLMSVVGIGKVMSRELVYLFSAKSFSTAKQAAAFVGLTPRLNESGSFKGRTTLSKIGPSRIRSKIFLAAVSASKYNPDIKAQKHRLLSAGKTKMQALGAAMRKLIQICFGVIKNQTKYQSEILLN

SEQ ID NO: 14700 - protein, 403 aa, unidentified
  source 1..403: note = protein_7371882
  REGION 4..160: note = RuvC_domain
  SITE 7: note = RuvC_P1
  SITE 57: note = RuvC_P2
  SITE 97: note = RuvC_P3
  SITE 99: note = RuvC_P4
  SITE 102: note = RuvC_P5
  REGION 270..356: note = Tnp_domain
  SITE 278: note = Tnp_P1
  SITE 309: note = Tnp_P2
  SITE 317: note = Tnp_P3
  SITE 318: note = Tnp_P4
MVFVGVDWAETHHDVCLLDEQGKVLGKRRIPEGLEGVSRLHELVAEHAEEPAQVVVGIETDRGLLVQALLAAGYQVYAVNPLAVSRYRDRHTTSRAKSDAGDAKLLADLVRTDRHNHRPIAGDSELAAAVQVLARAHQNLVWSRQRQVNQLRNTLREFYPGALEAFGTDLAGVDAIAILEQAPTPVQGRSVSQAKIVSALRKVGRARNLEVKAAEIQAHLRAPQLEVPPLLTQAYGRSVAASVRLLRQMNQELAGLERELAAHFEMHPDAEIYLSLPGLGFVLGARALAEFGDDRTRFVDPKARKNYAGNAPITKASGKSKVVLARVARNRRLADACHLWAFSALTSSPGARRYYDQLRARGKTHQQALRTLANRLVGILHGCLTNRELYREDVAWPTLEVAA

SEQ ID NO: 14701 - protein, 340 aa, unidentified
  source 1..340: note = protein_0940796
  REGION 7..148: note = RuvC_domain
  SITE 10: note = RuvC_P1
  SITE 53: note = RuvC_P2
  SITE 88: note = RuvC_P3
  SITE 90: note = RuvC_P4
  SITE 93: note = RuvC_P5
  REGION 211..299: note = Tnp_domain
  SITE 219: note = Tnp_P1
  SITE 249: note = Tnp_P2
  SITE 257: note = Tnp_P3
  SITE 258: note = Tnp_P4
  SITE 270: note = Tnp_P5
MVNCAAVGVDIAKNVFQVHYVDRETGEIVNKPIKRAKFLEFFANRTACVIGMEACGGAHHWARQLKKMGHEIKLMPAEFVKAFNIRNKNDAADARAIWLAVQQPSKAVAVKTEMQQAMMALHRMREQLVKFRTMQTNGLRGLLTEYGEVMSKGRAKLDQEIPVAFERIAERLPAALVDTLREQWSGLAKLDAQIVEIERRMHEWKKEDKAVKAISEIPGVGLLTATAAVAMMGDPKAFNSGREFAAWAGLVPKQTGSGGKVNLHGISKRGDTYLRTLLIHGARAVLSHAKEPGPWVEQITKRRPKNVVIVALANKMARTIWAVLAHDCPYRKDYVSAKPV

SEQ ID NO: 14702 - protein, 342 aa, unidentified
  source 1..342: note = protein_d99a6a2
  REGION 7..147: note = RuvC_domain
  SITE 10: note = RuvC_P1
  SITE 53: note = RuvC_P2
  SITE 88: note = RuvC_P3
  SITE 90: note = RuvC_P4
  SITE 93: note = RuvC_P5
  REGION 210..300: note = Tnp_domain
  SITE 218: note = Tnp_P1
  SITE 248: note = Tnp_P2
  SITE 256: note = Tnp_P3
  SITE 257: note = Tnp_P4
  SITE 269: note = Tnp_P5
MNVPVRIGMDTSKSVFQLHGVDENEVVVVRRQFRRAEMIRYFERLPPVLVAIESCGSSHHWGRLLQSFGHEVKLIPPQYVKAYVKRGKNDAADAEALCEAVTRPSMRFVPVKSKERQAACMLMTVRERLVSVKSQLSNAFRSYAAEFGIVGPAGRQNVAALIKRVLEDDSLPEMARDLFRLQADEYAAVQARLAKIEAKLLKWHREDDISRRIATIPGVGPIGSSMLSMKAPPPETFRSGRDFAAWLGLTPKDHSTGGRQRLGGITKAGDSILRSTLIVGATALLRHVRKGRHKPTPWLASLLERKPPKLVAVALANKFARIAWRLMISGGVYKQPVATMPT

SEQ ID NO: 14703 - protein, 307 aa, unidentified
  source 1..307: note = protein_08e1286
  REGION 6..152: note = RuvC_domain
  SITE 9: note = RuvC_P1
  SITE 53: note = RuvC_P2
  SITE 91: note = RuvC_P3
  SITE 93: note = RuvC_P4
  SITE 96: note = RuvC_P5
  REGION 211..295: note = Tnp_domain
  SITE 219: note = Tnp_P1
  SITE 249: note = Tnp_P2
  SITE 257: note = Tnp_P3
  SITE 258: note = Tnp_P4
  SITE 270: note = Tnp_P5
MAIIAIGIDLAKNVFAVHGVDAAGKAVLVRPAVRRDALLELIAKLPQCLIGLEACSGAHHWARQFQQFGHQVRIMAAKFVAPYRLSGKRGKNDAADAQAICEAVQRPQMRFVPIKGEDAQGRLSIHRVRQGFIEQRTATINRIRGLLSEYGHVLPQRAEVVRCEAGQCLEDLPGWANTAIGDLLSELHRLDERIAEYDRHVETMAKADDRCRKLMAIPGVGDKTATALMASIGSAHDFKCGKQLAAWLGLVPSQYSSGGKQRLGRITKAGDGYLRMLLILGARAVVAKNAGMAWAMLSKGEAFRPLT

SEQ ID NO: 14704 - protein, 422 aa, unidentified
  source 1..422: note = protein_cb4b90f
  REGION 21..177: note = RuvC_domain
  SITE 24: note = RuvC_P1
  SITE 74: note = RuvC_P2
  SITE 114: note = RuvC_P3
  SITE 116: note = RuvC_P4
  SITE 119: note = RuvC_P5
  REGION 291..376: note = Tnp_domain
  SITE 299: note = Tnp_P1
  SITE 329: note = Tnp_P2
  SITE 337: note = Tnp_P3
  SITE 338: note = Tnp_P4
  SITE 351: note = Tnp_P5
MRILEPLQIFILEESVMLNAVGIDVSKGRSTVAVLQPGGVIVHKPFDVTHKSKDLHDLAQYLGSLEGDTKVVLESTGRYHEPIRNTLSETGLFVCTVNPHLIKNYGNNTIRKVKTDSADAKKIARYTLDNWAELREYTSMDTTRTQLKTLNSQFSFFMKQKTAAKSNLIALLDATYPGVNKLFNSPVRADGSEKWVDFAYSFWHVDCVRKAGIKAFTDHYKRFCKHHGYEFQEAKAKAIYEDSKELIATLPKDAIYKELIQESIRQLNLVSENVEHIRKTMNELASTLPEYDTVMNMYGVGPTFGPQLIAEIGDISRFQHREALTAYAGVDPGKNDSGQEVHNSSHASKCGPSRLRRTLFQIMTTMLQNGVKEDDAVSSFLFKKKAENKPYLVYMTAGANKFLRVYYGKVKECLRNQEQAEQ

SEQ ID NO: 14705 - protein, 357 aa, unidentified
  source 1..357: note = protein_a1d52d2
  REGION 44..163: note = RuvC_domain
  SITE 67: note = RuvC_P2
  SITE 102: note = RuvC_P3
  SITE 104: note = RuvC_P4
  SITE 107: note = RuvC_P5
  REGION 226..313: note = Tnp_domain
  SITE 234: note = Tnp_P1
  SITE 264: note = Tnp_P2
  SITE 272: note = Tnp_P3
  SITE 273: note = Tnp_P4
  SITE 285: note = Tnp_P5
MGAPVGLPRFGGANHASCYDNRHRYCQVGIPGPRRRCCGQVVIRRQLKRRYVLAFFQKLPPCLVGIEACASSHHWSRELQALGHTVRLMPPAYVKPYVKRQKNDMADAEAICEAVTRANMRFVPTKTPEQQSGLMLHRTRHLLIRQQTSVINAIRAHLAEFGIVAPLGRKGVEELLGVIADPSDKRVSDVVRACLAALGSQLLSLKKQILDFDRMIMAWHRSNQTSKRLNCIPGVGPLLATALVASVADPKVFRSGRNFSAWIGLVPRQYSSGGRDRLGSISKQGDRYLRSLFVAGAFAVIRYAKLHGTKYRPWVAALLVRRPTKVAAIALANKLARMAWALMARGERYKYPAGLRV

SEQ ID NO: 14706 - protein, 376 aa, unidentified
  source 1..376: note = protein_a540ecf
  REGION 16..164: note = RuvC_domain
  SITE 19: note = RuvC_P1
  SITE 68: note = RuvC_P2
  SITE 104: note = RuvC_P3
  SITE 106: note = RuvC_P4
  SITE 109: note = RuvC_P5
  REGION 250..337: note = Tnp_domain
  SITE 258: note = Tnp_P1
  SITE 289: note = Tnp_P2
  SITE 297: note = Tnp_P3
  SITE 298: note = Tnp_P4
  SITE 310: note = Tnp_P5
MSIVTHPLVIDNPVAGGVDTHADVHVAAVIDHVGRELGHNSFPTTTAGYAALGTWLAGHGTITVVGVEGTGVYGAGLARSLTAEGLNVVEVDRPDRKSRRLDGKSDPLDAYAAARAALSGRATGTPKSRDGNVEMIRTLRVARSSAIKARAVAITQLKAVIKTAPDDLRAELRDLGGATLINRCARLRPARGQAPVPSPHAKRKPRPGRLLDIAAATKHTLATLARRVHILNDEITGLDDDLTGLVDETAPTLTAMFGVGTDIAGQLLATIGDNPERIATSAAFAHLCGVAPIPATSGKIQNRHRLNSGGDRHANCALYRIVMSRLRYEPRTQTRRDELCARGKTNQDIIRILKRAIAREVYQAIKTDLITIKNGT

SEQ ID NO: 14707 - protein, 340 aa, unidentified
  source 1..340: note = protein_919fee6
  REGION 5..158: note = RuvC_domain
  SITE 8: note = RuvC_P1
  SITE 56: note = RuvC_P2
  SITE 97: note = RuvC_P3
  SITE 99: note = RuvC_P4
  SITE 102: note = RuvC_P5
  REGION 220..306: note = Tnp_domain
  SITE 228: note = Tnp_P1
  SITE 258: note = Tnp_P2
  SITE 266: note = Tnp_P3
  SITE 267: note = Tnp_P4
  SITE 278: note = Tnp_P5
MTVIIGIDPHKASHTAVAIGCDERQLGQIKVRATCQQTARLLAWAEPLGERTWAVESAGGLGYLLSQQLVGAGERVLDVPATLASRVRVLGTGRSDKNDPNDALSVAIAALRSPGLRSVEPANHREVLRLLAKRNHELGRMRNMVVSRLHAALANLSPGGISKELNASDAVRLLGDFDPVTPVQQTRYDLALELLDDVKRLDVQLKESHKRITTAVKASGTSLTELYGVGPILACALIGYTGDVRRFTTRDQFASYAGVAPIEHSSGGRIVHRLSRRGNRQLNHAIHMVAICQIRQTDSEGRVYFERKVAEGKTKREAIRSLKRHVSNAVYRQLLIDTQK

SEQ ID NO: 14708 - protein, 396 aa, unidentified
  source 1..396: note = protein_50c4116
  REGION 19..166: note = RuvC_domain
  SITE 22: note = RuvC_P1
  SITE 68: note = RuvC_P2
  SITE 106: note = RuvC_P3
  SITE 108: note = RuvC_P4
  SITE 111: note = RuvC_P5
  REGION 234..320: note = Tnp_domain
  SITE 242: note = Tnp_P1
  SITE 272: note = Tnp_P2
  SITE 280: note = Tnp_P3
  SITE 281: note = Tnp_P4
  SITE 293: note = Tnp_P5
MLKTNLHNSIDFNGQIFHIGLDVHKKSWAVTIRSMGVQVAHFTQPPGADALARYLQKTFRGGSYYSAYEAGFCGTGIHEQLCKLGIKNIVVHAADIPSTDKQKKNKTDLHDSRAIAEHLQKGNLEGIYVLSREQQELRSLFRLREGKVKDVTRANNRLKSCMAFFGLVLPESINKKEYLSLRALAWLDNYQMVTSAGRITLQQYARELKYQRTQLYQLTCLLRKQIQDTDTKSYEYLLSAPGIGGITAMGLMAEIGDFGRFDDPDEYCSMLGLCPWEDSSGDTIKTKGMQPRCNRHLRPLLIEASWKAIRKSPLLFAYYSKHAARNNKAAIVKVARRLALIARALVIKQQLYQPDYLKEKKEEPKPVKVASKRFFSGITEQHENKQPGNMFMSWPG

SEQ ID NO: 14709 - protein, 349 aa, unidentified
  source 1..349: note = protein_217694a
  REGION 9..150: note = RuvC_domain
  SITE 12: note = RuvC_P1
  SITE 55: note = RuvC_P2
  SITE 90: note = RuvC_P3
  SITE 92: note = RuvC_P4
  SITE 95: note = RuvC_P5
  REGION 217..301: note = Tnp_domain
  SITE 225: note = Tnp_P1
  SITE 255: note = Tnp_P2
  SITE 263: note = Tnp_P3
  SITE 264: note = Tnp_P4
  SITE 276: note = Tnp_P5
MTKPTVAVLGIDLGKNSCSVAGLDDTGRVVLRRRLSREGVVRLTASMPTCVMAMEACCGAHHLGRVLREQGHEIRLMSPEYIQPYVKAQKNDERDAEAIAEAATRPTMRFVELKSEAQLEMQILHRARTRLVTERTALINQLRALLLERGIIVAKGRSRLEQHLASMLDEGAPAPMALSPRTLLLIEDMRLEWRDLDRRIAALSAEFQVRAREDQLASRLATIPGFGALNATALVAAIGSAETFHRGRDLAAWLGLVPRQVTTGGKPRLLGITKRGNVYLRTLLIHGARAALPSLVDSPTTMGEWLRGLSARAHKNKVIVALAGKLARIAWAVLRSGQGYRKGDMPVIA

SEQ ID NO: 14710 - protein, 342 aa, unidentified
  source 1..342: note = protein_e296e2f
  REGION 6..148: note = RuvC_domain
  SITE 9: note = RuvC_P1
  SITE 52: note = RuvC_P2
  SITE 87: note = RuvC_P3
  SITE 89: note = RuvC_P4
  SITE 92: note = RuvC_P5
  REGION 210..294: note = Tnp_domain
  SITE 218: note = Tnp_P1
  SITE 248: note = Tnp_P2
  SITE 256: note = Tnp_P3
  SITE 257: note = Tnp_P4
  SITE 269: note = Tnp_P5
MKDIMIGVDLAKQVFQLHGAQRSGEIVFRKKLSRDQFQGFMAAQPACLVVFEACGSAHHWARQMAVLGHDVKLIAPQYVRPFVKRQKNDAADAEAIVIAARQPEMCFVMPKTKEQQAKAVAFRSRERLVHQRTELVNALRAVFYEYGHAFPIGIAHLKRMEAVVEGPGIDLPELVIDECRDLLAQIAEKTERIAAKTKTLKALAAQTETARLLQTMPGVGPLTALAVEAFAPDMAEFKSGRNFAAWLGLVPRQNSSGGKARLGRLSKAGQSDIRRLLIIGAMTRTTGGARRRIAADGWIGRLLARKPGMLVGIALANRMARQIWAMMTRRQAYRDPAVVAAA

SEQ ID NO: 14711 - protein, 366 aa, unidentified
  source 1..366: note = protein_6b62b00
  REGION 13..166: note = RuvC_domain
  SITE 16: note = RuvC_P1
  SITE 64: note = RuvC_P2
  SITE 105: note = RuvC_P3
  SITE 107: note = RuvC_P4
  SITE 110: note = RuvC_P5
  REGION 228..313: note = Tnp_domain
  SITE 236: note = Tnp_P1
  SITE 266: note = Tnp_P2
  SITE 274: note = Tnp_P3
  SITE 275: note = Tnp_P4
  SITE 286: note = Tnp_P5
MATISSTDRPVVIAIDPHKASWTAVAVGDSRQPLATLRVSVSREGYRSLRRFARTWHGNIWAVEGAHGVGAPLTARLADDGIQVVDVPAKLAARVRLLSVGHGRKNDDADALSVGIAALNATHLNTVSVDAAITALRAIVEHREDLITTRTQTINRLHVLLTRLTPGGLAGTLTANRAAQLLRSIRPRDAATKVLRGLAVDMVVELRHLDRRICKTDSDIESAVKDSGTQLTTLHGIGITSAAKILSRVGPIHRFRSAAAFATYTGTAPIEVSSGEVTRHRLSRAGDRQLNACLHIMALTQIRSDTPGRAYYQRKRSEGKSKREAMRCLKRRLSDVIYRQLVRDARLHGADPGGHSGATLLSRAAS

SEQ ID NO: 14712 - protein, 347 aa, unidentified
  source 1..347: note = protein_c615a81
  REGION 7..149: note = RuvC_domain
  SITE 10: note = RuvC_P1
  SITE 53: note = RuvC_P2
  SITE 88: note = RuvC_P3
  SITE 90: note = RuvC_P4
  SITE 93: note = RuvC_P5
  REGION 212..304: note = Tnp_domain
  SITE 220: note = Tnp_P1
  SITE 250: note = Tnp_P2
  SITE 258: note = Tnp_P3
  SITE 259: note = Tnp_P4
  SITE 271: note = Tnp_P5
MKYVSTIGLDLAKHVFQVHGADIAGSPLFNRKLRRGEVLRFFEKLPSCLVGMEACGGAHYWAREIANLGHDVRLIPPAYVKPFVKRGKTDAADAEAISEAVIRKTMRFVPIKTAEQQADAMVLKTRALLVQQRTQSVNALRAHLTELGIIAAGGLPSVAALMTIVREGEDSRLPAAARFALMAVADQIDTLADQIFKLERAIVTEAKRDEDMRRLTTIPGVGVITAATIKALVPDPGGFKSARHFAAWVGLTPRPHSSGGKERLGGISKMGNPELRVLLVLGATAVLRIARNDDRARPWLKALLARRPFKVAAVALANKMARIIWALLNKGGIYHRPEPLSIAAVAR

SEQ ID NO: 14713 - protein, 342 aa, unidentified
  source 1..342: note = protein_ad31bb8
  REGION 7..148: note = RuvC_domain
  SITE 10: note = RuvC_P1
  SITE 53: note = RuvC_P2
  SITE 88: note = RuvC_P3
  SITE 90: note = RuvC_P4
  SITE 93: note = RuvC_P5
  REGION 211..296: note = Tnp_domain
  SITE 219: note = Tnp_P1
  SITE 249: note = Tnp_P2
  SITE 257: note = Tnp_P3
  SITE 258: note = Tnp_P4
  SITE 270: note = Tnp_P5
MEKANIIGLDLAKRSFQAHGARADGGVVFRKKLSREKVLAFLAEQSRCIVAMEACGSAHHWGRAIGDLGHEVRLIPPVYVKPFVKRQKNDAADAEAICEAAGRPTMRFVAVKTEEQQARAMLFRTRDLLVRQRTQLINALRGHLAEHGVVAPQGPANVKVLSEAIEEMTTSLPLLVVELSRVFLDQIDGLSTKIAELEKATVHEAARGATTRRLQTMPGVGPITAMAIETFAPPMTTFKRGRDFAAWLGLVPRQHSTGGKQLLGKTSKMGQRDIRRLLIIGAIAVVRWACRKGAPDGTWLHRMLARKPRMLVAIALANKMARSIWAMLTKGEDYRAPIAVTL

SEQ ID NO: 14714 - protein, 342 aa, unidentified
  source 1..342: note = protein_8ec46a9
  REGION 6..148: note = RuvC_domain
  SITE 9: note = RuvC_P1
  SITE 52: note = RuvC_P2
  SITE 87: note = RuvC_P3
  SITE 89: note = RuvC_P4
  SITE 92: note = RuvC_P5
  REGION 211..297: note = Tnp_domain
  SITE 219: note = Tnp_P1
  SITE 249: note = Tnp_P2
  SITE 257: note = Tnp_P3
  SITE 258: note = Tnp_P4
  SITE 270: note = Tnp_P5
MKITTVGIDLAKNVIQVHGVDERGKTVLKKSLKRMQVLPFFANLPVCLIGMEACGSAHHWARKLQTLGHTVKLMAPQFVKPYVKTNKNDAADAEAICEAVTRPTMRFVPIKNGDQQAVLALHRARQSFVKARTAQANQIRGLLTEYGIVIPQGISHIATHLPDILEDGENGLPGVFRQLIDRLGLHLKELDHQVRELEIQIQAWHRANEDSRKLAQIPGIGPITASALVASIGDAKHFADGRQLAAWLGLVPRQHSSGGKQTLLGISKRGDTYLRTLLIHGARAVIRVAERKTDHMASWLAGLIGRRNKNVAAVALANKNARVVWALLAQDREYKTNYVPLA

SEQ ID NO: 14715 - protein, 271 aa, unidentified
  source 1..271: note = protein_a1bba7c
  REGION 2..77: note = RuvC_domain
  SITE 17: note = RuvC_P3
  SITE 19: note = RuvC_P4
  SITE 22: note = RuvC_P5
  REGION 140..225: note = Tnp_domain
  SITE 148: note = Tnp_P1
  SITE 178: note = Tnp_P2
  SITE 186: note = Tnp_P3
  SITE 187: note = Tnp_P4
  SITE 199: note = Tnp_P5
MRLIPPSYVKPYVKRQKNDTADAEAIAEAGSRPTMRFVAVKTEEQQARSMVFRTRDLLVRQRTQLINALRGHLAEHGVIAPQGPAHLKTLAAAIDAAASTMPQLVVDVGRVYLEQVDRLSCEVAELEKILRREAQCGEDTRRLQTMPGVGPITAMAVEAFAPPMSTFKRGRDFAAWLGLVPIQHSTGGKQRPGRTSKMGQRDIRRLLIIGAMSVIQWASRRGARPGSWLARMLDRKPLMLVAMALANKMARSVWAMLTKKEDYRDLGSAAA

SEQ ID NO: 14716 - protein, 320 aa, unidentified
  source 1..320: note = protein_fe40271
  REGION 10..152: note = RuvC_domain
  SITE 13: note = RuvC_P1
  SITE 55: note = RuvC_P2
  SITE 95: note = RuvC_P3
  SITE 97: note = RuvC_P4
  SITE 100: note = RuvC_P5
  REGION 190..275: note = Tnp_domain
  SITE 198: note = Tnp_P1
  SITE 227: note = Tnp_P2
  SITE 235: note = Tnp_P3
  SITE 236: note = Tnp_P4
  SITE 248: note = Tnp_P5
MAKPIEPIRIGIDVSKAELVIACSDSKSLEKIANTPRAISRWLKTLPCGTPLAFEATGAYHRTLASLAHQAGFALYLLDGYRLNRYRDGIGNRAKTDPADARLILRYLSKELSELKPWVPPHEAFYRIQSLLRRRASLVHTRVALTQSLGDVPELKNASKRLSNNIKDIERLIERCLKEAMAEVGWRPDAQRCKAIEGIGDLTSVALANTFHRGEFKSSDAFIAYLGMDVRVRDSGKQVGRRKLTKKGDPELRRLLYNAAMSARRTKAWAGQYETYLSQGLKTTQALVKLARKLARIAFALMKNQSTYRPKVPVTCCAVP

SEQ ID NO: 14717 - protein, 345 aa, unidentified
  source 1..345: note = protein_747c5ec
  REGION 6..147: note = RuvC_domain
  SITE 9: note = RuvC_P1
  SITE 52: note = RuvC_P2
  SITE 87: note = RuvC_P3
  SITE 89: note = RuvC_P4
  SITE 92: note = RuvC_P5
  REGION 211..297: note = Tnp_domain
  SITE 219: note = Tnp_P1
  SITE 249: note = Tnp_P2
  SITE 257: note = Tnp_P3
  SITE 258: note = Tnp_P4
  SITE 270: note = Tnp_P5
MKITTVGIDLAKNLFQVHAVDERGNAVLRKQLRRRQVAVFFGNLPPCVIGMEACASAHYWGRTLQRFGHTVRLMAPQFVKPYVKTNKNDVADAEAICEAVGRVNMRFVPIKSVEQQAILSVHRVRQGFVKARTAQANQIRGLLGEFGLVIPQGIINVAKRVPEILEDASNELPVPFRHLIDRLTKHLKDLDRQVKEFEREIIAWHRSSELSRKLEKIPGIGPLAASALVASIADAHSFDNGRQVSAWLGLVPRQSSSGGKPTLLGMSKRGDAYLRTLLIHGARSAILAAKNKADNTQGWLTNLLKRRHPNIAAVALANKNVRTVWAILAYGREFKADYMPTPMTA

SEQ ID NO: 14718 - protein, 342 aa, unidentified
  source 1..342: note = protein_3586756
  REGION 6..147: note = RuvC_domain
  SITE 9: note = RuvC_P1
  SITE 52: note = RuvC_P2
  SITE 87: note = RuvC_P3
  SITE 89: note = RuvC_P4
  SITE 92: note = RuvC_P5
  REGION 211..296: note = Tnp_domain
  SITE 219: note = Tnp_P1
  SITE 249: note = Tnp_P2
  SITE 257: note = Tnp_P3
  SITE 258: note = Tnp_P4
  SITE 270: note = Tnp_P5
MQIHSVGIDLGKTTFHLVALGAAGKVLVRKKFTQKQLLAFTANLQTSLIGLEACSGAHFLGRALRDQGHDVRLIAAQFVKPFVKSNKNDFVDAEAIAEAVERKNMRFVPIKTDDQLDLQAIHRVRDRLVSRRTAVINQIRAFLLERGMVFAQKPAKLKAAMADILENAEANLTPTMRNLINMLWGEWKTVEQQIEELTDKLEQISASDAGCTRIRKIPGIGPIVATAIVAAIGNGAAFRKGRDFAAWLGLVPRQYSTGGKAKLLGISKRGNIYLRKVLIHGARAAAMRIKRDRAPIGAWMDALEARAPCNVLVVAMANKLARIAWAVLSSGGEYRPLASTPA

SEQ ID NO: 14719 - protein, 339 aa, unidentified
  source 1..339: note = protein_e96bcf3
  REGION 6..149: note = RuvC_domain
  SITE 9: note = RuvC_P1
  SITE 52: note = RuvC_P2
  SITE 88: note = RuvC_P3
  SITE 90: note = RuvC_P4
  SITE 93: note = RuvC_P5
  REGION 211..298: note = Tnp_domain
  SITE 219: note = Tnp_P1
  SITE 249: note = Tnp_P2
  SITE 257: note = Tnp_P3
  SITE 258: note = Tnp_P4
  SITE 270: note = Tnp_P5
MTPTVIGLDLAKNIFHVHVVDTSGAAIASKRLTRRELLPFFEAMPPCLVGIEACATAHNWARRLALFGHDVRLIPPAYVKPYVRRGAKNDAADAAAICEAVTRPNMRFVPVKSEENQAFLMLHRARGLLIRQRTMSACAIRAHLAEYGIVVAQGRHRVEALVSKMDEQREYLPDEACFALDALIGQLKALNVGIEEVDARLAQIHETHPICHLLATIPGIGPVTATAFAATIPDPSAFRSGREFAAWLGLTPRQNSSGGKSRLGGITKQGDRYLRHLLVLGARTVVRYPKARSRVDGPWIEALLERRRPMVVAVAVANKLARIIWAMLTTGEFFRSATA

SEQ ID NO: 14720 - protein, 421 aa, unidentified
  source 1..421: note = protein_5fe0f45
  REGION 22..174: note = RuvC_domain
  SITE 25: note = RuvC_P1
  SITE 73: note = RuvC_P2
  SITE 111: note = RuvC_P3
  SITE 113: note = RuvC_P4
  SITE 116: note = RuvC_P5
  REGION 281..367: note = Tnp_domain
  SITE 289: note = Tnp_P1
  SITE 320: note = Tnp_P2
  SITE 328: note = Tnp_P3
  SITE 329: note = Tnp_P4
  SITE 340: note = Tnp_P5
MKSASTTPNTQLPETPPNDVTGGLDWARDDHAVAVVDARGREVVRHSVEHTAAGLVELIDVLRRAGCREVAIERPDGPVVDALLGAGLTVVVISPNQVKNLRGRYGSAGNKDDRFDAFVLADTLRTDRARLRALVPDTPATVALRRTCRARRDLVAHRVGVANQLRAHLRAVFPGAVGLFADIDSPIILAFLTRFTTQEQADWLSPARFGAWLSKQGYSGKVDPAVLHQRLLAAPRGAVGPEATANAPTTRALVAVLVTLLAQIKTLAAEIDTQLDAHADAHIFTSLPRAGRVRAARLLAEIGDCRARFPTHESLTCLAGVAPSTRQSGKIRAVSFRWACDKQLRDAACDFAGDSRRANPWAQDLYQRARNRGHDHPHAVRILARAWLDVIWHCWQAGEAYDPARHGALQRLLNQDQIAAA

SEQ ID NO: 14721 - protein, 313 aa, unidentified
  source 1..313: note = protein_5f6a74e
  REGION 4..122: note = RuvC_domain
  SITE 26: note = RuvC_P2
  SITE 61: note = RuvC_P3
  SITE 63: note = RuvC_P4
  SITE 66: note = RuvC_P5
  REGION 183..268: note = Tnp_domain
  SITE 191: note = Tnp_P1
  SITE 221: note = Tnp_P2
  SITE 229: note = Tnp_P3
  SITE 230: note = Tnp_P4
  SITE 242: note = Tnp_P5
MLKKRLRRAELRAFFAGLSPCLIGMEACASAHYWARELAAVGHEVRLMPPSYVKPYVKRQKNDAADAEAICEAVTRPTMRFVPVKSEDQQAVLMLHRTRDLLIRQRTALSNALRAHLAELGIVERQGVAGLDALMASVEGETEIPPLARKALALLIKELRSMKEQIKAVETEILAWHRGNEASRRLETIPGVGPIIASALAATIADPSVFKSGRQLAAWIGLVPRQNSSGGKERLGRITKQGEPYLRRLLVIGASAVIRFCKTDGSALGGWITALRARRPAMVATVGMANKMARIAWAVLSRGKEFEMRPAMA

SEQ ID NO: 14722 - protein, 338 aa, unidentified
  source 1..338: note = protein_9274a76
  REGION 6..148: note = RuvC_domain
  SITE 9: note = RuvC_P1
  SITE 52: note = RuvC_P2
  SITE 87: note = RuvC_P3
  SITE 89: note = RuvC_P4
  SITE 92: note = RuvC_P5
  REGION 210..293: note = Tnp_domain
  SITE 218: note = Tnp_P1
  SITE 246: note = Tnp_P2
  SITE 254: note = Tnp_P3
  SITE 255: note = Tnp_P4
  SITE 267: note = Tnp_P5
MQVSTVGLDIAKNVFQVHGVDDHGRTVLRRKVSRGQLLKLFTGLEPCLIGMEACATAHHWARELGALGHEVRLMPPAYVKAYVKRNKNDAADAEAICEAVTRPTMRFVPVKSAEAQSVLMLHRARHLLVRQRTAQASAMRAHLAEYGIVAARGISRLRDLLPALDAGARIIPELARQTLLLVAQLIEALTIQIRKIDTELLRWHRINPVSQRLETIPGIGFITAMAASVRDARAFRSGRQFAAWLGLVPRQNSSGGKDRLGGISKMGDRYLRHLLVIGATAVVRYTRRKTTTISLWANRLLERKPARLVTVAVANKMARIVWAVMARQENYRTVPVAA

SEQ ID NO: 14723 - protein, 411 aa, unidentified
  source 1..411: note = protein_8e53598
  REGION 5..163: note = RuvC_domain
  SITE 8: note = RuvC_P1
  SITE 62: note = RuvC_P2
  SITE 102: note = RuvC_P3
  SITE 104: note = RuvC_P4
  SITE 107: note = RuvC_P5
  REGION 273..373: note = Tnp_domain
  SITE 281: note = Tnp_P1
  SITE 311: note = Tnp_P2
  SITE 319: note = Tnp_P3
  SITE 320: note = Tnp_P4
  SITE 333: note = Tnp_P5
MNPVVGLDISKGESQVQAFLDKGKPFRKSFKVSHTLEGLGSLIEFLEQVQQETGQRPCVILEATGHYQTPVVQYLEERGYLLIIINPLISYKAKSTSLRKVKTDAVDAFHLCELYYKEELEPYKKRGIQLLNLRNLTRQHENITGVMIQTKLQFQAVLDQVFPEYRGVFGDLYSVVSLLILKEFPSSEDILKADDETISRKIKELCKSRSIRWANEKAIKLKEAAIRNPFEKTVYQSHILSLGIYINIILQYKEHLSRLESEIDALAKDIEEYNIIKSIPGIGEKIAATIISEIGEIDRFNHPKKLVAFAGVDPSVFESGKFRATQNRITKRGSSRLRHALYMAVRCAIRDCRKKKTTDEIIPRNQKMRKYYDKKREEGKPFKVAVIACVNKLLHWVFALLKSKTTFQDIA

SEQ ID NO: 14724 - protein, 405 aa, unidentified
  source 1..405: note = protein_bcda791
  REGION 4..160: note = RuvC_domain
  SITE 7: note = RuvC_P1
  SITE 57: note = RuvC_P2
  SITE 97: note = RuvC_P3
  SITE 99: note = RuvC_P4
  SITE 102: note = RuvC_P5
  REGION 274..361: note = Tnp_domain
  SITE 282: note = Tnp_P1
  SITE 312: note = Tnp_P2
  SITE 320: note = Tnp_P3
  SITE 321: note = Tnp_P4
  SITE 334: note = Tnp_P5
MNAVGIDVSKGKSTVTIRRPGNEVLLPPCDFPHTQSCINGLIEQIKSLDGETKVCMEHTGRYYEPVASWLSDAGIFVSAVNPILIKEFGDDSLRTPKTDKADAKKIARYTLDRWANLKQYNHMDEIRNQLKTMNRQFGFYMDHKTAMKNNLIALLDQAYPGANDFFDSPARSDGSQKWVDFVHTYWHVDCVRGRSPEAFAQHYQDWCRRKGYNFSASKAEAIYSRSSDLIAVFPKDNTTKMLIRQAVAMLNATSATVESLRQKMDETASALPEYPVVMAMHGVGPTLGPQLMAEIGDVTRFTHREALTAFAGVDPGSRQSGKHEQKSVRTSKKGSPNLRKTLFQIMAGLIKRSPADDPVYAFMDKKRAQGKPYYVYMTAGANKFLRIYYGRVKEYLSTDTEADNA

SEQ ID NO: 14725 - protein, 348 aa, unidentified
  source 1..348: note = protein_0580567
  REGION 13..155: note = RuvC_domain
  SITE 16: note = RuvC_P1
  SITE 59: note = RuvC_P2
  SITE 94: note = RuvC_P3
  SITE 96: note = RuvC_P4
  SITE 99: note = RuvC_P5
  REGION 218..307: note = Tnp_domain
  SITE 226: note = Tnp_P1
  SITE 256: note = Tnp_P2
  SITE 264: note = Tnp_P3
  SITE 265: note = Tnp_P4
  SITE 277: note = Tnp_P5
MNQHSKAGDIRTIGIDLAKNVFHLHGVDGEGHVVMRKKLSRSKLLELMANLPAAHVGMEACGGAHDWARRLMAMGHDVRLISPQFVKPYVKSNKNDSADAEAICEAVQRPGMRFVPIKSISQQDIQSLHRARSLAVSHRTAQVNQIRGLLHEYGIVTAKSVAALRKTVPEILEDADNALTPMFRDLLCGLWDEMKRLDMRIQAYDAEIKRLSEQSDICRRLMTIPGIGPMTATAMEAAVSDGKAFKSGREMAAWLGLVPRQHSTGGKPRLLGISKRGDTYLRMLLIHGARAALRWTDKKPDTRSRWASELKERRGQNIAAVALANKMVRTAWALIRRNETYRTTPVTA

SEQ ID NO: 14726 - protein, 391 aa, unidentified
  source 1..391: note = protein_d7684cd
  REGION 1..151: note = RuvC_domain
  SITE 44: note = RuvC_P2
  SITE 90: note = RuvC_P3
  SITE 92: note = RuvC_P4
  SITE 95: note = RuvC_P5
  REGION 262..349: note = Tnp_domain
  SITE 270: note = Tnp_P1
  SITE 300: note = Tnp_P2
  SITE 308: note = Tnp_P3
  SITE 309: note = Tnp_P4
  SITE 322: note = Tnp_P5
MQSDGSKHSSFSVPNNRNGANIIVDRVTSVLLLQDIPQVVIGMEATSVYGDNLMRFLRESGGLGHFDRHMYMLNPKQVKKFRDAYSDLPKNDYVDSFVIADHLRFGRINKEVYMDDYKYQALKMYTRARHQLVQELTREKQRLLNTVFISFSGLTQEKIFSNKFGAASMALVEEFSSLDELAYMNTDALADFIREHGKNHFENPEEIAEAVQRAAKLSYRPPQVIADAARQMIAISMNTIRLLQKQVKEYDKAIEKMLETIPQTLTSIKGIGNVYAAGIIAEIGDINRFPGQASVAKYAGLVWTQHQSSDFEAEDRRMIQGGNHHLKYYLCEAANALRRCDPEFKRFYSLKYKEANKHNHKRALALTARKLVRLVYTLLKTNRLYIPPEEY

SEQ ID NO: 14727 - protein, 402 aa, unidentified
  source 1..402: note = protein_9cd228c
  REGION 7..172: note = RuvC_domain
  SITE 10: note = RuvC_P1
  SITE 63: note = RuvC_P2
  SITE 103: note = RuvC_P3
  SITE 105: note = RuvC_P4
  SITE 108: note = RuvC_P5
  REGION 272..357: note = Tnp_domain
  SITE 280: note = Tnp_P1
  SITE 310: note = Tnp_P2
  SITE 318: note = Tnp_P3
  SITE 319: note = Tnp_P4
  SITE 330: note = Tnp_P5
MDTSLLVAVDVGSRFHQVAVDDTFGRLLDEFRIDHDPAGFHTFFERVERHRAGPEQPVRVAMEGYNGWARPLDRQAQERGWQLYNVNNLKLARYKEIFPAPAKTDAIDARRMLELFAFDGRQGVARDVLQRVAAVPVEHRRLQYLTRRRRGLVEERAGRLTRLRCDLQAYAPGLLAITGSVGNRWFLNLLTCRERLTALVRLRAKTLAGLRGVGRCYLARIRQWQRTACFSPDIAFAEVDVVDDARAILALDARIGVLDAEIAQVSAACEPARILRSIPGFGATGAAELIGEIGTLDRFRSEAGLALYLGMAPLDHSSGLHVRGRRPRCVNARCQAALMTCVVRHMACVADSRTYYDRKRAQGKRHNQAVRALGRQLVRVIWHMLRDGREYQLTTTHEPTAT

SEQ ID NO: 14728 - protein, 347 aa, unidentified
  source 1..347: note = protein_b051e99
  REGION 6..147: note = RuvC_domain
  SITE 9: note = RuvC_P1
  SITE 52: note = RuvC_P2
  SITE 87: note = RuvC_P3
  SITE 89: note = RuvC_P4
  SITE 92: note = RuvC_P5
  REGION 214..299: note = Tnp_domain
  SITE 222: note = Tnp_P1
  SITE 252: note = Tnp_P2
  SITE 260: note = Tnp_P3
  SITE 261: note = Tnp_P4
  SITE 273: note = Tnp_P5
MTIAVLGIDLGKNSCSVAGLDETGRVVLRRRLNRDGVVRLASKLPACVMAMEACCGAHHLGRVLRDQGHEVRLMSPEYVQPYVKAQKNDERDAEAIAEAATRPTMRFVELKSEAQLDAQILHRARTRLVGQRTALINQLRAVLLERGIVVAKGRRQLELRLAELLDGAGERSPTLSARTLLLIEDMRLEWTELDRRISALTAEFVARARDDQAARRLTTILGFGALNATAMVAAIGMGETFRSARDLAAWLGLVPRQATTGGKPRLLGITKRGNAYLRTLLIHGARAVLPSLSASSTAMGEWLRALLGRAHKNKVVVALAGKLARIAWAVLRSGESYTAKAGRPATA

SEQ ID NO: 14729 - protein, 340 aa, unidentified
  source 1..340: note = protein_2301037
  REGION 5..158: note = RuvC_domain
  SITE 8: note = RuvC_P1
  SITE 56: note = RuvC_P2
  SITE 97: note = RuvC_P3
  SITE 99: note = RuvC_P4
  SITE 102: note = RuvC_P5
  REGION 220..306: note = Tnp_domain
  SITE 228: note = Tnp_P1
  SITE 258: note = Tnp_P2
  SITE 266: note = Tnp_P3
  SITE 267: note = Tnp_P4
  SITE 278: note = Tnp_P5
MTVIIGIDPHKAFHTAVAIGCDERQLAEIRVRATCQQTTKLLVWAELLGPRTWAVESAGGLGYLLSQQLVRAGEEVLDVPATLASRVRVLGTGRSNKNDPNDALAVAIAVLRSSGLRSVEPANHSEVLRLLAKRNHEIGRLRNIVVSRLHAALANLSPGGISKELNASDAVRLLNDLEPVTAVEQTRYDLAHELLDDVERLDVQLKESHRRIKVAVKASGTSLTELYGVGPILACELIGYTGDVRRFTTRDKFASYAGVAPIELSSGGRIVHRLSRRGNRQLNHAIHMVAICQIRQKDSEGRIYFEKKVAAGKTKREAIRSLKRHVANAVYRQLLIDAHK

SEQ ID NO: 14730 - protein, 405 aa, unidentified
  source 1..405: note = protein_82f4aa1
  REGION 4..160: note = RuvC_domain
  SITE 7: note = RuvC_P1
  SITE 57: note = RuvC_P2
  SITE 97: note = RuvC_P3
  SITE 99: note = RuvC_P4
  SITE 102: note = RuvC_P5
  REGION 274..361: note = Tnp_domain
  SITE 282: note = Tnp_P1
  SITE 312: note = Tnp_P2
  SITE 320: note = Tnp_P3
  SITE 321: note = Tnp_P4
  SITE 334: note = Tnp_P5
MNAVGIDVSKGKSTVTIQRPGDVVVMPPCDIPHTQSAINCLIEQLQRLDGETKVCMEHTGRYYEPVATWLSDAGIFVSAVNPILIRDFGNDSLHTPKTDKADSKKIARYTLDRWAKLKQYGSMDKTRNQLKTMNRQFGFYMAQKTAMKNNLIALLDQTYPGANDFFDSPARSDGSQKWVDFVYTFWHADCVRSKSLNSFTEHYQSWCKRKGYNFSADKAEKIYHLSSDLIAVFPKDDTTKMLIRQAVALLNTASETVESLRLKMNELASTLPEYPVVMDMNGVGSTLGPQLIAEIGDVTRFTHREALTAFAGVDPGKNDSGKHIQNSVRTSKKGSPYLRKALFQVMDSLIKRSPVDDPVYAFMDKKRAQGKPYYVYMTAGANKFLRIYYGRVREYLSTLPENKEI

SEQ ID NO: 14731 - protein, 397 aa, unidentified
  source 1..397: note = protein_73b1cb8
  REGION 3..159: note = RuvC_domain
  SITE 6: note = RuvC_P1
  SITE 55: note = RuvC_P2
  SITE 96: note = RuvC_P3
  SITE 98: note = RuvC_P4
  SITE 101: note = RuvC_P5
  REGION 265..351: note = Tnp_domain
  SITE 273: note = Tnp_P1
  SITE 303: note = Tnp_P2
  SITE 311: note = Tnp_P3
  SITE 312: note = Tnp_P4
  SITE 324: note = Tnp_P5
MWAGIDVGKEHHWVCVVDSNGNMVFSRKVVNDERTIGDLVAEIDTLAGEVSWTVDLSNVYAALVLTVLADAGKTVRYLAGRQVWQASATYRGGESKTDAKDARVIADQSRMRGADLPVLRPGDDLITELRMLTAHRADLVADRTRTINRLRQQLLAVCPALERVAELTQDRGWAVLLAHYQRPKAIRRTGVSRLTKVLAAAGVRNAATIAAAAVTAAKAQTVRLPGEDVGAGLVAELAQGVMNLDERIKHTDADIEERFRRHPLAEVITSLPGMGFRLGAEFLAVVGDPALLESPDQLAAWAGLAPVSKDSGKRTGRLHTPKRYSRRLRRVMYMSALTAIRCDPTSKAYYQRKRDQGKRAIPATICLARRRVNVLYALIRDNRTWHPDTPQIATAAA

SEQ ID NO: 14732 - protein, 401 aa, unidentified
  source 1..401: note = protein_67f742d
  REGION 5..162: note = RuvC_domain
  SITE 8: note = RuvC_P1
  SITE 59: note = RuvC_P2
  SITE 99: note = RuvC_P3
  SITE 101: note = RuvC_P4
  SITE 104: note = RuvC_P5
  REGION 273..362: note = Tnp_domain
  SITE 281: note = Tnp_P1
  SITE 311: note = Tnp_P2
  SITE 319: note = Tnp_P3
  SITE 320: note = Tnp_P4
  SITE 333: note = Tnp_P5
MKYGVGIDISKGKSTVAILSVEGEIIEEPFEITHNIEGLNLLEEKMKIFPKENIRIVMEETGTYHLPVLGYLLDKDYFVTTENAFKIKKYLDRGLRKAKTDKKDAYKLAEYACENWYKINKVRENDEIYDNLKFLSRQYLSTIAVQVKQKVNFSNLCDLLFPGYYQLLDDNTFMLGLEIFKKYFHPEIVKNKKENSFIDEVDKLARELGHKGAGISLATKIYALAQTTISPRPNNQYTQLSATSCVDALIITIKTSNTIITEMDKLARELPEYDVINEITGCGKKLTSRVIAEIGDIRRFKNAGSIIAYAGLDAPPYQSGQFEATNRHISKRGNKYLRKTGYEIMKSIKGSCKEDNELKAYIIKKENEGKLKKVAKIAGLNKFIRMYYGKVKKKYRELNIW

SEQ ID NO: 14733 - protein, 346 aa, unidentified
  source 1..346: note = protein_cb3c5e6
  REGION 6..147: note = RuvC_domain
  SITE 9: note = RuvC_P1
  SITE 52: note = RuvC_P2
  SITE 87: note = RuvC_P3
  SITE 89: note = RuvC_P4
  SITE 92: note = RuvC_P5
  REGION 211..296: note = Tnp_domain
  SITE 219: note = Tnp_P1
  SITE 249: note = Tnp_P2
  SITE 257: note = Tnp_P3
  SITE 258: note = Tnp_P4
  SITE 270: note = Tnp_P5
MKITTIGIDLAKTVFAVHGVNAHGKAALKKQLKRNQMLTFFANLEPCLIGMEACGSAHHWARQLTALGHTMRLMAPQFVKPYVKTNKNDAADAEAICEAVARPSMRFVPGKTAESQALLAVHRARQGFVKARTAQANQIRGLLSEFGLVIPQGITSIAQQIPRILEDAENGLPDTMRPLIARLAAHLGELDRQVDELEAQIQAWHRQNEASCRLQKIPGIGPITASALVASIGDAKNFANGRQLAAWLRCVPRQHSSGGKPTLLGISKRGDTYLRTLLIHGARAVIRVSAGKVPTDAWLGRLLDRRHKNIAAVALANKNARTVWALLVHGRDYRPDYAASSTPVAA

SEQ ID NO: 14734 - protein, 438 aa, unidentified
  source 1..438: note = protein_66097bc
  REGION 16..175: note = RuvC_domain
  SITE 19: note = RuvC_P1
  SITE 74: note = RuvC_P2
  SITE 114: note = RuvC_P3
  SITE 116: note = RuvC_P4
  SITE 119: note = RuvC_P5
  REGION 290..384: note = Tnp_domain
  SITE 298: note = Tnp_P1
  SITE 328: note = Tnp_P2
  SITE 336: note = Tnp_P3
  SITE 337: note = Tnp_P4
  SITE 350: note = Tnp_P5
MSNKVIFNLDELFISVGIDVGADFSWMSIALPNQQFVGKPYKILHNSIDSLTTAVSKIKEAEELYSLESRIFLESTGIYHYPLFCYLRDKGFNCSVINPIITKNSTNINIRKVHNDRFDSKKAALVGLKPDLKVSLMPSDLALNCRNLCREYYDLMDNRSAYVNKLQGELRMAFPQYLGIFSKVTINTSLTLLETYTSPSAFLEADKQEIIDIIKSTARFGLTYAQNKYNALIQAATDANQFGYIIDSNIKRIRLYISFIRKYDEELNSILESLHELVDAHEDADFVKQIHLIETFKGAGFLSAVSIMGEIGDFSAFSKPKQLFAYFGLDPAVKQSGKFEGTKVQMSKRGSAIARCVIHTLTLQSISISRNGEAKNPVLREYYIKKCDSKPKLVAMGAVSHKVCNMIFAILRDNKPFKIIAPQEHIKQYNAAKCDIAA

SEQ ID NO: 14735 - protein, 344 aa, unidentified
  source 1..344: note = protein_91b8950
  REGION 4..157: note = RuvC_domain
  SITE 7: note = RuvC_P1
  SITE 55: note = RuvC_P2
  SITE 96: note = RuvC_P3
  SITE 98: note = RuvC_P4
  SITE 101: note = RuvC_P5
  REGION 219..304: note = Tnp_domain
  SITE 227: note = Tnp_P1
  SITE 257: note = Tnp_P2
  SITE 265: note = Tnp_P3
  SITE 266: note = Tnp_P4
  SITE 277: note = Tnp_P5
MITIGIDPHKSSHTAVAIDAAGHKIGQRKFVVNAGTFGQLVRWCEPWSERRFAVEGAGGLGRTLAQQLAAAGEDVVDVPSTLSARARLLATGGDRKTDPADALHVAQVALFRADLRKVTSEGQSTILRLLTERHDDLVNERTRLTNRLHALLRDLLPGGAPTRLSADKAAALMKGIRPITATDNCRRDLARDLLADLRRLDRQVRDNEAQMREALAASRTTLTALPGLGTVLAARVLGHIGDISRFPTEHHFASYTGSAPLDASSGRHVRHRLNTGGNRALNSALHIIAVCQIRDGGRGQEYYLRKIAEGKTPAEARRALKRRLSNVVYRIMKRDQRHQLAAVA

SEQ ID NO: 14736 - protein, 344 aa, unidentified
  source 1..344: note = protein_6f208fd
  REGION 5..152: note = RuvC_domain
  SITE 8: note = RuvC_P1
  SITE 55: note = RuvC_P2
  SITE 92: note = RuvC_P3
  SITE 94: note = RuvC_P4
  SITE 97: note = RuvC_P5
  REGION 213..299: note = Tnp_domain
  SITE 221: note = Tnp_P1
  SITE 251: note = Tnp_P2
  SITE 259: note = Tnp_P3
  SITE 260: note = Tnp_P4
  SITE 272: note = Tnp_P5
MKYFTGIDVSLRSVSICVVDEAGAVRYETKVAADVDLIVEYLRRCSPAIKQVGFEAGTLTQYLTYGLQAAGFEVICLEARQVAATLAAMRNKTDRNDARGLAQILRSGWYRRVHVKSIESHQVRALLSSRKTILTKCVDLENELRGLLKIFGVRLAPRVGHGSFDQAVRTTVTADPLLARALVPLLDARTVLYKTYLKLDNAVKAIVRSDPICQRLMSVPGVGPVTSLTFKVGVDDPGRFRSSRTVAAHFGLTPRRYQSGETDNPGRISKAGDADVRRALYTAAHALMTRSDAWSTLKAWGLRLAKIRGHRRAVVAVARKLAVILHRMWLDSTRFRASRIEVAV

SEQ ID NO: 14737 - protein, 331 aa, unidentified
  source 1..331: note = protein_b9b11a3
  REGION 5..151: note = RuvC_domain
  SITE 8: note = RuvC_P1
  SITE 55: note = RuvC_P2
  SITE 95: note = RuvC_P3
  SITE 97: note = RuvC_P4
  SITE 100: note = RuvC_P5
  REGION 196..283: note = Tnp_domain
  SITE 204: note = Tnp_P1
  SITE 234: note = Tnp_P2
  SITE 242: note = Tnp_P3
  SITE 243: note = Tnp_P4
  SITE 256: note = Tnp_P5
MPVNVGLDISAYTVDVVIRQGDKASQPKQYKQTVEGHATLISQLKKAKPALIVMEATGIYYFDLAVALADAGLPVAVINPKSFRHFAELKLQTSKSDGIDADLLAEYGQRMAPALWTPPDQQHQALRGLGRQINRLVGNRAQAKNRLHALKATRSTPALLIEDEQDGIATLERRIERLRQAALELMAEAPVLQRQYEHLLAAKGVGEATALSVLAELCVLPRDLKSSQVSRHAGLDVRQHQSGTSVNRPGRISKAGNVYLRSALYMPALSAVRYDLNAKAFYEALVARGKKKIQALVAVMRKYLTGLWACLKTDTPFDSSRLFQPQESQNA

SEQ ID NO: 14738 - protein, 343 aa, unidentified
  source 1..343: note = protein_f2c2b18
  REGION 6..149: note = RuvC_domain
  SITE 9: note = RuvC_P1
  SITE 54: note = RuvC_P2
  SITE 89: note = RuvC_P3
  SITE 91: note = RuvC_P4
  SITE 94: note = RuvC_P5
  REGION 213..299: note = Tnp_domain
  SITE 221: note = Tnp_P1
  SITE 251: note = Tnp_P2
  SITE 259: note = Tnp_P3
  SITE 260: note = Tnp_P4
  SITE 272: note = Tnp_P5
MKLSRIGIDLAKNVFQLHGIDRHGKTVWRRRLKRDQWLEVLLDKVEPGCEIGMEACASAHHWARELQKRGFVVRLIPPQFVKPYVKSNKNDANDAEAICEAMSRPNMRFVAVKRVEQQDIQATHRIRAELMTQRTAKANQIRGLVAEYGLVAPLTLRALRVAIPEWLEDAENGLTDHFRTLLHGVWVDLLALDDRVLELDREIERLANSNEVTKRLQQLRGVGAMVATALVATVGNADQYHKGRQMAASLGLTPKQHSSGGKDRLLGITKRGDVYLRTLLIHGARSVVTHAKHRDDRLSRWVTSIATRRHPNVAAVALANKTARMAWAMLRNETNYDPDFAIR

SEQ ID NO: 14739 - protein, 345 aa, unidentified
  source 1..345: note = protein_659e577
  REGION 6..147: note = RuvC_domain
  SITE 9: note = RuvC_P1
  SITE 52: note = RuvC_P2
  SITE 87: note = RuvC_P3
  SITE 89: note = RuvC_P4
  SITE 92: note = RuvC_P5
  REGION 211..297: note = Tnp_domain
  SITE 219: note = Tnp_P1
  SITE 249: note = Tnp_P2
  SITE 257: note = Tnp_P3
  SITE 258: note = Tnp_P4
  SITE 270: note = Tnp_P5
MELHTIGIDLGKTVFHLVGVNLRGEVVVRKKFSRKQLLHFTANLRVELIGMEACGGAHFLGRALQEQGHEVRLMPAQYVKPYVKTNKSDYLDAEAIAEAVGRPRMRFVPIKTDDQLDLQSLHRVRERWVARRTAVINQIRGLLLERGITLRKGRCHVDAALPGILEDASAKLSGALRVLLAQLRLELDHLETRINEADAVIKKTVGENEACRRLVAIPGVGPVTATAVIAAIGNGAAFRKGREFAAWLGVVPREYSTGGKQKLLGISKRGNSYLRRLFVQGARAVLQQSAKQSSGLSAWLAQLTSRTHHNVAGVALANKLARMAWAVLTKNEHYRPPMLASAATA

SEQ ID NO: 14740 - protein, 343 aa, unidentified
  source 1..343: note = protein_bf516d1
  REGION 7..149: note = RuvC_domain
  SITE 10: note = RuvC_P1
  SITE 53: note = RuvC_P2
  SITE 88: note = RuvC_P3
  SITE 90: note = RuvC_P4
  SITE 93: note = RuvC_P5
  REGION 211..303: note = Tnp_domain
  SITE 219: note = Tnp_P1
  SITE 249: note = Tnp_P2
  SITE 257: note = Tnp_P3
  SITE 258: note = Tnp_P4
  SITE 270: note = Tnp_P5
MTKISTIGLDLAKNVFQIHGVDGSGKVVLRRQLRRGQVEKFFAELPPCLVGMEACGSAHHWARVIGRHGHEARLMPPGYVKPYVKRNKNDGRDAEACCEAVGRPTMRFVAVKSIEQQATLAVHSTRALLTRQRTMAANALRAALSEIGIVAAQSYKGLRELIARLEQPSDEIPELMRAALSVLAKHWQALDADERVLEQQIVKASRHNQDAQRLMEVPGVGPIIASTVLAKVPDAKLFRSGRGFAAWIGLTGRDHGTGGKHRPGHISKQGDRVLRALLITGASAHLRQQKARGVTDPWLRELLARRPYKVVMVALAARTARILWALLAKGEAYRDRASAPAAA

SEQ ID NO: 14741 - protein, 349 aa, unidentified
  source 1..349: note = protein_6f0f0c9
  REGION 7..148: note = RuvC_domain
  SITE 10: note = RuvC_P1
  SITE 53: note = RuvC_P2
  SITE 88: note = RuvC_P3
  SITE 90: note = RuvC_P4
  SITE 93: note = RuvC_P5
  REGION 212..298: note = Tnp_domain
  SITE 220: note = Tnp_P1
  SITE 250: note = Tnp_P2
  SITE 258: note = Tnp_P3
  SITE 259: note = Tnp_P4
  SITE 271: note = Tnp_P5
MGEVSTIGVDIAKSVFQIHGVDADGMVVIRRRVGRAKVLEFFAGLPPCLVGMEACATAHQWARELKKFGHDTRLMPPTYVKAYVKRGKNDAADAAAICEAVTRPSMRFVPIKSVEQQSALMLHRTRDLLIRQRTQLINALRAHLAELGLVAAKGHEGLHQLVTAVAESSDERLPSNARFACQAIVAQLSAVQTQINGIDTRITQAHRANADSKRLDAIPGFGVILSTAVVATMTDPKAFKTGREFAAWIGLVPRQNSTGGKERLGSISKQGDRYLRRLLVLGAISIVGTARTRPDKYPWVTELLGRRPAKVVAVALANKMARTAWAVLARGETYRAPTRSSSAAIAAAA

SEQ ID NO: 14742 - protein, 343 aa, unidentified
  source 1..343: note = protein_01a9c4f
  REGION 6..147: note = RuvC_domain
  SITE 9: note = RuvC_P1
  SITE 52: note = RuvC_P2
  SITE 87: note = RuvC_P3
  SITE 89: note = RuvC_P4
  SITE 92: note = RuvC_P5
  REGION 211..296: note = Tnp_domain
  SITE 219: note = Tnp_P1
  SITE 249: note = Tnp_P2
  SITE 257: note = Tnp_P3
  SITE 258: note = Tnp_P4
  SITE 270: note = Tnp_P5
MQIRSVGIDLGKTTFHLVALDDNGKVLLKKKFTQKQLIVFTANMQSSLIGMEACAGAHFLGRALRAQGHDVKLIPAQFVKPFVKSNKNDFIDAEAIAEAVGRQNMRFVSIKTDDQLDLQALHRVRERVMQRRTAVINQIRAFLLERGMVFAKSPIRLREAIPSVLENVEENLTPRMRNLIAMMWSEWKELELQLEEMNAEVERIASSDAACQRLRQIPGIGPLVATAIVASIGNGSAFRKGREFAAWMGLVPRQHSTGGKARLYGISKRGNRYLRMILVHGARAVVLRSKRDRIAMGAWLTSLEGRAPRNVLIVAMANKLARIAWAVLSTGQDYRVVPAETAA

SEQ ID NO: 14743 - protein, 406 aa, unidentified
  source 1..406: note = protein_fc4db3f
  REGION 6..164: note = RuvC_domain
  SITE 9: note = RuvC_P1
  SITE 59: note = RuvC_P2
  SITE 101: note = RuvC_P3
  SITE 103: note = RuvC_P4
  SITE 106: note = RuvC_P5
  REGION 278..363: note = Tnp_domain
  SITE 286: note = Tnp_P1
  SITE 316: note = Tnp_P2
  SITE 324: note = Tnp_P3
  SITE 325: note = Tnp_P4
  SITE 338: note = Tnp_P5
MNMNAVGIDVSKRKSTVAVLRPGGDAVVKPFDIPHLDDAFQSLINLLHSLDGETRIVMECTGHYYEPIARTLSQAGFFVSAVNPQIICNFQGQDNPLRRVKTDKADSVKIARYALDSWAKLKQYSLMDEIRTQLKTMNRQFDFYMKHKTAMKNNLIGLIDQTYPGANTYFDSPAREDGSQKWVDFLGTYWHVDCVRKMSLKAFTDHYQKWCSRKKYNFSQTKAEEIYGTAKELIPVLPKDNFTKRIIKQAIEQLNTASQTVEQLRSLMNETAAQLPEYPVVMAMKGVGSSLGPQLMAEIGDVTRFTHKGAITAFAGVDPGVNNSGDYSQKSVHASKHGSPVLRKTLFQIMDVLIKTKPDDPVYLFMDKKRAQGKPYYVYMTAGANKFLRIYYGRVKEYLSSLPVSE

SEQ ID NO: 14744 - protein, 336 aa, unidentified
  source 1..336: note = protein_b2f7edf
  REGION 6..148: note = RuvC_domain
  SITE 9: note = RuvC_P1
  SITE 52: note = RuvC_P2
  SITE 87: note = RuvC_P3
  SITE 89: note = RuvC_P4
  SITE 92: note = RuvC_P5
  REGION 210..296: note = Tnp_domain
  SITE 218: note = Tnp_P1
  SITE 248: note = Tnp_P2
  SITE 256: note = Tnp_P3
  SITE 257: note = Tnp_P4
  SITE 269: note = Tnp_P5
MQITTIGIDIAKKLFHVVCCNSKNKIIRKKMLRRSQLMDYLSNIPRCLVAMEACATSNYWGREIMALGHQVKLLPPQHVKAFLTGNKNDYNDAHAIVVTSGQAHIKAVPVKSVEQQDNQIVHAVRELAIRQRTALCNQIRGLLLEYGISVSKGINNLRKEVVHLQDDTSALSQTFKQVLSLLYNQLSLLDDSIAQHNQRITQQANHHETCLRLQTIPGVGPLVATSIFNEIGHGSAYKRGREVSASIGLVPRQHSTGGKERLLGISKRGNRYLRCLLIQGAKAVVFRAKHKTDKLSLWINRIVVTRGHNKACVAYANKMARIAWAITVSGESYQAI

SEQ ID NO: 14745 - protein, 419 aa, unidentified
  source 1..419: note = protein_e47b1b0
  REGION 29..183: note = RuvC_domain
  SITE 32: note = RuvC_P1
  SITE 81: note = RuvC_P2
  SITE 121: note = RuvC_P3
  SITE 123: note = RuvC_P4
  SITE 126: note = RuvC_P5
  REGION 289..375: note = Tnp_domain
  SITE 297: note = Tnp_P1
  SITE 327: note = Tnp_P2
  SITE 335: note = Tnp_P3
  SITE 336: note = Tnp_P4
  SITE 348: note = Tnp_P5
MTAGRSSGQNVLVWLEEGRVGQVRARVWVGVDAGKGHHWAVAVDEVGASVWSKKIDNDETAILNAIGEAGALAEQADWAVDISGTASALLLALLAAAGHRPVYVPGRTVNRMAGGYRGEAKTDARDAYVIAETARLRRDFAPIDVPGELVTELALLTAHRSDLIADRVRMINRLRDLLTGVFPALERAFDYSAAKGPLILLTGFQTPAALRRRGRSRLEAWLVKRGVRSADTVADKAMTAAAAQTVALPGEAVAADLVADLARQILALDERIGGIDKQIGATFRCHPQAEIIESLPGMGPILGAEFLASVGDLTAYADSGRLASAAGLAPVPRDSGRRTGNLHRPKRYNRRLRRLFYLSAQTAMMRPGPSRDYYLKKRAEGQRHVQAVIALARRRVDVLWALLRDGRLFTPNAPVTHTA

SEQ ID NO: 14746 - protein, 348 aa, unidentified
  source 1..348: note = protein_0b0ad8d
  REGION 7..150: note = RuvC_domain
  SITE 10: note = RuvC_P1
  SITE 54: note = RuvC_P2
  SITE 89: note = RuvC_P3
  SITE 91: note = RuvC_P4
  SITE 94: note = RuvC_P5
  REGION 213..307: note = Tnp_domain
  SITE 221: note = Tnp_P1
  SITE 251: note = Tnp_P2
  SITE 259: note = Tnp_P3
  SITE 260: note = Tnp_P4
  SITE 272: note = Tnp_P5
MHQHTAIGIDLAKRVFQVCVVDTRHPGVRVNKELKRRELLDFMRHQPACRVYLEACAGAHYWARQFNALGHETKLMAPQFVTPFRKGHKTDANDALAIVEAGLRPTMRFVPRKGLAQQDLQSLHRVRERLIKQRTQLINQTHGLLQEYGIIAGRGQKALKQVLAQALEDAENELTMAMRALLAEQREELNRLNARLAELDQRVRQQAQALPPCRALQAIEGIGPIGATLLVAALGDGHVFANGRQAAAYLGLTPRQYSSGGKVTLIGIGRTGHPQLKATLIRGAHAVIKTLGDKPDPKSQWLRALVARAGANKAAVALANKTVRTAWAVLHHGTDYRRDYEHPRATAA

SEQ ID NO: 14747 - protein, 345 aa, unidentified
  source 1..345: note = protein_a553e4e
  REGION 7..149: note = RuvC_domain
  SITE 10: note = RuvC_P1
  SITE 53: note = RuvC_P2
  SITE 88: note = RuvC_P3
  SITE 90: note = RuvC_P4
  SITE 93: note = RuvC_P5
  REGION 211..295: note = Tnp_domain
  SITE 219: note = Tnp_P1
  SITE 249: note = Tnp_P2
  SITE 257: note = Tnp_P3
  SITE 258: note = Tnp_P4
  SITE 270: note = Tnp_P5
MEQDTMIGVDLAKSVFQLHGASMVGHVKFRKKLSRQQFRKFMTDHPPASVVMEACGSAHYWARELTHLGHEVKLIAPQYVRPFVKRQKNDVADAEAIVIAAQRPEMRFVEPKCEGQQARAVLFRARERLVHQRTELANALRAVLYEFGNIVPQGIRHLKRIDGMLEEPNSGLPILVREECRDLMAQIAEKTARIEAKTKKVKELAKQTDMARRLQTMPGVGPMTALAIEAFAPDMSSFRRGRDFSAWLGLVPRQHSSGGKERLGRVSKAGHTDIRQLLIIGAMSRLNWMGRRSIPEGSWLAEMLSRKPRMLVAIALANKMARAVWAMLTKNQDYRDPIYAKADVA

SEQ ID NO: 14748 - protein, 346 aa, unidentified
  source 1..346: note = protein_8454c23
  REGION 5..157: note = RuvC_domain
  SITE 8: note = RuvC_P1
  SITE 56: note = RuvC_P2
  SITE 97: note = RuvC_P3
  SITE 99: note = RuvC_P4
  SITE 102: note = RuvC_P5
  REGION 220..305: note = Tnp_domain
  SITE 228: note = Tnp_P1
  SITE 258: note = Tnp_P2
  SITE 266: note = Tnp_P3
  SITE 267: note = Tnp_P4
  SITE 278: note = Tnp_P5
MTVIIGIDPHKSSHTATALGADLAELGTIRVRATRATIDQLLTWAAPWADRRWAIEGARGLGQLLAQRLVAAGESVVDVPATLAARARLLETGHGRKTDHIDARGVALVAAQRPDMAPVTADDHTRVLRLLADRRDELTRERRRTMNRLHRHLRDLIAGGAPLHLSAAKAAGLLAKVRPGDAVETERKQMARDLLADIRRLDRAIADNRRRCATAVASSGTSLTEITGISDVLAAKILGHVGDIGRFPSADHLASYAGTAPIEASSGDVVRHRLSRRGNRQLNNAIHLAAHVQTIFPGPGRDYYQRRLAAGNSRTEALRLLKRQLTKAIYRVLVADAVTHPFVVAA

SEQ ID NO: 14749 - protein, 412 aa, unidentified
  source 1..412: note = protein_3e28e5e
  REGION 5..166: note = RuvC_domain
  SITE 8: note = RuvC_P1
  SITE 63: note = RuvC_P2
  SITE 103: note = RuvC_P3
  SITE 105: note = RuvC_P4
  SITE 108: note = RuvC_P5
  REGION 274..360: note = Tnp_domain
  SITE 282: note = Tnp_P1
  SITE 313: note = Tnp_P2
  SITE 321: note = Tnp_P3
  SITE 322: note = Tnp_P4
MVLFVGDDWAEDHHDVEVQDATGRRLGKARLPEGVAGIARLHALIGEFTDPNDEAGAGQVLVGIETDRGPWVAALVAAGYRVFAVNPMQVARYRERHCTSGAKSDAGDAHALADMVRTDAHQLRPVAGDTALAEGTKVVARAHQSMIWDRTRHVLRLRSALREFYPAALEAFPDLAATDALELLAAAPDPVAAATLSRSRIVGALTRARRRDVAGKAERIQAVLRAEALRQPAVLAGAYAVTVRSTVAVITVLNSEITTLQGQVEAHFGRHPDVEIYRSQPGLGEILGARVLGEFGDDPHRYHDARARKNYAGSSPITRASGKKKIVLARYACNDRLADAVHQQAFCALTASPGARAYYDAIRTRGTGHHAALRQLANRLVGILHGCLKTGTLYDENIAWSHHTQQDQQTAA

SEQ ID NO: 14750 - protein, 348 aa, unidentified
  source 1..348: note = protein_b98017d
  REGION 9..151: note = RuvC_domain
  SITE 12: note = RuvC_P1
  SITE 55: note = RuvC_P2
  SITE 90: note = RuvC_P3
  SITE 92: note = RuvC_P4
  SITE 95: note = RuvC_P5
  REGION 214..304: note = Tnp_domain
  SITE 222: note = Tnp_P1
  SITE 252: note = Tnp_P2
  SITE 260: note = Tnp_P3
  SITE 261: note = Tnp_P4
  SITE 273: note = Tnp_P5
MNATRKAVVGVDTAKSVFQVYTVEQATGEVINKPIKRAQFLQWFANRPPGLIGMEACGGSQHWARKLHELGHEVKLISGKMVKAFVIGNKNDAADARAIYLAAQQPEVKAVAIKTEAQQAVLAMHRIRQQLVKMRTAQMNALRGLLAEYGEVFGTGRKAFDAGIKAALERLAERLPMPLIDALRDQWSELARLDDRIVRIESSLLTWMRQDRAANAIFAIPGVGLLTATTVVAAMGDAKAFRSGREFAAWLGLIPGQTGSGGKVRLLGMSKRGDTYLRTLLIHGARAVLRRPKTLSPWLQQLSQRRPLNVVIAALANKMARTIWAVLAHDRAYDKDHVSMRPDTAVAA

SEQ ID NO: 14751 - protein, 340 aa, unidentified
  source 1..340: note = protein_962d375
  REGION 6..147: note = RuvC_domain
  SITE 9: note = RuvC_P1
  SITE 52: note = RuvC_P2
  SITE 87: note = RuvC_P3
  SITE 89: note = RuvC_P4
  SITE 92: note = RuvC_P5
  REGION 211..298: note = Tnp_domain
  SITE 219: note = Tnp_P1
  SITE 249: note = Tnp_P2
  SITE 257: note = Tnp_P3
  SITE 258: note = Tnp_P4
  SITE 270: note = Tnp_P5
MTLTTLGIDLAKSVFQLHGVDEAGTVIIRKKLRRSAVLDTLRMLEPCLVGMEGCATAHYWAREISALGHEVKLMPPAYVKPYVKRGKNDMADAEAICEAVTRPTMRFVPIKSAERQGVLVLHRTRDLLMRQRTMLLNAVRGHLAEFGLIAPQGPRKVMELVAQMREGARADLPEIARTALLGIGLQLDALARQIHALERQLLTWHRQDAASQRLETIPGVGIITATALAASIPDPSVFCSGRQFAAFLGLTPRQNSSGGKDRLGRISKMGDGYLRRLLVIGATSVIRRAETNPSATGAWVRSLLTRKPPRVTTVAMANKTARIAWAVLARGEAYRAPAMA

SEQ ID NO: 14752 - protein, 342 aa, unidentified
  source 1..342: note = protein_6a03713
  REGION 5..154: note = RuvC_domain
  SITE 8: note = RuvC_P1
  SITE 56: note = RuvC_P2
  SITE 97: note = RuvC_P3
  SITE 99: note = RuvC_P4
  SITE 102: note = RuvC_P5
  REGION 216..301: note = Tnp_domain
  SITE 224: note = Tnp_P1
  SITE 254: note = Tnp_P2
  SITE 262: note = Tnp_P3
  SITE 263: note = Tnp_P4
  SITE 274: note = Tnp_P5
MTVIVGIDPHKSSHTATAITPDLAELGTIRVRATRTTIDQLLAWAEPWPERRWAIEGARGLGQLLAQRLVAAGETVVDVPATLAARARLLETGHGRKTDHIDALVAVQRPDLARVTADDHTRVLRLLADRRDELTRERRRTMNRLHRHLRDLIPGGAPLHLTAVKAAALLNKVRPGDAVETERKQMARDLVADVRRLDKAIADNRRRCATAVAASGTSLTEITGISDVLAAKILGHIGDINRFPSADHLASYAGTAPIEASSGDVVRHRLSRRGNRKLNNAIHLAAHVQTIFAGPGRDYYQRRLAGGNSRTEAKRLLKRQLTKAIYRTLVADLDRAVLHVTA

SEQ ID NO: 14753 - protein, 422 aa, unidentified
  source 1..422: note = protein_8aba232
  REGION 4..157: note = RuvC_domain
  SITE 7: note = RuvC_P1
  SITE 59: note = RuvC_P2
  SITE 94: note = RuvC_P3
  SITE 96: note = RuvC_P4
  SITE 99: note = RuvC_P5
  REGION 284..371: note = Tnp_domain
  SITE 292: note = Tnp_P1
  SITE 323: note = Tnp_P2
  SITE 331: note = Tnp_P3
  SITE 332: note = Tnp_P4
MLGVGIDFAEEFHLVALGRPGEGVIDIRRVEHTPEDLRRLFGAINELEPDPAEVRVVLETRHGMLVEALVDAGYTVVPVNPDLVARRRGPAKKKDDAEDARIACLIALDRFERLRPLIPHGEVAGELRAIARDDERAARDERRLLNRLRADLIATFPAALEIAGADLGAPTFLRLLEAWPTAASLREVPRDELVAFARSGRHGWPERFANQVVSSVSAENFVAREHLVAAKASTIRLAAAQLLLIGTQRRAWERRMGELLLGGPRRGRDHIVKDPDLGKAFPGGEIYLSFPGLGDRLAARVAAEIGEHIEQFDTPNSLQSYAGKAPVTRRSGKSELVVSTRLACNRYLRDAVQQWAFCSLSRSGWARVFYDAQRARGKGHHAALRALGNRWLEVLWHCVRNRTPYEEEVHVTNRKRYLQAAA

SEQ ID NO: 14754 - protein, 413 aa, unidentified
  source 1..413: note = protein_d10683f
  REGION 11..167: note = RuvC_domain
  SITE 14: note = RuvC_P1
  SITE 64: note = RuvC_P2
  SITE 104: note = RuvC_P3
  SITE 106: note = RuvC_P4
  SITE 109: note = RuvC_P5
  REGION 275..361: note = Tnp_domain
  SITE 283: note = Tnp_P1
  SITE 314: note = Tnp_P2
  SITE 322: note = Tnp_P3
  SITE 323: note = Tnp_P4
MLSLVEALFFVGIDWAAKVHAVCVLNAAGRKVAAFSIEHTAAGFAKLAARLAGLAEDPQAVPIAIERPDGRLIDALLEAGHPVVPVKPNAIKAWRDGEVLSGAKSDPGDAEVIAEYLRLRAHKLRPAVPYSDDTKALRTLTRTRGEMVEARVAATNQLAALLDACWPGAKEVFADVASPIALAFLTRYPTPAAAASLGVKRMAAFCAKHGYCGRRSPEALLDRLRSAPAGIISPAQTEALRDAVIAHVGVLAALNTALKDLDRSVAAHLADHPDGTIFASFPRAGTINAAQILAEWGDARDAYTGPEAVAALAGLVPVTKKSGKHSAVHFRWACNKRLRVAITTFADNSRHENPWAADIYRRARASGKDHPHAVRILARAWVRVIWRCWQTGIPYDPALHNGAQPALSAAAAA

SEQ ID NO: 14755 - protein, 346 aa, unidentified
  source 1..346: note = protein_cd6c0b8
  REGION 6..148: note = RuvC_domain
  SITE 9: note = RuvC_P1
  SITE 52: note = RuvC_P2
  SITE 87: note = RuvC_P3
  SITE 89: note = RuvC_P4
  SITE 92: note = RuvC_P5
  REGION 211..296: note = Tnp_domain
  SITE 219: note = Tnp_P1
  SITE 249: note = Tnp_P2
  SITE 257: note = Tnp_P3
  SITE 258: note = Tnp_P4
  SITE 270: note = Tnp_P5
MKITTIGIDLAKEVFQVYGVDTHGRRLLCKQIKRKDMAKFFANLDPCLIGMEACGGAHDWARKLTGYGHTVKLMAPQFVKPYVKTNKNDRADAEAICEAVARPNLRFVPVKTVEQQGILSVHRARQGFVHARTAQGNQLRGLLSEFGIVIPNGISAVFRRMPEILEDAGNGLPDVMRQLLERLFLNLKEMDRQVEELEQQIRLWHRENEASRKLEAIPGIGPITASALVATIGQAREFKDGRQLAAWLGLVPRQNSSGGKSTLLGISKRGDSYLRTLLIHGARSVVRLTANQARPDNWLLGLIGRRHKNVAAVALANKNARIIWALLAKDRLFQSDYAPAAKAAGV

SEQ ID NO: 14756 - protein, 333 aa, unidentified
  source 1..333: note = protein_ef41e0e
  REGION 12..156: note = RuvC_domain
  SITE 15: note = RuvC_P1
  SITE 58: note = RuvC_P2
  SITE 98: note = RuvC_P3
  SITE 100: note = RuvC_P4
  SITE 103: note = RuvC_P5
  REGION 195..280: note = Tnp_domain
  SITE 203: note = Tnp_P1
  SITE 232: note = Tnp_P2
  SITE 240: note = Tnp_P3
  SITE 241: note = Tnp_P4
  SITE 253: note = Tnp_P5
MMNTRIPDVLHVGADVAKDEVVVACEEEAFPPRSLVNERAALLVWLKTLPAGSCVGMEATGKYHRLLASLAFELGLAVYVLNPRDCRHYAKGVGLRGKTDRVDARLIARIIAREAGKARRWSPPSAQQQELDQLLRRRASVSRMRAGLVQSLEDLTGFGPERQRPLLQQLTELIACFDRRIKALIETSAERMAAYRRLLGICGVGAVVAAALLNVLERMAFARADAFIAFTGFDPRPDDSGRRRGRRRLTKRGPSELRRLLYLAAMAAARTEAWKPRYEHERAKGLSSTEALVVLARCIARTAWSIYTHKTSFDRERVGPSGCASSVPSARSL

SEQ ID NO: 14757 - protein, 346 aa, unidentified
  source 1..346: note = protein_0ac0477
  REGION 7..149: note = RuvC_domain
  SITE 10: note = RuvC_P1
  SITE 53: note = RuvC_P2
  SITE 88: note = RuvC_P3
  SITE 90: note = RuvC_P4
  SITE 93: note = RuvC_P5
  REGION 212..299: note = Tnp_domain
  SITE 220: note = Tnp_P1
  SITE 250: note = Tnp_P2
  SITE 258: note = Tnp_P3
  SITE 259: note = Tnp_P4
  SITE 271: note = Tnp_P5
MKYVSTIGLDLAKHVFQVHGADIEGSPLFNRKLRRNEVLRFFEKIPPCLVGMEACGGAHYWAREIASLGHDVRLIPPAYVKPFVKRGKTDAADAEAISEAVIRKTMRFVPIKTADQQADAMVLKTRALLVQQRTQSVNALRAHLAELGIIAAGGLPNVAALVAIVREGEDTRLPAAARFALTAIADQIGALADQIDELERTIITESKRDEDMRRLTTIPGVGAITAATIKALVPDPGGFKSGRHFAAWMGLTPRPHSSGGKERLGGISKMGNPELRVLLVLGATAVLRIARNDDRARLWLKALLARRPFKVAAVALANKMARIIWVLLNKGGIYNHPEPHSLTAVA

SEQ ID NO: 14758 - protein, 393 aa, unidentified
  source 1..393: note = protein_32dc5cd
  REGION 6..165: note = RuvC_domain
  SITE 9: note = RuvC_P1
  SITE 64: note = RuvC_P2
  SITE 105: note = RuvC_P3
  SITE 107: note = RuvC_P4
  SITE 110: note = RuvC_P5
  REGION 268..355: note = Tnp_domain
  SITE 276: note = Tnp_P1
  SITE 306: note = Tnp_P2
  SITE 314: note = Tnp_P3
  SITE 315: note = Tnp_P4
  SITE 328: note = Tnp_P5
MDMIYVGIDVAKNKHDCCILGSSGAVLREAFTLSNDRKGFQELFSAIHEALLQEGTDQIKAGLEATGHYSENLVAFLRNSGIQPVVFNPLQVNLFRKSQSLRRTKTDKVDAKCIAQLLMSAESTPVFASYQIQELKTLTRHRSRLVSQRSKLKQYISRLVDILFPELPSVCCSATQASMRTLLLELPSARQIAACRIDRLTNLLYAASKGHYSREKALEIKQLAQQSIGANSPASELELRLTLQQLDFLLDQLKQLEKAIQTIVAAIHSPILSIPGIGPTLAAIILAEIGDIHRFSSPDKLLAFAGLDPSTYQSGKFKAGYTPMVKHGSTYLRWALMQAARLASIHCATFRDYMDSKLAQGKHYFVALGHVSKKLVRVIFHILTTNEAFVPQA

SEQ ID NO: 14759 - protein, 401 aa, unidentified
  source 1..401: note = protein_bde6c11
  REGION 6..165: note = RuvC_domain
  SITE 9: note = RuvC_P1
  SITE 63: note = RuvC_P2
  SITE 103: note = RuvC_P3
  SITE 105: note = RuvC_P4
  SITE 108: note = RuvC_P5
  REGION 274..363: note = Tnp_domain
  SITE 282: note = Tnp_P1
  SITE 312: note = Tnp_P2
  SITE 320: note = Tnp_P3
  SITE 321: note = Tnp_P4
  SITE 334: note = Tnp_P5
MESPIVSIDVSNGNSHYMCFIKNNKRFGKVKKIDHDIEGFKRLLEDIQKLEAETNEKVCAVFEATGVYTKPLERFLSKNSIKTYIINPLESARKRKEEIHNKKTDKLDPISISKVYYDKEEMMELKKKDETYNWLRKKNRLYEDQLNHLRKYKVTFQNQLSICFPGYLDLFKDGYSDIPMTILKKYPHPDLLKNKKAETVARYLEKNTCHIHKVSLEYALKIIEFAKKTYPGCEKDDVEVEIFKILLDKVIETQRECEKTLNEMITVASTLEEYRYISSIDGIGPNLAARIIAEIGDIEEFKSREALVAYAGLDPHIYQSGDQDGKHLKISKKGNKYLRCLLFLAVGCSIRGAKDNPVNRFYQKKKQQSNPLNSKAAKTACTAKLLKIIYGICKNKTTYER

SEQ ID NO: 14760 - protein, 430 aa, unidentified
  source 1..430: note = protein_c85fcc5
  REGION 20..181: note = RuvC_domain
  SITE 23: note = RuvC_P1
  SITE 79: note = RuvC_P2
  SITE 120: note = RuvC_P3
  SITE 122: note = RuvC_P4
  SITE 125: note = RuvC_P5
  REGION 288..375: note = Tnp_domain
  SITE 296: note = Tnp_P1
  SITE 326: note = Tnp_P2
  SITE 334: note = Tnp_P3
  SITE 335: note = Tnp_P4
  SITE 347: note = Tnp_P5
MKSNTQNTKIEAVTEKTLVVGIDVGSEFHYARAFDWRGVEFSSKPFKFSNTEPGFIEFKAWILHIQTEHDKDAVVPGMEPTGHYWFNLGKFLQDNGMKPVLVNPHHVKKSKELDDNNPTKNDRKDPKVIAGLIKDGRYSYPYLPDGVYADLRTASNLRFQMQSELTRIQNRISRWFSIYFPEYKDVYGNPDAKSGMMIVKVAPLPEDIVTLGVEGVNRIWREAKLKGVGLKRAKTLYEAAEHSIGSREGAAAARLEIRMLLEDYESRAARLQEIMTLIESLVKQIPTAEKLLEIKGVGIKTVSGFLAEVGDINRFDNPKQLQKLAGLAIKENSSGKHKGETTITKRGRKRLRYLLFEVAMSVVSKNTEFSQLHLYYTTRRINPLKKMQSLMAVACKLIRIFYVMLTKQVDYDPQKMISDIRRPEIYLQAA

SEQ ID NO: 14761 - protein, 340 aa, unidentified
  source 1..340: note = protein_c850d87
  REGION 6..147: note = RuvC_domain
  SITE 9: note = RuvC_P1
  SITE 52: note = RuvC_P2
  SITE 87: note = RuvC_P3
  SITE 89: note = RuvC_P4
  SITE 92: note = RuvC_P5
  REGION 211..297: note = Tnp_domain
  SITE 219: note = Tnp_P1
  SITE 249: note = Tnp_P2
  SITE 257: note = Tnp_P3
  SITE 258: note = Tnp_P4
  SITE 270: note = Tnp_P5
MQTITIGLDLAKNVFQVHGVDAAGQVTTRRKLRRAELLRFFEALAPCTVGVEACATAHHWAREISALGHEVRLMPASYVKAYVRRQKNDAADAEAICEAVRRPTMRFVPVKSAERQSVLVLHRTRELLVRQRTTLINAIRGHCAEFGMIVAQGARRVAELLDEVRRNEGAALPDLARSALLMLADQLGALAGQINRLDRRLLAWHRQNQTSQRLATIPGVGVITATALAASIPDPHLFRSGREFSAFLGLVPRQNSSGGKDKLGRISKMGDGYLRKLLVVGATSVIRRARTGSSASAGWITALLARRPARVVTVAMANKTARIVWAILARGGVYRPPVMA

SEQ ID NO: 14762 - protein, 392 aa, unidentified
  source 1..392: note = protein_068e009
  REGION 4..163: note = RuvC_domain
  SITE 7: note = RuvC_P1
  SITE 60: note = RuvC_P2
  SITE 101: note = RuvC_P3
  SITE 103: note = RuvC_P4
  SITE 106: note = RuvC_P5
  REGION 268..354: note = Tnp_domain
  SITE 275: note = Tnp_P1
  SITE 305: note = Tnp_P2
  SITE 313: note = Tnp_P3
  SITE 314: note = Tnp_P4
  SITE 327: note = Tnp_P5
MIFVGIDVAKNKHDCFITNTDGESLFNSFTITNNLDGFNDLYRKISSVTENITKVKVGLEATGHYSYNLLGYLLDKGFPTYVINPLHTNLYRKSLSLRQTKTDKVDARTIASMLMSDVNLKSYSDTSYHNEELKSLTRYRFDKVKERSALKVSISRLVCILFPELENLVPTLHMTSVYSLLYEFPGASFVASAHLTRLANLLSKASKGHYNKDTAVLFRQTARDSIGSVMPAKSLELKHTIKLIQELTSEIDEIEAAIKQIMDEEIKSPILTIPGISYRMGAMIIAEIGDFNRFDSADKILAYAGMSPSTHQSGQLDNCHSRMEKRGSRYLRYALYNATKYVCHWDKSFGAYLEKKRSEGKHYNVALSHAAKKLVRTIFAMERSGHPYIASV

SEQ ID NO: 14763 - protein, 346 aa, unidentified
  source 1..346: note = protein_544a9ea
  REGION 6..147: note = RuvC_domain
  SITE 9: note = RuvC_P1
  SITE 52: note = RuvC_P2
  SITE 87: note = RuvC_P3
  SITE 89: note = RuvC_P4
  SITE 92: note = RuvC_P5
  REGION 212..298: note = Tnp_domain
  SITE 220: note = Tnp_P1
  SITE 250: note = Tnp_P2
  SITE 258: note = Tnp_P3
  SITE 259: note = Tnp_P4
  SITE 271: note = Tnp_P5
MEISTIGLDLAKNVFQVHGISATGEVVIRKALRRSQMLPFFEKLPPCLVGAEACGTSHHWARELTKLGHEVRLMPATYVKPYVKRGKNDAADAEAICEAVTRQTMRFVPIKSREQQAALSLHRVRQLLIKQRTQLVNMMRSVLAELGTAIPVGIVKALQMAREIAEGESKLDLPTEATNVVTMLAEQLLQLHAQLRKLDLRLAALQRSDERAKRLATIPGIGPVGATALAASVTDPGQFSSGREFAAWLGLTPRQSSSGGKERLGRITKMGDRYLRQLLVIGATALVRYAKEKPSTVDPRFVALLARKPARVASVAIANKMARIAWAIMARGGVFERGHSPMLAAA

SEQ ID NO: 14764 - protein, 272 aa, unidentified
  source 1..272: note = protein_3e10ed5
  REGION 1..79: note = RuvC_domain
  SITE 19: note = RuvC_P3
  SITE 21: note = RuvC_P4
  SITE 24: note = RuvC_P5
  REGION 139..227: note = Tnp_domain
  SITE 147: note = Tnp_P1
  SITE 177: note = Tnp_P2
  SITE 185: note = Tnp_P3
  SITE 186: note = Tnp_P4
  SITE 198: note = Tnp_P5
MICIETRHTKAFLKAQPNKSDRNDARGIAQMMRVHLYRAVHVKALTSQKRRALLTARKLLQDKAIAIENDLRGLLRNFGLKVGVVGSAKFEARIRELVARTLDLVEIVEPLLDARRKLREHFATLHRKLLMIARDDEVCRLLMTIPGVGPVVAVAYTATIDIPQRFKNSKAVGPILGLTPVLNQSGESHRVGRVSLCGDGMMRNLLYDAAQVLLNRVAKWSWLKAWAMSVAKRRGLQKAMVALARRLAVIMHRMWSDGTEFCWSREKLPAGA

SEQ ID NO: 14765 - protein, 326 aa, unidentified
  source 1..326: note = protein_495fa0b
  REGION 6..159: note = RuvC_domain
  SITE 9: note = RuvC_P1
  SITE 57: note = RuvC_P2
  SITE 95: note = RuvC_P3
  SITE 97: note = RuvC_P4
  SITE 100: note = RuvC_P5
  REGION 200..287: note = Tnp_domain
  SITE 208: note = Tnp_P1
  SITE 238: note = Tnp_P2
  SITE 246: note = Tnp_P3
  SITE 247: note = Tnp_P4
  SITE 260: note = Tnp_P5
MKNLVTGIDISKDTLDYCSLGNNDVQVKNRGVLENHRKAINKWLDDFDKTNTVFALEHTGHYGAALIDCLSQKKYAFYLINPLELKKSLGIQRGKSDIKDAYRIAEYAITNKHKLNPYHLPAENLGRLKALITARERYVKMSVQVQNSLKANEILNRTIDVKMLIREEKKQYKSLQKSIKNIEDEMQKIIKADQELKSSYKKVTAVIGVGPVIAIKCITETANFTKFHNPRKFSCHCGLAPFPYQSGSSIRGKTRTHFLRDKSLKAILIKGAVTAVQHDPQLKTYYNRKVKDGKHHMSVINAVANKLVLRIFAVAKREEPFVKLSA

SEQ ID NO: 14766 - protein, 320 aa, unidentified
  source 1..320: note = protein_e398b0c
  REGION 8..150: note = RuvC_domain
  SITE 11: note = RuvC_P1
  SITE 55: note = RuvC_P2
  SITE 95: note = RuvC_P3
  SITE 97: note = RuvC_P4
  SITE 100: note = RuvC_P5
  REGION 190..274: note = Tnp_domain
  SITE 198: note = Tnp_P1
  SITE 227: note = Tnp_P2
  SITE 235: note = Tnp_P3
  SITE 236: note = Tnp_P4
  SITE 247: note = Tnp_P5
MENIAQWVGIDVSKATLDVYIRPLGKAMIVANTESEISNLVKLLLSYSLNLIVLEATGGLETELVIQLQAALLPVALINPRQGRDFAKATGKLAKTDAIDAQILAHFGEAMKPQVLAIQSETARQLSELISRRRQLVEMQTAEKNRRSLTRGQALADIEAHIEYLEEHLKQLNQKIAELTQNNLQWIDKVNLLKSTPGIGQVISTTLVSDLPELGQLTAKQISRLVGVAPINHDSGQHKGKRMINGGRAHVRATLYMGAVVAMVHNPVIKAFYERLIERGKSKKLALTACVHKMLVILNAMVRDNLPWRVTENLQPIANA

SEQ ID NO: 14767 - protein, 341 aa, unidentified
  source 1..341: note = protein_7b4a6f9
  REGION 7..148: note = RuvC_domain
  SITE 10: note = RuvC_P1
  SITE 53: note = RuvC_P2
  SITE 88: note = RuvC_P3
  SITE 90: note = RuvC_P4
  SITE 93: note = RuvC_P5
  REGION 210..296: note = Tnp_domain
  SITE 218: note = Tnp_P1
  SITE 248: note = Tnp_P2
  SITE 256: note = Tnp_P3
  SITE 257: note = Tnp_P4
  SITE 269: note = Tnp_P5
MNRFSRIGVDLAKNFFQIHAIEREGGSPVTRKLSRNKFREFFSRTAPCRVAMEACGSSHYWARELGAMGHEVALIPPVYVKPYVKRGKNDAADAAAICEAMSRPDMRFAPIKSAAQQAVLMLHKTRDLLVKQRTMGVNALRGHLQEFGLIAPRGIHRVGDLIALARGRADLPEEAKQAVEILAWLGEELDAKIDALEKKIAQGAAKNPASRMLKQVPAIGPLIASAMAAFVPDPGVFKSGRDFSASLGLTPSQHSSGGKQKLGGITKKGNRYLRKNLVVGCTSVLRVAHKYKGALAEWIVAMKAKKPERVVAVALANRLARICWAIMSTGECFREDIYAKA

SEQ ID NO: 14768 - protein, 344 aa, unidentified
  source 1..344: note = protein_16d951b
  REGION 5..152: note = RuvC_domain
  SITE 8: note = RuvC_P1
  SITE 55: note = RuvC_P2
  SITE 92: note = RuvC_P3
  SITE 94: note = RuvC_P4
  SITE 97: note = RuvC_P5
  REGION 212..300: note = Tnp_domain
  SITE 220: note = Tnp_P1
  SITE 250: note = Tnp_P2
  SITE 258: note = Tnp_P3
  SITE 259: note = Tnp_P4
  SITE 271: note = Tnp_P5
MEHFAGLDVSVNETSVCIVDETGSIAREVKVASEPDALLAVLTTGAYHFKRIGLEAGPLSQWLFSALAEAGLPVICVETRHMRAALQAQINKTDRNDARGIARMMRAGLYKPVHVKTLRSQKLRTLLTHRKLLQSKAIAVENDLRGTLRNFGLKVGMVGTVKFEHRIRELVADIPDLAVLVEPLLVVRRVLREQIAVLHRRVLAIVKDDEVCRRLMTIPGVGPVVALTYRTTIDVPARFRNSRAVGAVLGLTPCKYQSGESEYTGGISKCGDEMMRVMLYEAAQILLMRATKWSWLKVWAMQIARRRGLKKAIVALARRLAVIMHRIWVDGTEFRWSRQEAAAA

SEQ ID NO: 14769 - protein, 321 aa, unidentified
  source 1..321: note = protein_e215672
  REGION 4..151: note = RuvC_domain
  SITE 7: note = RuvC_P1
  SITE 52: note = RuvC_P2
  SITE 92: note = RuvC_P3
  SITE 94: note = RuvC_P4
  SITE 97: note = RuvC_P5
  REGION 191..278: note = Tnp_domain
  SITE 199: note = Tnp_P1
  SITE 229: note = Tnp_P2
  SITE 237: note = Tnp_P3
  SITE 238: note = Tnp_P4
  SITE 251: note = Tnp_P5
MTYVGIDVSKATFVVAYSSAKTGRAKTFKNTVKGVHEFIQTISAAEHHCVLEATGNYSALLVYLLSEAGITVSLENPLKIKNFARAMLTVTKTDEIDARLIALYGERMQPAPYKLRSESILILKQKRTVLRQLKKQLVATRNLKSSMEVLPFFDPKCKKTIEKTIVFLEKQIKGMEEELASLAQGEYKKQMDLLTSIKGIGVTLATALIVATGGFTYFNNAKQLTRYLGLSPTYQQSGTSVNVKGHINRNGDSSLRSQLYVAAFSSLRCNAECKACFDRLRSNGKPGKLAVIAVANKLVRQAFAVVTHGKPYVDGFISEKP

SEQ ID NO: 14770 - protein, 354 aa, unidentified
  source 1..354: note = protein_2e2d8b4
  REGION 19..171: note = RuvC_domain
  SITE 22: note = RuvC_P1
  SITE 76: note = RuvC_P2
  SITE 114: note = RuvC_P3
  SITE 116: note = RuvC_P4
  SITE 119: note = RuvC_P5
  REGION 214..301: note = Tnp_domain
  SITE 222: note = Tnp_P1
  SITE 252: note = Tnp_P2
  SITE 260: note = Tnp_P3
  SITE 261: note = Tnp_P4
  SITE 274: note = Tnp_P5
MWLTHKYNHRKGMKKSYYIGIDISKKTLDASIFVENMNEKRYPHIKEDNDKAGFKRILKWASSEKVDLKDCLFCMEHTGNYGLELCLFLEQKHIEYCAVSPLVMKRAMGISRDKNDKIDSARIATFAFEKAYKMKPSKMASEDILALKKLQAERNLHVRERAKYKGYLSDKCTKNDGLRKRMTIMVKTLDCQIEEVEKEMQAIIQRNQELSSNYELLLSIPGVGKVIAISTLVYTNNFKAFDNARQYACYASVAPFVHTSGSSIHGAPTVSKMGNSQIKSELSMGALNAMFNDPQMSEYASRKRKEGKHNGVILNAIKFKLIERMFAVIHRGTPYVATHEYKTLRHPNRVSEAS

SEQ ID NO: 14771 - protein, 433 aa, unidentified
  source 1..433: note = protein_2e0d4a6
  REGION 30..193: note = RuvC_domain
  SITE 33: note = RuvC_P1
  SITE 87: note = RuvC_P2
  SITE 133: note = RuvC_P3
  SITE 135: note = RuvC_P4
  SITE 138: note = RuvC_P5
  REGION 305..391: note = Tnp_domain
  SITE 312: note = Tnp_P1
  SITE 342: note = Tnp_P2
  SITE 350: note = Tnp_P3
  SITE 351: note = Tnp_P4
  SITE 364: note = Tnp_P5
MRQVPRALVKFNSFTFTRKEVIIVSNSLLVGIDVSLNDNKVRILHPDGTSLSKFTVPNSVPGAKTLSQKITGVMEKNRFDDVVIGLESTSVYGDPLVYFLKQDASVNRFNTKIHVLNPTQVNKFKMFYPDLPKTDDIDAWVIAEHLRFGRINKEVYMDDRYKALQKLTRARFHTVQSLSREKNWFLNNLFLKFSSLTQEKIFSDRFGATSSSIIEEFFSVDEISYMPIEELVDFINKKGKGRFENPDEIAKAVQKAARSSYRLPKTVTDSVNQVLAVSFLAIKAYKEQLKIFDKAIEEQFKLIPNTLMSVKGIGPVYAAGIVAEIGDIHRFKDQAALAKFAGIAWTKHQSGNFTAANTHLIKFGNRYLRYYIMEATNKVRMHDPEFKRFYDLKYSQTPKTPHKRALALTARKFVRLVYALLHDNRLYTPPKGE

SEQ ID NO: 14772 - protein, 317 aa, unidentified
  source 1..317: note = protein_e692c8f
  REGION 7..151: note = RuvC_domain
  SITE 10: note = RuvC_P1
  SITE 50: note = RuvC_P2
  SITE 90: note = RuvC_P3
  SITE 92: note = RuvC_P4
  SITE 95: note = RuvC_P5
  REGION 186..270: note = Tnp_domain
  SITE 194: note = Tnp_P1
  SITE 223: note = Tnp_P2
  SITE 231: note = Tnp_P3
  SITE 232: note = Tnp_P4
  SITE 244: note = Tnp_P5
MTSEILFGIDVAKDELVIDSELGSLTVSNTAEAIDTWLKSLPTVSYLGLEATGTYHQLLADRAVSMGKIVYVLNPRDMRHYALGLGRRGKTDRVDAQMIRRFITAERQHLRPYQPATMVQHQLALLQRRRATVVKHRQALQKALRSVSELAEPLQETLVALDALLTRIDHQLNDLLELEPVLKAEARRLESIPGIGRQTSTQLAVLFDRVALTRSDAAVAFVGLDPRASDSGQKRGRRQVSKRGPGELRRLLYNCAQAAAKTAVWKPYYQSLRAREFSATQALVILARKLLRIAFSLWQQADAKFDAQKIGCLKNAA

SEQ ID NO: 14773 - protein, 412 aa, unidentified
  source 1..412: note = protein_c8f56b7
  REGION 5..164: note = RuvC_domain
  SITE 8: note = RuvC_P1
  SITE 63: note = RuvC_P2
  SITE 103: note = RuvC_P3
  SITE 105: note = RuvC_P4
  SITE 108: note = RuvC_P5
  REGION 274..374: note = Tnp_domain
  SITE 282: note = Tnp_P1
  SITE 312: note = Tnp_P2
  SITE 320: note = Tnp_P3
  SITE 321: note = Tnp_P4
  SITE 334: note = Tnp_P5
MNPVVGLDVSKGESQVQAFLNKRKPYRKSFSVKHTLDGLDRLLEFLVEITRLTNGKKPSVILESTGHYHHPVVQFLEDHHYVYIVVNPLVSHRSRSANLRKVKTDAADAYQLCELFYKEELAPHRKRGIQLLNLRNLTRQQETITSNASQTKLQLQSILDQVFPEYRGVFGNLYSKVSLRMLEAFPTSETVLQVSEAELRDKIASLCRSRSEKWALDKAQKLRESALRNPFQNNLYESLIFNLKMLINIVLQYEEHLSMLAAEIDALAKEIEEYKIIRSIPGIGEKIAATIISEIGEIERFNHPKKLVALAGVDPSVYSSGRFTASVNRITKRGSSRLRLALYMAVTCGIRDARKLKTTDEIIPRNKKLREFYNKKRDEGKPFRVAVIACVNKLLHWIYALLKSRSTYQDIV

SEQ ID NO: 14774 - protein, 397 aa, unidentified
  source 1..397: note = protein_616ecb2
  REGION 4..160: note = RuvC_domain
  SITE 7: note = RuvC_P1
  SITE 57: note = RuvC_P2
  SITE 97: note = RuvC_P3
  SITE 99: note = RuvC_P4
  SITE 102: note = RuvC_P5
  REGION 274..361: note = Tnp_domain
  SITE 282: note = Tnp_P1
  SITE 312: note = Tnp_P2
  SITE 320: note = Tnp_P3
  SITE 321: note = Tnp_P4
  SITE 334: note = Tnp_P5
MIAVGIDVSKSKSTVAILNSNGSLLVKPYTMTHTQSDMCALVDYLCTFDEPITILMEYTGHYHYPVLKKLQQEGFPVCIINPYQMKKYADVEIHKAKTDKKDAIRIATYALEKSYKLVPYNSLEQKYEDLKFLSRQYNQRISSVSYTKVQLINLLDQTMLGITRLLPLKSKNPEQCVLLLFIKRFKSFDEINKIGKTRFLSSYTTLVKKTCDRHAPSKGLAIYELATNSITTRGEDPYIQLAQSQCVDLLATSQNAADEIILQMQTMAETIPEYKILRAMAGVGDRLGPIILAEIGDIRRFHSGKALNSFAGNDAPPYQSWQFESRNRHISKRGSATLRKACFEVMQALKLTKPQDDPVYLFMLKKEQEGKPYNVAKMAGVNKFLRIYYARAMELYK

SEQ ID NO: 14775 - protein, 341 aa, unidentified
  source 1..341: note = protein_d8f59ab
  REGION 7..149: note = RuvC_domain
  SITE 10: note = RuvC_P1
  SITE 53: note = RuvC_P2
  SITE 88: note = RuvC_P3
  SITE 90: note = RuvC_P4
  SITE 93: note = RuvC_P5
  REGION 211..296: note = Tnp_domain
  SITE 219: note = Tnp_P1
  SITE 249: note = Tnp_P2
  SITE 257: note = Tnp_P3
  SITE 258: note = Tnp_P4
  SITE 270: note = Tnp_P5
MGETTIIGVDLAKRTFQLHGAAADGSVVFRKKVSRDQLLEFLARQPQCVVAMEACASAHHWGREIMELGHEVRLIPPIYVKPYVKRQKNDAADAEAIAEAASRPTMRFVAVKSAEQQGSGMLFRTRDLWVRQRTQTINALRGHLAEFGIVAPAGHARTERLAQAVEDDASALPETVRTLARMLLEQIGALTERIDALEKEIRRRAPKDPELARLMTIPGVGAICATAVKAFCPSMSQFRSGRDFAAWVGLTPRQNSTGGKTRLGRTSKMGQRDVRRLLIIGASAVVCWAARKGARPGSWLARMMARKPHMLVVVALANKMARTIWALSTRQEEYRDPAMVA

SEQ ID NO: 14776 - protein, 349 aa, unidentified
  source 1..349: note = protein_4c3a937
  REGION 12..153: note = RuvC_domain
  SITE 15: note = RuvC_P1
  SITE 58: note = RuvC_P2
  SITE 93: note = RuvC_P3
  SITE 95: note = RuvC_P4
  SITE 98: note = RuvC_P5
  REGION 217..303: note = Tnp_domain
  SITE 225: note = Tnp_P1
  SITE 255: note = Tnp_P2
  SITE 263: note = Tnp_P3
  SITE 264: note = Tnp_P4
  SITE 276: note = Tnp_P5
MIRNKPRGATVYGIDLGKNIFHVVGTDPAGNVVQRVKFRRDTLRAFFERAERAVVGMEACPGSQWLARKLQAMGHTVRIIPAQFVKPYVKSHKNDTIDAAAIAEAVTRPTMRFVQVKQPEQVDLQSLHRIRDQMVGSRTRLICQMRAFCLEYGVAIRQGAGLFKSDLPRVIADECNDLTPTMRRLLNELFEDLMRLEKRIAQVTREIEALAARDEKARRLMTIPGIGPLGATALLAAAGNGQQFKKARDMAAWLGLVPQQYSTGGKTQMFGISKRGNRYLRRLLIHGARSCVMHLDRSRDRLGAWLRQLHSRMHVNKVTVALAAKIARIAWVVLNRPGAIYERRDPALA

SEQ ID NO: 14777 - protein, 349 aa, unidentified
  source 1..349: note = protein_62391cf
  REGION 8..162: note = RuvC_domain
  SITE 11: note = RuvC_P1
  SITE 67: note = RuvC_P2
  SITE 107: note = RuvC_P3
  SITE 109: note = RuvC_P4
  SITE 112: note = RuvC_P5
  REGION 208..295: note = Tnp_domain
  SITE 216: note = Tnp_P1
  SITE 246: note = Tnp_P2
  SITE 254: note = Tnp_P3
  SITE 255: note = Tnp_P4
  SITE 268: note = Tnp_P5
MKELKQVVGIDVAQKELVVTLGRMFEDLSTELYAYKVFKNTEKGFVGLSDWVKKITKTEVKVLYVMEATGVYHQKFAYYLDKNGYEVCIVLPNKISNYIRTLDIKTITDKTCSQAIAQFGLERKLDLWKRPKSVYKSLQQLTRERDQIVNERVIVKNQLHAEESEAEPNEKSLKRINARIRFLNTQEKEIKNDINDIVKNDENLKKEIDIICTLPGVGELTAVIVLAETNGFELIKNKRQLTSYAGLDVKEKQSGTSIKGKPRISKKGNRSLRKAMHFPALVAVKWDDNFRELYARLVSKQGVKMKALVAVQRKLLEMIYTLFKNKTTYDKEYEYKKQTQKNSVQTQMA

SEQ ID NO: 14778 - protein, 384 aa, unidentified
  source 1..384: note = protein_3ee7637
  REGION 72..142: note = RuvC_domain
  SITE 79: note = RuvC_P3
  SITE 81: note = RuvC_P4
  SITE 84: note = RuvC_P5
  REGION 248..334: note = Tnp_domain
  SITE 256: note = Tnp_P1
  SITE 286: note = Tnp_P2
  SITE 294: note = Tnp_P3
  SITE 295: note = Tnp_P4
  SITE 307: note = Tnp_P5
MESDQWLWAGVDVGKEHHWVCVVDDTGAVVLSRKVANDEQQIRRLLAEGDGLSGQVSWTVDLTTVYATLLLTYRGGEAKTDAKDARVIADQSRMRGQDLPVLHPDDELITELRMLAGHRADLVADRTRTINRLRQQLVAVCPALERAAQLSSDRGWVVLLARYQRPKAIRQSGITRLTRILADAGVRNAPTIAQAAVAAARAQTVGLPGEQVAAGLVAQLAQGVIALDERIKTTDADIEDRFRRHPLAEVTTSMPGIGFRLGAEFLAAVGDPALIGSADQLAAWAALAPVPRDSGKRTGRLRTPKRYSRRLRRVMYMSALTAIRCDPQSRTYYQRKRDQGKRPTPATICLARRRTNVLFALIRDNRTWQPDSPPIATTAARHPH

SEQ ID NO: 14779 - protein, 334 aa, unidentified
  source 1..334: note = protein_15ac9bd
  REGION 1..139: note = RuvC_domain
  SITE 2: note = RuvC_P1
  SITE 45: note = RuvC_P2
  SITE 80: note = RuvC_P3
  SITE 82: note = RuvC_P4
  SITE 85: note = RuvC_P5
  REGION 202..290: note = Tnp_domain
  SITE 210: note = Tnp_P1
  SITE 240: note = Tnp_P2
  SITE 248: note = Tnp_P3
  SITE 249: note = Tnp_P4
  SITE 261: note = Tnp_P5
MDTAKSVFQLHGVDENEVVVVRRQFRRAEMIRYFEKLPPTLVAIESCGSSHHWARLLQSFGHEVKLIPPQYVKPYVKRGKNDAADAEALCEAVTRPTMRFVPIKSQDRQAACMLMTVRERLVMVKSQLSNAFRSYAAEFGIVGPAGRQNVNALIKRVLEEDNLPELARELFCFQAGEYAAVEARLEEVDTKLMKWHRADELSRRIATIPGVGPIGSTMLSMKAPPAETFRSGRDFAAWLGLTPRDHSTGGRTRLGGITKAGDPSIRSTLIVGATALLRHVRNGHTKPSPWLAGIMQRKPPKLVAVALANKFARIAWRLMVSGGVYSREPAAMAA

SEQ ID NO: 14780 - protein, 329 aa, unidentified
  source 1..329: note = protein_a23417b
  REGION 9..154: note = RuvC_domain
  SITE 12: note = RuvC_P1
  SITE 58: note = RuvC_P2
  SITE 98: note = RuvC_P3
  SITE 100: note = RuvC_P4
  SITE 103: note = RuvC_P5
  REGION 197..283: note = Tnp_domain
  SITE 205: note = Tnp_P1
  SITE 235: note = Tnp_P2
  SITE 243: note = Tnp_P3
  SITE 244: note = Tnp_P4
  SITE 256: note = Tnp_P5
MSNLLKKVIGVDVGSKFLTLSFLDDEKGEQVLNLPNNERSILSFLSKISPSDYCFVIEATGNYSSRLLHFSIGKGFESNLINCMSVKHFAKMKNIITKTDAEDAKLIRNYGEMFRPEFYVPKTQDIEYLDQEIKLLNDLEEEKRRYAVKLKALRFHPVVNPSTEKHYEKRLKQLEKEIKEVEARLPQLQDEEFTETKNLLQSVSGIGEKTSLQLMTATSGFKNFHSSKSLVKYFGLAPRIYQSGKKSYSPGKCRTSKTYIRSILYVCSWTAIKHNQKCKELYLRLLEKGKAKKLALIAVCNKLLRICFSVVKNKTPFQQDFQNKLKIST

SEQ ID NO: 14781 - protein, 387 aa, unidentified
  source 1..387: note = protein_bcbaa11
  REGION 47..194: note = RuvC_domain
  SITE 50: note = RuvC_P1
  SITE 97: note = RuvC_P2
  SITE 134: note = RuvC_P3
  SITE 136: note = RuvC_P4
  SITE 139: note = RuvC_P5
  REGION 254..342: note = Tnp_domain
  SITE 262: note = Tnp_P1
  SITE 292: note = Tnp_P2
  SITE 300: note = Tnp_P3
  SITE 301: note = Tnp_P4
  SITE 313: note = Tnp_P5
MGYSAWCPVPIIELGMKAALRSWLMVNVVCTQQPQASGKERSMKHYAGLDVSVKETSVCIVDETGKICREVKAVSHPDDLIAVLKTSGLQIERIGLEAGPLSQWLFEGLARAGLPVICIETRHTKAFLKAQPNKSDRNDARGIAQMMRVNLYRPVHVKTLTSQKRRALLTARKLLQEKALAIENDIRGLLRNFGLKVGVVGAVKFEARIRELVEGNLELAEVIEPLLDARRTLREHFAALHRKLLLIVKNDEVCRRLMTIPGVGPVVALAYTATIDIPQRFRNSKAVGPILGLTPVLNQSGESRRVGRISLCGDGMMRTLLYEAAQVLLTRVAKWSWLKAWAMNVAKRRGAQKAIVALARRLAVIMHRMWSDGTEFCWTRERFPAAI

SEQ ID NO: 14782 - protein, 313 aa, unidentified
  source 1..313: note = protein_d96d2de
  REGION 8..148: note = RuvC_domain
  SITE 11: note = RuvC_P1
  SITE 53: note = RuvC_P2
  SITE 93: note = RuvC_P3
  SITE 95: note = RuvC_P4
  SITE 98: note = RuvC_P5
  REGION 189..273: note = Tnp_domain
  SITE 197: note = Tnp_P1
  SITE 226: note = Tnp_P2
  SITE 234: note = Tnp_P3
  SITE 235: note = Tnp_P4
  SITE 246: note = Tnp_P5
MIIPLRYVGIDVSKQYLDIFDEALGVPERIANAPQAITQIAARWRCDVLVVFEATGVYDLELREALGRAGIRFARINPARARDFARASGRLAKTDPIDARMLAAFGRVMQPATEQAVNPARNALARLAKRRDQLVLMRAQEKNRRSEADDRALAERISRLIEVLDSEIAEIEADIKELIKAEPEITDEARLMRSLPGVGPVACMQLIAKMPELGRVGAKQIAALAGLAPFNVDSGAFRGKRKIAGGRKRVRDALYMAALNAVRRADPFKAFYERLRQAGKPAKLALIAVARKLLTVLNAMMRDRKPYLQAEPT

SEQ ID NO: 14783 - protein, 412 aa, unidentified
  source 1..412: note = protein_fa7058e
  REGION 5..164: note = RuvC_domain
  SITE 8: note = RuvC_P1
  SITE 63: note = RuvC_P2
  SITE 103: note = RuvC_P3
  SITE 105: note = RuvC_P4
  SITE 108: note = RuvC_P5
  REGION 274..374: note = Tnp_domain
  SITE 282: note = Tnp_P1
  SITE 312: note = Tnp_P2
  SITE 320: note = Tnp_P3
  SITE 321: note = Tnp_P4
  SITE 334: note = Tnp_P5
MNPVVGLDVSKGESQVQAFLDKGQPYRKSFSIKHTLDGLGSLLEFLRDIEKLAAGKQPSVILESTGQYHMPVIQFLEEQQYVYIIVNPLISHRARSTNLRKVKTDAIDAYRLCELYYKEELEPYKKRGIQLLNLRNLTRQQETISSTAAQTKLQLQSILDQVFPEYRGVFGNLYSKISLQILSIFPTSKEVLSVSESDLTNKIAELCTTRSEKWAKEKAIKLREAALRNPFQNNLYQSHIFNLRMFINIVLQYQEHLSKLATEIDALAKEIEEYEIIQSIPGVGEKIAATIISEIGEIERFNHPKKLVAFAGIDPSVYSSGRFTASINRITKRGSSRLRQALFMAVQCGIRDARKQKTSDEILPRNKKLREFYDKKREEGKPFRVAIIACANKLLHWIYALLKRKMPFQNTA

SEQ ID NO: 14784 - protein, 359 aa, unidentified
  source 1..359: note = protein_82277fb
  REGION 7..151: note = RuvC_domain
  SITE 10: note = RuvC_P1
  SITE 60: note = RuvC_P2
  SITE 93: note = RuvC_P4
  SITE 96: note = RuvC_P5
  REGION 216..293: note = Tnp_domain
  SITE 224: note = Tnp_P1
  SITE 254: note = Tnp_P2
  SITE 262: note = Tnp_P3
  SITE 263: note = Tnp_P4
  SITE 275: note = Tnp_P5
MKRKVYVGMDVHKETNRIACLTNNTKEIVKEQQIKHNEVQIKKFVNKLKSEWNEIHSCYEAGVTGYPLYRYLKSLGVNCILVAPGKIPRQSSDKRDAIKLAKLLRSGDLESIHVPSEEDEAVRDYLRSRDSLRLDLGRNRQRLMKFLLRKGITYSATKYWTVSHNKWLNNLQFNNEILQETFNDYYSRVRVQEENLKAMDKRIQEIAESEPYREKVGILRCFRGVDYLTAMFLLCEVCDFKRFKTAGSFMSFLGLVPGEYSSGSKRKQTGITKTGSPRLRRILTEAAWQHRFPGTGSKIVTARRSGQPALVVALAEKASLRLHKKFRNLQQRGKTPQVMITAVSRELSGFLWAAMNLVA

SEQ ID NO: 14785 - protein, 391 aa, unidentified
  source 1..391: note = protein_4a3ee70
  REGION 4..163: note = RuvC_domain
  SITE 7: note = RuvC_P1
  SITE 60: note = RuvC_P2
  SITE 101: note = RuvC_P3
  SITE 103: note = RuvC_P4
  SITE 106: note = RuvC_P5
  REGION 267..353: note = Tnp_domain
  SITE 274: note = Tnp_P1
  SITE 304: note = Tnp_P2
  SITE 312: note = Tnp_P3
  SITE 313: note = Tnp_P4
  SITE 326: note = Tnp_P5
MVYVGIDVAKDKHDCFILGSEGEVLADVFTVPNSMEGFRCLLERLRSVTDPEDKIKVGLEATGHYSYNLLGFLLDNGLSTHVLNPLHTNLYRKSLSLRKTKTDKVDARTIAAMLMSDLGLKPYTDTVYHNEELKSLTRYRFDKVRERAKLKQSIARLACILFPELEKLVPSLHMTSVYALLDEFPGAKQIAEANLTRLKHLLGDASKGRYGRDMALAIRDAARASVGSIMPAKSLELRHTIHLIRELDAEIGEVEDSIQDIMEKTGSPITTIPGMGFRMGAMILAEVGDFSRFDSPDKVLAFAGLSPSTYQSGQLSNCYAHMEKRGSPYLRFALYNATKYVCHWDPAFAAYLAKKRAEGKHYNVALSHAAKKLVRLICAMEKSGLPYQPAA

SEQ ID NO: 14786 - protein, 405 aa, unidentified
  source 1..405: note = protein_851b8b6
  REGION 4..160: note = RuvC_domain
  SITE 7: note = RuvC_P1
  SITE 57: note = RuvC_P2
  SITE 97: note = RuvC_P3
  SITE 99: note = RuvC_P4
  SITE 102: note = RuvC_P5
  REGION 276..362: note = Tnp_domain
  SITE 283: note = Tnp_P1
  SITE 313: note = Tnp_P2
  SITE 321: note = Tnp_P3
  SITE 322: note = Tnp_P4
  SITE 335: note = Tnp_P5
MNAVGIDVSKGKSTIAIMRPFGEVVASPFDVAHTEGELNNLVAFIKKLKGETRVVMEATSHYYEPIAGYLKERGIFVSVVNPVLIHEFGGNTLRKPKTDPIDSVKIATYALTYWLELKEYVSQEGLRKSLKMLNRQYQQISKVRTTLSNNLISLIDRTFPGINKLFTSPIRDKDGHEKWVDFVLKFPHKDSVAKLTPGVFKKKYQSWCKENEYRYCESKAMEIHSFSRECVSSVSQNNAVVLLITQAVSMVNSALESCHALQEEMYQTASQLPEFETVIGMYGVGKYLAPQLMAEIGDPRRFHSRKAITAYFGYDSENRDSGMRKTSSNPITKKGSGTLRRTLFIVMFALIQGKPKDNPVYDFLLRKKSEGKHYFTYMNAAANKFLRIYYARVKETLKIKEAALE

SEQ ID NO: 14787 - protein, 345 aa, unidentified
  source 1..345: note = protein_8161295
  REGION 6..147: note = RuvC_domain
  SITE 9: note = RuvC_P1
  SITE 51: note = RuvC_P2
  SITE 86: note = RuvC_P3
  SITE 88: note = RuvC_P4
  SITE 91: note = RuvC_P5
  REGION 210..300: note = Tnp_domain
  SITE 218: note = Tnp_P1
  SITE 250: note = Tnp_P2
  SITE 258: note = Tnp_P3
  SITE 259: note = Tnp_P4
  SITE 272: note = Tnp_P5
MYRTRVGVDLAKKVIQVCIYRNKKVQSNIEMTPDEFLSWLVNQKPLTIIFEACSMSNYWKQKATEAGHEALLISAKLVSVVRQNQKTDKNDALAIVQATFLPDVTFIGGKTIEQQQIQTIKRLRELAVKHQGACQKQLVSLLLELNIRIGNRQGGILCAIDAVLEDATNGLSDECRRAIYIGKGQLAVAIEAVEHYGKCLEKVVSINKECKKLLRLEGVGTTNAINLYLALGCWDIGVFSKGKDASACIGLTPIQHSSGGLVKLGSIGKHCKNSILRSQLICGAMAVVRQLATREAKTKKDVWLKGLIERRGKKCAAVALANKTVRTAFAMLTQGTEYKAELLTA

SEQ ID NO: 14788 - protein, 398 aa, unidentified
  source 1..398: note = protein_f764a37
  REGION 7..172: note = RuvC_domain
  SITE 10: note = RuvC_P1
  SITE 63: note = RuvC_P2
  SITE 103: note = RuvC_P3
  SITE 105: note = RuvC_P4
  SITE 108: note = RuvC_P5
  REGION 272..357: note = Tnp_domain
  SITE 280: note = Tnp_P1
  SITE 310: note = Tnp_P2
  SITE 318: note = Tnp_P3
  SITE 319: note = Tnp_P4
  SITE 330: note = Tnp_P5
MESQLRVGIDVGCHAHRVGIADPTGSILEEFDISHSEAGFQEFFRRVEERRAKLGFPVAVAMEGYNGYARPLDRLVQEKGYRLFNVNNLKLARFKEVFPGAAKTDPIDARKILELFHLREQLPMAKDVLQEVLPAPEVNEKLKRLSRRRRQLVTEKLRVLNRMQVDLQAVSPELLAATHDADNLWFLRFLSFRDDLQQLAKLRRATIRQIPSVGAKYAKVIEEWQAKATFSDEVEYVGPMIVDDAKRILELHQQIHTLDEALAKLAMQSEIACRLSTIPGFGKTSIAELAGEIGTVSRFSGEASLALYMGMSPLTRQSGQISRAKAPRQVNTRCRAAMMTTVARHIGCVPQSRAYYDRKRAQGKTHNQAIRALGRHMVRVIWAMLRDGRDYEPRGDTA

SEQ ID NO: 14789 - protein, 311 aa, unidentified
  source 1..311: note = protein_25b6955
  REGION 7..148: note = RuvC_domain
  SITE 10: note = RuvC_P1
  SITE 53: note = RuvC_P2
  SITE 93: note = RuvC_P3
  SITE 95: note = RuvC_P4
  SITE 98: note = RuvC_P5
  REGION 188..272: note = Tnp_domain
  SITE 196: note = Tnp_P1
  SITE 225: note = Tnp_P2
  SITE 233: note = Tnp_P3
  SITE 234: note = Tnp_P4
  SITE 245: note = Tnp_P5
MVHPVYIGCDVSKAHLDLFDAATQKTVRIANTGTAIDEWLATLDGREAQIILEATGRYDRLLCSALERWRRPYCRVNPARARDFARATGQLAKTDTIDARLLARMGETLSPPVTTPPDPARQQLESLHTRRDQLVAMRQQERARLHTAEPSERDSIARHLGWLDTEIAAIEQQCQSHVRTNVTLNEQNIRLRSIPGIGQITAFILMAHMPELGDSSPGSMAALAGLAPFNADSGIHRGQRHIRAGRKRVRDALYMAALVAYRLKSPFARMVQAMQAKGKPFKVMIIAIARKLLVIANANLRNKTTFRARWE

SEQ ID NO: 14790 - protein, 400 aa, unidentified
  source 1..400: note = protein_3a9e04e
  REGION 5..163: note = RuvC_domain
  SITE 8: note = RuvC_P1
  SITE 62: note = RuvC_P2
  SITE 102: note = RuvC_P3
  SITE 104: note = RuvC_P4
  SITE 107: note = RuvC_P5
  REGION 274..363: note = Tnp_domain
  SITE 282: note = Tnp_P1
  SITE 312: note = Tnp_P2
  SITE 320: note = Tnp_P3
  SITE 321: note = Tnp_P4
  SITE 334: note = Tnp_P5
MNPVIGLDVSKGESHAQAFADRGTPYGKTFRFKHDLEGLASFLRYAQDLESFTGKRSAVILEATGHYHSPVVQFLDEHQFLHVVINPLLSHQAKKANLRKVKTDAADAYQLGEIFYKEELEPYKKRGQFLMNLRYLTRQHESLTDMYVQAKLQFQAVLDQVFPEYHGVFGDLYSKVSLRFLALYPTSQSVLARSENDIMTHIQTLAGFVNPNDWTLERAQKLMAAAERNPFKETAFPSHLISLDLLIHLLLQYQEHLAKLDQSIEELARGLLEYDLIQSIPGIGTKLAATILAEIGEIDRFNHAKKLIAFAGIDPSVFSSGKFTATRNPITKRGSRKLRTALYLAVRCGLRSSRNKKLRAFYDKKRAEGKLFKVAVIACANKLIHWIYAILTKKEPFRLV

SEQ ID NO: 14791 - protein, 264 aa, unidentified
  source 1..264: note = protein_bf5ba15
  REGION 2..70: note = RuvC_domain
  SITE 9: note = RuvC_P3
  SITE 11: note = RuvC_P4
  SITE 14: note = RuvC_P5
  REGION 132..216: note = Tnp_domain
  SITE 140: note = Tnp_P1
  SITE 170: note = Tnp_P2
  SITE 178: note = Tnp_P3
  SITE 179: note = Tnp_P4
  SITE 191: note = Tnp_P5
MKPFVKRQKNDAADAEAIVIAAQRPEMRFVEPKSEEQQARAVLFRARQRLVHQRTDLVNALRAILYEYGHVVAQGIHHLTRIKEIVEETKSNLPELVRHECQDLIDQIAWKTQRIEAKTVQLRKLATETETVRRLQTMPGVGPLTALAVEAFAPDMASFKRGRDFAAWLGLVPRQHSSGGKERLGRVSKEGQADIRQLLIIGAMSRLNWLGRRSISTGSWLAHMLARKPRMLVAIALANKMARAIWTMLRTNEDHRNPASAAAA

SEQ ID NO: 14792 - protein, 345 aa, unidentified
  source 1..345: note = protein_d07f18c
  REGION 6..147: note = RuvC_domain
  SITE 9: note = RuvC_P1
  SITE 51: note = RuvC_P2
  SITE 86: note = RuvC_P3
  SITE 88: note = RuvC_P4
  SITE 91: note = RuvC_P5
  REGION 210..299: note = Tnp_domain
  SITE 218: note = Tnp_P1
  SITE 250: note = Tnp_P2
  SITE 258: note = Tnp_P3
  SITE 259: note = Tnp_P4
  SITE 272: note = Tnp_P5
MYRTKVGVDLAKEVIQVCIYRNKKVQSNIEMTPNEFLCWLMNAKPVTIIFEACGTSNYWKQKATEAGHDARLISAKLVAVVRQNQKTDKNDALAIVQAALLPDVTFIGGKTVEQQQLQSIKRLKELAVKHQGASQKQLVSLLLELNIRISNRRGGIICAIEGVLEDATNGLSAECRAAIYTAKEHLKSLIDAVHRYDDCLEKSVVAHADCKKLLKLEGVGTMNAINLYLALGCAELGVFSKGKDASACIGLTPIQHSSGGVVKLGSIGKHCKNSMLRSQLICGAMAAVHQAVIREAKTKKDVWLKGLVERRGKKCAAVALANKTVRTAFAMLTQGTEYKAELLVA

SEQ ID NO: 14793 - protein, 275 aa, unidentified
  source 1..275: note = protein_72972e0
  REGION 1..109: note = RuvC_domain
  SITE 16: note = RuvC_P2
  SITE 46: note = RuvC_P3
  SITE 48: note = RuvC_P4
  SITE 51: note = RuvC_P5
  REGION 144..232: note = Tnp_domain
  SITE 152: note = Tnp_P1
  SITE 182: note = Tnp_P2
  SITE 190: note = Tnp_P3
  SITE 191: note = Tnp_P4
  SITE 204: note = Tnp_P5
MQWLNTFGETFHCVMEATNIYHEALADFLFQQQITDFTKTDNLRSKTDKIDAKMLADYADEKRHKLPIYQPISPAQRELLRKNRQLDHLKKQLAQEKTRLTMLLDSDCIASTQQMIAFIKAQIKALEKTIKQCINADNTLKNNVKLLCTIPAIGFATAVQLIAHLGDGNRFKNAKAAATFAGLTPMIKSSGKSLNTVIGISKIGQSDIRKALFCPAMNFAFGSYKNSVYRSFVLRLLECGKPKMVIITALMRKLVTIAQAVLQKQTAFNLDTFMK

SEQ ID NO: 14794 - protein, 341 aa, unidentified
  source 1..341: note = protein_e864836
  REGION 6..147: note = RuvC_domain
  SITE 9: note = RuvC_P1
  SITE 52: note = RuvC_P2
  SITE 87: note = RuvC_P3
  SITE 89: note = RuvC_P4
  SITE 92: note = RuvC_P5
  REGION 211..302: note = Tnp_domain
  SITE 219: note = Tnp_P1
  SITE 249: note = Tnp_P2
  SITE 257: note = Tnp_P3
  SITE 258: note = Tnp_P4
  SITE 270: note = Tnp_P5
MQIALLGIDLGKNSCSVAGIDAAGQVLLRRRLHRDSIVKLAAKFPGCIVAMEACCGAHHLGRVLRKQGHVVRLMSPEYVRPYVKAQKNDDRDAEAIAEAATRPTMRFVELKTEEQLDLQSLHRARDRLVGERTALINQLRAILLERGITVPQGRKKLESVLPQVIESSGDLLTDRIRRLLKEMWQDLRDLSERISSFDDEFTAFSRDDASCQRLESIPGIGSLNATAFVAAIDQAQAFARGRDLAAWLGLVPRQMTTGGRPKLLGITKRGNGYLRRMLIHGARAAMPHLARTQTATGSWLRRLIARAHPNVVVVALAAKMARIIWAVLQKRVTFEHTAAAL

SEQ ID NO: 14795 - protein, 329 aa, unidentified
  source 1..329: note = protein_1c2497b
  REGION 4..158: note = RuvC_domain
  SITE 7: note = RuvC_P1
  SITE 60: note = RuvC_P2
  SITE 100: note = RuvC_P3
  SITE 102: note = RuvC_P4
  SITE 105: note = RuvC_P5
  REGION 200..286: note = Tnp_domain
  SITE 208: note = Tnp_P1
  SITE 237: note = Tnp_P2
  SITE 245: note = Tnp_P3
  SITE 246: note = Tnp_P4
  SITE 259: note = Tnp_P5
MYHVGIDVSKAKLDICLLADGLDGKRKTKSLPNGISSAEAVINWLVMQKREPKQARIVMEATGIYHEHLAYGLHRAGVSVSVVNPCRIREFAKGMGILTKTDKVDAYVLACYSSLKQPQEWQPPSEEVRKLRALLQHRDVLLEDKLRTENRVKTLSSTQAPEEVMMSLSLMINHLKDELARIESLISKHVDNHPGLKDDLALLTSINGVGAQTGLNMLAELRGNTFESASQAAAYLGVVPIERRSGSSVRGKSRLSKTGPSKIRAKLYMAALTAISKNMHVKNQYERLLLKGKAKMQALGAAMRKLVHLCYGVLHTQQPYSQDYGMVTE

SEQ ID NO: 14796 - protein, 343 aa, unidentified
  source 1..343: note = protein_e8b099c
  REGION 9..150: note = RuvC_domain
  SITE 12: note = RuvC_P1
  SITE 55: note = RuvC_P2
  SITE 90: note = RuvC_P3
  SITE 92: note = RuvC_P4
  SITE 95: note = RuvC_P5
  REGION 213..305: note = Tnp_domain
  SITE 221: note = Tnp_P1
  SITE 251: note = Tnp_P2
  SITE 259: note = Tnp_P3
  SITE 260: note = Tnp_P4
  SITE 272: note = Tnp_P5
MANPKIDVLGVDLGKNSCSVAGLDDSGAVVLRRRMTRQGLIKFASKLPGCVVAMEACCGAHFLARIFQSHGHLVRLMSPEYVQPYVKAQKTDDRDAEAIAEAATRPTMRLVTPKSEAQLDLQILHRARARLVAERTRLTNQLRAMLLERGIILPKRRGPLIKRLDKIMADNPPISARMLCLLHDLREEWAELDRRIGAYDDELVTMTREDDLARRLVTVPGIGVVNATALVAAVGDASAFAKGRDLAAWLGLTPRQHSTGGKTKMLGISKRGNRYLRTQLIHGARAAMRHFAEQRTAMGKWLRNLLARAHPNVVVVALAAKLARIAWAVLRRGDVYQSQEATI

SEQ ID NO: 14797 - protein, 320 aa, unidentified
  source 1..320: note = protein_9813d3c
  REGION 9..118: note = RuvC_domain
  SITE 58: note = RuvC_P3
  SITE 60: note = RuvC_P4
  SITE 63: note = RuvC_P5
  REGION 182..268: note = Tnp_domain
  SITE 190: note = Tnp_P1
  SITE 220: note = Tnp_P2
  SITE 228: note = Tnp_P3
  SITE 229: note = Tnp_P4
  SITE 241: note = Tnp_P5
MDRTTYGLDIAKNVMQLHWVDGETGEIGRKKLARARLGEFFAQRQPARQVRAFVRSNKDDAADARAIWLAAQHSDIRRAPVKTIEQQAVMSLHRARSHWVSVRTATINMLRSLLYEFGVVLPGGKKAALKTMGVKRAEIDDQLSPLMRRLADLQLETLKEVERSIDRLEAEIAGQQRRIDQARVLREVPGIGVLGATALAATLGDASGWRSGREFAASLGLVPAHSGTGGKTRIGHLSKRGDPYLRTLLIHGARSVIAHAKVMPVWLEQLLRRRPPNVAVVALANKMARTAWALVAHGRVYRSEWKSTPPSGCGAQAQAA

SEQ ID NO: 14798 - protein, 341 aa, unidentified
  source 1..341: note = protein_fd639f9
  REGION 6..148: note = RuvC_domain
  SITE 9: note = RuvC_P1
  SITE 52: note = RuvC_P2
  SITE 87: note = RuvC_P3
  SITE 89: note = RuvC_P4
  SITE 92: note = RuvC_P5
  REGION 211..301: note = Tnp_domain
  SITE 219: note = Tnp_P1
  SITE 249: note = Tnp_P2
  SITE 257: note = Tnp_P3
  SITE 258: note = Tnp_P4
  SITE 270: note = Tnp_P5
MSIATLGIDLGKTSMHIVGLDASGKPVHRKKLTRTALIRFLSNLAPCRVAMESCAGSHDIARKADAMGHDAVLLPAQFVRPYTKGQKNDNSDAEAIAEAATRPTMPTVSIKDATQQEIQFLHRTRQGWIKQRTETANRVRAMLLEFSITVPKRILNLRRALPGILEDAENDLPDGVRQLVADHWQQLQDLDDKIADITQRVERIPVRDARAARLMSIPGIGPMIATAMVAAVGDGTQFTQGRGLSAWLGLVPQQFTTGGKPRLLGISKRGNRYLRTLLIHGARAVLQQAHRGDDALRRWIQQVNGRVHRNKAAVALANKLARVAWAVLTRGETFRASAAAA

SEQ ID NO: 14799 - protein, 343 aa, unidentified
  source 1..343: note = protein_bb97271
  REGION 40..190: note = RuvC_domain
  SITE 43: note = RuvC_P1
  SITE 85: note = RuvC_P2
  SITE 125: note = RuvC_P3
  SITE 127: note = RuvC_P4
  SITE 130: note = RuvC_P5
  REGION 222..307: note = Tnp_domain
  SITE 228: note = Tnp_P1
  SITE 257: note = Tnp_P2
  SITE 265: note = Tnp_P3
  SITE 266: note = Tnp_P4
  SITE 278: note = Tnp_P5
MHRLQATIGASQRLLVNPSEPKNHSVGAQLMAMPAKQFIIGIDVAKVELVSYCEQTGQHQSFRNTQPEIRKWLALQPANTAICVEATNIYHLDLVEMAYEKGFAVYVVDGYQLSNYRKGIGGRVKTDASDACLLARFLDREGSALRPWVPPPPVYRKLQSLLRRRSALVSARTSLVQSWSNEAFLKEAFNSFIKHFESLDLLIQKQLKTVVREAGLTEQVVRCQKVEGIGFLTAVALVTAFIRGEFRSSDEYIAFLGMDLKVADSGQKSGRRRLTKRGCSEVRRLLHNAAMAASKSAAWKELYEYYRSKGKAATQVLVILARKLARVAFALMKTQGEYVSRRA

SEQ ID NO: 14800 - protein, 344 aa, unidentified
  source 1..344: note = protein_0df55f2
  REGION 6..147: note = RuvC_domain
  SITE 9: note = RuvC_P1
  SITE 52: note = RuvC_P2
  SITE 87: note = RuvC_P3
  SITE 89: note = RuvC_P4
  SITE 92: note = RuvC_P5
  REGION 210..301: note = Tnp_domain
  SITE 218: note = Tnp_P1
  SITE 248: note = Tnp_P2
  SITE 256: note = Tnp_P3
  SITE 257: note = Tnp_P4
  SITE 269: note = Tnp_P5
MKITTIGIDLAKTLFQVHGVDKQRKAGLKKQLKRKDVMSFFANLEPCLIGMEACGSAHYWARKLSELGHTVRLMAPQFVKPYVKTNKSDRNDAEAICEAVGRPNRRFVPVKTAPMQAVLALHRARQGFVKARTQGNQIRGLLAEFGIVIAKGISHITERLPAILEDGENGLPGMMRELLQRLDENLKDMDKQVAELERQIKLWHRGHEPSRQLEAIAGFGPITASAFVATVGDAKSFKNARQVPAWLGMVPRHEGTGGKAKLGRISKRGDVYLRTMLIHGARSVIAHIERKPDHADEWLKKLLARRNKNVAAVALAAKNARIAWALLAHERSYQHDYVATRKAA

SEQ ID NO: 14801 - protein, 339 aa, unidentified
  source 1..339: note = protein_fbbd9c2
  REGION 18..169: note = RuvC_domain
  SITE 21: note = RuvC_P1
  SITE 68: note = RuvC_P2
  SITE 106: note = RuvC_P3
  SITE 108: note = RuvC_P4
  SITE 111: note = RuvC_P5
  REGION 211..298: note = Tnp_domain
  SITE 219: note = Tnp_P1
  SITE 249: note = Tnp_P2
  SITE 257: note = Tnp_P3
  SITE 258: note = Tnp_P4
  SITE 271: note = Tnp_P5
MKSLLSTKHYKVMKSIYVGIDISKNTLDFCVRSSGVASFHKIGNKIKSIRKLLKSIAKIDSKAFIAMENTGYYNYNLYQTLKDFDFNVYVIDPKHIKRSIGLVRGKNDKVDAKRIAIFIERNHQDFECWEPCSEAIRSLKILMGQRRSKIKQRKGIKQQMADLKDIVFNGSTRKLIKINQKAIKELDRHIHEIETLIRAEIKSDPVLQEQLKRIKTVPGIGDVTAWMIAIKTEGFQRLTDPRKLACFAGVVPFEQQSGTSLKTRPRVSKMADMALKSVLQMAAMRAVRMQNDLQVYYLRKVEEGKNKMSVLNAVRNKLLHIAMALIKNQTNYKNRLELS

SEQ ID NO: 14802 - protein, 389 aa, unidentified
  source 1..389: note = protein_e085336
  REGION 4..162: note = RuvC_domain
  SITE 7: note = RuvC_P1
  SITE 60: note = RuvC_P2
  SITE 101: note = RuvC_P3
  SITE 103: note = RuvC_P4
  SITE 106: note = RuvC_P5
  REGION 265..352: note = Tnp_domain
  SITE 273: note = Tnp_P1
  SITE 303: note = Tnp_P2
  SITE 311: note = Tnp_P3
  SITE 312: note = Tnp_P4
  SITE 325: note = Tnp_P5
MIFVGIDVAKNKHDCCIFNSDGLILEEGFTFSNNSNGFNKFKAALAKHSPNLDNIKVGLESTGHYSNNIVNFIKKNNLELKIFNPLAVNLYRKALTLRKTKTDKIDAQFIAQMLFSDDSEPYLPIDYHINEIKSLARHRYRLVGHRGKLKISLTRILDIAFPELSSIVYTIHQKSCYALLLKFPTAEEISKCHLTKLTNILSKASKGQYNREKAKQIKELAKISIGTPYLSIGFELQQTIRLIQNIQCEIDLLDKKIKEIVEETHTPLLTIPGISYVLASIILSETGNIKNFSNSGKLLAFAGLEPSTHQSGKYTATMSRMVKRGSKYLRWALMQAARTVSERVPVFKEYLALKRSQGKHYLVAMSHVAKKLLRVIFHLLQNDEKFVSA

SEQ ID NO: 14803 - protein, 315 aa, unidentified
  source 1..315: note = protein_94cf3c6
  REGION 8..157: note = RuvC_domain
  SITE 11: note = RuvC_P1
  SITE 53: note = RuvC_P2
  SITE 93: note = RuvC_P3
  SITE 95: note = RuvC_P4
  SITE 98: note = RuvC_P5
  REGION 188..272: note = Tnp_domain
  SITE 196: note = Tnp_P1
  SITE 225: note = Tnp_P2
  SITE 233: note = Tnp_P3
  SITE 234: note = Tnp_P4
  SITE 246: note = Tnp_P5
MTSPRPVIGIDVAKDSLSLYRADSGQASEIPNDTRSIKTWLKSLPARSAIAIEATGIYHLDVASLAHARGHSVYIINGYRLSNYRKGIGGRNKDDRSDARLLARYLAHEMAQLQPWEPPHKAYTRLQTLLHRRAVLVRSAGALRQSFSQDPLLKNALKPLLKRMSALEERLKKLIDQALNESGLAEQSKRCQAVEGIGPLTAAALNMALLRGTFRNSDAFIAFLGLDVRLKESGRYCGQRKLTKQGDPEIRRLLHNAAMAAARTQRWQETYQGYLKRGLKRTEALTILARKLARIAFALMQKQVDYNPKQGAPLT

SEQ ID NO: 14804 - protein, 267 aa, unidentified
  source 1..267: note = protein_f14477d
  REGION 5..151: note = RuvC_domain
  SITE 8: note = RuvC_P1
  SITE 53: note = RuvC_P2
  SITE 91: note = RuvC_P3
  SITE 93: note = RuvC_P4
  SITE 96: note = RuvC_P5
  REGION 211..267: note = Tnp_domain
  SITE 219: note = Tnp_P1
  SITE 249: note = Tnp_P2
  SITE 257: note = Tnp_P3
  SITE 258: note = Tnp_P4
MEEYIGLDVSMKETAVAIRREGKRVWRGKCASDPKIIAELIRKRAPAAKRVVFETGPLSVWFYHALRAERVPAICIDARHAKAALDMAPNKTDANDADGLAHLAEVGFFREVRVKGFDSMLTRTLVAARTRLVRITTELSNQIRGIMKTFGLLVPAGKGTTFEKNVRRLLIDHEELALIVLPMLEAWRGIRIRAAELGRQLVADARQSQACRMLMSIPGIGAITATSFATAIEDPGNFKTSRSVGAWIGLTTRRYESGEVDYDGHIS

SEQ ID NO: 14805 - protein, 360 aa, unidentified
  source 1..360: note = protein_aa6f80f
  REGION 48..193: note = RuvC_domain
  SITE 51: note = RuvC_P1
  SITE 97: note = RuvC_P2
  SITE 133: note = RuvC_P3
  SITE 135: note = RuvC_P4
  SITE 138: note = RuvC_P5
  REGION 261..322: note = Tnp_domain
  SITE 269: note = Tnp_P1
  SITE 298: note = Tnp_P2
  SITE 306: note = Tnp_P3
  SITE 307: note = Tnp_P4
MGDSPMVCWGVAGRSLTHKDSWVTEQEAPARPIRHLWEAPVFTERTSVGLDVHARSIVAAALDGQTSELHQARLTPSFEHVRSWLATLPGPVAVAYEAGPTGFGLYRDLTAAGIRCEVVAPSKLQRPVGDRVKTDVRDSIHLARLLRLGETTSVCIPTVAQEAARDLVRAREDCRGDLMRARHRLSKLLLRHGLVYDGGTAWTGAHDRWLRTVAASALTGAATRVAFDADYEHVLTMKARRDRLDVAIVAMAGDSEFTPIVRRMSCLRGVSTLTAFALTVEIGDWDRFTGNSIGSFVGLVPSEYSSGMSSGAGGDHQDRQHPCPPIARRSSLAPSGALSRRCGDAGTLGTGSRSGSGAWR

SEQ ID NO: 14806 - protein, 323 aa, unidentified
  source 1..323: note = protein_f2579b2
  REGION 8..150: note = RuvC_domain
  SITE 11: note = RuvC_P1
  SITE 52: note = RuvC_P2
  SITE 92: note = RuvC_P3
  SITE 94: note = RuvC_P4
  SITE 97: note = RuvC_P5
  REGION 191..278: note = Tnp_domain
  SITE 199: note = Tnp_P1
  SITE 229: note = Tnp_P2
  SITE 237: note = Tnp_P3
  SITE 238: note = Tnp_P4
  SITE 251: note = Tnp_P5
MNKDIKYFGIDISHLVFDVTDSNGNYYQFKNTSLGFKKFLKLLDSNSHCVMEATGYYHYQLAYYLLESGVKVSVENPLAVKRFIQMKLSKIKTDKSDSKLICEYAKQVELKLWQGNSKHQTECLQMTRLLSVYTKQSTMLKNKLHGEAVLGNPSKDVLRSLKRSLEQVQKEMKTLEEKLIIIVKQVHQGVLTRLKSIPGIGNKTALMLVVLTDGFERFTSGSELCSYAGLTPIIRKSGSSVNGRSRISKIGNQKLRNLLFMCSFNACKYNKACREIYERIVAKGKSKKLALIAVCNKLLKQAFAIAKSGLIYDDSYRSILVKN

SEQ ID NO: 14807 - protein, 403 aa, unidentified
  source 1..403: note = protein_7e65223
  REGION 5..160: note = RuvC_domain
  SITE 8: note = RuvC_P1
  SITE 59: note = RuvC_P2
  SITE 98: note = RuvC_P3
  SITE 100: note = RuvC_P4
  SITE 103: note = RuvC_P5
  REGION 274..359: note = Tnp_domain
  SITE 281: note = Tnp_P1
  SITE 311: note = Tnp_P2
  SITE 319: note = Tnp_P3
  SITE 320: note = Tnp_P4
  SITE 333: note = Tnp_P5
MRSVLSIDVANGKSEVLLITEHGEVLIEPYEVNHCLNELNKLKDKINSFNLDDLTIFMESTSTYHLPIQRFFTNNNFKVQVINPILGKNNTRNLRKTKTDIEDCYNLADLFFKNTVKIYTKEMNTIYSNMIELSRQEKHLTENIVRSKNRFKQIIANAFPEYIKCFTSNDIYGETSLNFIKEFPHADIIKSKRIDALANNIYKSTKGYLPYSRCLTKAKKIKELANNSYPGIEVNSCEVNNLINIVDIIIYNSNKLDEVKKNIINLAKQTPYFDIINSIYGIGETSTAQIIAELGDINRFENIKQLNAFCGLDPTIIQSGKSINYNGPISKRGNRNARKILFITCCSIIRSSVLHNIDTDILVYYRKKQAENKHFKECITACSTKLLRIIFAMCKNNSLYVQK

SEQ ID NO: 14808 - protein, 322 aa, unidentified
  source 1..322: note = protein_3f6fe28
  REGION 6..134: note = RuvC_domain
  SITE 38: note = RuvC_P2
  SITE 73: note = RuvC_P3
  SITE 75: note = RuvC_P4
  SITE 78: note = RuvC_P5
  REGION 190..277: note = Tnp_domain
  SITE 198: note = Tnp_P1
  SITE 228: note = Tnp_P2
  SITE 236: note = Tnp_P3
  SITE 237: note = Tnp_P4
  SITE 249: note = Tnp_P5
MHGVDRHGKTQWQVKYSRQKWLDGLSRKVPAGAEIGMEACASSHHWARELQKRGYHVRLIAAQFVKPYVKSNKNDRVDAEAICEAMSRPNMRFVAPKTVAQQDIQAAHRIREELVGQRTAKANQIRGLVGEYGIIAPVGIQQLRQALPGWLEDAENGLTDSFRALLNGLAEDLRYLDDRIVESVRKNPVAKRLMTLCGVGPLTASALSGALGDGKAFRRGRDFAASLGLTPKQHSTGGRDRLLGISKRGDSYLRKQLVHGARAVLRHVDGKDDGLSHWLKGLASRKHFNVATVALANKTARIAWALAHGEEDYDEKLAAAGA

SEQ ID NO: 14809 - protein, 328 aa, unidentified
  source 1..328: note = protein_72feabe
  REGION 4..155: note = RuvC_domain
  SITE 7: note = RuvC_P1
  SITE 60: note = RuvC_P2
  SITE 100: note = RuvC_P3
  SITE 102: note = RuvC_P4
  SITE 105: note = RuvC_P5
  REGION 200..286: note = Tnp_domain
  SITE 208: note = Tnp_P1
  SITE 237: note = Tnp_P2
  SITE 245: note = Tnp_P3
  SITE 246: note = Tnp_P4
  SITE 259: note = Tnp_P5
MFYLGMDVAKAKLDCCLLLDEATGRRKTKAVNNTRPGIVELLALVAKQNISPQELHVVMEATGVYHEQAALALADAGVTVSIVNPAQVKDFGRGLAVRTKTDGVDSFVLARYGALLKPVAWQPPPPEARMLQALLARREAIAQDMQRERNRQEKADATDTPEPIRQSLADSIGFLSRQLAQLQQDIDRHIDRHPGLKHDLALLQTIPAVGPKVGSNMLSVMHSHDFGSAEQLAAYLGLVPVERQSGSSVMGRARLSKAGPARIRAVLYMAAVVATKYNPHIKAVYERLLARGKSRMSALGAAMRKLVHLCFGVIKTQTPYQPNYVKIA

SEQ ID NO: 14810 - protein, 320 aa, unidentified
  source 1..320: note = protein_7d3902c
  REGION 10..152: note = RuvC_domain
  SITE 13: note = RuvC_P1
  SITE 55: note = RuvC_P2
  SITE 95: note = RuvC_P3
  SITE 97: note = RuvC_P4
  SITE 100: note = RuvC_P5
  REGION 190..275: note = Tnp_domain
  SITE 198: note = Tnp_P1
  SITE 227: note = Tnp_P2
  SITE 235: note = Tnp_P3
  SITE 236: note = Tnp_P4
  SITE 248: note = Tnp_P5
MAKPIEPIRIGIDVSKAELVIARSDSKSLEKIANTPRAISRWLKTLPCGTPLAFEATGAYHRTLASLAHQAGFALYLLDGYRLNRYRDGIGNRAKTDPADARLILRYLSKELSELKPWVPPHEAFYRIQSLLRRRASLVHTRVALTQSLGDVPELKNASKRLSNNIKDIERLIERRLKEAMAEVGWRPDAQRCKAIEGIGDLTSVALANTFHRGEFKSSDAFIAYLGMDVRVRDSGKQVGRRKLTKKGDPELRRLLYNAAMSARRTKAWAGQYETYLSQGLKTTQALVKLARKLARIAFALMKNQSTYRPKVPVTCCAVP

SEQ ID NO: 14811 - protein, 392 aa, unidentified
  source 1..392: note = protein_c1f59b7
  REGION 4..161: note = RuvC_domain
  SITE 7: note = RuvC_P1
  SITE 60: note = RuvC_P2
  SITE 100: note = RuvC_P3
  SITE 102: note = RuvC_P4
  SITE 105: note = RuvC_P5
  REGION 267..354: note = Tnp_domain
  SITE 275: note = Tnp_P1
  SITE 305: note = Tnp_P2
  SITE 313: note = Tnp_P3
  SITE 314: note = Tnp_P4
  SITE 327: note = Tnp_P5
MFFIGIDIAKRSHQAAVTDVSGNIIIKPFNFRNSSVGFNQFLSMLASNSVPKDDCIIGLESTGHYWYPLYFFLVEQKFNVKVFNPIQTAAFREITIRKVKNDNLDSIMIADFTRFGRYSETHIPSENMLALKNLSRFRLSVCDICGSLKKRTIVLLDQVFPEYDTVFCDIFGTTSKLLLEKFSTPEEFSEISTTKLANFIHKVSRGRLGREKAELIKAAANNSIGISYAVDTFSFQIKQLIEQIEFMENQLSEIDAEMAKLLALSEYSVITTISGVGPTLGSIIVSEIGDIERFETSSKLVAYAGLDASVKQSGEFNSSQNKISKRGSPHLRRALWMAAFMSLQCDPALYDYYSRLRARGKSHRLATTAVARKLCIIVWAIMKSKQPYSPNI

SEQ ID NO: 14812 - protein, 424 aa, unidentified
  source 1..424: note = protein_afcae56
  REGION 9..157: note = RuvC_domain
  SITE 12: note = RuvC_P1
  SITE 63: note = RuvC_P2
  SITE 97: note = RuvC_P3
  SITE 99: note = RuvC_P4
  SITE 102: note = RuvC_P5
  REGION 259..347: note = Tnp_domain
  SITE 267: note = Tnp_P1
  SITE 298: note = Tnp_P2
  SITE 306: note = Tnp_P3
  SITE 307: note = Tnp_P4
  SITE 318: note = Tnp_P5
MKVTFQTCCGVDVHKSFLVATIIKTSSGIEPSYQKRRFSTFNNSILEFKKWLLENECLYVCMESTGKYWIPVFNILEDEINVTIANPKWVKAVKGNKDDTKDSKWIGDLFRLGLVRGSYIPCKKIRILREFTRYRYKLVSCRSSEKNRYQNALTVCNVALDSVVSDIFGKSSTSIIDYLLEQSGTSIDHEVIASKLLKRLKAKEDAVIESIEGYQMTDSQKYRMHLVRAHMDYITAAINDVDSEIESLIASDPDYENAVELLCTIPGVKYDSAITIISEIGIDMSQFCSSKRLCCWAGLTPGSNESAGKKKSVRITRAGVYLKPALVQCAHAAVKSDKSPYYKKKYESLVKRRGKKRAIIAIARMILTAIYQMLSTGEQWNPSDLYKVDMPEALLEKQKQKAIKQAQKLLIREGLLPPTEPIAS

SEQ ID NO: 14813 - protein, 424 aa, unidentified
  source 1..424: note = protein_2190e62
  REGION 23..183: note = RuvC_domain
  SITE 26: note = RuvC_P1
  SITE 81: note = RuvC_P2
  SITE 122: note = RuvC_P3
  SITE 124: note = RuvC_P4
  SITE 127: note = RuvC_P5
  REGION 290..376: note = Tnp_domain
  SITE 298: note = Tnp_P1
  SITE 328: note = Tnp_P2
  SITE 336: note = Tnp_P3
  SITE 337: note = Tnp_P4
  SITE 349: note = Tnp_P5
MKFKMQDKQNQLIERISDKHLVVGIDIAQLTHVARAVNYRGIVVGDPLSFENNEDGFAKLLDWINKLKNVKGLDTAIVGMEPTGHYWLNLSQWLYDRNIDVVTVNPHLVKKIKENRDNTQSKSDKKDALVIADMVKNGYYSFIRPTTEAFEKLRVLMSNRDVIVKRHVSTSNQIHRWVDIIFPELRQVFKDVTCKGAIVTLRLFPTPKELRSMEAIDIVTGWRTEMKRQPGIKKAEALIKLAKNSVGNDKAHDAYKLHLKQLLEEFDLATSQLEIVDKEVSEALGSITFTEKLLSIKGLTIVMLGGILGENGDLSQFAHGNSLLRHAGLHLVEASSGKWKGQIVISKRGRSRLRRFLYLATMCLVMNNPEFREIHAHNVKVKKMKKMKSIMKLIGKFARMIVGIARHNEPYCAEKVHPLAPLAA

SEQ ID NO: 14814 - protein, 341 aa, unidentified
  source 1..341: note = protein_a60c093
  REGION 8..162: note = RuvC_domain
  SITE 11: note = RuvC_P1
  SITE 64: note = RuvC_P2
  SITE 102: note = RuvC_P3
  SITE 104: note = RuvC_P4
  SITE 107: note = RuvC_P5
  REGION 205..292: note = Tnp_domain
  SITE 213: note = Tnp_P1
  SITE 243: note = Tnp_P2
  SITE 251: note = Tnp_P3
  SITE 252: note = Tnp_P4
  SITE 265: note = Tnp_P5
MEKHFYFIGLDIAKETFVASIYHTPDRPVLTKENFSNNPQGYKELIVWLQDNQINTTNCHICLEATGVYSDGVAYYLSAQGYRVTVEPPLRVKRAFHPAGHKTDPVDSRQIAEYAYRFSDRLIPWHPKEELLEKIRQLLSVREQFTKQKVALKNARDAYQRQKVQVELIQKAHQETLAQLEKQITRIDQELDRLMKENPDLSQKFHHLKSIPGFGLLLSAHLLVMTENFTSINDYQRLAAFVGIVPYQHQSGTSILKKARIRHYGPRACRKLLRLAAQSVATHNMTFRKYYLRKLAEGKAKALVLNNIANKLLKLACALIRDNSRYIKEYHSFHPMYVKGT

SEQ ID NO: 14815 - protein, 260 aa, unidentified
  source 1..260: note = protein_aaa19ec
  REGION 1..77: note = RuvC_domain
  SITE 16: note = RuvC_P3
  SITE 18: note = RuvC_P4
  SITE 21: note = RuvC_P5
  REGION 170..256: note = Tnp_domain
  SITE 178: note = Tnp_P1
  SITE 208: note = Tnp_P2
  SITE 216: note = Tnp_P3
  SITE 217: note = Tnp_P4
  SITE 229: note = Tnp_P5
MLIKKFAKSLSLRKTKTDKKDAHGIALKLLSDPNREQFQHNNRQVELKILTRHIHRLKKKQSDWKVQYTRCLDIIFPELDKIVGKHSEYTYQLLTRYPNPQKRIEAGFDKLIEIKRLTASKIQDILSVAPRSIGTTSPAREFEIIEIIKHYKRLIDKAEKCVNDLMAEFNSVITTVTGIGNRLGAVILAEIQNIHAFDNPAQLQAFAGLDSSIYQSGQIDLAGRMVKRGSPHLRWALIQAAKACARFSPAFKAYLKTKLE

SEQ ID NO: 14816 - protein, 339 aa, unidentified
  source 1..339: note = protein_9d1dadc
  REGION 6..147: note = RuvC_domain
  SITE 9: note = RuvC_P1
  SITE 52: note = RuvC_P2
  SITE 87: note = RuvC_P3
  SITE 89: note = RuvC_P4
  SITE 92: note = RuvC_P5
  REGION 211..297: note = Tnp_domain
  SITE 219: note = Tnp_P1
  SITE 249: note = Tnp_P2
  SITE 257: note = Tnp_P3
  SITE 258: note = Tnp_P4
  SITE 270: note = Tnp_P5
MKLKRIGVDLAKQVFQLHGVDSHEQVVCRKQIKRAGLLDFFRQLEPCLVVMEACGSAHYWAREFRAQGHEVRLIAPQFVKPYVKGGKNDANDAEAICEAGSRPTMRYVEVKTEEQQAALSVHRIRSRVIRARTALSNEIRGLLSEFGLIEPRQGFAATRALLTRSLEPDSSLPAAMRELVGELRDELQETDNRVAHLDSLIQQQARQDERVQRLLQIEGIGPISATAMVASVGDARQFKSGRQLAAWLGLVPNQHSSGGKERLGRISKRGDRYLRTLLIHGARSALRTSAKKTDPRSVWLNELKCRRNMNIATVALANKNARIIWALLSKGESYHSMRS

SEQ ID NO: 14817 - protein, 400 aa, unidentified
  source 1..400: note = protein_7deb680
  REGION 10..164: note = RuvC_domain
  SITE 13: note = RuvC_P1
  SITE 62: note = RuvC_P2
  SITE 102: note = RuvC_P3
  SITE 104: note = RuvC_P4
  SITE 107: note = RuvC_P5
  REGION 270..356: note = Tnp_domain
  SITE 278: note = Tnp_P1
  SITE 308: note = Tnp_P2
  SITE 316: note = Tnp_P3
  SITE 317: note = Tnp_P4
  SITE 329: note = Tnp_P5
MSKQRARIWVGIDAGKGHHWAAVVDETGATLRSKKIENDESAILTALGEILDLADEVHWAVDISSRSSTLLLALLAAHGQQAVYVPGRTVNRMAGAYRGEAKTDARDAYVIAETARHRRDFATLDVPAQLAADLALLTAHRTDLITDRVRMVNRLRDVLTGMFPALERAFDYSARKGALVLLTGYPTSAALRRRGLSRLTAWLVNRGVRNADSVAATAVEAAQAQQTALPGEDAAAQIVADLATQILALDDRLKRLDRRIRDTFRTHPQAEIIESLPGMGSILGAEFVVAAGDLTAYTDAGHLASAAGLVPVPRDSGRRTGNLHRPKRYSRRLRRVFYLSAQTSIIRDGPNREYYLKKRGEGCKHVQAIIALARRRTSVLWALLRDNRTFTPVPPTAQAA

SEQ ID NO: 14818 - protein, 407 aa, unidentified
  source 1..407: note = protein_c482139
  REGION 4..160: note = RuvC_domain
  SITE 7: note = RuvC_P1
  SITE 57: note = RuvC_P2
  SITE 97: note = RuvC_P3
  SITE 99: note = RuvC_P4
  SITE 102: note = RuvC_P5
  REGION 270..356: note = Tnp_domain
  SITE 278: note = Tnp_P1
  SITE 309: note = Tnp_P2
  SITE 317: note = Tnp_P3
  SITE 318: note = Tnp_P4
MVFVGIDWAEEHHDVCVMSVDGQPLGRARVAEGVDGVARLHALVADHADDPAEVVVGIETDRGLLVTSLVATGYQVYAVNPRAVDRYRDRHAVSGAKSDGGDAKVLADLVRTDRHNHRQVAGDSVLVEAVKVTARTHQSLIWTRQRQVNQLRSALREYYPGALATFGTDLAHPDALAVLATAPTPELGRRLSSARIASALRRAGRVRNIDARAAAIRDGLRVPQLAAPTVVADAYGDTAKALINVIAALTVQIAELESALADRFEQHPDADILRSLPGLAVILGARVLGELGDDPNRYANAKARRNYAGSSPITKQSGSRKIALARYVRNRRLADAITWWAFCSLQSSPGARAFYDRRRAAGDTHHKALRALSNRWVGILHGCLRHHTPYDEATAWGHLTESHAAAA

SEQ ID NO: 14819 - protein, 343 aa, unidentified
  source 1..343: note = protein_e2bbe5b
  REGION 7..149: note = RuvC_domain
  SITE 10: note = RuvC_P1
  SITE 53: note = RuvC_P2
  SITE 88: note = RuvC_P3
  SITE 90: note = RuvC_P4
  SITE 93: note = RuvC_P5
  REGION 212..296: note = Tnp_domain
  SITE 220: note = Tnp_P1
  SITE 250: note = Tnp_P2
  SITE 258: note = Tnp_P3
  SITE 259: note = Tnp_P4
  SITE 271: note = Tnp_P5
MSEVTTIGLDIAKNVFHAHGTDTSGRPLFSRKISRTKLLEFFGKQPHCLVALEACGGAHHWARELTLLGHRVKLIPPAYVKPFVKRHKNDAVDAEAICEAAQRPNMRFVAIKSEEQQASALVFRTRDLLVRQRTQLINAIRGHLTEYGWVAPKGPSHITLLSDMLDGKMGSSLPDAATTMFRTMLSMLKELNCKIDELDKEIARRACEDVIARRLMTIPGVGPITATAIAALAPPAETFTRGRDFAAWLGLTPRQLSTGGKQKLGSITKMGERTLRRLIIIGCSAVVLQASKRGAPPGSWLEQMMARKPRMLVTVALANKTARIIWALLIKQEDYRAPVAAAV

SEQ ID NO: 14820 - protein, 347 aa, unidentified
  source 1..347: note = protein_2e0b09b
  REGION 5..152: note = RuvC_domain
  SITE 8: note = RuvC_P1
  SITE 55: note = RuvC_P2
  SITE 92: note = RuvC_P3
  SITE 94: note = RuvC_P4
  SITE 97: note = RuvC_P5
  REGION 212..297: note = Tnp_domain
  SITE 220: note = Tnp_P1
  SITE 250: note = Tnp_P2
  SITE 258: note = Tnp_P3
  SITE 259: note = Tnp_P4
  SITE 271: note = Tnp_P5
MKQYAGIDVSLESSSVCVVDAEGRILREGKVLSDPEALIAWLREHADPAERIGLEAGPLSQWLYAWMTAAGLPVELLETRHVRAAFKTMPVKTDKKDARGIAQLMRLGWFRPVHCKSLAAQEVRAVLTARKLLLSKLHDVEMSIRGILRGFGLKVGATTPRTYPARVRALVEGHPTLESLAEALLRARAVFGDELRGLERQMRAIGRQDERARRLMTTPGVGVVVALTFVSGIDKADRFRSSRMVGAHFGLTPKKYQSGEMDRSGRISKCGDAAVRAALYEAANVILTHPVRGSDLKTWALGVAQRAGPRKAKVALARKLAVVLHRMLRDDADFIAHPTAPPAMTAA

SEQ ID NO: 14821 - protein, 328 aa, unidentified
  source 1..328: note = protein_6b93302
  REGION 4..155: note = RuvC_domain
  SITE 7: note = RuvC_P1
  SITE 60: note = RuvC_P2
  SITE 100: note = RuvC_P3
  SITE 102: note = RuvC_P4
  SITE 105: note = RuvC_P5
  REGION 200..286: note = Tnp_domain
  SITE 208: note = Tnp_P1
  SITE 237: note = Tnp_P2
  SITE 245: note = Tnp_P3
  SITE 246: note = Tnp_P4
  SITE 259: note = Tnp_P5
MFYLGIDVSKLKLDCTLLLDPENDKRKSKVLPNSRDGARDLVRWCFKHGVGADRIHAVLEATGPYHEQVATTLHDGGVTVSIANPANVHDFGRALAMRSKTDALDSLVLARYGVAMRPAAWQPPPVHVRELRALITQLEALSKDRLRTLNRQEKIEASAASELVERSISDTLSFYDQEIALLEKAIDDHIDRHPDLKDDAKLLSTIPGVGPKVARTMLRVMRTHQFKCAEDLAAYLGLVPVQRQSGTSLHGRSRMSKAGPADVRALVYMAGVVASKHNPHVRALYQRLLATGKTKMSALGACMRKVVHLCFGVLKTRQAYRPDYAFSA

SEQ ID NO: 14822 - protein, 362 aa, unidentified
  source 1..362: note = protein_66e9815
  REGION 23..183: note = RuvC_domain
  SITE 26: note = RuvC_P1
  SITE 81: note = RuvC_P2
  SITE 122: note = RuvC_P3
  SITE 124: note = RuvC_P4
  SITE 127: note = RuvC_P5
  REGION 290..360: note = Tnp_domain
  SITE 298: note = Tnp_P1
  SITE 328: note = Tnp_P2
  SITE 336: note = Tnp_P3
  SITE 337: note = Tnp_P4
MKFKMQDKQNQLIERISDKHLVVGVDIAQKTHVARAVNFRGIVIGEPLTFENNEEGFDSLFQWINRLKISKGYSTEIVGMEPTGHYWLNLSKWLYDQGVDVVTVNPHLVKRNKENRDNTQSKSDKKDALVIADMVKNGYYSFIRPTSEAFEELRVLMSNRDVIVKRLVSSANQINRWVDVVFPEFREVFKDVKGKGAITTLRLFPTPKELRSLDVKDIVNGWKSLMKRQPGLKKAQLLIKLSKNSVGTTQAYDAYKLHLKMLLDEFDLATIQLETVEKEVSEVLKNITFSDKLLGIKGLTEVTLGGILGETGDLSKFAHGNSLLRHAGLHLVEASSGKWKGQIVISKLRMVSFKAIFISSNT

SEQ ID NO: 14823 - protein, 349 aa, unidentified
  source 1..349: note = protein_09ba0df
  REGION 6..168: note = RuvC_domain
  SITE 9: note = RuvC_P1
  SITE 67: note = RuvC_P2
  SITE 105: note = RuvC_P3
  SITE 107: note = RuvC_P4
  SITE 110: note = RuvC_P5
  REGION 212..299: note = Tnp_domain
  SITE 219: note = Tnp_P1
  SITE 250: note = Tnp_P2
  SITE 258: note = Tnp_P3
  SITE 259: note = Tnp_P4
  SITE 272: note = Tnp_P5
MKKIFISIDFSKEKFDATIIKAEDLSEMLSVGHQEFINKVSGYRKMLRWVDSLCGADTCEDWLFCGENTGGYSQMMSDYLYSKGYDLWIENALSIKRAFAMKRGKSDRSDSLMIAEYAMRYQDKARLYEPLSPALSQLREVFLYRHMLVRHKCSFEVRRIEKRFTQQKSSAKTMISQSSRHILTELKHEIQKCDQRIQELLRSDEELSRIFGIITSMPGVGTINAVCLMVFTNNFTKFDYNARKIACYYGVAPFARDSGTSVHSAPKVGYLANKMIKSLLSQAALAAVNFCPAMSMYYHRLVDKGKKPMVALNNVKNKMLTIITAMVKNDCKYQPEYISINARSEMLNK

SEQ ID NO: 14824 - protein, 343 aa, unidentified
  source 1..343: note = protein_b3295ca
  REGION 7..149: note = RuvC_domain
  SITE 10: note = RuvC_P1
  SITE 53: note = RuvC_P2
  SITE 88: note = RuvC_P3
  SITE 90: note = RuvC_P4
  SITE 93: note = RuvC_P5
  REGION 212..303: note = Tnp_domain
  SITE 220: note = Tnp_P1
  SITE 250: note = Tnp_P2
  SITE 258: note = Tnp_P3
  SITE 259: note = Tnp_P4
  SITE 271: note = Tnp_P5
MQAVTTIGLDIAKSVFQVHGVDAEGKVLIRRKLKRRYVLAFFQKLPPCLVGIEACATSHHWSRELKALGHTVRLMPPAYVKPYVKRQKNDAADAEAICEAVTRANMRFVETKTPEQQSCLMLHRTRHLFIRQQTSVINAIRAHMAEFGIVAPVGRQGVEALLEVAADGGDNRVPEVARSCLAALGAQLRALKAQILEFDRRITAWHRSNETSRRLDAIPGVGPALATALVASVADPKAFRSGRNFSAWIGLVPKQHSSGGKDRLGSISKQGDRYLRSLFTAGALAVIRYAKIHGTKHRPWLTALLARRPTKVAAIALANKIARMAWAMMARGERYKEPVALAA

SEQ ID NO: 14825 - protein, 397 aa, unidentified
  source 1..397: note = protein_561f942
  REGION 4..160: note = RuvC_domain
  SITE 7: note = RuvC_P1
  SITE 57: note = RuvC_P2
  SITE 97: note = RuvC_P3
  SITE 99: note = RuvC_P4
  SITE 102: note = RuvC_P5
  REGION 274..361: note = Tnp_domain
  SITE 282: note = Tnp_P1
  SITE 312: note = Tnp_P2
  SITE 320: note = Tnp_P3
  SITE 321: note = Tnp_P4
  SITE 334: note = Tnp_P5
MIAVGVDVSKHKSTVAALSSDGEIMMKPTDFHHDQPTLKQLVSKLLSFQDNIKIVMEATGHYHKPILKIFLESNLFVSVVNPYVIKKYSENDIRKGKTDKKDAMRIAWYVLEKQHSIVPYNATNQKYDDLKYLSRQYGQCVSMRVKARVQFYNLLDNIMPGIQSIINSRTADPDDNFLYKFVKKYESYDKIKSMSESRFINSYLKLAYKSGARCPESKALKIYEKAKKSIVIRPLDTSTRIITREYIDLLKQTELSSNAIMHQMRSIACTLPEYETVLAMGGVGFKLAPIIIGEIEDVRRFTNARALNAFAGNDAPPFQSGQYESQNRHISKRGSAPLRKACYEVTQCLKMHQMIDDPVYQFILKKEAEGKPKNVAKMAGVNKFLHIYYARVMELYN

SEQ ID NO: 14826 - protein, 398 aa, unidentified
  source 1..398: note = protein_b142534
  REGION 4..160: note = RuvC_domain
  SITE 7: note = RuvC_P1
  SITE 57: note = RuvC_P2
  SITE 97: note = RuvC_P3
  SITE 99: note = RuvC_P4
  SITE 102: note = RuvC_P5
  REGION 275..362: note = Tnp_domain
  SITE 283: note = Tnp_P1
  SITE 313: note = Tnp_P2
  SITE 321: note = Tnp_P3
  SITE 322: note = Tnp_P4
  SITE 335: note = Tnp_P5
MISVGIDVSKEKSTVCILKPYGEILSSPFEIFHTESDLSGLVTMLQRFDEEVRVVMEATGAYHLPVLSHLKENGLYVSLINPFVMKEYRCKGLRRAKTDSLDAKMIANYGIDNWYHLENYEFSEEIYQELKLLGRQYAHYMKMRIESVLVLTNMLDYTMPGIKILLNGWDESSGKDKLADFVEEYWHYDNITKKSEKQFVNSYLKWAEKKGYHQSEAKAIKIYAMAKEGIPTLSSSAPSTKMLVLEAVRVLREVDNTLKLILTQMQELARSLKEYPVVRAMGGVGDVLAPKLIAEIGDVRRFHSGKALIAYAGIDAPPYQSGQFVGTNRHISKRGSSTLRKVGYETMRCLKTTKNVEDSVYQFMIKKEIEGKPKKVAKMAVLNKFLRIYYARVKEVYR

SEQ ID NO: 14827 - protein, 310 aa, unidentified
  source 1..310: note = protein_adac4c4
  REGION 8..152: note = RuvC_domain
  SITE 11: note = RuvC_P1
  SITE 51: note = RuvC_P2
  SITE 91: note = RuvC_P3
  SITE 93: note = RuvC_P4
  SITE 96: note = RuvC_P5
  REGION 186..271: note = Tnp_domain
  SITE 194: note = Tnp_P1
  SITE 223: note = Tnp_P2
  SITE 231: note = Tnp_P3
  SITE 232: note = Tnp_P4
  SITE 244: note = Tnp_P5
MQVEPSIIGIDVAKAELVIYFQGQIYSIENTPKAIRAWLKGLPAHCEIAIEATGTYHMDVIELAHRKGHHIYVIDGSRLHHYRKGTGGRAKTDASDAQLLARHLQHEKEALRRWSPPPKAYRTLQTLLRRRAALVKARTIIQQSLGAEPLLKAGLKRLISQINTLDAQIQKYLRDAAREAGLCDQVKRCKALEGVGDLTAYALVMAFLRGDFRNSDAFVAFPGMDVHVKDSGTKTGKRKLTKKGDSEARRLLYCAAMAARRSKRWAGVYQAYLDRGLATTQALVILARKLVRIAFALMKNGTDYQPTPAS

SEQ ID NO: 14828 - protein, 340 aa, unidentified
  source 1..340: note = protein_ae6a4ff
  REGION 7..149: note = RuvC_domain
  SITE 10: note = RuvC_P1
  SITE 53: note = RuvC_P2
  SITE 88: note = RuvC_P3
  SITE 90: note = RuvC_P4
  SITE 93: note = RuvC_P5
  REGION 209..294: note = Tnp_domain
  SITE 217: note = Tnp_P1
  SITE 247: note = Tnp_P2
  SITE 255: note = Tnp_P3
  SITE 256: note = Tnp_P4
  SITE 268: note = Tnp_P5
MGNVNIIGIDLAKRVFQLHGAGAEGTVLFRKKLSRSQFLKFLSKQPNCIVAMEACSTSHYWGREIVKLGHEVRLIPPIYVKPFVKRQKNDTTDAEAIAEAAVRPTMRFVAVKTADQQSHAMVFRTRELLVGQRTQLINALRGHLAEHGIVAAVGIVHFGKLVNAIEDEELPEIVRTMSRMFVDQISICSQKISMLNKTIRTYAAADQGAALLQTMPGVGPISAMAIKAFAPSMEEFKSGRDFAAWLGLVPRQHSSGGKERLGRASKMGQRDIRRLLITGAMSVVQWAGRKGTTAGSWLDRMMARKPLMLVAIALANKMARMIWAMLTRNEIYRDPVMIAT

SEQ ID NO: 14829 - protein, 411 aa, unidentified
  source 1..411: note = protein_b00c08a
  REGION 5..163: note = RuvC_domain
  SITE 8: note = RuvC_P1
  SITE 62: note = RuvC_P2
  SITE 102: note = RuvC_P3
  SITE 104: note = RuvC_P4
  SITE 107: note = RuvC_P5
  REGION 273..373: note = Tnp_domain
  SITE 281: note = Tnp_P1
  SITE 311: note = Tnp_P2
  SITE 319: note = Tnp_P3
  SITE 320: note = Tnp_P4
  SITE 333: note = Tnp_P5
MNPVVGLDISKGESQVQAFLDKGKPYRKSFKGTHTLEGLNDLVIFLEDVKNEAGMKPTIILEATGHYSAPVIHHLEERGYLLIIINPLISYKARGSSLRKVKTDAIDAYLLCELFYKEELEPYKKRGVQLLNLRNLTRQHENITGVMIQTKLQFQAVLEQVFPEYKGVFGDLYSNVSLLTLSEFPSSEDILKASEESITDKIYELCKSRSIRWANEKALHLKAAAARNPFEKTVYQSHILSLDMYIKILLQYKEHLSKLESEIETLAKEIEEYSIIKSIPGIGEKIAATIISEIGEIDRFNNPKKLVAFAGVDPSVFESGKFSATKNRITKRGSSRLRHALFMAVRCAIRDCRKTKTDDTIIPRNKKIRKFYDKKREEGKPFKVAIIACVNKLLHWIFALLKNRTTYQDLA

SEQ ID NO: 14830 - protein, 282 aa, unidentified
  source 1..282: note = protein_3aa8426
  REGION 1..115: note = RuvC_domain
  SITE 16: note = RuvC_P2
  SITE 53: note = RuvC_P3
  SITE 55: note = RuvC_P4
  SITE 58: note = RuvC_P5
  REGION 154..241: note = Tnp_domain
  SITE 162: note = Tnp_P1
  SITE 192: note = Tnp_P2
  SITE 200: note = Tnp_P3
  SITE 201: note = Tnp_P4
  SITE 214: note = Tnp_P5
MKAEGINLKEALICLEYCGIYGLELGLFLENKIDFCFTAPLHIKRSLGLTRGKNDKLDAYKIARFCYLFRDELSPTKMPSKTMVKLKTLMAERNRVVKAAKTEKQVLKEFSIQLDPKATKRIKQRIKLSSDDIKAIENEILLLIKKDIKLQENYNLLLSITGIGIINAVMMILCTNNFEGITNARSFACYCGVAPFEYSSGTSMRGKTRVSNLANKKMKADLTNAARSAVLNDPELRIYYKRKREEGKAHGTVMSAVKFKIITRAFAIVNRKTPYVTLRKVG

SEQ ID NO: 14831 - protein, 391 aa, unidentified
  source 1..391: note = protein_bc6242e
  REGION 4..163: note = RuvC_domain
  SITE 7: note = RuvC_P1
  SITE 60: note = RuvC_P2
  SITE 101: note = RuvC_P3
  SITE 103: note = RuvC_P4
  SITE 106: note = RuvC_P5
  REGION 266..353: note = Tnp_domain
  SITE 274: note = Tnp_P1
  SITE 304: note = Tnp_P2
  SITE 312: note = Tnp_P3
  SITE 313: note = Tnp_P4
  SITE 326: note = Tnp_P5
MIYVGIDVAKDKHDCCITNSDGEILFAPFTIPNNRTGFLDLWSKIQSAGGSPENVKAGLEATGHYSYNILGFLVDKGLPTFVINPLHTNLYRKSLSLRQTKTDKVDSKTITMMLMSGIHFQSYSPASYHNEELKSLTRYRFEKVRERARLKTSIARLINILFPELEKLVPTLHINTVYQLLCEYPGASFIADVHLTRLSNLIKDASHSRYGKDKAIEIREAARNSVGSVMQVKSLELTHTIRLIRELDTEINTIEEMIGSIMDKKNSPITSIPGINIRMGAMILAEIGDISRFSNPDKLLAYAGLSPSTYQSGNFESTHSHMEKRGSKYLRYALFNATKYVCLWNPEFKSYLAKKRAEGKHYNVAISHAAKKLTRLIYTMEKSGKTYTAKN

SEQ ID NO: 14832 - protein, 314 aa, unidentified
  source 1..314: note = protein_74d80cf
  REGION 4..123: note = RuvC_domain
  SITE 27: note = RuvC_P2
  SITE 62: note = RuvC_P3
  SITE 64: note = RuvC_P4
  SITE 67: note = RuvC_P5
  REGION 186..273: note = Tnp_domain
  SITE 194: note = Tnp_P1
  SITE 224: note = Tnp_P2
  SITE 232: note = Tnp_P3
  SITE 233: note = Tnp_P4
  SITE 245: note = Tnp_P5
MALSKKLTRAKLTAFIAQMPVCLIGIEACGGANYWKRVFERYGHTVKMMSPQFVKPYVKSNKSDAIDAEAICEAVQRPNMRFVPCKSIEQQDIQSLHRIRSQLVARRTAQANQIRGLLLEYGIVIPKGISYVRKQIPSILENAENELTLLFRTLLKDLYEEMVHLDERVESLEDELKKVSQENINCQRLLTIPGVGLLSATALIAAIGDISVFKSGRELAAWLGLVPRQHSTGGKPTLLGISKRGDTYIRTLLIHGGRSITRLAEQHQDKRSQWISRLEQRRGNNITAVAVANKNARIAWALLTREVNFKTCLV

SEQ ID NO: 14833 - protein, 344 aa, unidentified
  source 1..344: note = protein_6dca0e0
  REGION 6..148: note = RuvC_domain
  SITE 9: note = RuvC_P1
  SITE 53: note = RuvC_P2
  SITE 88: note = RuvC_P3
  SITE 90: note = RuvC_P4
  SITE 93: note = RuvC_P5
  REGION 212..298: note = Tnp_domain
  SITE 220: note = Tnp_P1
  SITE 250: note = Tnp_P2
  SITE 258: note = Tnp_P3
  SITE 259: note = Tnp_P4
  SITE 271: note = Tnp_P5
MNIKVVGIDLAKHYFQVCVLTDENKIHSNKKVTRARLLDVVRQFPEGTLIAMEACGSSNYWARTFAKMGFEIKLIPPQHVKPFVGHQKNDANDARAICEAAFRPDVHGVPTKTIELQDIKSVRCIRQRRVEQRLAAANQLKGLAGEYGVIIAKSFKCLREQVPIALEDPDNELSLVMRRMLHDLLTEINMLTAEIKSLSQDLEALCKQQPRYQALLSIPGFGPIVTAAFLSQVGSGKQFSNGRQLSAWCGLVPRQFSSGGKTRLGKITKNGNNELRALLIHGARSVSKYTPERTDALSRWFNALALRSGKTKAIVALANKLTRIAWVIVTTNDEFKANCAFKTA

SEQ ID NO: 14834 - protein, 342 aa, unidentified
  source 1..342: note = protein_40c403a
  REGION 5..152: note = RuvC_domain
  SITE 8: note = RuvC_P1
  SITE 55: note = RuvC_P2
  SITE 92: note = RuvC_P3
  SITE 94: note = RuvC_P4
  SITE 97: note = RuvC_P5
  REGION 212..296: note = Tnp_domain
  SITE 220: note = Tnp_P1
  SITE 250: note = Tnp_P2
  SITE 258: note = Tnp_P3
  SITE 259: note = Tnp_P4
  SITE 271: note = Tnp_P5
MEYYAGIDVSLEYSSLCVVDGTGKIVREAKAASEPAALIAWFGSLGFGLARIGLEAGPLSQWLFAAMREAGLAVELLETRHVRKAFEAMLVKSDRNDARGIAQLIRLGWFRPVHCKSMDAQEVRAVLTARKLVQTKLLDVENSLRGILRGFGLKVGKTTDRSFATRIQELVKGHPNLEAIGEALLSVRAVLLREFNAFEKRVRAMSRLNARAKLLMSTPSVGPIVALTYASAIDDPARFKSSKQAGPHFGLTPKKYQSGETDYSGRISKIGDAAVREALYQAAHVMLTKPIKGCSELKSWAMRIARRAGMSKAKVALARKLAVILHRMLANATPFNAAAAAA

SEQ ID NO: 14835 - protein, 341 aa, unidentified
  source 1..341: note = protein_1c28c75
  REGION 8..165: note = RuvC_domain
  SITE 11: note = RuvC_P1
  SITE 64: note = RuvC_P2
  SITE 102: note = RuvC_P3
  SITE 104: note = RuvC_P4
  SITE 107: note = RuvC_P5
  REGION 205..292: note = Tnp_domain
  SITE 213: note = Tnp_P1
  SITE 243: note = Tnp_P2
  SITE 251: note = Tnp_P3
  SITE 252: note = Tnp_P4
  SITE 265: note = Tnp_P5
MQKRKYFSGLDISAEDFSASCIISPDNLVFSTQKFPNNLDGFNNFTSLFHKHNVKASELIICMEATGVYSENLSYYLVSKGFSVAIEAPHKIKNKTKDSPRKNDFIDALSIAEYAFRYTDKLSPWKPNDEIIEQIKVLLSTREHLTSQLTANNNALKALKHKYYQTPLANQIYVNTINKLKEHIKQIDKEIKNLIDKDDSFKKKISLAKSVPGVGLLLSANLLVLTNGFTEHLNYKNTAAYTGICPYEQKSGTSLNKPPRSRKAGPAKLRKLLYLAALSVRTHNPIFKKYFLRKVAEGKNKRLILNNIENKLLKIIFAVINSGVAFTNNYKSINPTQLKTA

SEQ ID NO: 14836 - protein, 391 aa, unidentified
  source 1..391: note = protein_1a2de84
  REGION 4..163: note = RuvC_domain
  SITE 7: note = RuvC_P1
  SITE 60: note = RuvC_P2
  SITE 101: note = RuvC_P3
  SITE 103: note = RuvC_P4
  SITE 106: note = RuvC_P5
  REGION 266..352: note = Tnp_domain
  SITE 274: note = Tnp_P1
  SITE 304: note = Tnp_P2
  SITE 312: note = Tnp_P3
  SITE 313: note = Tnp_P4
  SITE 326: note = Tnp_P5
MIFIGIDAAKDKHDCFIVNSDGEVLYDVFTISNTLNGFNDLLLKIQSVSPDLSKTKVGLEATGHYSYNLLGFLLDKGLTTYVINPLHTNLYRKSLTLRKTKTDKVDARMIASMLMSCVDLKPYTRTLYHNQELKSLTRYRFNKVSERAKLKTSVSRLVNILFPELEKLVPTLHMKSVYALLSEFPSAHHIAKAHLTRITNILYEASKGRYNRDTAIRFRDAARNSIGSVMLAKSLELKHTIKLIGELTAEIDEMETEIKHIVESLGTTVLTIPGISYTTAASILAEIGDFSHFETPDKILAFAGMSPSTYQSGRLNNCYAHMEKRGSRYLRFALYNAAKHVCNWDKTFSNYLVKKRSEGKHYNVAISHAAKKLVRLIFALEKSHLPYNPAA

SEQ ID NO: 14837 - protein, 261 aa, unidentified
  source 1..261: note = protein_13a040e
  REGION 7..69: note = RuvC_domain
  SITE 9: note = RuvC_P3
  SITE 11: note = RuvC_P4
  SITE 14: note = RuvC_P5
  REGION 133..220: note = Tnp_domain
  SITE 141: note = Tnp_P1
  SITE 171: note = Tnp_P2
  SITE 179: note = Tnp_P3
  SITE 180: note = Tnp_P4
  SITE 192: note = Tnp_P5
MWWCTLLGKNDLNDAVAICEAVQRPSTRFVPVKSPEQQAILSVHRMREHWVRERTALMNRMRALLSEFGLIIPVGRSSFMKQVPLMLEGAENELPHLARTVIADAYHHLGELNQRITDTEQVFDSFAKVSANVQRVMKVRGIGPQTATAILASIGNGSQFDKSRDFSAWLGLVPKQYSTGGKPRLGRITKHGDKYLRTLLVHGVRTVIANLGDKQDKLSQWCRGVLERRGMNRAIVALAAKNARIIWSLLHNQTEYENYAT

SEQ ID NO: 14838 - protein, 390 aa, unidentified
  source 1..390: note = protein_a6b4899
  REGION 4..164: note = RuvC_domain
  SITE 7: note = RuvC_P1
  SITE 60: note = RuvC_P2
  SITE 101: note = RuvC_P3
  SITE 103: note = RuvC_P4
  SITE 106: note = RuvC_P5
  REGION 263..352: note = Tnp_domain
  SITE 270: note = Tnp_P1
  SITE 300: note = Tnp_P2
  SITE 308: note = Tnp_P3
  SITE 309: note = Tnp_P4
  SITE 322: note = Tnp_P5
MLFIGIDVASKKHDVIIISEYGEILSESFTIENSSAGFKKLHTEISSHTELFDNVHIGLEETGIYSSNIRDFLHSAGFNVYMINPVLTHHSRMAYSLRNTKTDKLDCLAICRYIMHNFTHLKPYISTLYTTSELKSLSRLRLDKLHTLAKAKMEFTRLLQITFPEFIKHFKQHSQWAMNLFSSYPAPAKIARMHLDTLVSIIKIKGDRVSAAQLIKNLAKKTIGDTSITNSLLIESIIDDINHYNKQIAIIDKHLDALMADFDFITTIPGVGNVIGASIIGEIGDISRFNSPSQLLAFAGLDPSIYESGEFKGKRCRISKRGSKYLRTSIFTATRVACVGKGKNNQFRQKYHKKKLQGKHHNSALCNVSKNMINTIFAMLNSKEDFIYIT

SEQ ID NO: 14839 - protein, 389 aa, unidentified
  source 1..389: note = protein_c01c7d0
  REGION 19..167: note = RuvC_domain
  SITE 22: note = RuvC_P1
  SITE 68: note = RuvC_P2
  SITE 106: note = RuvC_P3
  SITE 108: note = RuvC_P4
  SITE 111: note = RuvC_P5
  REGION 234..320: note = Tnp_domain
  SITE 242: note = Tnp_P1
  SITE 272: note = Tnp_P2
  SITE 280: note = Tnp_P3
  SITE 281: note = Tnp_P4
  SITE 293: note = Tnp_P5
MPSTKLQNSTDFDGQIFYVGLDVHKHSWAVTVRSLGIQVANFSQPPSAKALHTTLTRMFPGGVYYSAYEAGFCGTGTHEQLRKLGITNIIVHAADIPLTDKQKKNKTDIHDSRSIAEQLERKNLHGIHILTHEQQELRSLFRLRENKIKDITRANNRLKSFMAYYGIEIPESISKKEYISKRVLEWLDNLELSSDSGTITKQELIEELKYQRKQGSKITKLLRQQIQISHTDAYKRLLTVPGLGPVTSMGLLAEIADFSRFEDPVDYIGYLGLTPWNDSTGDTVKTKGVQPRCNKHLRPLLIEASWVAIRNAPHLFAYYSKHAVKNNKHAIIKVAHRLALIARGVVLKKQDYQADYLQNKQQEKVIKKGLKRTKNQGIQNGKVLLASTE

SEQ ID NO: 14840 - protein, 341 aa, unidentified
  source 1..341: note = protein_a60cc5a
  REGION 8..149: note = RuvC_domain
  SITE 11: note = RuvC_P1
  SITE 54: note = RuvC_P2
  SITE 89: note = RuvC_P3
  SITE 91: note = RuvC_P4
  SITE 94: note = RuvC_P5
  REGION 213..300: note = Tnp_domain
  SITE 221: note = Tnp_P1
  SITE 251: note = Tnp_P2
  SITE 259: note = Tnp_P3
  SITE 260: note = Tnp_P4
  SITE 272: note = Tnp_P5
MSNCSYFGGIDLAKNHFSIHIVDSDGKVILNKSVTRPKLLTTIANMPPMRIGLEACGGAHYWARTLNKLGHDARIMAVKYVVPHRVKGKNDLNDAVAICQAVQHTSTRFVPIKSSEQQAILSVHRMREHWVRERTALMNRIRALLSEFGLIMPVGQSSLMKQVPLLLEEAENELPQLARATIADAYHHLEHLNQRIADTEQAFHAFAKVSDNVQRIMKVRGIGPQTATAILASIGNGAQFDKSRDFSAWLGLVPKQYSTGGKARLGRITKHGDKYLRTLLVHGARTVIANLGDKQDRLSQWCRGILERRGMNRAIVALAAKNARIIWSLLHNQTEYENYAA

SEQ ID NO: 14841 - protein, 330 aa, unidentified
  source 1..330: note = protein_d38f0c2
  REGION 8..156: note = RuvC_domain
  SITE 11: note = RuvC_P1
  SITE 59: note = RuvC_P2
  SITE 97: note = RuvC_P3
  SITE 99: note = RuvC_P4
  SITE 102: note = RuvC_P5
  REGION 202..289: note = Tnp_domain
  SITE 210: note = Tnp_P1
  SITE 240: note = Tnp_P2
  SITE 248: note = Tnp_P3
  SITE 249: note = Tnp_P4
  SITE 262: note = Tnp_P5
MKKWNVILGVDVSKLTLDICWAEQALHVRIDNNSKGFIAFKKWCKTHAIHLEETLIVMEYTGGYEYRFLQFCDSQSIRYCRIPGLEIKQSMGMIRGKNDEVDSFRIGRYGEQRADELNPSKPLDKNILLLKQLLTFRKRLVRDNAGLQSTLKEREHMYGQLKKDTISRIIFKKIKSNTKDIKQVEQEIMKIITCDEAILLNYRIITSIKGIGKINAWMTIAYTENFTSFKDARSYGVYVGVIPFGHTSGTSIKKPKRVSHIAHKELKQELNQAAKTAIIYDPELRAYAERKLKNKAYRLVLNNVKFKLILRMFSLVERGELYVENYRRVA

SEQ ID NO: 14842 - protein, 394 aa, unidentified
  source 1..394: note = protein_8c8e8ca
  REGION 4..164: note = RuvC_domain
  SITE 7: note = RuvC_P1
  SITE 59: note = RuvC_P2
  SITE 99: note = RuvC_P3
  SITE 101: note = RuvC_P4
  SITE 104: note = RuvC_P5
  REGION 268..354: note = Tnp_domain
  SITE 275: note = Tnp_P1
  SITE 305: note = Tnp_P2
  SITE 313: note = Tnp_P3
  SITE 314: note = Tnp_P4
  SITE 327: note = Tnp_P5
MKLVGIDIGKHKHFVSIVDKLTGEIILQPVAFSNNAQGFEFLISQIALYPVDSVLIGMEDTGHYHFALLRFLLQKNYSVALINPKTTDLNRRMDGGITKNDKLDTLNICDILSSNKLKKPYRLTSSKKFDLYEQKQLTRLHHSLKEQINVLSNRLQKCIDLVFPEYNSLFKSKYGKVYMSILKQFGSAKAIAQADIRTLRKCFDITGRGNRISLTAEKLKESAKTSVGISSLADEMQIKHLIAHIELLNDQLKEIDKKIEEFSTDLNSPIISVPGISHFSGTSILAEYGDIFNYSKPSKIIKAAGVAPFHYESSQYEAKHSAITKQGSSYLRKTLYQVIVPVIRFNKVFKDYYDLKRSQGKSHRCAQGHCIRKLLRVIYHLVTTNQQFDASLLR

SEQ ID NO: 14843 - protein, 339 aa, unidentified
  source 1..339: note = protein_e22962d
  REGION 6..148: note = RuvC_domain
  SITE 9: note = RuvC_P1
  SITE 52: note = RuvC_P2
  SITE 87: note = RuvC_P3
  SITE 89: note = RuvC_P4
  SITE 92: note = RuvC_P5
  REGION 211..302: note = Tnp_domain
  SITE 219: note = Tnp_P1
  SITE 249: note = Tnp_P2
  SITE 257: note = Tnp_P3
  SITE 258: note = Tnp_P4
  SITE 270: note = Tnp_P5
MHVTTIGLDLAKNVFQVHGIDENGEVVFNRALRRAQVLVFFERLEPCLVGIEACGTSHHWARELIKLGHNVKLIPPAYVKPYVKRGKSDAVDAAAICEAVTRPTMRFVEVKTPEQQAILSVHRTRDLIVRQRTQTINMLRAQLAEFGIIMPQGIYHALQFAKDCINDEPLNLPMDAQEVIFNLCDELLFLHTKILRHSRHMTRIAKSEERVALLRTIPGVGPITASAIVATVGSGKQFNNGREFAAWLGLTPLNRSSGGKERLGHISKMGDQYIRRLLVLGMTSRIRSIRLEPEKFDPWFADILSRKPSRVAAVAMANKTARMIWAVLTRNEPFKVRTV

SEQ ID NO: 14844 - protein, 356 aa, unidentified
  source 1..356: note = protein_542daeb
  REGION 5..161: note = RuvC_domain
  SITE 8: note = RuvC_P1
  SITE 59: note = RuvC_P2
  SITE 99: note = RuvC_P3
  SITE 101: note = RuvC_P4
  SITE 104: note = RuvC_P5
  REGION 242..327: note = Tnp_domain
  SITE 250: note = Tnp_P1
  SITE 280: note = Tnp_P2
  SITE 288: note = Tnp_P3
  SITE 289: note = Tnp_P4
  SITE 302: note = Tnp_P5
MKIYVGIDIAKLNHFAAAISSDGEIMIEPFKFTNDADGFQLLISKLESFDKNSIIIGLESTAHYGDNLVRYLVTELYQVCVLNPIKTCQMRKNNVRKTKTDKVDTYVIAKTLMMQDDIRFVSFFDLDMMDLKALGRFRQKTIKQRTRLKIQLTTYVDQVFPEIQYFFKSGLHQKAVYALLKEAPSPKEVTSMHMTHLANLLKVNSHGAISIQITQTIQQIELLDSQLEKIEAEMTEIMKFNDSVIKTIPGIGYINGGMILGEIGDIHRFSNPNKLLAFAGLDPSVYQSGNFQAKTTRMSKRGSRVLRYALVNAAWNVVRNNATFMPRGLKAGLIIMHLGIAPASLSESSGRCSLTM

SEQ ID NO: 14845 - protein, 393 aa, unidentified
  source 1..393: note = protein_e00690a
  REGION 5..164: note = RuvC_domain
  SITE 8: note = RuvC_P1
  SITE 61: note = RuvC_P2
  SITE 102: note = RuvC_P3
  SITE 104: note = RuvC_P4
  SITE 107: note = RuvC_P5
  REGION 267..354: note = Tnp_domain
  SITE 275: note = Tnp_P1
  SITE 305: note = Tnp_P2
  SITE 313: note = Tnp_P3
  SITE 314: note = Tnp_P4
  SITE 327: note = Tnp_P5
MVVSIGIDVSKDKHDCFILSSEGEVLADVFTIPNTMDGFTCLLQRIQNCTEQMDKIKVGLEATGHYSYNLLGFLLDNGLATYVLNPLRTNLYRKSLSLRKTKTDRVDARTIATMLLSDAGLKPYTNTAYHNEELKSLTRYRFDKVKERAKLKTSISRLVCILFPELEKLVPTLHMTSVYALLEEFPGVKQVAAAHLTRLESLLETASKGHYKRDMALKIRDAARDSIGSRMPAKSLELQHTIRLIRELNTEIAEIEAQIQSLMEEIDSPITTIPGVGFRMAAMILAEIGDLTRFDSPDKLLAYAGMSPSIYQSGQLKNCYPHMEKRGSRYLRYALFNATRYVCLWDPNFAVYLAKKRAEGKHYNVALSHAAKKLVRLIFAMEKSRQPYCSLAA

SEQ ID NO: 14846 - protein, 342 aa, unidentified
  source 1..342: note = protein_7f01215
  REGION 6..148: note = RuvC_domain
  SITE 9: note = RuvC_P1
  SITE 52: note = RuvC_P2
  SITE 87: note = RuvC_P3
  SITE 89: note = RuvC_P4
  SITE 92: note = RuvC_P5
  REGION 211..298: note = Tnp_domain
  SITE 219: note = Tnp_P1
  SITE 249: note = Tnp_P2
  SITE 257: note = Tnp_P3
  SITE 258: note = Tnp_P4
  SITE 270: note = Tnp_P5
MTIATLGIDLAKSSFALHGVDSSGKVLLKKNISRKKLSETLTNMPPCLVGMEACSSAHYWARVFKQFGHDVKLMPPQFVKPYVKSNKNDTADAEAICEAVTRPNMRFVPIKSIEQQSILSVHKARERLVSMKTGQTNQLRGLLAEFGLVFPKGSASLNKQLPLVLEDAENNLTPPIRCVVTHLKELIDELSSRISALTKEIEQWHSTNVDSKRIAEIPGIGPITATALVASIGDPASFNNGRQVSAWIGLVPKQFSTGGKQVLLGISKRGDGYLRRLLVHGARAVLGHLKQQPTTYTHRWLNDLLKRKHKNVAIVALANRNARIAWALLANQQHYNPELLSI

SEQ ID NO: 14847 - protein, 331 aa, unidentified
  source 1..331: note = protein_1d6eac4
  REGION 8..157: note = RuvC_domain
  SITE 11: note = RuvC_P1
  SITE 62: note = RuvC_P2
  SITE 100: note = RuvC_P3
  SITE 102: note = RuvC_P4
  SITE 105: note = RuvC_P5
  REGION 205..291: note = Tnp_domain
  SITE 212: note = Tnp_P1
  SITE 242: note = Tnp_P2
  SITE 250: note = Tnp_P3
  SITE 251: note = Tnp_P4
  SITE 264: note = Tnp_P5
MDKFTQFIGIDISKEYFDAAIYIDANSYKHNQFDNTKKGVNQFIKWMKNEGCCVEETLICMEHTGIYKNILVDVLLSKNCNLWVEMAYRIIKSSGIQRGKNDKVDSTRIALYAKKNQEEAKLFKASKDVLDKIQVLLGQRDMNIAHKTAMEVRTKELKGFNDELYKVLSKNDKAILKALENAIKAIEKQLNTLIRENQEVSEIFDCVTSVRGVGDVTAMFLICYTNAFTSFETSRQLASYCGVVPFEYTSGKSIRGKPRVHFMANKKLKKLLHMCALSSVKHDPEMKAYYERKVAEGKHKMLVLNNVRNKLVERICACVRDKKAYEVRQVA

SEQ ID NO: 14848 - protein, 394 aa, unidentified
  source 1..394: note = protein_165187c
  REGION 4..162: note = RuvC_domain
  SITE 7: note = RuvC_P1
  SITE 60: note = RuvC_P2
  SITE 101: note = RuvC_P3
  SITE 103: note = RuvC_P4
  SITE 106: note = RuvC_P5
  REGION 268..355: note = Tnp_domain
  SITE 276: note = Tnp_P1
  SITE 306: note = Tnp_P2
  SITE 314: note = Tnp_P3
  SITE 315: note = Tnp_P4
  SITE 328: note = Tnp_P5
MIYAGVDIAKTDHVIGAVDERGAEMCPPMPFKNTEAGLERAVAWLEGLAGSPSDVVVGMEATGHYWMACYSFLVARGYSVAVINPMQVKAVRKLKGLDKVKNDRVDAGLIAEALRIGQYDETRLATDEMASLRSLSRYLQSLRGMVAELKTQCICLMDAHFPEYAGIFSDMFGAGSRAVLSKSPLPFELARRRADSLARDIAEASRRGGKSSGYAAKIKAAAKSSIGVRLGQEAASFQVKSLIRQIEFADSECAGVEARLRSLLDEVEPLVLTIPGVSYVTGAQIVSEIGDVSRFRNAPALVSYAGLNSSVSQSGQFDSGGGPITKHGSPYLRRALWLAANRARQYDPGLRAFYDRKRAEGKPHRVAVTAVARKLCHIVFAVMRDQVPYDPGRE

SEQ ID NO: 14849 - protein, 257 aa, unidentified
  source 1..257: note = protein_501f83a
  REGION 1..88: note = RuvC_domain
  SITE 31: note = RuvC_P3
  SITE 33: note = RuvC_P4
  SITE 36: note = RuvC_P5
  REGION 133..218: note = Tnp_domain
  SITE 141: note = Tnp_P1
  SITE 170: note = Tnp_P2
  SITE 178: note = Tnp_P3
  SITE 179: note = Tnp_P4
  SITE 191: note = Tnp_P5
MYYLHEQGFILLQANPSKASQYAKALNLVHKTDKSDATMLARYGHDQQHSLCRWQPEPVESRALKAMLRRLEALEQDLQREENRFEAANFSGASARVIQSLEDMIAVLKDEIDKLTQEIDDHIDGHPSLKKNRKLLQSISGVGVVVSRVMVSLLACKNFKNAKQFSAYLGLIPKLKESGKQAGKTTLSKQGPSYVRVKLYMAAVVAGQHNPDIKAQKTRLLQQGKNKMQALGAAMRKLAQICFGVVKTQTEYQPQVN

SEQ ID NO: 14850 - protein, 304 aa, unidentified
  source 1..304: note = protein_c154397
  REGION 7..149: note = RuvC_domain
  SITE 10: note = RuvC_P1
  SITE 53: note = RuvC_P2
  SITE 88: note = RuvC_P3
  SITE 90: note = RuvC_P4
  SITE 93: note = RuvC_P5
  REGION 212..298: note = Tnp_domain
  SITE 220: note = Tnp_P1
  SITE 250: note = Tnp_P2
  SITE 258: note = Tnp_P3
  SITE 259: note = Tnp_P4
  SITE 271: note = Tnp_P5
MSLIKVVGIDLAKLVFSIHGINEHDKCKLRKTVKRNKLLAEVAKLPPCIIGIEACSGAHYWAREFTELGHEVRIMASKFVIPYRQNEKNDANDAEAICEAATRPKTRFVSIKSEEQQAVLCSHRIRQGAIKDKTARINPLRGLLSEFGIIMPKGRYPAQKAISGILEDAENNLPFLARELLNDLWQSIRGLNDEILKYDRKLYALANQMKDAKRLMSIPGIGEITAIAVVATVNDAKHFETSRSFAAWIGLVPRQYSTGGVVRLGRISKRGEKHIRTSLIHGARAVIANCKKNRPDKSMGKRPC

SEQ ID NO: 14851 - protein, 319 aa, unidentified
  source 1..319: note = protein_b295ab9
  REGION 14..162: note = RuvC_domain
  SITE 17: note = RuvC_P1
  SITE 60: note = RuvC_P2
  SITE 100: note = RuvC_P3
  SITE 102: note = RuvC_P4
  SITE 105: note = RuvC_P5
  REGION 196..280: note = Tnp_domain
  SITE 204: note = Tnp_P1
  SITE 233: note = Tnp_P2
  SITE 241: note = Tnp_P3
  SITE 242: note = Tnp_P4
  SITE 253: note = Tnp_P5
MTSRGTEKMTETTIGIDISKDSLDAHRLSDGISRQFANDSKGHKALIAWIGKDVARVVFEPTGPYHRTFERALARGGLPMVKVNPRQARRFAEAVGKLAKTDRLDAILLARMGALLQLETRPAPDETIVELRQFHLAREALVKDRTAARNRAKSLSITLLRRQNAERLKHIERQIAAIDAELERRIQANAELSRRQEILISIPGIGRLTALALLIEMPELGVLEPGQAASLAGLAPIARQSGRWTGHAFIRGGRADVRQALYMPALVAMRFNPDLKAKYQQLISAGKPAKLAITAIMRKLVVLANALLRAGRPWIPKSA

SEQ ID NO: 14852 - protein, 398 aa, unidentified
  source 1..398: note = protein_9c4cd35
  REGION 4..160: note = RuvC_domain
  SITE 7: note = RuvC_P1
  SITE 57: note = RuvC_P2
  SITE 97: note = RuvC_P3
  SITE 99: note = RuvC_P4
  SITE 102: note = RuvC_P5
  REGION 275..360: note = Tnp_domain
  SITE 283: note = Tnp_P1
  SITE 313: note = Tnp_P2
  SITE 321: note = Tnp_P3
  SITE 322: note = Tnp_P4
  SITE 335: note = Tnp_P5
MISVGIDISKEKSMVCILKPYGEIIAEPYEIKHTDAELKLLVETILNSKEDARVVMEATGVYHLPVLSYLKEHNIFVAVINPLVMKRYSYGGLRKGKTDKMDAVKIANYGIDNWFKLINYNVSDKVYSELKLLGRQYSHYITMRIESKLVLSNLLDRTMPGIKKLLQNRSDKPQKDKLNDFVKEYWHYDNITKKSEKQFIISYLKWAKKKGYHQNETKAKQIYALAQEGIPTLSSNTPSTKMLVLEAVRVLSEIDRTLHIILSQMQELARNLKEYDVVRDMPGVGDTLAPRLIAEIGDVRRFYNKKALIAYAGIDSPPFESGQFVANKRRISKRGSSLLRKTGYEIMKCIKSNKPDDPVFLYMIKKETEGKAKKVAKIAALNKFLRIYYAKVKEVYNT

SEQ ID NO: 14853 - protein, 388 aa, unidentified
  source 1..388: note = protein_dab24a9
  REGION 4..160: note = RuvC_domain
  SITE 7: note = RuvC_P1
  SITE 58: note = RuvC_P2
  SITE 98: note = RuvC_P3
  SITE 100: note = RuvC_P4
  SITE 103: note = RuvC_P5
  REGION 264..351: note = Tnp_domain
  SITE 272: note = Tnp_P1
  SITE 302: note = Tnp_P2
  SITE 310: note = Tnp_P3
  SITE 311: note = Tnp_P4
  SITE 324: note = Tnp_P5
MIYVGIDIAKLNHFASAISSDGEELIQPFQFTNDADGFQLLVSRLDSFEKASLIIGLESTAHYGDNLVRFLVASNYSVCVLNPIQTSSIRKNNIRKTKTDKVDTRVIARTLMMQDSYRFVSFTDLDIMDLKQLGRFRQKTVKQRTRLKIQLVSYVDQAFPELQYFFKSGLHQHSVYALLKEAPTAQMVASMHMTHLARLLSEASHGRFKKDVAKELRALAQKSVGHHDSALAIQIAHSVDQIELLDSQLAKIEAEMTEIMKFHDPVILTIPGMGYINGGMILGEIGDIHRFSSPSKLLAYAGLDPSVYQSGNFQAKRTRMSKRGSRVLRYALINAAHNVVKNNSTFKAYYDAKMAEGRTHYNALGHCAGKLVRVIFKMLTDNVEFNLG

SEQ ID NO: 14854 - protein, 391 aa, unidentified
  source 1..391: note = protein_69fa375
  REGION 4..161: note = RuvC_domain
  SITE 7: note = RuvC_P1
  SITE 60: note = RuvC_P2
  SITE 100: note = RuvC_P3
  SITE 102: note = RuvC_P4
  SITE 105: note = RuvC_P5
  REGION 266..353: note = Tnp_domain
  SITE 274: note = Tnp_P1
  SITE 304: note = Tnp_P2
  SITE 312: note = Tnp_P3
  SITE 313: note = Tnp_P4
  SITE 326: note = Tnp_P5
MFYIGIDIAKHNHEVSIIDDNGKALGKSFSISNSQKGVDKFNTYLDSFNITSENCVIGMESTGHYWINLFSFLVNLKFNVFVINPIQSDAFRKMYIRKTKNDSKDSYIIAQIMRFGEYSSSNISDENIFALRQLSRYRTSLVDECSSWKRKIISILDQVFPEYSNLFSDTFGVTSKELLSKYPLPENMLELSTEELTNLLNKASKGRLGNEKAQEIKESAKNSFGVSFAKQTFSFQIKQIINQISFIESQLKELDNEISNMLKELNSEITTITGIGDVLGACILSEIGDISRFEKASQLVAFAGLDVAVKQSGEFTGTEMKITKRGSPYLRRAIWLAATVASFKDPALSIYYKSLIARGKKHLTAIGAVSRKMCNIIFSVLKNKKAYTPNI

SEQ ID NO: 14855 - protein, 376 aa, unidentified
  source 1..376: note = protein_e94a28f
  REGION 4..164: note = RuvC_domain
  SITE 7: note = RuvC_P1
  SITE 61: note = RuvC_P2
  SITE 102: note = RuvC_P3
  SITE 104: note = RuvC_P4
  SITE 107: note = RuvC_P5
  REGION 268..323: note = Tnp_domain
  SITE 275: note = Tnp_P1
  SITE 305: note = Tnp_P2
  SITE 313: note = Tnp_P3
  SITE 314: note = Tnp_P4
MIFVGTDVAKDKHDCFIISSEGEVLADVFTVSNSREGFEHLLQTINTCTGIGNSKIKVGLETTGHYSYNLLGFLLDNGLTTYVINPLHTNLYRKSQSLRKTKTDRVDARTIASMLMSDVSLKPYTNIAYHNYELKSLTRYRFDKVSERAKLKTSVSRLVNILFPELEKLLPTLHTASSYALLSELPSAKHIADVHLTHLTNLLYTASKGRYNRDRAIQIRETARNSIGTYMPAKALELKHTIKLIRELDSEIDEINIAIKEIMDKIDSPIISIPGVGLNMAAMIIAEIGDFNNFDSPDKILAFSGLSPSTYQSASSIIAMLTWKNEVLDIYDMLFLMLPSSFVIGTLFSSIILQKTLGRPSITMLLFLTLPRNWFV

SEQ ID NO: 14856 - protein, 386 aa, unidentified
  source 1..386: note = protein_ee54db2
  REGION 7..166: note = RuvC_domain
  SITE 10: note = RuvC_P1
  SITE 66: note = RuvC_P2
  SITE 106: note = RuvC_P3
  SITE 108: note = RuvC_P4
  SITE 111: note = RuvC_P5
  REGION 207..294: note = Tnp_domain
  SITE 215: note = Tnp_P1
  SITE 245: note = Tnp_P2
  SITE 253: note = Tnp_P3
  SITE 254: note = Tnp_P4
  SITE 266: note = Tnp_P5
MNLKYSVGLDVSSKKINACMSVIDEKQKVVVKSSTIICNTLKGFATLEEWIIKQKKEAIPVVVCMEATGIYHENCAYYLHGKDFNVSIILPNKAKKYLEAIGLKSKNDSIDAKGLSQMGAEQCLEFWEPMGTFFYELRLLTRQHQNVTELKTVLKNQLSALSYAMHHLDAVNNQLEQTIILFETQLKELDKEIKAHLKSNNEVHEKAENILKMKGLGILTLSTVLAETNGFTLFNNYKQLVSYAGYDVVEAQSGTRVGKTKISKRGNSRIRRALHMPSLVVIQCKVKPFKDLYDRTYEKHAIKMKSYVAVQKKLLIMIYHLWNKNEVYDANYQLNIQEEEQKFSLGQLASEKTQLQKNSPNLEIEATQGKHPVNYRKKLPLGAANI

SEQ ID NO: 14857 - protein, 388 aa, unidentified
  source 1..388: note = protein_61a240d
  REGION 4..160: note = RuvC_domain
  SITE 7: note = RuvC_P1
  SITE 58: note = RuvC_P2
  SITE 99: note = RuvC_P3
  SITE 101: note = RuvC_P4
  SITE 104: note = RuvC_P5
  REGION 262..348: note = Tnp_domain
  SITE 270: note = Tnp_P1
  SITE 300: note = Tnp_P2
  SITE 308: note = Tnp_P3
  SITE 309: note = Tnp_P4
  SITE 321: note = Tnp_P5
MYLIGIDISKYKHDCFIATEAGVPIKAFSFENNRLGFDLFLKDLRFLDQSKEIRIGLESTGHYGSNLKQFITTSGYTYLEFNPYLTHMFSKALSLRKTKTDKVDAKTISSMLGSVDYKTLHTKFYHINELKQLVRYRHVQMMNRSKTLIELTNILDRTFPEFKPFFNERLAGSALFILKKFKSRTRISKFSTKDYESIRSYSKGKLSYVRVQKLKSLALSSVGYETQSDLLLLKHTIKHYEELSNTLDTIDEEILSIMKDIPQTLTTIPGVSVISAAIIIAELGDFKNFTNPSQIVSFSGLDTSVNQSGTMETRGHLVKRGSGLLRMTLWQITFSSLKLNPKLYDYYLKKRAEGKHHKVALVHCARKLIRTIYYLGVNQVPFDHSLFK

SEQ ID NO: 14858 - protein, 391 aa, unidentified
  source 1..391: note = protein_2602c89
  REGION 4..163: note = RuvC_domain
  SITE 7: note = RuvC_P1
  SITE 60: note = RuvC_P2
  SITE 101: note = RuvC_P3
  SITE 103: note = RuvC_P4
  SITE 106: note = RuvC_P5
  REGION 266..353: note = Tnp_domain
  SITE 274: note = Tnp_P1
  SITE 304: note = Tnp_P2
  SITE 312: note = Tnp_P3
  SITE 313: note = Tnp_P4
  SITE 326: note = Tnp_P5
MVYVGIDVAKDKHDCFILNSEGEVLADVFTIPNNMEGFNCLLQKIRLCSVPQDKIKVGFEATGHYSYNILGFLLDNGLPTYVLNPLHTNLYRKSLSLRKTKTDRVDARTIAAMPMSDVGLKPYTDSAYHNEELKSLTRYRFDKVKERAKLKSSIARLVCILFPELEKLVPTLHMASVYALLVEFPGAEQIAAAHLTHLKATLGTASKGRYNRDKAIEIRETARVSIGSVMPAKSLELRHTIRLIRELDTEIEEIEETIQSIMDELNSPITTIPGIGFRMGAMILAEVGDFSRFDSPDKVLAYAGLSPSTYQSGQLTNCYAHMEKRGSRYLRFAIFNAAKYVCHWDPTFAAYLAKKRAEGKHYNVAVSHAAKKLVRLICALEKSGEPYRPAA

SEQ ID NO: 14859 - protein, 402 aa, unidentified
  source 1..402: note = protein_3c199c2
  REGION 4..160: note = RuvC_domain
  SITE 7: note = RuvC_P1
  SITE 57: note = RuvC_P2
  SITE 97: note = RuvC_P3
  SITE 99: note = RuvC_P4
  SITE 102: note = RuvC_P5
  REGION 275..362: note = Tnp_domain
  SITE 283: note = Tnp_P1
  SITE 313: note = Tnp_P2
  SITE 321: note = Tnp_P3
  SITE 322: note = Tnp_P4
  SITE 335: note = Tnp_P5
MNAVRIDVSKGKSTVAVIQPFGVVIAEPFDVLHTESGLKELVAFIKSLSGETKVVMEYTGTYYEPIANAIHNAGIFVSVVNPLLIDDYDTNRVRKVKTDRIDAFKIASFALDKWIKLREYTPAETIRKTLKIMNRQCIKLNKILVMQKNSFIALLDCCFPNANTLFTSPRRESDGHEKWVDFVLIFPHSDSVAKLSLSSFETKYQSWCKKNHYNYNKSKAAEIHACARTLVSTLPMTEAANTIVYESAKALNSTLETLAKFHAEMNALASQLPEYETVMSMLGVGKVICSQLISEIGDIMQLKSGKSLVALAGIDPPPNQSGKDDPKSRSISKRGSPALRKTLFLIMTIYLQQQPTDEPVYQFLDKKRSEGKPYKVYMIAAAHKFLRIYYARVKEAMNAQST

SEQ ID NO: 14860 - protein, 411 aa, unidentified
  source 1..411: note = protein_3a32738
  REGION 5..163: note = RuvC_domain
  SITE 8: note = RuvC_P1
  SITE 62: note = RuvC_P2
  SITE 102: note = RuvC_P3
  SITE 104: note = RuvC_P4
  SITE 107: note = RuvC_P5
  REGION 273..373: note = Tnp_domain
  SITE 281: note = Tnp_P1
  SITE 311: note = Tnp_P2
  SITE 319: note = Tnp_P3
  SITE 320: note = Tnp_P4
  SITE 333: note = Tnp_P5
MNPVVGLDVAKGESQVQAFLDKKKPYKRSFKVAHTIEGLESLHQYLREIENVTGIRPPVVLESTGHYHTPVVQYFEERGYLLIIVNPLISYRAKSSSLRKVKTDLIDARHLCELYYKEDLEPYRKRGIQLLNLRNLSRQHANITGIYVQTKLQFQAVLDQVFPEYRGVFGDLYSVVSLLTLLEFPTSEDISAVDEETVANRINELCPSRSRKWANTQAEKLMAASARNPFQRTLYQSHILSLEMYIKMLLEYQKHLSKFEEEINALAKEIEEYKIIQSIPGIGEKIATTIISEIGEIDRFNHPKKLVAFAGIDPSIFESGKFKGSVNRITKRGSGRLRHALYMAVRCAIRDCRKKKTTDEIIPRNKRLREFYDKKREEGKPFKVAVIACANKLLQWIYALLQNNSTFQDLT

SEQ ID NO: 14861 - protein, 324 aa, unidentified
  source 1..324: note = protein_593e611
  REGION 5..158: note = RuvC_domain
  SITE 8: note = RuvC_P1
  SITE 58: note = RuvC_P2
  SITE 98: note = RuvC_P3
  SITE 100: note = RuvC_P4
  SITE 103: note = RuvC_P5
  REGION 196..282: note = Tnp_domain
  SITE 204: note = Tnp_P1
  SITE 234: note = Tnp_P2
  SITE 242: note = Tnp_P3
  SITE 243: note = Tnp_P4
  SITE 255: note = Tnp_P5
MACVVGIDIAKKTFDVATRQGNGTYRTRSQLANDASGFKALRTWLTKYAEPRAWIVIEATGHYHQQLAAELHEHGYQVSVVNPACIAYYAKSQLQRIKTDKADAKLIARYGECHSDTLRMWQPAPWAQRKLCTLLRRIEDLQKLERMEHNRLDVATDASEQASIECVLEQLQTQITELLAAVEDHIAHDASLRHKRNLLTSIGGISNKTAALLLAELGDPLLFDDAREIVAFAGLNPKLAESGQQKGTVRISRTGSARLRAGLYMPAIVAMTHNPAIKALKERLRTRGKAGKQIVCAAMRKLLHLVYGVLKSGQPFDPALAIAH

SEQ ID NO: 14862 - protein, 343 aa, unidentified
  source 1..343: note = protein_f401054
  REGION 75..173: note = RuvC_domain
  SITE 111: note = RuvC_P3
  SITE 113: note = RuvC_P4
  SITE 116: note = RuvC_P5
  REGION 276..319: note = Tnp_domain
  SITE 284: note = Tnp_P1
  SITE 314: note = Tnp_P2
MTVDLERGYKHRELCGPKQYLNLLLRSVLMIYVGIDVAKDKHDCFITNSDGEVLFQVFTIQNNREGFDDLFSKIQSISPDMSLIDKGLPTFVINPLHTNLYRKSLSLRKTKTDKVDARTIAMMFMSDVNLKSYSDTSYHNEELKSLTRYRFDKVQERAQLKQSVSRLVTILFPELEKLVPTLHIASVYALLSELPSAGKIASCHLTRLTNLLKNASKGRYNREKAIEIRDAARTSIGSNMPAKSLELKHTLRLISELDSEISEIESEIKQIMDWISSPILTIPGISYRMGAMILAEIGDFSRFDSPDKILAYAALLHPPINLDSWIPLIPIWKSEAHAICVLP

SEQ ID NO: 14863 - protein, 343 aa, unidentified
  source 1..343: note = protein_9da88fa
  REGION 5..152: note = RuvC_domain
  SITE 8: note = RuvC_P1
  SITE 55: note = RuvC_P2
  SITE 92: note = RuvC_P3
  SITE 94: note = RuvC_P4
  SITE 97: note = RuvC_P5
  REGION 212..299: note = Tnp_domain
  SITE 220: note = Tnp_P1
  SITE 250: note = Tnp_P2
  SITE 258: note = Tnp_P3
  SITE 259: note = Tnp_P4
  SITE 271: note = Tnp_P5
MEHFAGLDVSVKLTSLCIVDDAGGIIREAKIESDPDALLQVLKNGAYHFKRIGLEAGPLSQWLFSALAEAGLPVICVETRHMRAALKAQINKTDRNDARGMAQMMRAGLYRPVHVKTVRSQKLRMLLTHRKLLQSKAIAIENDLRATLRNFGLKVGMAGAVKFEARIKELVENIPDLAILVEPLLIVRRTLREQFGIVHRRLLAVVRQDEVCRRLMTVPGVGPVVALTYRSTVDVPARFRNSKAVGAVFGLTPSKYQSGEIDRTGAISRCGDEMMRVMLYEAAQSMLYSRKWSWLKAWAMQIARRRGIKKAIVALARRLAVVMHRIWVDGTEFRWTKQEAAAA

SEQ ID NO: 14864 - protein, 347 aa, unidentified
  source 1..347: note = protein_a4db93b
  REGION 2..114: note = RuvC_domain
  SITE 12: note = RuvC_P2
  SITE 53: note = RuvC_P3
  SITE 55: note = RuvC_P4
  SITE 58: note = RuvC_P5
  REGION 219..306: note = Tnp_domain
  SITE 227: note = Tnp_P1
  SITE 257: note = Tnp_P2
  SITE 265: note = Tnp_P3
  SITE 266: note = Tnp_P4
  SITE 279: note = Tnp_P5
MDNPTDVLIGMEATRHYWLAFYSFLLEKEFSVIVLNPLQTNAWRKGTEIRKRKTDSIDATLIADVIRFGRFTETALADETMLALKQLSRFRYSLVHSVSDLKRKAIVVLDQTFPEYHTVFSDIFGKTSSEILMEYTTPSDFENVSIEQLTELMEKASRKRIGENKAKQLLQIASQSFGVRFCKGAFSFQLKMLLEQIKFIEEQIKHCEHQMGEYLVELDTPITTIPGIGLILGATILSEIGNIHRFDKPAKLVAYAGIDASISQSGQYEASKGSMSKRGSSHLRRALFQSAISAYRCAPVLQAFYQKKKAQGKHYYVCIGALARKLCYIIYAILKNNKPYEIPPHIK

SEQ ID NO: 14865 - protein, 403 aa, unidentified
  source 1..403: note = protein_bb87c4c
  REGION 5..160: note = RuvC_domain
  SITE 8: note = RuvC_P1
  SITE 59: note = RuvC_P2
  SITE 98: note = RuvC_P3
  SITE 100: note = RuvC_P4
  SITE 103: note = RuvC_P5
  REGION 273..366: note = Tnp_domain
  SITE 281: note = Tnp_P1
  SITE 311: note = Tnp_P2
  SITE 319: note = Tnp_P3
  SITE 320: note = Tnp_P4
  SITE 333: note = Tnp_P5
MKSVLSIDVANGKSEVLLITEYGEVLIEPYEVKHCLSEFNLLKEKIDNFNLNDLTIFMESTSTYHLPIQRFFTKNNYNVQVINPILGKNNTRNLRKTKTDIEDCYNLADLFFKNTVKIHTKNMNDIYSSMIELSRQEKHLTESLVRSKNRFKQIVANAFPEYIKCFTANDIFGKTSLNFIKEFPHADIIKEKRIDALANNLYKSSKNGCSYNKCLSKAKKIKELANNSYPGIDVDSYEVNNLINIVDVISYNGSKLNDVKQDIVKLARQIPYFNIINSIYGIGETSTAQIIAELGDINRFENIKQLNAFCGLDPTIIQSGKSINYHGPISKRGNRNARKILFITCCSIIRASVLHNMDNEILLYYRKKQAENKHFKECIIACSTKLLRTIFAMCKNNSLYVQK

SEQ ID NO: 14866 - protein, 329 aa, unidentified
  source 1..329: note = protein_d9c1473
  REGION 4..159: note = RuvC_domain
  SITE 7: note = RuvC_P1
  SITE 60: note = RuvC_P2
  SITE 100: note = RuvC_P3
  SITE 102: note = RuvC_P4
  SITE 105: note = RuvC_P5
  REGION 200..286: note = Tnp_domain
  SITE 208: note = Tnp_P1
  SITE 237: note = Tnp_P2
  SITE 245: note = Tnp_P3
  SITE 246: note = Tnp_P4
  SITE 259: note = Tnp_P5
MYYVGIDISKRVVDVCLLVDGIKGKRKTKTLPNGPNAVEALAEWLTRQQCDPGQAHIVMEATGIYHEHLAYGLHQSGIAVSVINPHRLREFAKGMGILTKTDKVDACALACYGCLRQPECWTPPAPEIRKLRALLQHRDSLLGDKQRLENRLSALSSTLTTEEVMASLELMVQHVKDELEHIERLIADHIDKYPGLKNDLKLLKSIDGVGDQIGWNMLATIRGSNFRSAEQVAAYLGVIPVERRSGTSVRGRARLSKIGPPAIRAKLYMGAIAAISHNHHVKAQYERLLQKGKAKMLAIGAAMRKLVHLCYGVLHTQQQYDRNYGVVAS

SEQ ID NO: 14867 - protein, 344 aa, unidentified
  source 1..344: note = protein_e210e6f
  REGION 7..150: note = RuvC_domain
  SITE 10: note = RuvC_P1
  SITE 54: note = RuvC_P2
  SITE 89: note = RuvC_P3
  SITE 91: note = RuvC_P4
  SITE 94: note = RuvC_P5
  REGION 213..297: note = Tnp_domain
  SITE 221: note = Tnp_P1
  SITE 250: note = Tnp_P2
  SITE 258: note = Tnp_P3
  SITE 259: note = Tnp_P4
  SITE 271: note = Tnp_P5
MSTTRVVGIDIAKSVFQVCVWMVDGSVAWNKKISRSKLLDTIRQFEPGTLVAMEACATSHFWGRTFASMGYCVRLIPAQHVKAFVRSQKNDANDALAICETAFRPGIHFVSVKTTEQQDIKALRNTRQLMVEQRTKLVGQRRSLLAEYGFTIPVGILRLQQQLPELIEDASNSLTFTLRRLLSSLREDMQALNERITSLDSEIAALSSQQIAYRHLLTIPGVGPLIAAAFISEVDATQFSSGRELSAWCGLVPRQHSSGGKQRLSSVTKNGNRSLRTLIIHGARSVMRCVKKRDDSLSIWLQRLEARRGFLKTTVALANKLTRIIWRVLTDGIDFNMQEAVAIN

SEQ ID NO: 14868 - protein, 330 aa, unidentified
  source 1..330: note = protein_2d08efb
  REGION 8..159: note = RuvC_domain
  SITE 11: note = RuvC_P1
  SITE 59: note = RuvC_P2
  SITE 97: note = RuvC_P3
  SITE 99: note = RuvC_P4
  SITE 102: note = RuvC_P5
  REGION 202..289: note = Tnp_domain
  SITE 210: note = Tnp_P1
  SITE 240: note = Tnp_P2
  SITE 248: note = Tnp_P3
  SITE 249: note = Tnp_P4
  SITE 262: note = Tnp_P5
MKSWNVILGVDVSKLTLDICCAERQLYLKIDNQTKGFNVLRKWCKANAIDLKETMVVLEHTGGYEYRFMQFCESSSITYCRIPGLEIKNSMGMTRGKSDRTDSFRIGQYGEEKIKRLVPSKPLDKNILALKQLLSFRKRLVREKAGYESTVRERKHMYQSKKTDTVTHVAQSKIKENTKHIRQIEQEIMEMIKSNEAFLQTYRIITSLKGIGNVNAWMTIAYTENFTSFADARKYAVYVGVVPFGHGSGTSIKKRDRVSHLAHKEIKQELNQAAKTAIVHDPEIRAYATRKLQNKCYPLVLNNVKFKLILRMFALVKRGEGFVENYKRVA

SEQ ID NO: 14869 - protein, 321 aa, unidentified
  source 1..321: note = protein_9ce3ee9
  REGION 7..127: note = RuvC_domain
  SITE 31: note = RuvC_P2
  SITE 66: note = RuvC_P3
  SITE 68: note = RuvC_P4
  SITE 71: note = RuvC_P5
  REGION 190..274: note = Tnp_domain
  SITE 198: note = Tnp_P1
  SITE 227: note = Tnp_P2
  SITE 235: note = Tnp_P3
  SITE 236: note = Tnp_P4
  SITE 248: note = Tnp_P5
MAPLPGTGKISRQKLLDTLRQFEPGTLIALEACSTSHFWGRTLSSMGYSVRLIPTQHVKAFARNQKNDANDALAICETACRPGIHFVPVKTTEQQDIKALRNTRQLMVEQRTALANQLRSLLAEYGLIIPAGIQRLQQQLPELIEDASNGLTFTLRRLLYSLREDIQSLNERIVCLDKEIAALSSQQAAYRHLLTIPGIGPLIAAAFISEVDAVQFSNGRELSAWCGLVPRQHSSGGKQRLSSVTKNGNRSLRTLIIHGVRSVIRCVKKRDDNLGLWLKRLEARRGFLKTTVALANKLTRIIWRILTDGVDFNMNKAFAVS

SEQ ID NO: 14870 - protein, 342 aa, unidentified
  source 1..342: note = protein_5af01bd
  REGION 6..148: note = RuvC_domain
  SITE 9: note = RuvC_P1
  SITE 52: note = RuvC_P2
  SITE 87: note = RuvC_P3
  SITE 89: note = RuvC_P4
  SITE 92: note = RuvC_P5
  REGION 211..298: note = Tnp_domain
  SITE 219: note = Tnp_P1
  SITE 249: note = Tnp_P2
  SITE 257: note = Tnp_P3
  SITE 258: note = Tnp_P4
  SITE 270: note = Tnp_P5
MTITTIGIDLAKNVFQIHGVDGSGKTVLKKQLRRNQVLTYFIKLTTCTIGIEACGGAHYWARKLRAMGHTVKLMAPQFVKPYVKANKTDAADAEAICEAVTRPNMRFVAIKNVEQQAILSLHRARQGFVKARTAQANQIRGLLGEYGITIPQGIKYVMKDMLKLLDPPEHDLPGAFTDLLKRLHTHLLVLEEQVSDLETQINSWHSNNEYSQRLSKIPGIGPLTATALVASIADANCFRNGRELAAWLGLVPRQHSSGGRPMLLGISKRGDTYLRTLLIHGARSAVRVAKNKSSPTDKWTNEMLNRRHQNVASVARANKNARIVWALLAHGRDYNAEYKIAA

SEQ ID NO: 14871 - protein, 404 aa, unidentified
  source 1..404: note = protein_baa782f
  REGION 6..162: note = RuvC_domain
  SITE 9: note = RuvC_P1
  SITE 60: note = RuvC_P2
  SITE 100: note = RuvC_P3
  SITE 102: note = RuvC_P4
  SITE 105: note = RuvC_P5
  REGION 271..358: note = Tnp_domain
  SITE 279: note = Tnp_P1
  SITE 310: note = Tnp_P2
  SITE 318: note = Tnp_P3
  SITE 319: note = Tnp_P4
  SITE 331: note = Tnp_P5
MPELWAGTDAGKAEHHCTVIDANGTTLLSRRVPNSEAELLELLGDVLGIADGGLVTWAVDLNAGGASLWIALLVNHGQKLLYIPGRTVHHASAAYRGSGKTDAKDAFIIADTARMRRDLQPLQELGEIAVDLRILTARRIDLAADRTRAINRLRAQLLEYFPALERAFDLSTSKSALILLAGYQTPAALRRIGRSRLTTWLKNHGVRTSTAARSTAEAAVTAGEAQFTVVPGERTCARMVHTLAAAVTALDEEISELEAQIEARFREHPDAEVITSMPGIGMTLGAEFIAATGGDMSVFGSSDRLAGVAGLAPVPRDSGKVSGNLRRPRRYSRRLLRMFYLSAQVAAVHCPESKRYYQRKRAEGKSHKQAVLALARRRLNVLWALLRDHKLFETAAARAGATAI

SEQ ID NO: 14872 - protein, 411 aa, unidentified
  source 1..411: note = protein_4262f94
  REGION 5..163: note = RuvC_domain
  SITE 8: note = RuvC_P1
  SITE 62: note = RuvC_P2
  SITE 102: note = RuvC_P3
  SITE 104: note = RuvC_P4
  SITE 107: note = RuvC_P5
  REGION 273..373: note = Tnp_domain
  SITE 281: note = Tnp_P1
  SITE 311: note = Tnp_P2
  SITE 319: note = Tnp_P3
  SITE 320: note = Tnp_P4
  SITE 333: note = Tnp_P5
MNPVIGLDVAKGESQVQAFLEKKTPYKKSFKVAHTLEGLQELHAFVKEIENLTGSKPPFILESTGHYHMPVVQYFEKRGYLLIIVNPLISYKAKSSSLRKVKTDIIDAHHLCELYYKEDLEPYKKRGIQLLNLRNLTRQHENLTGMFVQTKLQFQSVLDQVFPEYVGVFGELYSDVSLLTLSAFPTSEEILEAGEETLSMKIKELCKSRSQKWARNQATKLMKAAKRNPFQQTLYHSHLISLEMLIKILLEYKKHLSKLEEEIDALAKNIEEYKIIQSIPGIGEKIAATIISEIGEIDRFNHPKKLVAFAGIDPSVFESGTFKGTKNHITKRGSSRLRHALFTAVRCAIRDARKKRTTKELIPRNKRLREFYDKKRDEGKPYRVSIIACANKLLGWIYALLKTKTTFQDVA

SEQ ID NO: 14873 - protein, 330 aa, unidentified
  source 1..330: note = protein_9e61f08
  REGION 5..152: note = RuvC_domain
  SITE 8: note = RuvC_P1
  SITE 55: note = RuvC_P2
  SITE 95: note = RuvC_P3
  SITE 97: note = RuvC_P4
  SITE 100: note = RuvC_P5
  REGION 197..283: note = Tnp_domain
  SITE 204: note = Tnp_P1
  SITE 234: note = Tnp_P2
  SITE 242: note = Tnp_P3
  SITE 243: note = Tnp_P4
  SITE 256: note = Tnp_P5
MSVFVGVDIAAKSFDLVSRVEEKSSKAERFSQTSQGHAKAIKRLKALKPSVIVIEATGIYYLDLAVALVKADLPVSVINPKSFRHFAELKLAGSKTDGVDATLLAEYGERMSPRLWTPPSEERLALRDIGRQINRLTATKTQAKNRLHALQSKRATMPLLIEDEQEGIALLDRRIKRLSQAALELIAGCGELSTHLANIGAAKGIGEATAIAVLAELCVLPASLKAPQVSRHAGLDVRLTQSGTSVNRPARLSKSGNAYLRAALYMPAMSAARHDPRAKAFYESLVARGKKKIQAQCAVMRKYLTGIWACMKTGSAFDSTLLFSEEHKNA

SEQ ID NO: 14874 - protein, 343 aa, unidentified
  source 1..343: note = protein_9712cb4
  REGION 6..146: note = RuvC_domain
  SITE 9: note = RuvC_P1
  SITE 52: note = RuvC_P2
  SITE 87: note = RuvC_P3
  SITE 89: note = RuvC_P4
  SITE 92: note = RuvC_P5
  REGION 211..296: note = Tnp_domain
  SITE 219: note = Tnp_P1
  SITE 249: note = Tnp_P2
  SITE 257: note = Tnp_P3
  SITE 258: note = Tnp_P4
  SITE 270: note = Tnp_P5
MEIRSVGIDLGKTTFHLVALGDNGKLLIKKKFSQKQLIAFTANMQTSLIGMEACSGAHFLGRTLREQGHDVKLIPAQFVKPFVKSNKNDFIDAEAIAEAVTRENMRFVPIKTDDQLDLQALHRVRDRLIARRTSVINQLRAFLLERGVVFAKSPAKLRECIPETLEDADEKISPRMRNLLALLWEEWKDLDQQLEDMNHEVERIASSDPACQRLRQIPGIGPLVATAIVAAIGNGAAFRKGRDFAAWTGLVPKQHSTGGKTKLAGISKRGNRYLRKILIHGARSVVFRSRRERIAMGEWMNTLETRSSRNVLIVAMANKLARIAWAVLSSGQDYRAVQEPIAA

SEQ ID NO: 14875 - protein, 390 aa, unidentified
  source 1..390: note = protein_70b5582
  REGION 4..162: note = RuvC_domain
  SITE 7: note = RuvC_P1
  SITE 60: note = RuvC_P2
  SITE 101: note = RuvC_P3
  SITE 103: note = RuvC_P4
  SITE 106: note = RuvC_P5
  REGION 265..352: note = Tnp_domain
  SITE 273: note = Tnp_P1
  SITE 303: note = Tnp_P2
  SITE 311: note = Tnp_P3
  SITE 312: note = Tnp_P4
  SITE 325: note = Tnp_P5
MIYAGIDVAKDEHDCLITDADGNRLFDPFVIQNNAIGFDKLFERLIACSEDLSKVKVGLEATGHFSDNLLEFIMTKDFPTYVINPLHTNLYRKSLSLRKTKTDKVDARSIVTMLRTESLKPYSHKAYHIRELKSLTRYRHSLVQDCAMVKTSFARLLVILFPELEKIVSSLHTVAVYALLKEFPNVSAIANCHLTRLTNLLYEASKGHYGKDKAIEIRKSARVSIGTNSTVKSLELQQTIARIEMMESQIKQVEEMINPIVDSFNSPIMSIPGISYRMAAIIIAETDNFQDFDKAEQVLAFAGLEPSVYQSGQLTSTHAKMVKRGSKYLRYALFNAAKFVCMHDDTFKTYLAKKRAEGKPYNVAVSHAAKKLTRVIHHLVKTNQAFVKQS

SEQ ID NO: 14876 - protein, 341 aa, unidentified
  source 1..341: note = protein_895c711
  REGION 5..151: note = RuvC_domain
  SITE 8: note = RuvC_P1
  SITE 91: note = RuvC_P3
  SITE 93: note = RuvC_P4
  SITE 96: note = RuvC_P5
  REGION 211..296: note = Tnp_domain
  SITE 219: note = Tnp_P1
  SITE 249: note = Tnp_P2
  SITE 257: note = Tnp_P3
  SITE 258: note = Tnp_P4
  SITE 270: note = Tnp_P5
MEEHIGLDVSMKETAVSIRREGERIWRGKCASDPRIIAELVRKRAPAAKRVVFETGPLSVWFYHALRAEGLPAICIDARHAKAALDMAANKTDANDADGLARLAEAGFFREVRVKGFDSMLTRTLVAARTRLVRITVELSNQIRGIMKTFGLLVPAGKGTTFEKNVRSLLIDQSELAPVVLPMVEAWRSIRIRAAELGRQLVADARQSQACRILMSIPGIGAITATSFATAIEDPGNFKKSRSVAAWIGLTTRRYQSGEVDYDGHISRRGDRHLRGLLYEAAAVILTRSPIDSSLRTWGLKLRERVGFKRAAVAVARKLAVIMHSMLKTGEFFDRNAGATA

SEQ ID NO: 14877 - protein, 304 aa, unidentified
  source 1..304: note = protein_8d86a31
  REGION 4..154: note = RuvC_domain
  SITE 7: note = RuvC_P1
  SITE 50: note = RuvC_P2
  SITE 90: note = RuvC_P3
  SITE 92: note = RuvC_P4
  SITE 95: note = RuvC_P5
  REGION 182..266: note = Tnp_domain
  SITE 190: note = Tnp_P1
  SITE 219: note = Tnp_P2
  SITE 227: note = Tnp_P3
  SITE 228: note = Tnp_P4
  SITE 239: note = Tnp_P5
MNGIGVDVSKRQLDVGTTDGEILQVSNSASGFAELDLWLRKHPASQIVLEATGGYERPVLDFLHVAGHPVVRANALRARRLAQGLGQLAKTDRLDAYALAQMAALVKLPAYQPLEPWQQKMREFVRARRQTMEALTVARQQQEMVTDRELRRLLQANISRLQGIVGRLGKQIAEQVAQQPQLAVLKSMKGVGPGLQAVLASYLPELGRISGKRIASLVGVAPMSHDSGTMRGKRSIHGGRAEIRQVLYMASMSAMRHEPRLRDFYQSLRARGKEGKVAIVAVMRKMLVILNARVRDAQGGSIPA

SEQ ID NO: 14878 - protein, 345 aa, unidentified
  source 1..345: note = protein_e015e41
  REGION 7..148: note = RuvC_domain
  SITE 10: note = RuvC_P1
  SITE 53: note = RuvC_P2
  SITE 88: note = RuvC_P3
  SITE 90: note = RuvC_P4
  SITE 93: note = RuvC_P5
  REGION 212..299: note = Tnp_domain
  SITE 220: note = Tnp_P1
  SITE 250: note = Tnp_P2
  SITE 258: note = Tnp_P3
  SITE 259: note = Tnp_P4
  SITE 271: note = Tnp_P5
MMYIASIGIDLGKTTFHLVALGERTQVLRRKKCSRAQLLAYTANLPACLIGLEACAGSHFLGSVLRQQGHQVRLIPAQFVKPYRKSNKNDFLDAEAIAEAVTKQNMRFVPIKTQEQLDLQAIHRVRDRLVQRRTALINEIRGFLLERGITFAAGPIHLRQHLPTVLEDAEQNLSPRLRWLLDRLWQEWKQIELDIKTLTEEIERISNEDARCRRLRQIPGFGPLVSTATVAAIGNGAAFRRGRDFAAWLGVVPRQCSSGGKQKLLGISKRGNVYLRRMLIHGARAVLLRIKYDTAGLGQWVHRLAQRAPRNKVIVAIANKLARIAWAVLSSGNDYRHQPLQAVPA

SEQ ID NO: 14879 - protein, 398 aa, unidentified
  source 1..398: note = protein_b219eef
  REGION 5..163: note = RuvC_domain
  SITE 8: note = RuvC_P1
  SITE 62: note = RuvC_P2
  SITE 102: note = RuvC_P3
  SITE 104: note = RuvC_P4
  SITE 107: note = RuvC_P5
  REGION 273..362: note = Tnp_domain
  SITE 281: note = Tnp_P1
  SITE 311: note = Tnp_P2
  SITE 319: note = Tnp_P3
  SITE 320: note = Tnp_P4
  SITE 333: note = Tnp_P5
MDPVIGLDVAKGESQVQAFLEKKNPYKKSFKFKHDRMGLHDFYLFYQEVEQISGQSPSVIFESTGHYHEPVLQFLEDHGVTYYLVNPVISYEAKKVSLRKVKTDAIDAYHLCELYYKEDLEAFQKKNIQTLNLRNLCRQHDSLTGTYVQTKLQFHTILDQVFPEYKGVFGDLFSKVSLHTLLAFPTPGEVEELNLSEIAHEIHQLCKRRSKSWSMKKAEKLKSAARNNPYKQTLYYSHLISVKMYIEMLLQYQKHLSQLETEIDAMAQAFEAYPIIRSIPGIGGKIAATIISEIGEIDRFNNPKKLVAFAGIDPSVHESGQFKARINRITKRGSTRLRQVLYIAVQCGLINTRNPRLKEFYDRKREEGKPHKVAVIACANKLIHWIYALLKRKETFVI

SEQ ID NO: 14880 - protein, 430 aa, unidentified
  source 1..430: note = protein_8622965
  REGION 9..157: note = RuvC_domain
  SITE 12: note = RuvC_P1
  SITE 62: note = RuvC_P2
  SITE 97: note = RuvC_P3
  SITE 99: note = RuvC_P4
  SITE 102: note = RuvC_P5
  REGION 254..361: note = Tnp_domain
  SITE 262: note = Tnp_P1
  SITE 293: note = Tnp_P2
  SITE 301: note = Tnp_P3
  SITE 302: note = Tnp_P4
  SITE 313: note = Tnp_P5
MEIVYPRSCGVDVHKSFIVAVICISESVKPKYIKKRFSTFNNQLIQFRDWLIENNCQNVCMESTGKYYIPVYNALEGHISNVVVANPKWVKAIKGEKDDNKDAKWIADLFKFGIVRSSYIPEKDIRILREFTRYQYKLVNMRSSEKNRFQNALTTGNCKLDIVFSDIFGKSASAIVDTILSNNPYTSEDILSKVHAGCKASHEDILSAVEGIQLNQFQKARIRIVQKHMEYLDSLLDEIQHHIDLMVANYEEYIQLLCTIPGINRKSAITIISEIGTDMSQWSSHRKLAAWAGLAPGCNESAGKKKSVKISKAGVYLKPCLVQVAHAAVKDKNCDYYADKFNKISKRRGKKRAIIAIARKILIAVYHLLKTGEVFNPTDMADVETTKKQRIEYVKNNLRNAFNQLSRTGLSEAEILQLIRKESTNSPQIE

SEQ ID NO: 14881 - protein, 407 aa, unidentified
  source 1..407: note = protein_0eaf2d3
  REGION 6..159: note = RuvC_domain
  SITE 9: note = RuvC_P1
  SITE 57: note = RuvC_P2
  SITE 98: note = RuvC_P3
  SITE 100: note = RuvC_P4
  SITE 103: note = RuvC_P5
  REGION 221..306: note = Tnp_domain
  SITE 229: note = Tnp_P1
  SITE 259: note = Tnp_P2
  SITE 267: note = Tnp_P3
  SITE 268: note = Tnp_P4
  SITE 279: note = Tnp_P5
MTRVFIGVDPHKLSATIEVVDAQEKVLATGRFDTDKAGYAAMRKHVARWPDRVWAVEGSGGAGRPLAQRLLADGEHVVDVPPKLSARVRLFDTGHNRKTDAHDAHAVAAVAVRTKNLRTLAYDQELEALRMLSERRAELISHRVQTVNRLQRLLSELLPGQAKPNLTAPQAKAILSSRRPRDLANKTRKRMALEQVEDLVVVDARIKAINKELKAMVLATGSHLMDLPGIGPIGAARILADVGDVTRFANRNRFASWTGTAPLDASSGEQVRHRLSRAGNRKINHMLHMAATSQIRLDTEGRAYYRRKRAAGKTHLEAMRCLKRRISDAVYRQLIADASEAAAANVIQESEASPGGHCGATQESSAVDLPPHIDTSDQPLPDPQPQRYAAQNPGRKKEAHDVLLRTG

SEQ ID NO: 14882 - protein, 351 aa, unidentified
  source 1..351: note = protein_72b8f29
  REGION 18..160: note = RuvC_domain
  SITE 21: note = RuvC_P1
  SITE 64: note = RuvC_P2
  SITE 99: note = RuvC_P3
  SITE 101: note = RuvC_P4
  SITE 104: note = RuvC_P5
  REGION 220..306: note = Tnp_domain
  SITE 228: note = Tnp_P1
  SITE 258: note = Tnp_P2
  SITE 266: note = Tnp_P3
  SITE 267: note = Tnp_P4
  SITE 279: note = Tnp_P5
MLVRSLTSGTVMENIALLGIDLGKHTFHVHAQDKAGHQLWRRKLNRKELVELVANTPVCRIVMESCSGAHHFARRFLQFGHDVKLIAPQYVKPFVKGNKSDFVDAEAICEAASRPTMRFAAVRNEQQQTISALHRTRDMLIRSRGSAHNQIHAYLVEFGIAISTGPAAIRKLPAVLEANELPPRLVALLEQLRDYVFHLNEQIAVIERELNALMKEDDVAQRLLTVPGIGPITASVLAAQAGDARQYRTSRDFAASLGLVPRQYSTGGKTTLLGISKRGDKHLRTLLVQCARSIMMHIHKRTDAMAIWVRQLLERRNSSIVACALAAKLARIAWAVLGGNAAYVPHPQRAA

SEQ ID NO: 14883 - protein, 399 aa, unidentified
  source 1..399: note = protein_de706e2
  REGION 6..159: note = RuvC_domain
  SITE 9: note = RuvC_P1
  SITE 57: note = RuvC_P2
  SITE 98: note = RuvC_P3
  SITE 100: note = RuvC_P4
  SITE 103: note = RuvC_P5
  REGION 221..306: note = Tnp_domain
  SITE 229: note = Tnp_P1
  SITE 259: note = Tnp_P2
  SITE 267: note = Tnp_P3
  SITE 268: note = Tnp_P4
  SITE 279: note = Tnp_P5
MERIVIGVDPHKLSATIEVVDDHERKLGQGRFTTNRAGYAAMLTYVRAWPGRTWAVEGANGAGRPLAQRLLEAGEDVVDVPAKLAARVRLFDTGHNRKTDAHDAHSIAMVAVRTQGLRVLALVGELEALRMLADRREALSRRRVQTVDRLQALLAELLPGQAKKDITTGQAKAMLASVRPRDIAGKTRRRIAAEELSELVAVEATMKKANAELKAMVLARGSHLMDLRGVGPVVAARVLADVGDVSRFADRNRFASWTGTAPLDASSGEQSRHRLSRAGNRRVNHMIHIAAISQIRLDTDGQAYYRRKRAEGKRPLEAIRCLKRRISDAIFRQLVTDATAARREDMDAGPGGHRGATQESSAAGSHPHTDTSDQPLPGPAPTTLRPAAAARKTHLEATG

SEQ ID NO: 14884 - protein, 338 aa, unidentified
  source 1..338: note = protein_3c3e5f0
  REGION 7..149: note = RuvC_domain
  SITE 10: note = RuvC_P1
  SITE 53: note = RuvC_P2
  SITE 88: note = RuvC_P3
  SITE 90: note = RuvC_P4
  SITE 93: note = RuvC_P5
  REGION 211..295: note = Tnp_domain
  SITE 219: note = Tnp_P1
  SITE 249: note = Tnp_P2
  SITE 257: note = Tnp_P3
  SITE 258: note = Tnp_P4
  SITE 270: note = Tnp_P5
MEPIATIGLDLAKNVFQVHCVDGVGNVVIKRQLRRSEVLKFFTKVPACLVGIEACGTAHYWGRELLKLGHNVKLMPPAYVKPYVKRGKTDAADAEAIAEAVTRPTMRFVAVKSVEQQAVLMLHKARDLLVRQKTMLINALRAHLAEFGIIAVRGPAGVNTVLDILHATQGELPRAAVQALNGLADQLNSVRIEIDKIETEIKDWHRANEVSQRLATIPGIGPITASAIVAAVPDATLFKSSRQFAAWLGLTPKSHSSGGKERLVGISKQGDGYIRRLLVLGATAVTRFTRQGHGIKIWASQLLDRKPSRLVTVALANKLARIVWALLIRKQSYAATVA

SEQ ID NO: 14885 - protein, 425 aa, unidentified
  source 1..425: note = protein_52391e8
  REGION 38..196: note = RuvC_domain
  SITE 41: note = RuvC_P1
  SITE 95: note = RuvC_P2
  SITE 135: note = RuvC_P3
  SITE 137: note = RuvC_P4
  SITE 140: note = RuvC_P5
  REGION 300..389: note = Tnp_domain
  SITE 308: note = Tnp_P1
  SITE 338: note = Tnp_P2
  SITE 346: note = Tnp_P3
  SITE 347: note = Tnp_P4
  SITE 360: note = Tnp_P5
MFELVEAMTSYHKRSYRFGTIVGVPAICFGRRVMEPVVGLDVAKGKSVFQAFLRKNESYGRAESISHSEDGFKRFGNLIAELKNLTGSDPIVILEATGHYHREVVNFFTGVKINHIIINPLQSKRAKGAKLRKVKTDAIDAWNLAEMYYRGDVRPHRTWQETYTELQHATRQHEFVTSLYVQAKLNMRALLDQVFPQYENVFYDLYSVTALKVLQTCLQGNIENMEETILDTAGKSHSKSWINEKLACLRETLGVWEKRDKSLSQSAALEGMLALLLTLRMQLEQLEEQIAKLAANLSEVALLKSIPGIGDKLAATIISEIGDAKQFESAKQLVAYAGLDPGVHSSGTFTATNNRITKRGSKRLRRALYLAVQCSMRKGTENRIRNYYDKKKREGKPYKVAVIACANKLLHYIYAILTKGQPYSN

SEQ ID NO: 14886 - protein, 377 aa, unidentified
  source 1..377: note = protein_f8bde8d
  REGION 1..147: note = RuvC_domain
  SITE 42: note = RuvC_P2
  SITE 82: note = RuvC_P3
  SITE 84: note = RuvC_P4
  SITE 87: note = RuvC_P5
  REGION 250..337: note = Tnp_domain
  SITE 258: note = Tnp_P1
  SITE 288: note = Tnp_P2
  SITE 296: note = Tnp_P3
  SITE 297: note = Tnp_P4
  SITE 310: note = Tnp_P5
MDKDSGEVLLQPSSFSNTKDGFDSLIQKLSSYSKDSILIGMEDTGHYHFALLKYLLEKNFTVALINPKTTDYTRKMQNGITKNDKLDTLTICDVLDTPVRKKQYRITKVNSFDLYEQKQLTRHHHNLKEELNVYTNRLQKCIDIVFPEFNSLFSSKYGIIYMNVLKTFGSAENIASTDIRTIRKCFEIKGRGNRISLTAQQLKDSAKSSIGISSAAEVIKIKHLISQIELINEQLAETDKKIEEFSIQNNSPILSIPGISHFSGTSILAELGEISNYSKPSKIIKAAGVAPYHYESSQYNAQHTAITKKGSPYLRKTLYQIILPVINNNPVFKQYYDLKISQGKGHRCACGHCVRKLLRIIYHLSSTNQQFDDALLR

SEQ ID NO: 14887 - protein, 389 aa, unidentified
  source 1..389: note = protein_415dafc
  REGION 4..159: note = RuvC_domain
  SITE 7: note = RuvC_P1
  SITE 58: note = RuvC_P2
  SITE 98: note = RuvC_P3
  SITE 100: note = RuvC_P4
  SITE 103: note = RuvC_P5
  REGION 262..349: note = Tnp_domain
  SITE 270: note = Tnp_P1
  SITE 300: note = Tnp_P2
  SITE 308: note = Tnp_P3
  SITE 309: note = Tnp_P4
  SITE 322: note = Tnp_P5
MFFLGIDIAKLNHVASLVSDNGNIVFSNFMFKNSLEGFLSLIDKVKSIPKDDIVIALEFTGHYSDNFVNFFFNRKFNVTLVNPANVANFRKSYGRDSKNDRIDSINIAKMLLSREYSLVTQSDIEYLSLKKLNRIRDSLVKQKSKCKILLTRNLDSIFPELHLLPSGIHSKAVYALLKKYPSSEEIAALGIDVLTNILKTNSRGHFCEKTACIIKSQAKSSVGFEDISLSFHISQLISSIELLEEQIRNTEKQINDIIEKLKPVILSIPGISNVACACILGEIGNISRFRSPSKLLAFAGLDPKVRQSGQFRALSCRMSKRGSKYLRYSLIYTAWNAVRNNEVFSNYYALKRSQGKNHYKALGHVAHKLVRVIYRLMKDNIPFDAEQLI

SEQ ID NO: 14888 - protein, 349 aa, unidentified
  source 1..349: note = protein_ffbb148
  REGION 6..148: note = RuvC_domain
  SITE 9: note = RuvC_P1
  SITE 52: note = RuvC_P2
  SITE 87: note = RuvC_P3
  SITE 89: note = RuvC_P4
  SITE 92: note = RuvC_P5
  REGION 211..309: note = Tnp_domain
  SITE 219: note = Tnp_P1
  SITE 249: note = Tnp_P2
  SITE 257: note = Tnp_P3
  SITE 258: note = Tnp_P4
  SITE 270: note = Tnp_P5
MKITTIGIDLAKTVFQIHGVDEHGKVILRKRLNRSEMAVFFAKLSPCLIGMEACGSAHHWARKLSQFGHVVKLMAPQFVKPYVKTNKNDMADAEAICEAVARPNMRYVAVKNIEQQGVLSIHRARAGFVKSRTALANQIRGLLAEFGIVIPQGIRSIMKKMPSILEDEENGLPGVMRNLMRGLTEHLKGLDTLVAELEIQIQRWHRESDASRKLESIPGIGPITASAIVATIGNAREFNNGRQLAAWLGLVPRQHSSGGKPTLLGISKRGDAYLRTLLIHGARSVIRVAETRMDGDNWLRKLLARRNRNVASVALANKNARIIWALLVREQSFQPGYVTTGNWAVTSSD

SEQ ID NO: 14889 - protein, 343 aa, unidentified
  source 1..343: note = protein_94b5cde
  REGION 6..150: note = RuvC_domain
  SITE 9: note = RuvC_P1
  SITE 54: note = RuvC_P2
  SITE 89: note = RuvC_P3
  SITE 91: note = RuvC_P4
  SITE 94: note = RuvC_P5
  REGION 213..299: note = Tnp_domain
  SITE 221: note = Tnp_P1
  SITE 251: note = Tnp_P2
  SITE 259: note = Tnp_P3
  SITE 260: note = Tnp_P4
  SITE 272: note = Tnp_P5
MKISRVGVDLAKNVFQLHGVDRHGETVLKRRVSRDKWISVLVKSAEPGCEVGMEACGGAHYWARQLMAKGFKVKIIPPQFVTPYVKSNKNDAKDAEAICEAMSRPTVRFVEAKTVEQQDIQATHRIRSELMCHRTAKANQIRGLVTEYGLVAPLHMASLRAAIPRWLEDAENGLTDRFRALLHGLWDDLLTLDQRIEALNREVDCIAKNDPVAQRLQQLRGVGPLVATALIARVGNGDQFSTGRQMAASMGLTPRQHSSGGKDRLLGISKRGDAYLRGTLIHGARAVVSQAKHKEDRLSRWVTGLAERRHPNVAAVALANKTVRMAWAMMNHDADYDPEFAVS

SEQ ID NO: 14890 - protein, 323 aa, unidentified
  source 1..323: note = protein_59d55fb
  REGION 8..147: note = RuvC_domain
  SITE 11: note = RuvC_P1
  SITE 52: note = RuvC_P2
  SITE 92: note = RuvC_P3
  SITE 94: note = RuvC_P4
  SITE 97: note = RuvC_P5
  REGION 191..278: note = Tnp_domain
  SITE 199: note = Tnp_P1
  SITE 229: note = Tnp_P2
  SITE 237: note = Tnp_P3
  SITE 238: note = Tnp_P4
  SITE 251: note = Tnp_P5
MNKYKEIFGVDISKDVFDVYGSESGHSQFKNTPQGFKLFAKTLPTGALVVMEATGYYHYRLAQYLFSHDISVSVVNPLQVKRFVQMRLSKIKTDKSDAKAICGYAIANTVPLYDAVNETQAECLQLFRLLDVYLKQRTAIKNKLHGERTLGRPSKVVYRSLSRSLKHLDVEIDCLEVRILSLVKQGQQKQLTDLKSIPGLGTKTALFLIVVTDGFNKFDTAGQLCSYVGLTPIIRMSGSSVRGKARISKMGNRKLRNLLFLCAFSACKHNKACRAVYERIVAKGKSKKLALIAVANKLLKQAFAIAKSGLPYDENYVSAQVKG

SEQ ID NO: 14891 - protein, 391 aa, unidentified
  source 1..391: note = protein_33a00b2
  REGION 4..163: note = RuvC_domain
  SITE 7: note = RuvC_P1
  SITE 60: note = RuvC_P2
  SITE 101: note = RuvC_P3
  SITE 103: note = RuvC_P4
  SITE 106: note = RuvC_P5
  REGION 266..353: note = Tnp_domain
  SITE 274: note = Tnp_P1
  SITE 304: note = Tnp_P2
  SITE 312: note = Tnp_P3
  SITE 313: note = Tnp_P4
  SITE 326: note = Tnp_P5
MISVGIDVAKDKHDCFIINSEGEVLADVFTIPNNMDGFHRLLQRIRDCTSPQDKIKVGLEATGHYSYNILGFLLDNGLPTYVLNPLHTNLYRKSLSLRKTKTDRVDARTIAAMLLSDVGLKPYTGTAYHNEELKSLTRYRFDKVKERGKLKQSIARLVCILFPELEKLVPTLHMVSVYALLEEFPGAKQIAEAHLTRLKTLLHDASRGRYGRDMAVDIRETARKSIGSVMPAKSLELCHTIRLIRELDAEIDEIETAIQNIMNKLHSPITTIPGVGTRMGAMILAEVGDFSRFGSPDKLLAYAGLSPSTYQSGQLHNCYAHMEKRGSRYLRFAIFNAAKYVCHWDPVFAAYLAKKRAEGKHYNVAVSHAAKKLVRLIYALEKSGKPYCLTA

SEQ ID NO: 14892 - protein, 340 aa, unidentified
  source 1..340: note = protein_e9dea53
  REGION 5..151: note = RuvC_domain
  SITE 8: note = RuvC_P1
  SITE 53: note = RuvC_P2
  SITE 91: note = RuvC_P3
  SITE 93: note = RuvC_P4
  SITE 96: note = RuvC_P5
  REGION 211..297: note = Tnp_domain
  SITE 219: note = Tnp_P1
  SITE 249: note = Tnp_P2
  SITE 257: note = Tnp_P3
  SITE 258: note = Tnp_P4
  SITE 270: note = Tnp_P5
MDEYIGLDVSLKETAISVRRGGKRVWRGKCASDPQLIAEVIRKRAPAAKRVVFETGPLSVWFFHALTAEGMPAICIDARHAKAALDMAANKTDANDADGLAHLAEVGFFREVRVKAFDSMLSRTLVAARVKLVRASLDVANQMRGLMKTFGLIVPRSMGGKFEDNVRTRLADDPNLARIILPLLEAWRALRTQAAELTRQLLANARRSEQCQLLMTIPGVGAITATSYLTAVEDPSNFKRSRSVGAWLGLTTRRYQSGEVDYDGHISRRGDTHVRSLLYEAAVVILTRSHAASDLRTWGIKLREKIGFKRAAVAVARKLAVIMHAMLCSGELFNRTQATD

SEQ ID NO: 14893 - protein, 342 aa, unidentified
  source 1..342: note = protein_9c52f60
  REGION 6..148: note = RuvC_domain
  SITE 9: note = RuvC_P1
  SITE 52: note = RuvC_P2
  SITE 87: note = RuvC_P3
  SITE 89: note = RuvC_P4
  SITE 92: note = RuvC_P5
  REGION 211..298: note = Tnp_domain
  SITE 219: note = Tnp_P1
  SITE 249: note = Tnp_P2
  SITE 257: note = Tnp_P3
  SITE 258: note = Tnp_P4
  SITE 270: note = Tnp_P5
MQITTIGLDIAKNVFQVHGIDGDEKVVVRKQLRRSQVMRFFQELAPCLVGLEACATAHHWARELQALGHTVRLMPAKDVKAYVKRNKNDAADAAAICEAVRRPSMRFVPVKSAEQQAQLMQHRARDLLMRQRTQLINAIRAHMAELGITAPQGREGIKQLLAIVADDEDLRLPVDARASLIVLAAQLQAMQTTIGSLERRIVARHRANADSKRLQTIPGVGVIGATAIAATVSDPAAFRSGRDFAAWVGLVPREASTGGKQKLGPISKQGDRYLRRILVGGAVSILRRAKLNPLRYPWVTQLLARRPFKVVAIALANKMARVAWALLAKGGTYRRLRLAAAV

SEQ ID NO: 14894 - protein, 430 aa, unidentified
  source 1..430: note = protein_ed8b621
  REGION 12..175: note = RuvC_domain
  SITE 15: note = RuvC_P1
  SITE 75: note = RuvC_P2
  SITE 121: note = RuvC_P3
  SITE 123: note = RuvC_P4
  SITE 126: note = RuvC_P5
  REGION 297..384: note = Tnp_domain
  SITE 305: note = Tnp_P1
  SITE 335: note = Tnp_P2
  SITE 343: note = Tnp_P3
  SITE 344: note = Tnp_P4
  SITE 357: note = Tnp_P5
MKQYELLHSLFVGIDVSMKENVVHAMPFSPEDHPGHAHLRFSAPNTPAGSVGIVEKVSDFLKFYPDVIQVVIALEATSVYSFHLATFLSVAHFNGHIPAIVYSVNPKEIHAYKKTFTDVGKDDYVDAMVIADYARSNKIRSRPWKGPELLGLRVLTRLRFRIAKLMGIVKNSTGNSIYLECSGLMTGENPFCNVWTTTCQELLTTFQGPDEILSLSHEELLNFITEKGHGRFSHPLDVVEKVKKAARNSYRLDKRVYEPLTSGLSVSFFIIHSLEAAIKKLDKSIETMAKSFSSDSYQILLSIDGVGPVIAGGLLAEIGDIKRFKTDDALAKYIGLTWRGKQSGQSESPVKHLSKAGDVYLRYYVLLATGQIINYSAKYHEAYERIRSRKTLFPYRAALNLVARKIVRLIFTLLDKHQLYSDNKVMVTLE

SEQ ID NO: 14895 - protein, 348 aa, unidentified
  source 1..348: note = protein_3c5b3b7
  REGION 5..148: note = RuvC_domain
  SITE 52: note = RuvC_P2
  SITE 87: note = RuvC_P3
  SITE 89: note = RuvC_P4
  SITE 92: note = RuvC_P5
  REGION 208..295: note = Tnp_domain
  SITE 216: note = Tnp_P1
  SITE 246: note = Tnp_P2
  SITE 254: note = Tnp_P3
  SITE 255: note = Tnp_P4
  SITE 267: note = Tnp_P5
MHKRIAVDLAKSVYQVAESVRVGQVSQRRRLNREAFRRYIQEQGEPVEWVMEACGTAHYWGRVAQALGHRVILLHPRYVRPYRRRNKTDRNDCDAILEAARCQGIHPVPVKSSAQQQVQQLHGLRETWKKSRIQRINLLRGILREAGIEAPVTTAAFLRQATELVEHPELARLSGLLHIVLSEINLYEQCMSECEQQLKRWHADDEVVRKLDEVSGIGVLTASAFKAVVGQPERFANGRQLSAWLGMTPREFSSGNSRKLGHISRQGNVYLRTLLIHGARAALLAAQRCQANTPERMTALQRWATQTVARIGHNKAAVALANKLVRICWAVWCHERRFSGNWQSIAPA

SEQ ID NO: 14896 - protein, 345 aa, unidentified
  source 1..345: note = protein_e89513e
  REGION 9..169: note = RuvC_domain
  SITE 12: note = RuvC_P1
  SITE 68: note = RuvC_P2
  SITE 108: note = RuvC_P3
  SITE 110: note = RuvC_P4
  SITE 113: note = RuvC_P5
  REGION 209..295: note = Tnp_domain
  SITE 217: note = Tnp_P1
  SITE 247: note = Tnp_P2
  SITE 255: note = Tnp_P3
  SITE 256: note = Tnp_P4
  SITE 269: note = Tnp_P5
MTNIVKQVVGIDIAQTELVVSLGRMNHDTGIDIFAFKTFANNAIGFKDLLAWVNKLAAKEIRVRYVMEATGVYHEKLAYYLSDQGQEVSIVLPNKISNYFRTLDVKTITDKTASQAICRFGLERKLEIWQKPKKIFKDLKQLTRERDQLIADRVVLKNQLHAEKAEAFPNESSIKRVTKRIQLIDKQELEIRAELAAIVKQDTELVKKIDTITTIPGVGKLTAVIVLAETNGFELIKSKKQLVSYSGMDIRLKDSGTSVKGKPRISKKGNRHLRKAMYMPALAAMRFNEHHKTVFVRLVSKHGIKMKAAVAVQRKILELIYVIYKTDKAFDKDYVKKQTAEVQNS

SEQ ID NO: 14897 - protein, 338 aa, unidentified
  source 1..338: note = protein_71b036a
  REGION 7..149: note = RuvC_domain
  SITE 10: note = RuvC_P1
  SITE 53: note = RuvC_P2
  SITE 88: note = RuvC_P3
  SITE 90: note = RuvC_P4
  SITE 93: note = RuvC_P5
  REGION 211..296: note = Tnp_domain
  SITE 219: note = Tnp_P1
  SITE 249: note = Tnp_P2
  SITE 257: note = Tnp_P3
  SITE 258: note = Tnp_P4
  SITE 270: note = Tnp_P5
MNSTHIIGIDLAKHVFHLVGHDCSGRETFRTKLTRQKTLQFLSAHDAAIVVMEACGGCHWFARKCQEYGHQVKLIPAQYVKPYVKTHKNDFIDAEAIAEAATRPKMRFVSPKSEQAQISVVIRKIRSGYIKERTACMNRIGSMLLEFGISFPRGHHQMKNLFQWLADHNEVVPPLLILELRNQLDYYNLLNKWIKEQEEKLDRVNKDNELMAILQSVPGIGPITASCCLSAVADPQDFKNGRNFAAWLGLVPYQYTTGGKPRMLGVSKRGNKELRELFIHAARAVMWRDVSAEKYFGSWLIELKRRKPFNVALVALANKLARIAWSVMMTRKTFEIRT

SEQ ID NO: 14898 - protein, 272 aa, unidentified
  source 1..272: note = protein_ede30ce
  REGION 6..122: note = RuvC_domain
  SITE 62: note = RuvC_P3
  SITE 64: note = RuvC_P4
  SITE 67: note = RuvC_P5
  REGION 182..265: note = Tnp_domain
  SITE 190: note = Tnp_P1
  SITE 220: note = Tnp_P2
  SITE 228: note = Tnp_P3
  SITE 229: note = Tnp_P4
  SITE 241: note = Tnp_P5
MASEPDVLIAWFRGLEFAVTRIGLQAGPLSQWLYASMREAGLTVELLATRHVRAAFKAMPVKTDRKDARGIAQLMRLGWFRPVRCKSLLAQEVRALLTARKLLQTKNHDVEMSLRGVLHGFGLKVGPTTPRTFATRIRELVAGHPTLSTAAEALLAARSTLFEQWQQLEKRLRSLAREDHRVRLLTTVPGVGAIVGLTYVSAIDDPGRFRSSKAVGAHFGLTPKKYQSGETDVTGRISKIGDGGVRTALYEAANVILTRPVKGSTLKSWGCV

SEQ ID NO: 14899 - protein, 400 aa, unidentified
  source 1..400: note = protein_2184a43
  REGION 8..152: note = RuvC_domain
  SITE 51: note = RuvC_P2
  SITE 91: note = RuvC_P3
  SITE 93: note = RuvC_P4
  SITE 96: note = RuvC_P5
  REGION 262..362: note = Tnp_domain
  SITE 270: note = Tnp_P1
  SITE 300: note = Tnp_P2
  SITE 308: note = Tnp_P3
  SITE 309: note = Tnp_P4
  SITE 322: note = Tnp_P5
MKARYKLSWIRKNLIKKALKVEHTLEGLEKLHSFLSDVEGITGVKPPLVMESTGHYHTPVVHYFEERGYLIIIVNPLVSYRAKSSSLRKVKTDIIDANHLCEMYYKEDLEPYKKRGIQLLNLRNLTRQHENITGIYVQTKLQFQAVLDQVFPVYRGVFGDLYSVVSLLTLLEFPTSQSILEAGEETVTNTIKKLCPRRSINWAKTKAIALLAAASQNPFRENLYQSHILSVEMYIKMLLEYQKQLSKFEEEIDALAKDIEEYKIIQSIPGIGEKIAATIIFEIGEIERFDHPKKLVAFAGIDPSIFESGKFRGTVNRITKRGSSRLRHTLYMAVRCAIRDSRKSKTTEELIPRNERLREFYDKKREEGKPFKVAIIACANKLLQWIYALLKSRTTFQDLA

SEQ ID NO: 14900 - protein, 345 aa, unidentified
  source 1..345: note = protein_e8e2af5
  REGION 5..152: note = RuvC_domain
  SITE 8: note = RuvC_P1
  SITE 55: note = RuvC_P2
  SITE 92: note = RuvC_P3
  SITE 94: note = RuvC_P4
  SITE 97: note = RuvC_P5
  REGION 212..300: note = Tnp_domain
  SITE 220: note = Tnp_P1
  SITE 250: note = Tnp_P2
  SITE 258: note = Tnp_P3
  SITE 259: note = Tnp_P4
  SITE 271: note = Tnp_P5
MKHYTGLDVSVKETAVCIIDEAGKICREVKVSSHPDDLIVVLKDPRWHIERVGLEAGPLSQWLFETLAKAGVPTICIEIRHTKAFLKAQPNKTDRNDARGIAQMMRVNLYKPVHVKTLTSQKRRALLTARQLLQQKAIAIENDIRGLLRNFGLKVGLAGKITFEERVCELVTGFPELAEIMDVLLSARTKLRDELKKLQKKVLDLTSRDEICRLLMTVPGVGPVVSFAFVSTIDIPQRFKNSKAVGPILGLTPKLNESGESKRIGRISCCGDAMMRSLLYEAAQTLLTLVKKWSWLKAWAMKIAKRAGKQKAIVALARRLAVIMHRMWSDGTEFCWTRNGLPAAA

SEQ ID NO: 14901 - protein, 392 aa, unidentified
  source 1..392: note = protein_b164570
  REGION 4..163: note = RuvC_domain
  SITE 7: note = RuvC_P1
  SITE 60: note = RuvC_P2
  SITE 101: note = RuvC_P3
  SITE 103: note = RuvC_P4
  SITE 106: note = RuvC_P5
  REGION 266..353: note = Tnp_domain
  SITE 274: note = Tnp_P1
  SITE 304: note = Tnp_P2
  SITE 312: note = Tnp_P3
  SITE 313: note = Tnp_P4
  SITE 326: note = Tnp_P5
MISVGIDVSKDKHDCFIVNSEGEVLADVFTIHNTMDGFNFLLQRIRECTMPQDKIKVGLEATGHYSYNLLGFLLDNGLPTYVLNPLRTNLYRKSLSLRKTKTDRVDARTIATMLLSDAGLKPYTDTAYHNEELKSLTRYRFDKVKERTKLKSSISRLVCILFPELEKLVPTLHMASIYALLEEFPDAKQIAAAHLTRLKALLETASKGHYKRDMALRIRDAARNSIGAFMPAKSLELQHTIRLIRELDAEIAEIEERIQSIMNDLHSPITTIPGMGVRMAAMILAEVGDFTRFVSPDKLLAYAGMSPSTYQSGQLKNCYPHMEKRGSRYLRYALYNATKCVCHWNPNFAAYLAKKRAEGKHYNVALSHATKKLVRLIFAMEKSKQPYSQLAA

SEQ ID NO: 14902 - protein, 392 aa, unidentified
  source 1..392: note = protein_8a03bc9
  REGION 4..164: note = RuvC_domain
  SITE 7: note = RuvC_P1
  SITE 62: note = RuvC_P2
  SITE 103: note = RuvC_P3
  SITE 105: note = RuvC_P4
  SITE 108: note = RuvC_P5
  REGION 268..354: note = Tnp_domain
  SITE 275: note = Tnp_P1
  SITE 305: note = Tnp_P2
  SITE 313: note = Tnp_P3
  SITE 314: note = Tnp_P4
  SITE 327: note = Tnp_P5
MLFIGIDVSKSKHNCYLVDSEGTIHENNLQIQNDIHGFKTLSQKITSICQAHNHKKVKIGLESTGHYSTNITNYLYSEGFEVIIFNPIITNNNRKSNTLRKTKTDKTDAKVIATMLFTDDSKSYSPISYQIIELKSLTRHRHRMVSQRSKFKVSLTRLITIIFPELPEHIYSIHQTSSKALLLELPTTKDISNCHLTKLTNLLKKNSRGKYSRNKAIELKNIAAESIGSSNRATAFELKQTIRFIQFLDSEIKIIDKKIKELLDEINTPVITIPGIGHTLAATIIAEIGDIHRFPKPSKLVAFSGLDPSVCQSGNYNATHTIMVKRGSKYLRWAILQAAKTVTMRDKTFKDYLSKKLSERKHYFVALSHVGKKLIRVIFHLLKNNISFVPQT

SEQ ID NO: 14903 - protein, 408 aa, unidentified
  source 1..408: note = protein_f22fac2
  REGION 6..162: note = RuvC_domain
  SITE 9: note = RuvC_P1
  SITE 58: note = RuvC_P2
  SITE 99: note = RuvC_P3
  SITE 101: note = RuvC_P4
  SITE 104: note = RuvC_P5
  REGION 269..356: note = Tnp_domain
  SITE 277: note = Tnp_P1
  SITE 309: note = Tnp_P2
  SITE 317: note = Tnp_P3
  SITE 318: note = Tnp_P4
  SITE 329: note = Tnp_P5
MPRYYLGVDWADKSHQLYVCDESARKIKEQEVQHTVGELVELGRWLDESRQNGIELWGAIEKPHGRIVDFLLDHGVMTYPINPKALDRARDRFRMSPSKSDAFDARVLAEFLRTDHAHLRALEPDSIAAQELKMLTRDHQRLGRQKIRLINQIKITLKEYYPRALEVFGDLETQIALDFLNNYPTPQALSKLTQRSWMRFATREHHLGEARAKELWDKLNPIQLPVPEHVVRAKTKLLLALVVQVQASIKAVDSYNEEIQSFFAAMPPAQLAKTLPGAKSATTVATLWAELGDAPSRWSSFRHLQAQAGAVPITKSSGKNRLVQFRSACNKHLRQTLYWFSFNSLSRCEWAKKYYRDQRAKGHNKHQALRALGAKWLKIIFVMWKDHKPYDENYHLANIARQRMRQAA

SEQ ID NO: 14904 - protein, 389 aa, unidentified
  source 1..389: note = protein_90f9538
  REGION 4..163: note = RuvC_domain
  SITE 7: note = RuvC_P1
  SITE 60: note = RuvC_P2
  SITE 101: note = RuvC_P3
  SITE 103: note = RuvC_P4
  SITE 106: note = RuvC_P5
  REGION 266..353: note = Tnp_domain
  SITE 274: note = Tnp_P1
  SITE 304: note = Tnp_P2
  SITE 312: note = Tnp_P3
  SITE 313: note = Tnp_P4
  SITE 326: note = Tnp_P5
MIYVGIDVAKDKHDCFICNGDGEVLANVFTIENSKSGFEHLLSIINTCTGVDGKKKVGLEATGHYSYNLLGFLLDNGLPTYVINPLHTNLYRKSLSLRKTKTDKVDARTIASMLMSDVSLKPYSQTLYHNEDLKSLSRYRFDKVKECSKLKTSVSRLINILFPELDKLVCSVHMTSIYALLSEFPSAKDISSAHLTRLTNLLYSVSKGHYNRDTAIKFRDAARNSIGCYMPAKALELKHTIKLIRELNTEIKEIDIEIKRIMDDINSPILSVPGIGYSLGAMIVSEIGDFNNFSTPDKILAFAGLSPSTYQSGKLDNAYAHMEKRGSRYLRYALFNAAKLVCTWDNTFSAYLAKKRNEGKHYNVAVSHAAKKLVRLIFALEKSGRPYKV

SEQ ID NO: 14905 - protein, 326 aa, unidentified
  source 1..326: note = protein_05c2ae9
  REGION 8..149: note = RuvC_domain
  SITE 11: note = RuvC_P1
  SITE 52: note = RuvC_P2
  SITE 92: note = RuvC_P3
  SITE 94: note = RuvC_P4
  SITE 97: note = RuvC_P5
  REGION 193..280: note = Tnp_domain
  SITE 201: note = Tnp_P1
  SITE 231: note = Tnp_P2
  SITE 239: note = Tnp_P3
  SITE 240: note = Tnp_P4
  SITE 253: note = Tnp_P5
MIKNTNYFGIDISKDVFDVTGSDGKHYQFKNDISGFKKMLSLTNEFSHCVMESTGVYHLRLAYYLYEKAIAVSVENPLSIKRFIQMRLTKIKTDKRDSQMIYEYAVNSSNELRLWKGQSTTQIACSQIISLTNLYTKQTTALKNKLQTEESMGSPCPQVIRSLKRSLKHLKKEMDKLEDSLLKLVKQDNQDLLTRVESIPGIGRRSSMLLIVLTGGFERFNKASELCSFAGLTPIIRQSGSSIRSRSRISKMGNRRLRKTLFMCSLSAKKYNKACKEIFDRIVAKGKSKKVALIAVCNKLLKQAFALAKSGLKYDRNYRSVLHNLN

SEQ ID NO: 14906 - protein, 345 aa, unidentified
  source 1..345: note = protein_19fe4a8
  REGION 7..149: note = RuvC_domain
  SITE 10: note = RuvC_P1
  SITE 53: note = RuvC_P2
  SITE 88: note = RuvC_P3
  SITE 90: note = RuvC_P4
  SITE 93: note = RuvC_P5
  REGION 211..296: note = Tnp_domain
  SITE 219: note = Tnp_P1
  SITE 249: note = Tnp_P2
  SITE 257: note = Tnp_P3
  SITE 258: note = Tnp_P4
  SITE 270: note = Tnp_P5
MSLIKILGIDLGKSSFHVIGRDFNDTPIFRKKFTRQKLIEYLTQLELCTIAFEACGGAHWLGRKCQTMGHTVRLIPPQYVKPYVKGNKNDFIDAEAISEAATRPNMRFVSVKTEEAQVISSIHKIRQGYVKERTACMSRIGALLLEFGISLPRGHATMKKLFNWLASQKVNFPSTLMEELLGLHEYYLELNKRITVKDNKLRQITEQNELGRLLKTIPGIGDKTASLCIANISAAADFKNGRNMAAWLGLVPRQYSTGGKPTLLGISKRGNKALRTLFVHCARSVLSKPDKTGKVFGDWLYDLRCKKPFNVATVALANKLARIAWAVIKTKKPFDVKQLQQNLQC

SEQ ID NO: 14907 - protein, 408 aa, unidentified
  source 1..408: note = protein_36b9cde
  REGION 6..170: note = RuvC_domain
  SITE 9: note = RuvC_P1
  SITE 63: note = RuvC_P2
  SITE 109: note = RuvC_P3
  SITE 111: note = RuvC_P4
  SITE 114: note = RuvC_P5
  REGION 282..368: note = Tnp_domain
  SITE 289: note = Tnp_P1
  SITE 319: note = Tnp_P2
  SITE 327: note = Tnp_P3
  SITE 328: note = Tnp_P4
  SITE 341: note = Tnp_P5
MNPLYVGIDVSSKSNVVYLMLPDGKKHSNFSVPNSQDGSTQMIKRILSVLTSHSFDTVIIGLEATSVYGDNLVYFLREDAILAPYNRKIHVLNPKQVKKFKDSYNDLPKNDYIDSFIIADCLRFGRINNEVYVSDYRYKALQNLTRARFYAVQNLTKEKRRFINVLFKKYSTMTQEKVFSNTFSTTAFAVYQEIESAEALANMDLQELTDFIIEKGKNRFPDPDAVAKAIQKAARSSYRLPKTVNDSVNQVLSISITSMKALESQIKEFDKAIEAEMQLLPNVLTSIHGIGPVISAGIIAEIGDINRFPNQAKLGKYAGLAWKQHQSGNFDSEHTRLIQSGNRFLKYYLYKGAFSLVRCDTEYSNFYHSKYKEVNRFQHKRALALTARKFTRLVFRLLKDNRLYRAAE

SEQ ID NO: 14908 - protein, 285 aa, unidentified
  source 1..285: note = protein_ee63e30
  REGION 4..163: note = RuvC_domain
  SITE 7: note = RuvC_P1
  SITE 60: note = RuvC_P2
  SITE 101: note = RuvC_P3
  SITE 103: note = RuvC_P4
  SITE 106: note = RuvC_P5
  REGION 170..246: note = Tnp_domain
  SITE 198: note = Tnp_P2
  SITE 206: note = Tnp_P3
  SITE 207: note = Tnp_P4
  SITE 220: note = Tnp_P5
MIYIGIDVAKDKHDCFITNSDGEVLFKSFTISNNREGFETLFQKVQSISDDLTKVKVGLEATGHYSYNLLGFLLDKGLPTYIINPLHTNLYRKSLSLRKTKTDKVDARTIASMIMSDVNLKSYTNTSYHNEELKSLTRYRFDKVKERAKLKSSISRLVCILFPELEKLVPTLHMASVYALLGDFNRFDSADKILAYAGMSPSTYQSGQLENCHSHMEKRGSRYLRYALYNATKYVCYWDESFGVYLGKKRSEGKHYNVALSHATKKLVRLIFAMEKSKQPYQPTV

SEQ ID NO: 14909 - protein, 372 aa, unidentified
  source 1..372: note = protein_2d01866
  REGION 7..149: note = RuvC_domain
  SITE 10: note = RuvC_P1
  SITE 53: note = RuvC_P2
  SITE 88: note = RuvC_P3
  SITE 90: note = RuvC_P4
  SITE 93: note = RuvC_P5
  REGION 211..297: note = Tnp_domain
  SITE 219: note = Tnp_P1
  SITE 249: note = Tnp_P2
  SITE 257: note = Tnp_P3
  SITE 258: note = Tnp_P4
  SITE 270: note = Tnp_P5
MENVSIIGIDLAKRSFQLHGASPDGSVVFRKKLSRPQLTAFLSELPKCIVAMEACATSHYWAREIGKLGHEARFIPPVYVKPFVKRQKNDANDAEAIAEEASRPTMHYVSVKSAEQQSQAKVFRTRDLFVRQRSQLVNALRGHLAEYGVVVAQGMVQFRRMITSFDEVAVDLPAQILNLCQAYIDQIALFDERIAVLDHEIKGRAKTDEATSRLMTIPGVGPMCATTIQAFAPPMEEFSNRREFAAWCGLVPRQKSTGGRQILGRTSKMGQRDIRRLLITGAPLIHVNMHCRAVNGRHPLGHPERSTTWIMACQDAGAQASYAGGDCTGKQACAYCLGINNHKRGLSNSTAGCTSFAPCVGVNRQCEKGEGE

SEQ ID NO: 14910 - protein, 343 aa, unidentified
  source 1..343: note = protein_39e8ac2
  REGION 6..149: note = RuvC_domain
  SITE 9: note = RuvC_P1
  SITE 54: note = RuvC_P2
  SITE 89: note = RuvC_P3
  SITE 91: note = RuvC_P4
  SITE 94: note = RuvC_P5
  REGION 213..300: note = Tnp_domain
  SITE 221: note = Tnp_P1
  SITE 251: note = Tnp_P2
  SITE 259: note = Tnp_P3
  SITE 260: note = Tnp_P4
  SITE 272: note = Tnp_P5
MKLIRVGVDLAKNVFQVHGVERKEKAIWRRRLTRENWLKVLLETVEPGCEIGMESCGGAHHWARRVQEKGFTVKLIAPQFVKPYVKSNKNDANDAEAICEAMSRPGMRFVAVKTVEQQDIQAVHRVRAELTKQRTAKANQIRGLVAEYGLVAPKEIVHLRRALPCWLEDAENGLSERFRRLLNGLWGDLRALDDRMAELEREIALIAQSDPVAKRLQQLRGVGPIIATALVAAVGNGEQFANGRQMSAAFGLTPRQHSSGGKERLLGISKRGDAYLRSLLIHGARAVIRTAKGKDDRLSQWVTRLAARRHPNVAAAALANKTTRMAWAMLRSGTDYQPDLVTG

SEQ ID NO: 14911 - protein, 387 aa, unidentified
  source 1..387: note = protein_b930b3c
  REGION 4..159: note = RuvC_domain
  SITE 7: note = RuvC_P1
  SITE 58: note = RuvC_P2
  SITE 98: note = RuvC_P3
  SITE 100: note = RuvC_P4
  SITE 103: note = RuvC_P5
  REGION 263..350: note = Tnp_domain
  SITE 271: note = Tnp_P1
  SITE 301: note = Tnp_P2
  SITE 309: note = Tnp_P3
  SITE 310: note = Tnp_P4
  SITE 323: note = Tnp_P5
MIYVGIDIAKQKHFAAAMTADGEVLVPPFGFTNDADGFNTFLSKIKSFDKTDILIGLESTAHYGENLICYLFSLGYRISVINPIQTSTLRKTNIRKTKTDKVDCLLIIKSMIVNKTRLYSKSDIDSLRLKSLCRFREKLKKSKTKLKIQLVTYVDVIFPELQYFFKSGIHINTCYMLLMKHPSPDEIAALHLTYLVNLLQKASHGRFGKEEAIALKSLAKSSVGTGNTAVSIQITQSITQIELLEQQMNIIDENIESIMLEMDSIIMTIPGIGSLNGAMILGEIGDISRFSNPSKLLAYAGLDPTVNQSGKFTAKSTKMSKRGSKLLRYALINAAWNVSLNNKTFDDYYNLKRSQGNNHYAALGHVAHKLVRVIFKILKDNVAFNLD

SEQ ID NO: 14912 - protein, 337 aa, unidentified
  source 1..337: note = protein_3c57d67
  REGION 6..148: note = RuvC_domain
  SITE 9: note = RuvC_P1
  SITE 52: note = RuvC_P2
  SITE 87: note = RuvC_P3
  SITE 89: note = RuvC_P4
  SITE 92: note = RuvC_P5
  REGION 211..298: note = Tnp_domain
  SITE 219: note = Tnp_P1
  SITE 249: note = Tnp_P2
  SITE 257: note = Tnp_P3
  SITE 258: note = Tnp_P4
  SITE 270: note = Tnp_P5
MKITTIGLDIAKRFFHVVCCNKQGWLINKKMLTRAQVLAFFQTHPSCLVALEACATSHYWAREIQQCGHQVKLIPPQHVKAFLIGNKNDYNDALAIAVAANQPHIKSVGIKSIEQQDNQAQHKARELAVRQRTALCNQIRGLIAEYGIALTQGVNNIRKSIPLMLDDEASPLSGAFKAILRQLQSQLTALDTCIEAYSQLIVEAVKRNDICQRVQTIPGFGPMVSSAYFNEVGNGSHYRRGRDVSASLGIVPRQHSSGGKETLLGISKRGNSYLRCLLIQGAKAVVSRAGTKKDKLSQWINRLVQTRGHNRACVAYANKMARMAWAITVSGEDYSAE

SEQ ID NO: 14913 - protein, 374 aa, unidentified
  source 1..374: note = protein_3fc35ad
  REGION 41..182: note = RuvC_domain
  SITE 44: note = RuvC_P1
  SITE 87: note = RuvC_P2
  SITE 122: note = RuvC_P3
  SITE 124: note = RuvC_P4
  SITE 127: note = RuvC_P5
  REGION 245..332: note = Tnp_domain
  SITE 253: note = Tnp_P1
  SITE 283: note = Tnp_P2
  SITE 291: note = Tnp_P3
  SITE 292: note = Tnp_P4
  SITE 304: note = Tnp_P5
MDEGKYRKVWSLTDFRHHSAQYGMHKAPSDWRLHSMKYTPVGVAIAKHLIQVHFINEHTGEVIDKQLRNQDFLTFFSNREPCLIGMEACGGSQHWARELKKLGHQVRLLQARFVKAFVMGNKNDVMDARAIWMVVQQPGKEIAVKTEEQQSVLVLHRSRRQLVKFRTAQINSLHGTLLEFGENIHKGRAAMDRELPEALERMKATLPPYLITVPEDQHNRLKELDSMMDDPEKQLNSMARQNETCKRLMEIPAVGPLIATAAVATMGEAAAFKSGREFAAYVGLVPKQTGSGGKVRLPGINKRGDTYLRTLFIHGARAAALLTKEPGPWITELKKRRPTGVAIVAMANKLARTVWAIAAHDRKYDKNHVSIRPY

SEQ ID NO: 14914 - protein, 340 aa, unidentified
  source 1..340: note = protein_a58ae40
  REGION 5..151: note = RuvC_domain
  SITE 8: note = RuvC_P1
  SITE 53: note = RuvC_P2
  SITE 91: note = RuvC_P3
  SITE 93: note = RuvC_P4
  SITE 96: note = RuvC_P5
  REGION 211..296: note = Tnp_domain
  SITE 219: note = Tnp_P1
  SITE 249: note = Tnp_P2
  SITE 257: note = Tnp_P3
  SITE 258: note = Tnp_P4
  SITE 270: note = Tnp_P5
MDEYIGLDVSLKETAVSIRRDGKRVWRGKCPSDPQLLAALIRKHAPAPKRVVFETGPLSVWFFHALAAEGVPAICIDARHAKAALDMATNKTDANDADGLAHLAEVGFYKEVRVKSFDSMLTRTLVAARTRLVRIGTELSNQIRGLMKTFGLVVPAVTGSKFEHHVHALLADNIDLGQIIRPLLEAWHAVRLRAAELGRKLLADARRNAACQLLMSIPGVGVVTATSFVSAIEEPANFKHSRSVGAFVGLTTRRYQSGEIDYDGHISRRGDSHLRGLLYEAATVLLTRSRSECDLRKWGLQLRERLGFKRATVAVARKLAVIMHSMLITGEPFREKSVAA

SEQ ID NO: 14915 - protein, 392 aa, unidentified
  source 1..392: note = protein_133f57d
  REGION 5..164: note = RuvC_domain
  SITE 8: note = RuvC_P1
  SITE 61: note = RuvC_P2
  SITE 102: note = RuvC_P3
  SITE 104: note = RuvC_P4
  SITE 107: note = RuvC_P5
  REGION 267..354: note = Tnp_domain
  SITE 275: note = Tnp_P1
  SITE 305: note = Tnp_P2
  SITE 313: note = Tnp_P3
  SITE 314: note = Tnp_P4
  SITE 327: note = Tnp_P5
MVISVGIDVSKDKHDCFIVSSEGEVLADVFTIPNTMDGFNLLLQRVRECTTPQDKIKVGLEATGHYSYNLLGFLLDNGLATYVLNPLCTNLYRKSLSLRKTKTDRVDARTIASMLLSDVGLKPYTDTAYHNEELKSLTRYRFDKVKERAKLKSSIARLICILFPELEKLVPSLHIASVYSLLEEFPGAQQIAATHLTRLKALLETASKGRYKRDMALEIRDAARNSIGSSMPAKSLELQHTIRLIRELDNEITEIEEQIQAIMDELNSPITTIPGIGFRMAAMIFAEVGDFTRFDSPDKLLAYAGMSPSTYQSGQLKNCYPHMEKRGSRYLRYALYNATKYVCHWNPTFADYLAKKRAEGKHYNVALSHATKKLVRLIFALEKSRETYRLAV

SEQ ID NO: 14916 - protein, 400 aa, unidentified
  source 1..400: note = protein_1b6cbbd
  REGION 5..161: note = RuvC_domain
  SITE 8: note = RuvC_P1
  SITE 58: note = RuvC_P2
  SITE 98: note = RuvC_P3
  SITE 100: note = RuvC_P4
  SITE 103: note = RuvC_P5
  REGION 276..363: note = Tnp_domain
  SITE 284: note = Tnp_P1
  SITE 314: note = Tnp_P2
  SITE 322: note = Tnp_P3
  SITE 323: note = Tnp_P4
  SITE 336: note = Tnp_P5
MMISVGIDISKGKSTICILKPYGEIISMPYELTHTETELSALVKCILNFNEETRVVMEATGAYHLPVLSYLKEHGIFVSVINPLVMKKYAAMALRKGKTDKIDSIKIASYGIDNWFRMVDYHASDELYSELRVLGRQYSHYIRMRVESKIVLSNMLDRTMPDIKSLLKNRSSKPDKDKLSSFVEEYWHYDNITSKSEKQFIRSYLKWAKNNGYHQNEAKAKKIYTLAQEGIPTLSSVTPSTKMLVLEAVRVLREVDKTLCLILSQMQELASSLEEYKIVREMPGVGDTLAPRLIAEIGDIRRFHSKKALIAYAGIDSPPYESGEFVGNKRRISKRGSSLLRKTGYEIMKCIKSNKPQNDAIYLYMIKKEAEGKAKKVAKIAAFNKFLRIYYARLKEIYMT

SEQ ID NO: 14917 - protein, 389 aa, unidentified
  source 1..389: note = protein_b78f45e
  REGION 4..161: note = RuvC_domain
  SITE 7: note = RuvC_P1
  SITE 59: note = RuvC_P2
  SITE 100: note = RuvC_P3
  SITE 102: note = RuvC_P4
  SITE 105: note = RuvC_P5
  REGION 265..349: note = Tnp_domain
  SITE 271: note = Tnp_P1
  SITE 301: note = Tnp_P2
  SITE 309: note = Tnp_P3
  SITE 310: note = Tnp_P4
  SITE 322: note = Tnp_P5
MFYVGIDISKFKHDCFIVTEAGEVVCDSFSIKNDSDGFTELLSVLDSLDPKENVRIGFESTGHYALNLKLFLEKAHYSFMEFNPVLLSKFNKSQSLRRTKTDAIDSISIARWLMTVDYKPYPIGFYHTYALKSLTRLRDSLVKQRSFYMVKITNVLDHVFPEFKPFFNNRFSKTAIYLLDNYGSAKSIANMNTRSYDALRSISRGKFSMQKFIKLKELAKNTVGCDHELFTCQLNSLLSLYKQLANEVDSLESQIESLIVEIDPKTLSIPGIGPLSAAVIYAEYGDLSKFNSPAQMLSFAGLEPGYYQSGTSEHGGGMVKRGSSHLRYTLMNLCIPLIQYNMTFAEYYHKKRNEGKSHRVACSHLVKKLIRVIFTLEKNGIDFDPTKLR

SEQ ID NO: 14918 - protein, 345 aa, unidentified
  source 1..345: note = protein_70d9ed7
  REGION 6..148: note = RuvC_domain
  SITE 9: note = RuvC_P1
  SITE 52: note = RuvC_P2
  SITE 87: note = RuvC_P3
  SITE 89: note = RuvC_P4
  SITE 92: note = RuvC_P5
  REGION 211..300: note = Tnp_domain
  SITE 219: note = Tnp_P1
  SITE 249: note = Tnp_P2
  SITE 257: note = Tnp_P3
  SITE 258: note = Tnp_P4
  SITE 270: note = Tnp_P5
MKITTIGIDLAKAVFGVHGVDERGKAVLRKPLKRKEVVSFFANLEPCLIGMEACGSAHYWARKLTQLGHTVRLMAPQFVKPYVKTNKSDRNDAEAICEAVARPNMRFVPVKTAEQQAVLALHRGRQGFVKARTAQANRIRGLLAEFGIVIPQGIGHIAKRLPEILEDAENALPGMMRELLERLGENLKQMDKQVGEMERQIKLWHRENEASRKLEAIDGFGPITASAFVATVGDARSFKNARQVPAWLGMVPRHEGTGGKVSLGRISKRGEAYLRTLLIHGARSVIAQIERKPNQADEWLKKLLARRNKNVAAVALAAKNARIAWALLAHERSYEREYVATRPAA

SEQ ID NO: 14919 - protein, 416 aa, unidentified
  source 1..416: note = protein_d7b79e9
  REGION 4..160: note = RuvC_domain
  SITE 7: note = RuvC_P1
  SITE 57: note = RuvC_P2
  SITE 97: note = RuvC_P3
  SITE 99: note = RuvC_P4
  SITE 102: note = RuvC_P5
  REGION 274..361: note = Tnp_domain
  SITE 282: note = Tnp_P1
  SITE 312: note = Tnp_P2
  SITE 320: note = Tnp_P3
  SITE 321: note = Tnp_P4
  SITE 334: note = Tnp_P5
MNAAGIDVSSRKSTVAVLRPFGEVVHVPFDVAHNTEGLAFLAEQLKELDGETRVVMEHTGRYYEPIAKALHEAGLYVSAVNPLLIKEYGGNSLRRVKTDKADAIKIARYALDNWTDLRDYTPMDTIRYDLRTLNRQFQLASKQRTVCSNNLIALLEQSFPGIRKCFDSPVRNDGTQKWVDFAHTFWHVDCVRKQSLNAFSERYRKWCKRHGYFFKQDNAEEVYTLSKNALVLVPKSEVTKVLVQEAANQLTSISRSVETYRAEMERLASMLPEYPVVMEMYGVGKSSGPQLMAEIGDVRRFERKQALVAFAGIDPMPNQSGERNVRSNKSSKRGSPYLRKTLFNVMSIYLKCAPADEPVYQFLDQKRSEGKPFYVYMTAASNKFLRRYYAKIRDYLATLENLPPVDMDSTGLQGSD

SEQ ID NO: 14920 - protein, 340 aa, unidentified
  source 1..340: note = protein_5c13414
  REGION 7..149: note = RuvC_domain
  SITE 10: note = RuvC_P1
  SITE 53: note = RuvC_P2
  SITE 88: note = RuvC_P3
  SITE 90: note = RuvC_P4
  SITE 93: note = RuvC_P5
  REGION 212..297: note = Tnp_domain
  SITE 220: note = Tnp_P1
  SITE 250: note = Tnp_P2
  SITE 258: note = Tnp_P3
  SITE 259: note = Tnp_P4
  SITE 271: note = Tnp_P5
MSDIYTIGIDLAKSVFQLCAFDKAGKKLVNRALRRNQVIKFLSNIAPCLIGMEACASSHYWAREIRKLGHEVRLMPPQYVKPYVKTNKNDMADAEAICEAVRRPTMRFVSVKSEEQQALLLLHREREGVIRDRTALINRIRASLQEFGVSVPAGRFQLRKWFREGFSLVEYQLPKLLVGHIKLMQTRLREIEQYVEYLDTQIDLASEVSDECQKVRGIPGVGRLTSSALVASIGDAKAFSSGRQLSAWMGLVPSQHSSGGKSLLLGISKRGDTYLRRMFIHGARAVMRHLKEGKPFFGWVTSLLKRMHKNKVIVALANKLVRISWAVLAKEENFSVERTY

SEQ ID NO: 14921 - protein, 345 aa, unidentified
  source 1..345: note = protein_e3ed8b3
  REGION 7..149: note = RuvC_domain
  SITE 10: note = RuvC_P1
  SITE 53: note = RuvC_P2
  SITE 88: note = RuvC_P3
  SITE 90: note = RuvC_P4
  SITE 93: note = RuvC_P5
  REGION 212..300: note = Tnp_domain
  SITE 220: note = Tnp_P1
  SITE 250: note = Tnp_P2
  SITE 258: note = Tnp_P3
  SITE 259: note = Tnp_P4
  SITE 272: note = Tnp_P5
MFDCNVITIDLAKNLFQVCKTDKNGHVIYNKAITRAKLKELLIKEKQSLVAMGSCGGTHYWARFAKQAGHQVKAINARQVKAFRQGQKTDANDALAISVAARLPHIKGSRLLSAHEQCLQGIECMRDLLVKQKVSLSNQLRGLLLELGYPIAQGDTPLIHAIPEILEEAENSLTASFRFSIHLLFKRFKETIEEAKLIEKQLHEIIKEDKTCNRLQALEGVGPVCAILIKIALGNATHFKSGREAAACFGLTPVQHSSGGKEKIGAISKVIGNKKLRSALFKGALAVVSQLEKRESRSEKDVWLKALTARRGKKVAAIALANKTIRTAFAMQKHDKEYQPQLLAA

SEQ ID NO: 14922 - protein, 339 aa, unidentified
  source 1..339: note = protein_9c0ed67
  REGION 7..147: note = RuvC_domain
  SITE 10: note = RuvC_P1
  SITE 53: note = RuvC_P2
  SITE 88: note = RuvC_P3
  SITE 90: note = RuvC_P4
  SITE 93: note = RuvC_P5
  REGION 212..299: note = Tnp_domain
  SITE 220: note = Tnp_P1
  SITE 250: note = Tnp_P2
  SITE 258: note = Tnp_P3
  SITE 259: note = Tnp_P4
  SITE 271: note = Tnp_P5
MANVAVLGIDIAKNVFQLHGVGADGQVVLRRRVMRDQLLQVTEAMPPCLIGIEACTGAFHWQRHFESQGHTVKIIAPQYVKPFLKGQKNDGNDAQAICIAVQQPHMRFVPKKSIIQQDIQGLHRARQRLVNHRVALISQMRGLLLERGVAIAKSASIAQRTIPEIINNPRIDITELTRDIIGTLHAFLLQLNEKIKYFDKQIEAVFRESDVCQRIAKIRGVGPKTATAVVAAVGDGADFKNGRHLAAWMGLVPRQHSSGDRRVLLGISKRGSQHLRTLLVHGGRSVVRTAQRKSDPASEWVNELRERRGYNRAAVAVANKNARVIWALLQHGGEYRANP

SEQ ID NO: 14923 - protein, 306 aa, unidentified
  source 1..306: note = protein_753f3ca
  REGION 6..152: note = RuvC_domain
  SITE 9: note = RuvC_P1
  SITE 63: note = RuvC_P2
  SITE 100: note = RuvC_P3
  SITE 102: note = RuvC_P4
  REGION 180..266: note = Tnp_domain
  SITE 187: note = Tnp_P1
  SITE 217: note = Tnp_P2
  SITE 225: note = Tnp_P3
  SITE 226: note = Tnp_P4
  SITE 239: note = Tnp_P5
MNPLYVGIDVSSKNNVIYLMLPNGDKHSSFSLANSHDGSTQLVKRIFTAMTSNNIDSVLIGLEATSVYATMTQEKVFSDTFSTTALAVYEKFESAETLAKMDLQELTAFIMEKGKNRFPDPDAVAKALQKAARSSYRLPKTVNDSVNQVLAISITSIRALESQIKAFDKAITKQMELLPNVLISIPGIGPVLSAGIMAEIGDINRFQNQAALAKYAGLAWQQHQSGDFEAQTTRMIHSGNRFLKYYLCEAAFSLVRCDKEYSRFYHLKYKEVNRFQHKRALALTARKFVRLVFALLKDNRLYRPAE

SEQ ID NO: 14924 - protein, 403 aa, unidentified
  source 1..403: note = protein_0f5bd80
  REGION 9..163: note = RuvC_domain
  SITE 12: note = RuvC_P1
  SITE 60: note = RuvC_P2
  SITE 100: note = RuvC_P3
  SITE 102: note = RuvC_P4
  SITE 105: note = RuvC_P5
  REGION 270..315: note = Tnp_domain
  SITE 278: note = Tnp_P1
  SITE 308: note = Tnp_P2
MHGGYGVYLGLDVGKGDHHAVGLAPDGKRLHDAALPNTEARLRQLFDKLARHGRVLVVVDQPASIGALPVAVARAAGHQVAYLPGLAMRRIADLHPGSAKTDARDAYVIADAARTLPHTLRQVDTGDETLAELEILVGFDDDLAGEATRVSNRIRGLLTQIHPALERVLGPKVHHKAVLELLSRCGGPVGLRKAGRRKLLSIAAVHAPRMGDRLVEQIMAALDEQTVTVPGTQAAETILPRLADSLRDILRQRDQAAAQVERMLDAHPLAPVLTSMPGIGVRTAARILLEVGDGSSFATPGHLAAYAGLAPRHPTIRQQHPWRTPTPRRQQEPQTRVLPRRVRSPGRPREQGLLRPQTRRRQTPQRRPHLPRPPSLRRPIRHAPRQDPLPTPPHDADRRLTNP

SEQ ID NO: 14925 - protein, 310 aa, unidentified
  source 1..310: note = protein_09808c5
  REGION 1..82: note = RuvC_domain
  SITE 21: note = RuvC_P3
  SITE 23: note = RuvC_P4
  SITE 26: note = RuvC_P5
  REGION 186..270: note = Tnp_domain
  SITE 192: note = Tnp_P1
  SITE 222: note = Tnp_P2
  SITE 230: note = Tnp_P3
  SITE 231: note = Tnp_P4
  SITE 243: note = Tnp_P5
MEFNSLLVNRFVRSKSLRKTKTDSIGALMIAQYLMTVEYKPYPPSFYTLEKLKSLTRFRDSLIRQRSKQLVELTNVLDKVFPEFKPFFKGKLSVTALYILSHYTSPEKISNMNSKSYESLRRLSRGKFSMVDFVELKTLARNTVGSTRDYLLQEMEIIIDIYNQLQSKVEEVEQLINDCVLVLDPPMLTIPGIGVSSAAVILSEFGDLSKFDSPSKLLSFAGLEPGYFQSGISESVGKMVKHGSSHLRYAIMNCAQTVINNEPTFAAYYAKKRAEGKEHRIALTHVAKKLLRVIYTLQTKELPYNPDLIR

SEQ ID NO: 14926 - protein, 234 aa, unidentified
  source 1..234: note = protein_3ace35d
  REGION 3..78: note = RuvC_domain
  SITE 17: note = RuvC_P3
  SITE 19: note = RuvC_P4
  SITE 22: note = RuvC_P5
  REGION 137..224: note = Tnp_domain
  SITE 145: note = Tnp_P1
  SITE 175: note = Tnp_P2
  SITE 183: note = Tnp_P3
  SITE 184: note = Tnp_P4
  SITE 196: note = Tnp_P5
MAAKFVSPYRMAGKSGKNDAADAQAICEAVRRPHMRFVPVKDKGQQAMQCLHRTRQGFIEEKTAAYNRLRGLISEFGVIASQSTAALRYAAARHKDSLPAQVRQCIEDLLAHITRIEEQIAEYDRILSQVAKTDNRSQRLMKLQGIGPTTACALVASIGNAHDFKSGRQLAAWLGLTPSQYSSGGKSKPGRITKAGDAYLRTLLVQGARSVLINADKKTDSFSRWGCSLVERRG

SEQ ID NO: 14927 - protein, 344 aa, unidentified
  source 1..344: note = protein_86f44b9
  REGION 8..167: note = RuvC_domain
  SITE 11: note = RuvC_P1
  SITE 67: note = RuvC_P2
  SITE 107: note = RuvC_P3
  SITE 109: note = RuvC_P4
  SITE 112: note = RuvC_P5
  REGION 208..295: note = Tnp_domain
  SITE 216: note = Tnp_P1
  SITE 246: note = Tnp_P2
  SITE 254: note = Tnp_P3
  SITE 255: note = Tnp_P4
  SITE 268: note = Tnp_P5
MKVLKQVAGIDVSQKELVVTLGCLYEDQTIKFLAYKVFKNTDVGIPLLINWIEKQSVEDQEIHYVMEATGVYHQKFAYYLAENNKKVYIVLPNKISSYLRTLDIKTITDKSCSQAITQFGLERKLNHWKKPDQTYNELQQLTRERDQIVQERNVIKNQLHAETIQASPHLKSIERMQARMNLLNAQEKAIKKDIDTIINTNPVIKQLIERLTTIPGVGVLTAVTVLGETNGFELIRNKSQLSSYAGLDVREKQSGTSVKGKSRISKKGNRMLRKCLFLPALTIVKWDDNFKEVYIRLTSKHGIKMKALVAIQRKILELIYILFKNETVYDGKYKSKNSVKTEIV

SEQ ID NO: 14928 - protein, 391 aa, unidentified
  source 1..391: note = protein_882d0d9
  REGION 4..163: note = RuvC_domain
  SITE 7: note = RuvC_P1
  SITE 60: note = RuvC_P2
  SITE 101: note = RuvC_P3
  SITE 103: note = RuvC_P4
  SITE 106: note = RuvC_P5
  REGION 266..353: note = Tnp_domain
  SITE 274: note = Tnp_P1
  SITE 304: note = Tnp_P2
  SITE 312: note = Tnp_P3
  SITE 313: note = Tnp_P4
  SITE 326: note = Tnp_P5
MVYVGIDVAKDKHDCFIVSAGGEVLQDVFTITNTMTGFDDLFQRISTVSGSLDKVKVGLEATGHYSYNLLGFLLDKGLLTFVINPLHTNLYQKSLSLRKTKTDKVDARMIASMLMSDVNLKSYTDTTYHNEELKTLTRYRFDKVKERAQLKQSISRLVTILFPELEKLVPTLHMVSVYALLSEYPGAVQIAAANMTHLKALLSDVSRGHYGREKATEIRDAARCSIGSRMPAKSLELRHTIQLMHELDAEIAEIEAEIKSIMDELQSPILTIPGISYRMGAMILAEIGDFSRFDSPDKILTYAGLSPSTYQSGQFTSSYAHMEKRGSRYLRYALFNATKFVCHWDPTFAAYLAKKRSEGKHYNVAISHAAKKLVRLISALEKSGQPYNLAA

SEQ ID NO: 14929 - protein, 397 aa, unidentified
  source 1..397: note = protein_e0ab6db
  REGION 4..162: note = RuvC_domain
  SITE 7: note = RuvC_P1
  SITE 60: note = RuvC_P2
  SITE 101: note = RuvC_P3
  SITE 103: note = RuvC_P4
  SITE 106: note = RuvC_P5
  REGION 267..354: note = Tnp_domain
  SITE 275: note = Tnp_P1
  SITE 305: note = Tnp_P2
  SITE 313: note = Tnp_P3
  SITE 314: note = Tnp_P4
  SITE 327: note = Tnp_P5
MYYIGIDIAKFKHYASIIDQTGKTLTKPISFQNHTEGGNKLLDWIHQYVDTPTDVLIGMEATGHYWLALYSFLLEKGFSVIVLNPLQTNAWRKGTEIRKRKTDSIDATLIADVIRFGRFTETPLANETMLALKQLSRFRSSLVHSVSDLKRKAIVVLDQTFPEYHTVFSDIFGKTSAEVLMEYTTPSDFEHVSVDQLTEMMEKASRKKIGENKAKHLLQIASQSFGVTFCKDAFSFQLKMLLEQIKFIEEQIKHCEQQMGEYLVELNTPITTIPGIGSILGATILSEIGDIHRFDKPAKLVAYAGIDASISQSGQYEASKSSMSKRGSSHLRRALFQAAISGYRSNPVLKAFYEKKRAQGKHYYVCIGAVARKLCYIIYAVLKNNKPYEIPHHTPER

SEQ ID NO: 14930 - protein, 325 aa, unidentified
  source 1..325: note = protein_94bdec7
  REGION 8..150: note = RuvC_domain
  SITE 11: note = RuvC_P1
  SITE 55: note = RuvC_P2
  SITE 95: note = RuvC_P3
  SITE 97: note = RuvC_P4
  SITE 100: note = RuvC_P5
  REGION 194..281: note = Tnp_domain
  SITE 202: note = Tnp_P1
  SITE 232: note = Tnp_P2
  SITE 240: note = Tnp_P3
  SITE 241: note = Tnp_P4
  SITE 254: note = Tnp_P5
MQTQTNYTGIDISKSFFDVAFLQAGRYTYYKFSNDRDGFKALLKVVPSGTWVVMEASGPYYLQLACFLHDQRIAVSVINPLVIRRFSQMRMSRAKTDKKDAKMIAEYGKTEQPPLWQKPEQHVITLQQMEALLARLQTEYTSLSNQLGSFDSSGMLTGQLRKQVVAELKHKQTLVKKLTNQMEQIAKHHYSNMLADLESIPGLGKKTAMILTVLSGGFSRFDDYRKLSSYIGICPRIFESGTSVKGKARICKMGMSRIRATLYVCSWSASRCNKACRELYERLLAKGKAKKLALIAVANKLLKQAFAIARQQTKYQENYSNITCF

SEQ ID NO: 14931 - protein, 387 aa, unidentified
  source 1..387: note = protein_f2eebde
  REGION 5..161: note = RuvC_domain
  SITE 8: note = RuvC_P1
  SITE 59: note = RuvC_P2
  SITE 100: note = RuvC_P3
  SITE 102: note = RuvC_P4
  SITE 105: note = RuvC_P5
  REGION 261..347: note = Tnp_domain
  SITE 269: note = Tnp_P1
  SITE 299: note = Tnp_P2
  SITE 307: note = Tnp_P3
  SITE 308: note = Tnp_P4
  SITE 320: note = Tnp_P5
MIYYVGIDISKFKHDFCIISNAGEVIVENSSFENNKKGFQLLLDQLKSYDKAQVRIAFEATGHYSSNLESFLNNQEYSFMKINPLVVHQFLKARSLRRTKTDKADSLAMANYLMSVPYVPNSKVLYHINSLKSLCRTRELLIKERSKFAVLLTNELDKSFPEVKAFFNNIFSSTLLFILEKYKNAYHISLMKDYDSLKKVSHGKFSYAKFVKLKELAKNTVGYYDDNSDLLISTYISIYNDFNNQIDPIDKQISTIIKELNPRMLSIPGLGEISAASILSEYGDITNFSSPNKMLAFAGLEPSVIQSGTLESNGKMVKHGSRHLRYSIMNSAMIILRHSPTFYDYYNKKRNEGKCHRVALSHVCKKLIRVIYSLEKYNQNFNPSLLK

SEQ ID NO: 14932 - protein, 319 aa, unidentified
  source 1..319: note = protein_2a6cb6e
  REGION 5..154: note = RuvC_domain
  SITE 8: note = RuvC_P1
  SITE 52: note = RuvC_P2
  SITE 92: note = RuvC_P3
  SITE 94: note = RuvC_P4
  SITE 97: note = RuvC_P5
  REGION 193..280: note = Tnp_domain
  SITE 201: note = Tnp_P1
  SITE 231: note = Tnp_P2
  SITE 239: note = Tnp_P3
  SITE 240: note = Tnp_P4
  SITE 253: note = Tnp_P5
MSKIIGIDISKQVFDVSFFDQQLWNHYVFKNTDSGFKELLKFVEKGDVVIMEASGTYYLPLAEYLYSQGINVVVENPLSIKRYAQSRLKRAKTDKADSKIIAEYGKKNMDELSLWNAESKVCIRIRQMHTRIQMIQKQISQTYNQLEAFRSSGFLDEKLELEIKDSAKQLLSGKELLEKEIEKLALEEFGETIECLTSIPGIGVETAIMLTVITDDFKKFNHYKQLIAFVGFSPRIFESGSSVRGKSSICKMGKSQIRKLLYLCSWSAKRWNKKCKEMYERLINNGKAERVAKIALANKLLKQAFAIGKKKEKYIENLC

SEQ ID NO: 14933 - protein, 400 aa, unidentified
  source 1..400: note = protein_428d327
  REGION 5..163: note = RuvC_domain
  SITE 8: note = RuvC_P1
  SITE 62: note = RuvC_P2
  SITE 102: note = RuvC_P3
  SITE 104: note = RuvC_P4
  SITE 107: note = RuvC_P5
  REGION 273..362: note = Tnp_domain
  SITE 281: note = Tnp_P1
  SITE 311: note = Tnp_P2
  SITE 319: note = Tnp_P3
  SITE 320: note = Tnp_P4
  SITE 333: note = Tnp_P5
MNPVVGLDVAKGESQVQAFSDKSKPYGKSFSMKHTREELDQFIGFLKEIEEVTGQVPMVILESTGHYHSPIVQCMEEHEILYILLNPIISYQAKKSSLRKVKTDVIDAYQLCVLYYKEDFEPHKNRGIQLLNLRNLSRQQEIVTNMYVEVKLHFHTILDQVFPEYRKVFGDLYSKVSLSMLKEYPTSEAILTAGESRLVESVMEFCPRRSGQWAREKAKKIMDSASRNPFQKVVYESHLINLRMYIDLLFHYQGHLSDLEGRIVALANEVEEYKIIQSIPGIGEKIAATIISEIGEIDRFNHPKKLVAFAGVDPSVHSSGKFTATINHITKRGSSRLRHSLYLAVLCGIRSSRNKKLKAFYDKKKSEGKPAKVAIVACINKLLHWIYALLKRKETFLDLA

SEQ ID NO: 14934 - protein, 336 aa, unidentified
  source 1..336: note = protein_18a10f6
  REGION 7..149: note = RuvC_domain
  SITE 10: note = RuvC_P1
  SITE 53: note = RuvC_P2
  SITE 88: note = RuvC_P3
  SITE 90: note = RuvC_P4
  SITE 93: note = RuvC_P5
  REGION 212..298: note = Tnp_domain
  SITE 220: note = Tnp_P1
  SITE 250: note = Tnp_P2
  SITE 258: note = Tnp_P3
  SITE 259: note = Tnp_P4
  SITE 271: note = Tnp_P5
MKQLSVIGVDLAKNIFQIHALDKLGHCCLKKSLRRSQFLSFFAKLQPCLIGMEACGGSHYWARELISLGHDVRLMPPQYVKPYVKTNKNDAADAEAIAEAVTRPNMRFVDVKSVEQQTILLIHRERDGLVKERTSLINRLRATLSEFGIAIPTGRSRLKNWFKEQYGNYEDSLPEVLKSHICQIMLRWQQKEEQIIELEKVLDKQRCSSEPCQRLTEVTGIGALTSSALVATVGNAKSYKSGRQLSAWLGIVPRQNSSGGKQVLQGISKRGNTYLRRLFIHGARALLRHIKPSHPWYEWVQNLECRMHRNKVIVAIANKLVRVAWAILHKGTRYQP

SEQ ID NO: 14935 - protein, 324 aa, unidentified
  source 1..324: note = protein_6c1ef74
  REGION 6..147: note = RuvC_domain
  SITE 9: note = RuvC_P1
  SITE 53: note = RuvC_P2
  SITE 91: note = RuvC_P3
  SITE 93: note = RuvC_P4
  SITE 96: note = RuvC_P5
  REGION 196..283: note = Tnp_domain
  SITE 204: note = Tnp_P1
  SITE 234: note = Tnp_P2
  SITE 242: note = Tnp_P3
  SITE 243: note = Tnp_P4
  SITE 256: note = Tnp_P5
MKNIIIGIDISSKTLDICVKEESLNYFSIENNVPAIKRFFKKYSDENVILAMENTGRYNWNLFEVLEKFNFKVYVISALHIKKSIGLVRGKNDKIDALRICSFIEKNYQENREWKPSSCSIKKIKILLTERALRIKIKKQLMVQQHDYKLMKGIGLDKELKSLNVKLIKNIEGQIKIIENDIENIIRSDETLNHQQKLIKSVPGVGQVLSWTLLSKTEGFTIITDPRKMACYSGVVPFDFQSGTSLKRRPGVSMLADKNLKTILHLAAMSAIRLDNDLRRYYIRKIDEGKNKMSVLNAVRNKIIHRVFAVIKNQTFYEKDLVLS

SEQ ID NO: 14936 - protein, 387 aa, unidentified
  source 1..387: note = protein_acccfa7
  REGION 4..159: note = RuvC_domain
  SITE 7: note = RuvC_P1
  SITE 57: note = RuvC_P2
  SITE 98: note = RuvC_P3
  SITE 100: note = RuvC_P4
  SITE 103: note = RuvC_P5
  REGION 262..347: note = Tnp_domain
  SITE 269: note = Tnp_P1
  SITE 299: note = Tnp_P2
  SITE 307: note = Tnp_P3
  SITE 308: note = Tnp_P4
  SITE 320: note = Tnp_P5
MYYIGIDISKFKHDCAVIDDVGDVVTPSWSFANDHEGFLQFKALLDSLGSETRIGLESTGHYGTNLKLFLESCSTTFMEFNPLLINRFIKSKSLRKTKTDSIDCEMIARYLMTVEYKPYPSSFYHTEKLKSLTRFRDNLVRQRSRQLVELTNILDKAFPEFKPFFKGKFSATAFHILINYSSPERIANMNSKSYETLRKLSRGRFSLADFTTLKHIARNTVGRPDDFLLSEMAMVIDIFSQLDSKVDETETLIKECVLEINPPILTIPGIGVDSAAVILAEFGDFSKFQNPAQLLSFAGLEPGYFQSGTSESNGKMVKHGSSYLRYALMNCAQSVANYEPIFAEYYSKKRAEGKTYRVALSHVAKKLVRVIFTLQTKNLVYDPDAIR

SEQ ID NO: 14937 - protein, 424 aa, unidentified
  source 1..424: note = protein_e178af8
  REGION 27..185: note = RuvC_domain
  SITE 30: note = RuvC_P1
  SITE 84: note = RuvC_P2
  SITE 124: note = RuvC_P3
  SITE 126: note = RuvC_P4
  SITE 129: note = RuvC_P5
  REGION 298..387: note = Tnp_domain
  SITE 306: note = Tnp_P1
  SITE 336: note = Tnp_P2
  SITE 344: note = Tnp_P3
  SITE 345: note = Tnp_P4
  SITE 358: note = Tnp_P5
MLWSDKKNLRDAGESKLKGRDEMNPVVGLDISKEESHGQAFLARGKPFRGTFHFEHTRDGLANLHQVLKDVETASRLRPLLILEATGHYQSPVVQFLEEHHYIYIVINPLISNRLRKSHLRKVKTDAADAYLLGELYYKEEFEPFKKRGVQLLNLRYLTRQYESLSKMCVQTKLQFQAVLDQVFPAYKGVFGAMYSRISLRFLSKFPTSYSVLQTDEITLKAKMKELLSSKRGRSEGWINQRVQRLLDAAKQNPFQQTMYASHLINLKVLITLILQYQEHLAELEQNIDALAEEIEEHELIQSIPGIGHKIAATILSEIGEVDRFDHPKKLVAFAGIDPSVFASGKFTATRNRITKRGSRQLRYALVMAVQCGLIRSRNMRLKAFYDRKRAEGKPHKVALIACANKLVHWLYAILKNKKEFRPI

SEQ ID NO: 14938 - protein, 345 aa, unidentified
  source 1..345: note = protein_b65ecdb
  REGION 6..148: note = RuvC_domain
  SITE 9: note = RuvC_P1
  SITE 52: note = RuvC_P2
  SITE 87: note = RuvC_P3
  SITE 89: note = RuvC_P4
  SITE 92: note = RuvC_P5
  REGION 212..297: note = Tnp_domain
  SITE 219: note = Tnp_P1
  SITE 249: note = Tnp_P2
  SITE 257: note = Tnp_P3
  SITE 258: note = Tnp_P4
  SITE 270: note = Tnp_P5
MKITTVGIDLAKSVFQVHGVDERGKAVLRRQLKRKDMVRFFANLQPCVIGMEACGSAHYWARKLTELGHTARLMAPQFVKPYVKTNKNDRNDAEAICEAVGRPNMRFVPVKTAEAQAVLGLHRARQGFVRARTAQANQIRGLLAEFGIVIPNGIGHVTKRLPEILEDAENGLPGMMRQLLERLVEQLKQLDRQVGELERQIKLWHRANEQSCKLEEIAGIGPITASALVASVGDARSFKNARQVPAWLGMVPRQDSTGGKATLGRISKRGDVYLRTLLIHGARAVISQFERKPDQPDGWLKRLLARRNKNIAAVALAAKNARIVWALLANDRTYQSDYAAKRAAA

SEQ ID NO: 14939 - protein, 406 aa, unidentified
  source 1..406: note = protein_80af510
  REGION 4..162: note = RuvC_domain
  SITE 7: note = RuvC_P1
  SITE 57: note = RuvC_P2
  SITE 99: note = RuvC_P3
  SITE 101: note = RuvC_P4
  SITE 104: note = RuvC_P5
  REGION 277..362: note = Tnp_domain
  SITE 285: note = Tnp_P1
  SITE 315: note = Tnp_P2
  SITE 323: note = Tnp_P3
  SITE 324: note = Tnp_P4
  SITE 337: note = Tnp_P5
MNAVGIDVSKGKSTVSILRPGGEVVASPFEVSHNPRELHELVKLIKSLDDDTKIVMEYTGNYYLPVALFLQKSGLFVSVVNPILVKDHGNKSLTVRKGKTDKKDSIKLAAFALDRWNELPLFSARSDTRTLLKAFNRKYNQYIKLKVMLKNNLISILGLTFPGANTLFNTPARKADGHEKWIDFALKFPHCECISRKTYSVFSKCYLSWCRKCGYHFSGAKAKEFYSFACNCAPSLADSETAHSLVSTAIAQLNTLNEALASLQKEMDLLASSLPEYDTVLSFFGVGSVLGSQLIAEIGDVLRFSNKKALVGFASIYAPPFQSGNFNPQSRSISKRGSAALRKTLFQVMSVILQNAPPNEPVFLFMDKKRSEGKHFYVYMMAGANKFLRIYYARVLEHLNALREAA

SEQ ID NO: 14940 - protein, 391 aa, unidentified
  source 1..391: note = protein_b9b1095
  REGION 4..163: note = RuvC_domain
  SITE 7: note = RuvC_P1
  SITE 60: note = RuvC_P2
  SITE 101: note = RuvC_P3
  SITE 103: note = RuvC_P4
  SITE 106: note = RuvC_P5
  REGION 266..353: note = Tnp_domain
  SITE 274: note = Tnp_P1
  SITE 304: note = Tnp_P2
  SITE 312: note = Tnp_P3
  SITE 313: note = Tnp_P4
  SITE 326: note = Tnp_P5
MIYVGIDVVKDKHDCFIIHSDGEVLFKSFTISNNRDGFETLFQKIQSVSDDLTKVKVGLEATGHYNYNLLGYLLDKGLPTYVINPLHTNLYRKSLSLRKTKTDKVDAYTIASMIMSDVNLKSYSDTSYHNEELKSLTRYRFDKVKERAKLKTSVSRLICIRFPELEKLVPTLHMASVYALLSEFPSTHAVASAHLTRLTNLLSESSKNRYGKDIAVMFREAARNSIGSDMPAKSLELKHTIKLIQELTSEIDEIEIEIKSIMDEINSPILTISGISYRMGAMIIAEIGDFTRFDSPDKILAYAGMSPSTYQSGQLDNCYSHMEKRGSRYLQYALYNATKYVCHWDVSFGKYLAKKRAEGKHYNVALSHAAKKLVRLIFAIEKSRQAYMPTT

SEQ ID NO: 14941 - protein, 330 aa, unidentified
  source 1..330: note = protein_1645d67
  REGION 5..153: note = RuvC_domain
  SITE 8: note = RuvC_P1
  SITE 55: note = RuvC_P2
  SITE 95: note = RuvC_P3
  SITE 97: note = RuvC_P4
  SITE 100: note = RuvC_P5
  REGION 196..283: note = Tnp_domain
  SITE 204: note = Tnp_P1
  SITE 234: note = Tnp_P2
  SITE 242: note = Tnp_P3
  SITE 243: note = Tnp_P4
  SITE 256: note = Tnp_P5
MNVFVGIDIAAKTFDLVMRSNGRSSKVEQFKQTPQGHAKAVKRLLAKTPSLIVMEATGIYYFDLAVALVKAGLPVAVINPKSFHHFATLKLTGSKTDGIDSALLAEYGERMEPRLWTPPSESHLGLRDIGRQINRLTGTRTQAKNRLHALQAKQATMPMIIEDEEDGIDMLSRRIDRLTQAALALIAESEILSLHLKSMSAAKGVGRATALIVLAELCVLPKDLKAPQVSRFAGLDVRLTQSGTSVNRPARLSKAGNAYLRSALYMPAMCAAQHDVRAKAFSEALVSRGKKKIQAQCAIMRKYLTGLWACMKTETPFDSTLLFSEQHIKS

SEQ ID NO: 14942 - protein, 342 aa, unidentified
  source 1..342: note = protein_b6863aa
  REGION 6..146: note = RuvC_domain
  SITE 9: note = RuvC_P1
  SITE 52: note = RuvC_P2
  SITE 87: note = RuvC_P3
  SITE 89: note = RuvC_P4
  SITE 92: note = RuvC_P5
  REGION 211..299: note = Tnp_domain
  SITE 219: note = Tnp_P1
  SITE 249: note = Tnp_P2
  SITE 257: note = Tnp_P3
  SITE 258: note = Tnp_P4
  SITE 270: note = Tnp_P5
MEIHILGIDLAKQVFQLHGADRRGRAVHRAKVSRGSLFQAVRTLKPRMLVMEACSSAHHWARRFQSLGIEVRLISPQYVAPFVKTNKNDRNDAEAIVEAACRPTMRFVSIKSVEQQDIQAAHRMRAILVRHRTALINQMRGLLGERGLSISRSPQAFRRAMPELLHASSDELTSFCQTLLTELLQHLAAIEERLHFLENSIQSFMKHSTLCRKITRVPGIGPVTATAIVGAVGDARQFRNGRHLAAWLGLVPRQYSSGGKARLQGISRRGDTYLRTLLIHGARAVLRYVAAKTDARSVWLQQLIVRRGYNCAAVALANKNARLIQVLLSGDTDYVAPRAAVN

SEQ ID NO: 14943 - protein, 357 aa, unidentified
  source 1..357: note = protein_3d203b1
  REGION 16..173: note = RuvC_domain
  SITE 19: note = RuvC_P1
  SITE 75: note = RuvC_P2
  SITE 115: note = RuvC_P3
  SITE 117: note = RuvC_P4
  SITE 120: note = RuvC_P5
  REGION 216..303: note = Tnp_domain
  SITE 224: note = Tnp_P1
  SITE 254: note = Tnp_P2
  SITE 262: note = Tnp_P3
  SITE 263: note = Tnp_P4
  SITE 276: note = Tnp_P5
MLTINISTMRALKQVLGVDVAQKELVVTLGRLLDDLSIELYAYKIFSNTEKGFSSLLAWAKKLADPDIELRFVMEATGVYHQKFAYFLDDQGCTLSIVLPNKISNYIRTLEAKTITDKSCSEAIARFGLERKLDSWKRPKSNYKYLQQLTRERDQIVSERSIVKNQLHAESQEAEPHERSLERLKERIRFLNRQEQEIKEDIHQLVNQDTELKKEIEIISSIPGVGQLTAIIILAETNGFELIRNKKQLSSYAGFDVKEKQSGTSVKGKPRISKKGNRSLRKAMYFPAMTAVKYDDNFKNMYVRIVSKQGIKMKALIAAQRKLLELAYILYKSKTSYDKSHETQRAGQKNSMSAQSV

SEQ ID NO: 14944 - protein, 341 aa, unidentified
  source 1..341: note = protein_1618b90
  REGION 7..148: note = RuvC_domain
  SITE 10: note = RuvC_P1
  SITE 53: note = RuvC_P2
  SITE 88: note = RuvC_P3
  SITE 90: note = RuvC_P4
  SITE 93: note = RuvC_P5
  REGION 211..304: note = Tnp_domain
  SITE 219: note = Tnp_P1
  SITE 249: note = Tnp_P2
  SITE 257: note = Tnp_P3
  SITE 258: note = Tnp_P4
  SITE 270: note = Tnp_P5
MEQVITIGLDLAKSVFQAHGADAAGGVVFRKKLRRDQMLAFFADQPLCLVAMEACAGAHYWAREIGALGHEVRLIPPAYVKPFVKRQKNDMADAEAISEAAQRPTMRFVTPKSAESQAAAIVFRTRDLLVRQRTQLINALRGHLAEFGYVVRQGAGHAAKLFDLVADPSTDLPQPARAVLAVIVESLQALQAQVALLDKEIAARAKQDPVAKRLMTIPGVGAVVATALVALAPAASTFRRGRDFAAWLGLTPRQHSSGGKERLGRTTRMGERSLRRLLILGASSAAKAASRGSESASPWLRAMLAKKPRMLVTVALANKMARIVWALMAHGGTYKAPIAAT

SEQ ID NO: 14945 - protein, 250 aa, unidentified
  source 1..250: note = protein_16d9c88
  REGION 6..141: note = RuvC_domain
  SITE 9: note = RuvC_P1
  SITE 52: note = RuvC_P2
  SITE 87: note = RuvC_P3
  SITE 89: note = RuvC_P4
  SITE 92: note = RuvC_P5
  REGION 118..204: note = Tnp_domain
  SITE 126: note = Tnp_P1
  SITE 156: note = Tnp_P2
  SITE 164: note = Tnp_P3
  SITE 165: note = Tnp_P4
  SITE 177: note = Tnp_P5
MEHTTIAVDRAKSVFQVAVSHRPGRVDDERRLTRERFLRFFAQQPPATIVLEACGSAHYWARQLQPFGQTVRLLPPHDVRRYVRRNKTDRTDAKALLEANMRAVDRQLTSLVRQPPDVTLLQTVAGVGVLTATALVALVGDIRRFRSGRHFASFLGLTPKEDSSAGRRRLGAISKQGDVYVRMLLTHGARSFVWHAKTAAPPTSLQRWAVQTEQRRGHNVATVAVANNLARIVWAVWVQQRPFAAEHRPG

SEQ ID NO: 14946 - protein, 347 aa, unidentified
  source 1..347: note = protein_1c4f403
  REGION 6..148: note = RuvC_domain
  SITE 9: note = RuvC_P1
  SITE 52: note = RuvC_P2
  SITE 87: note = RuvC_P3
  SITE 89: note = RuvC_P4
  SITE 92: note = RuvC_P5
  REGION 211..299: note = Tnp_domain
  SITE 219: note = Tnp_P1
  SITE 249: note = Tnp_P2
  SITE 257: note = Tnp_P3
  SITE 258: note = Tnp_P4
  SITE 270: note = Tnp_P5
MKIATVGLDLAKTLFQVHGVDLQGHVIVRKQLRRVDVLPFFAKLGPCVVGMQACGSSPYWGRELTKPGHSVCLIAPQFVRPYVKSNKTDAADAEAICEAVNRPHMRFVPIKTQAQQTMLSLHRARAGLVKSRTALASQIRGLLSEFGIVLPQGIRLLGQRAIEALSNREPELCEPFRALIQMLVEHLRELGNKAAELEGRIRAMHRTDEAGQLLQTIPGVGPLTASALAASIGNPRAFRDGRQLAAWLGLVPRQHSSGGKPRLLGISKRGDTALRTLLIHGARAVIRMAATKPEMADSWVMKLCRRRHKNIAAVALAAKNARTAWALLIRKQVYEVSHVPTRPGVAG

SEQ ID NO: 14947 - protein, 341 aa, unidentified
  source 1..341: note = protein_9c616c2
  REGION 6..149: note = RuvC_domain
  SITE 9: note = RuvC_P1
  SITE 54: note = RuvC_P2
  SITE 89: note = RuvC_P3
  SITE 91: note = RuvC_P4
  SITE 94: note = RuvC_P5
  REGION 213..299: note = Tnp_domain
  SITE 221: note = Tnp_P1
  SITE 251: note = Tnp_P2
  SITE 259: note = Tnp_P3
  SITE 260: note = Tnp_P4
  SITE 272: note = Tnp_P5
MKLIRVGVDLAKNVFQLHGVVHSEKTVWRRKLVRGDWIEALLKRIEPGCEIGMEACSGAHHWARLLQAKGYTVKLIAPQFVKPYVKSNKNDANDAEAICEAMSRPSMRFVAVKTVEQQDIQAVHRVRSGLMDQRKAKANQLRGLTSEYGLVAPKELLHLRSAIPRWLEDQENGLSERFRRLLRGLWRDLLAFDERIEELDREIEQIARQDPVAVRLQQVRGIGPLTATALLATVGDASQFSNGREMAASFGLTPKQNSSGGKERLLGISKRGDAYLRSLLVHGARAVIRTAQAKTDRLSIWVMRIAMTRHPNIAAVALANKTARVAWAMLTRGTDYQPQAA

SEQ ID NO: 14948 - protein, 397 aa, unidentified
  source 1..397: note = protein_fccb79d
  REGION 9..153: note = RuvC_domain
  SITE 12: note = RuvC_P1
  SITE 59: note = RuvC_P2
  SITE 93: note = RuvC_P3
  SITE 95: note = RuvC_P4
  SITE 98: note = RuvC_P5
  REGION 248..335: note = Tnp_domain
  SITE 256: note = Tnp_P1
  SITE 286: note = Tnp_P2
  SITE 294: note = Tnp_P3
  SITE 295: note = Tnp_P4
  SITE 307: note = Tnp_P5
MDGEINKSCGLDIHKQFVIATILNKSGEKQLQRFERDDEGILNLKNWVTSEKCDVVACESTSDFWVPIYDSLINHLPVIVGNARDMKAFTHKKTDKIDSEVIAKLALNKMIQPSRVFPKRHREYRSYVRLRLTLVRKRTDIKNEAHAILSSEMLHLGNVLKDIFGKNGRAILAGISSGKNVDQIIASLTPNVRKKAGQIREILDREISQSAALRLQICLDLIKNLDDEIETLEKEIFNYAYSKHKREMDLLMSVPGIGEIGAATLIAEIGNFKDFLSGDKLASWLGLVPNVYQSADKYHNGRITKRGSKVARWILTQIAQAAARKKNSKLKEFFNRKKKTIGHAKAIIALARKIATIIWHLIINDEMYEDETGYEKGRFKRERLLRLRHSRLMSVSQ

SEQ ID NO: 14949 - protein, 411 aa, unidentified
  source 1..411: note = protein_3c6bd47
  REGION 5..163: note = RuvC_domain
  SITE 8: note = RuvC_P1
  SITE 62: note = RuvC_P2
  SITE 102: note = RuvC_P3
  SITE 104: note = RuvC_P4
  SITE 107: note = RuvC_P5
  REGION 273..373: note = Tnp_domain
  SITE 281: note = Tnp_P1
  SITE 311: note = Tnp_P2
  SITE 319: note = Tnp_P3
  SITE 320: note = Tnp_P4
  SITE 333: note = Tnp_P5
MNPVVGLDVSKGESQVQAFLEKGKPHRKSFSVSHTIEGLNCLIDYLEEIRDLTGKKPPVVMESTGHFHLPVVHYLEERDYLLIIVNPLVSYKARSSSLRKVKTDAIDAYHLCELYYKEELEPYKKRGIQLLNLRNLTRQHENITDLQVQAKLQFQALLDQLFPEYKGVFGSLYSVVSLLTLRRFSSSEEILNTDDEDLASSIAEFCKSRSEKWAKEKAAQLKEAATRNPFQKTLYHSHILSLHMYIDMLLQYKEHLSKLATEIDALAKEVEEYEIIQSIPGIGEKIAATIISEIGEIERFSHPKKLVAFAGVDPSVFESGKFRATMNRITKRGSSRLRQALFMAVKCAIRDCRKQKTSDEIIPRNKRLRAFYDKKREEGKPYKVAVIACVNKLLRWIFALLTNKVDFQDIE

SEQ ID NO: 14950 - protein, 255 aa, unidentified
  source 1..255: note = protein_914f309
  REGION 2..54: note = RuvC_domain
  REGION 119..204: note = Tnp_domain
  SITE 127: note = Tnp_P1
  SITE 157: note = Tnp_P2
  SITE 165: note = Tnp_P3
  SITE 166: note = Tnp_P4
  SITE 178: note = Tnp_P5
MRAIAEAVQRPRMRFVPIKSEEQLDLQALHRVRERWVMRRTAVVNQIRSLLLERGLTLPKGRRYVEEALPRILEDAELPLSGSFRLLLAQLKLELEQLSARIDQLDVAILERAKEDEACQRLTTIPGVGPVTATAVIAAVGNGSAFGRGRDLAAWIGMVTGEHSSGGKQTLPGISKRGNPYLRRLFVQGARSVLQQRHRQAPGLSSWLAQLLARKHKNVVIAALANKLVRMAWAVLCKVNAIALPSLLCPPKIPV

SEQ ID NO: 14951 - protein, 325 aa, unidentified
  source 1..325: note = protein_b733294
  REGION 5..157: note = RuvC_domain
  SITE 8: note = RuvC_P1
  SITE 58: note = RuvC_P2
  SITE 98: note = RuvC_P3
  SITE 100: note = RuvC_P4
  SITE 103: note = RuvC_P5
  REGION 197..283: note = Tnp_domain
  SITE 205: note = Tnp_P1
  SITE 235: note = Tnp_P2
  SITE 243: note = Tnp_P3
  SITE 244: note = Tnp_P4
  SITE 256: note = Tnp_P5
MVAVVGIDVAKHTFDIATLQPNGKYRTRSRLANDPSGFAQLCEWLEKHAGPDAWTVMEATGIYHEALATCLFERGYRVSVVNPTQTAAYAKTQLSRGKTDKTDAKLIAGFGQDQLAKSRLRLWQPEPPAQKRLRALVRRLADLREMEQMERNRLESADANIQDSIHTVLRHIEEEIRRTLKAIEDHIDNDPDLRQRKELLTSIKGFGDQTAALLLGELGDPLAFRSAKAVAAFAGLTPRPDQSGEYQGPTPISRIGSGFLRSRLYMPAISAMQHNPAIKALAERLRSRGKRGKQIVCAAMRKLLHIAYGVLKSGQPFDPKLALAR

SEQ ID NO: 14952 - protein, 413 aa, unidentified
  source 1..413: note = protein_2344dba
  REGION 25..183: note = RuvC_domain
  SITE 28: note = RuvC_P1
  SITE 81: note = RuvC_P2
  SITE 122: note = RuvC_P3
  SITE 124: note = RuvC_P4
  SITE 127: note = RuvC_P5
  REGION 288..375: note = Tnp_domain
  SITE 296: note = Tnp_P1
  SITE 326: note = Tnp_P2
  SITE 334: note = Tnp_P3
  SITE 335: note = Tnp_P4
  SITE 348: note = Tnp_P5
MRSWTDKAEARHGNLGKETRPMIYAGVDIAKVDHVVGAIDETGDEVAKPMPFKNSKEGFERCVAWLEGVAETQDDVVIGMEATGHYWQACFSYLTSCGYRVAVINPMQVKAVRKLKSLSKVKNDRIDSVVIAETLRIGNFDETALATDELQSLKTLTRYRQSLKEQIAAVKTHVVCLMDTYFPEYGGIFSNMFGKASLAVLAKCPLPDEIAHVRESTLEKIITEASHGRSGARQAAKVKARAKESIGFTLGSAAASFEVKSYVAQIEFLLARVAEAEARIAALLESIEPLILTVPGISTTTGAQIVAEIGDVSRFRNAAAIVSYAGINSSVNQSGKFELEGGSITKSGSPYLRRALYLAAQGAYRNDSGLRAFYDKKRSEGKCHRVAVMAVARKLCHIIYAILRDRVPFESRG

SEQ ID NO: 14953 - protein, 265 aa, unidentified
  source 1..265: note = protein_5b3fbf2
  REGION 9..157: note = RuvC_domain
  SITE 12: note = RuvC_P1
  SITE 56: note = RuvC_P2
  SITE 96: note = RuvC_P3
  SITE 98: note = RuvC_P4
  SITE 101: note = RuvC_P5
  REGION 195..254: note = Tnp_domain
  SITE 203: note = Tnp_P1
  SITE 232: note = Tnp_P2
  SITE 240: note = Tnp_P3
  SITE 241: note = Tnp_P4
MSLPNQLCAGIDVSKATLDIAASSDFAQFTAGNNADGFDAIIVELRKHSVALVLMEATGGLETAVACALQAKGFSVAVVNPRQARDFARAMGYLVKTDRIDARVLAQMAGVINQHPERKRFIRELPDTERRALAAMVVRRRQLVTMWVAGRNRLHPSHPQSRESIDIIINALEDEIARVDENMNNHIRTYFKELAERLSSIKGVGPMTTAALLAEVPEPGHLSRREISALVGVAPANRDSGTMRGRRTIFGPNSVIYGRACRDQI

SEQ ID NO: 14954 - protein, 322 aa, unidentified
  source 1..322: note = protein_c2859d2
  REGION 9..157: note = RuvC_domain
  SITE 12: note = RuvC_P1
  SITE 56: note = RuvC_P2
  SITE 96: note = RuvC_P3
  SITE 98: note = RuvC_P4
  SITE 101: note = RuvC_P5
  REGION 195..279: note = Tnp_domain
  SITE 203: note = Tnp_P1
  SITE 232: note = Tnp_P2
  SITE 240: note = Tnp_P3
  SITE 241: note = Tnp_P4
  SITE 252: note = Tnp_P5
MRLPNPLCVGIDVSKATLDIAATAEIEQFTTRNDSDGFDEIINKLKECRISLVLMEATGGFEAAIACSLQAAGFDVTVINPRQARDFARAMGYLAKTDRIDARVLAQMAEVINKHPDRERFIRPIQDAERQVLTAMVVRRRQLIAMHVAERNRLHPAHPQSRKSINIIIKALDDELARVDAEMSKHVQNHFKELADRLNTFKGVGIRTTASLLAEVPELGNLTRREISALVGVAPVNRDSGTMRGRRTIFGGRIGARTALYMAALVATRFNPVIKAFYSRLLAVGKPKKVALVACMRKLLTILNAMLRKNEEWDMSYHSVSL

SEQ ID NO: 14955 - protein, 400 aa, unidentified
  source 1..400: note = protein_cfe936f
  REGION 10..164: note = RuvC_domain
  SITE 13: note = RuvC_P1
  SITE 62: note = RuvC_P2
  SITE 102: note = RuvC_P3
  SITE 104: note = RuvC_P4
  SITE 107: note = RuvC_P5
  REGION 270..356: note = Tnp_domain
  SITE 278: note = Tnp_P1
  SITE 308: note = Tnp_P2
  SITE 316: note = Tnp_P3
  SITE 317: note = Tnp_P4
  SITE 329: note = Tnp_P5
MGKRPGCVWCGIDAGKGHHWAAVVDETGATLWSKKIDNDESAILAALGEILDLADEVHWAVDISGTSSALLLALLAAHGQQAVYVPGRTVNRMSGAYRGEAKTDARDAYVIAEATRQRRDFATIDVPAQLAADLALLTAHRSDLVADRVRMINRLRDVLTGVFPALERAFDYSAHKGALVLLTGYQTPAAIRRRGRARLTAWLANRSVRGADDVAATALEAARAQQTALPGEDVAAQIVADLATQILALDERLKRIDKRIRDTFRGHPQAEIIESLPGMGPILGAEFVVAAGDLTAYADAGHLASAAGLVPVPRDSGRRTGNLHRPKRYSRRLRRVFYLSAQTSIIREGPNRDFYLRKRGEGCKHVQAVIALARRRADVLWALLRDGRLFTPAPPVTQAP

SEQ ID NO: 14956 - protein, 389 aa, unidentified
  source 1..389: note = protein_2437058
  REGION 4..163: note = RuvC_domain
  SITE 7: note = RuvC_P1
  SITE 60: note = RuvC_P2
  SITE 101: note = RuvC_P3
  SITE 103: note = RuvC_P4
  SITE 106: note = RuvC_P5
  REGION 266..353: note = Tnp_domain
  SITE 274: note = Tnp_P1
  SITE 304: note = Tnp_P2
  SITE 312: note = Tnp_P3
  SITE 313: note = Tnp_P4
  SITE 326: note = Tnp_P5
MIYVGIDVAKDKHDCCILGSEADNLYPVFTIPNNKTGFDELYEKIFSVTDDRTEIKVGLEATGHYSLNLLGSLIDKGLPTCVINPLHTNLYRKGLSLRKTKTDKVDAGSIAMMLMTDKTLKPYSDTSYHSEELKSLTRYRFDKVQERAKLKSSVARLINILFPELEKLVPNLHMASVYALLSEFPGASYIAESHLTHLRNVLETASKGRYGRNMAVTIRDAAKDSIGSVMPAKSMELKHTIHLIEVMTDEIDEIEASIKSIMDTCDSPIMTIPGISYRMGAMILAEIGDFNRFSNADQILAFAGLSPSTYQSGQLDSCFSHMEKRGSRYLRYALFNATKYVCHWDESFGAYLSKKISEGKHYNVAIGHAAKKLIRTIYRMELTGEAYRK

SEQ ID NO: 14957 - protein, 272 aa, unidentified
  source 1..272: note = protein_9c05ca6
  REGION 1..77: note = RuvC_domain
  SITE 16: note = RuvC_P3
  SITE 18: note = RuvC_P4
  SITE 21: note = RuvC_P5
  REGION 140..230: note = Tnp_domain
  SITE 148: note = Tnp_P1
  SITE 178: note = Tnp_P2
  SITE 186: note = Tnp_P3
  SITE 187: note = Tnp_P4
MPIPPKQVKPFRTGQKTDANDAIAIAVASRAANIKPARVLTTEEQGLQSVGKMRDLLDKQKLQLSNQVRGLLLEFGIIINKSIKSFKARIPEILEDAENQLPMPMRKSLFQMWELYYRLAHDFQVMNKGLIQLTEQDDDCKRFMKLEGVGPITSMRLKIQLGSGEHFKSSKQVSACIGLTPKQRSGGKVQLGSVGKISCDKPLRSCLFLGARAVVSKLKNRPAKTEKERWLKALIERRGANCASMALANKNARTAYALLKNNADYNLVLIAA

SEQ ID NO: 14958 - protein, 339 aa, unidentified
  source 1..339: note = protein_061b5ed
  REGION 7..152: note = RuvC_domain
  SITE 10: note = RuvC_P1
  SITE 58: note = RuvC_P2
  SITE 93: note = RuvC_P3
  SITE 95: note = RuvC_P4
  SITE 98: note = RuvC_P5
  REGION 220..303: note = Tnp_domain
  SITE 226: note = Tnp_P1
  SITE 256: note = Tnp_P2
  SITE 264: note = Tnp_P3
  SITE 265: note = Tnp_P4
  SITE 276: note = Tnp_P5
MAWTVAIGVDTHKDVHVAVACDRLGGQLDACEVPASAAGYTHLLAWAEALGRPAFAIEGCGSYGSGLARFLQASGATVFECERPRRRERRRGKSDLIDAALAARRLVVGEGLGSPRGGGRREELRLLLLERRGLVGARTATLNQLQAVLVSAPERLRVRLGALRGARLAQAARALRCGSGEERVLVGVLRRLGRRVQQLEAELAELEAELEAIVSELVPELLEECGVGPVCAAQLVASSGDPARMRSEAAFAALAGTSPVDASSGRQRRHRLNRGGDRQLNRTLHVIALARVRHDRDTAAYHERLLGSGKTAREARRCVKRALARHFYRRLCANPALTT

SEQ ID NO: 14959 - protein, 277 aa, unidentified
  source 1..277: note = protein_4c0f6b5
  REGION 6..147: note = RuvC_domain
  SITE 9: note = RuvC_P1
  SITE 52: note = RuvC_P2
  SITE 87: note = RuvC_P3
  SITE 89: note = RuvC_P4
  SITE 92: note = RuvC_P5
  REGION 211..261: note = Tnp_domain
  SITE 219: note = Tnp_P1
  SITE 249: note = Tnp_P2
MKITTLGLDLAKNVFQIHGVDERGAVVLRKQLKRDQVAPFFARLEPCLIGIKACGGAHYWAIKLSTLGHCVKMMAPQFVKPYVKTNKNDLLDAEAICEAVARPNMRFVPTKSPEQQAVLSLHTARESFVRARTAQANQIRGLLIEFGLIIPQGIRHIYQRVPELIEDASNELPGRFRMLIDRLLQHLKELDRQVRELEREIEQWHRSSEVSRRLQTIPGIGPMTASALVASVGDPSNFKNARQFAAWIGLCRIRTPVAARRSCWASASAAMSIFEHC

SEQ ID NO: 14960 - protein, 334 aa, unidentified
  source 1..334: note = protein_4aad75c
  REGION 7..149: note = RuvC_domain
  SITE 10: note = RuvC_P1
  SITE 53: note = RuvC_P2
  SITE 88: note = RuvC_P3
  SITE 90: note = RuvC_P4
  SITE 93: note = RuvC_P5
  REGION 209..295: note = Tnp_domain
  SITE 217: note = Tnp_P1
  SITE 247: note = Tnp_P2
  SITE 255: note = Tnp_P3
  SITE 256: note = Tnp_P4
  SITE 268: note = Tnp_P5
MQNVTLIGIDLGKHSFHLHAQDKNGNALLRKKFSRTQLTTFLSTCTASTVVMESCAGAHFMARHISQLGHQVKLISPQFVRPFIKSNKNDFIDAEAICEAASRPSMRFVTPRTEDQQAMSALHRVRDALVRDRVKTTNQMHAFLLEFGISMPRGIAVIRRLAVVLEEHELPPYLARLLMRLHQHYAYLTEQIEEVEQELKIHMAEDDTAQRLLTIPGVGLITASFLATKLGDGKSYACSRDFAASTGLVPRQYSTGGKNTLMGISKRGDKNLRRLLVQCARVFMQRLEHNRGRLADWVKGQLTRHHSNVVACGLANKLARIAWSVTTHRTAFIQ

SEQ ID NO: 14961 - protein, 403 aa, unidentified
  source 1..403: note = protein_bd069b3
  REGION 4..160: note = RuvC_domain
  SITE 7: note = RuvC_P1
  SITE 59: note = RuvC_P2
  SITE 99: note = RuvC_P3
  SITE 101: note = RuvC_P4
  SITE 104: note = RuvC_P5
  REGION 273..360: note = Tnp_domain
  SITE 281: note = Tnp_P1
  SITE 312: note = Tnp_P2
  SITE 320: note = Tnp_P3
  SITE 321: note = Tnp_P4
  SITE 333: note = Tnp_P5
MFCLGIDVSKKSCRYLILNKEGQKVKSFSLENTHEAFQDLLERLNHLSIPKENLLTGLEASGGFWENLYSHLKENGFSVVLLNPYQTSKFREALAKKAKTDDIDALVIAQLLRTGEYVQSQVAEELIQSLRELSKLRYELVKERKNYQRQVFSLLSIVFPEHEKTALKNPFSVASLAIFQTFSTAKDLAQAKPKQIEKIVRSIKGNNFDLKEIETLIRTAQNPIYSGRAKEARGTSLRILLRHIETLSSSIEELEADIKKLLSPQEPQDSFPGENLLTIPGVGEKTVAAVLSYLGTDGSNFSTSTKAVGYVGYFPKIYQSGQSLWESTICKRGPKLLRWALYMAAVACLRHNPEMKNLYHKKLSQGKTEKQALICVAKKLLEIMLAMLKSGEPYDPLRVYANC

SEQ ID NO: 14962 - protein, 411 aa, unidentified
  source 1..411: note = protein_2ca1b3d
  REGION 5..163: note = RuvC_domain
  SITE 8: note = RuvC_P1
  SITE 62: note = RuvC_P2
  SITE 102: note = RuvC_P3
  SITE 104: note = RuvC_P4
  SITE 107: note = RuvC_P5
  REGION 273..373: note = Tnp_domain
  SITE 281: note = Tnp_P1
  SITE 311: note = Tnp_P2
  SITE 319: note = Tnp_P3
  SITE 320: note = Tnp_P4
  SITE 333: note = Tnp_P5
MNPVVGLDVSKGESQVQAFLEKGKPHRKSFSIPHTIEGLDCLVEYLEEIWSLTGIRPPVVLESTGHFHLPVVQYLEERDYLLIIVNPLVSYRAKSSNLRKVKTDVIDAYHLCELYYKEELEPYKKRGIQLLNLRNLTRQHENITELHVQAKLQFQSLLDQVFPEYKGVFGSLYSVVSLLTLKEYPSSEDILRTEEEDLSDKIAELCKSRSKAWAKEKATELKEAAKRNPIQKTLYRSHILSMNMYIHMLLQYKEHLSKLAAEIDALAKEVEEYELIKSIPGIGEKIAATIISEIGEIERFSHPKKLVAFAGIDPSVFESGKFRATINRITKRGSSRLRQALFMAVKCAIRDCRKKKITDKVIPRNKRLRAFYDKKRDEGKPYKVAVIACVNKLLRWIFAILTSKEVFQDID

SEQ ID NO: 14963 - protein, 400 aa, unidentified
  source 1..400: note = protein_94ab83d
  REGION 4..160: note = RuvC_domain
  SITE 7: note = RuvC_P1
  SITE 57: note = RuvC_P2
  SITE 97: note = RuvC_P3
  SITE 99: note = RuvC_P4
  SITE 102: note = RuvC_P5
  REGION 275..362: note = Tnp_domain
  SITE 283: note = Tnp_P1
  SITE 313: note = Tnp_P2
  SITE 321: note = Tnp_P3
  SITE 322: note = Tnp_P4
  SITE 335: note = Tnp_P5
MNAVGIDVSKRKSTVAIMRPFGEVIAEPFEVSHTDTELRKLACFLEKLPGETRIVMEYTGSYWQPIAKVLHDAGFFVSAVNALLIYKYGNNSIRKGKTDKLDAVKIANYCLDRWTDLERYSPTDQIRQTLKTCRRQYDQYIRLKVNLKNNLIALLDGTFPGINTLLKSAPRDTDGHEKWVDFAGKFWHRQCVCGNSEKAFANQYRKWCAKAGYRFNAEKAVAIYSHPGSQVDTLPMSSAIQSLITHAVAQLNMIIETISAIQHEMLTLASQFPEYPIVMRMFGVGPVLGPQLMAEIGDVRRFHCKQSLVAFAGVDAPPCQSGTFESKNRHISKRGSPRLRKTLFQVMSTIIQHAPADDPVYQFLDRKRREGKHYYVYMTAAANKFLRIYYGTVMAYFEKP

SEQ ID NO: 14964 - protein, 342 aa, unidentified
  source 1..342: note = protein_351cb6d
  REGION 30..181: note = RuvC_domain
  SITE 33: note = RuvC_P1
  SITE 84: note = RuvC_P2
  SITE 121: note = RuvC_P3
  SITE 123: note = RuvC_P4
  SITE 126: note = RuvC_P5
  REGION 247..332: note = Tnp_domain
  SITE 255: note = Tnp_P1
  SITE 285: note = Tnp_P2
  SITE 293: note = Tnp_P3
  SITE 294: note = Tnp_P4
  SITE 306: note = Tnp_P5
MTKFNTESVSIHTVGAPVEPEQPTIHSAYVGLDVHKETIAIAVAEPGRQEPVYEGEIANTPKRVERKIQQLSELYGGGLLQFVYEAGPCGYGLYRQLLASGHDVHVVAQSRIPKAPGERIKTDRRDALKLARQARSGDLTPVWVPDTEQEAMRDLTRARDCMKAQERKACQQLNAFVLRHGHHWPKGRTRWTQTHFNWLESLRFEHDWQQVVLQEYTDAVKAATRRVADITAQMEEALPQWTLAPVVEALVALRGIDKLAAMVLMAELGDISRFDSPRELMAFLGLVPSEHSSGSRRRQGAITLTGNSHARRMLVESAWSYRFPARQTMHLKRKAADAPEEG

SEQ ID NO: 14965 - protein, 319 aa, unidentified
  source 1..319: note = protein_0f88dff
  REGION 3..147: note = RuvC_domain
  SITE 6: note = RuvC_P1
  SITE 50: note = RuvC_P2
  SITE 90: note = RuvC_P3
  SITE 92: note = RuvC_P4
  SITE 95: note = RuvC_P5
  REGION 189..273: note = Tnp_domain
  SITE 197: note = Tnp_P1
  SITE 226: note = Tnp_P2
  SITE 234: note = Tnp_P3
  SITE 235: note = Tnp_P4
  SITE 246: note = Tnp_P5
MFVGIDVAKAELVVSIVPSAERFTVANDERGVRTLVERLRAIGPTLIVLEATGGYELLGVAGLVAAALPVVVVNPRQVRDFARATGQLAKTDRIDADILARFADVVRPDVRVIADAEAQELEALLARRRQLLEMLQAERNRVGQVFGKGKRLVRKSLKAHITFLERELRMTDTDLGAMVKASPAWRERDELLRSVPGVGPVLSRTLLADLPELGRLSRREIAKLVGVAPLSRDSGTFRGRRFVQGGRASVRAVRYMAALVATKRNATIRIFYLRLVAAGKPKKLALVACMRKLLTILNVMVRTEQRWSAEATPGALIPA

SEQ ID NO: 14966 - protein, 400 aa, unidentified
  source 1..400: note = protein_1478591
  REGION 3..159: note = RuvC_domain
  SITE 6: note = RuvC_P1
  SITE 55: note = RuvC_P2
  SITE 96: note = RuvC_P3
  SITE 98: note = RuvC_P4
  SITE 101: note = RuvC_P5
  REGION 266..350: note = Tnp_domain
  SITE 274: note = Tnp_P1
  SITE 303: note = Tnp_P2
  SITE 311: note = Tnp_P3
  SITE 312: note = Tnp_P4
  SITE 324: note = Tnp_P5
MFVGLDVGKSDHHAVAVTAAGKTVYDKALPNDEARLRAILEELATAHGPVLMVVDQPATIGALAVAVAQAMESVTVAYLPGLAMRRIAELHPGTAKTDARDALIIAEAARTMPHTLRDIRVDEAQIAELAVLAGFDDDLAAQITATSNRLRGMLTQIHPALERVLGPRVGHPAVAGLLTRYPTPAKLAAAGRGQVRARLRKHAPRLAETLTEEIFTALGQQTVVVAGTEAAATVVPILAGQLAALTTHRVQVASQVEVLVEAHPLSEVLTSMPGIGVRTAARILTEVVGKDFADAGHLTSYAGIAPVTRRPGTSNRGEHAPRGGNKRLKRALFLSAFASLHHAPSRAYYDRKRAQGKRHNQAIIALARRRTDVLFAMLRDGTLYQDPTDPQTASSMALAA

SEQ ID NO: 14967 - protein, 368 aa, unidentified
  source 1..368: note = protein_717b27e
  REGION 34..194: note = RuvC_domain
  SITE 37: note = RuvC_P1
  SITE 87: note = RuvC_P2
  SITE 133: note = RuvC_P3
  SITE 135: note = RuvC_P4
  SITE 138: note = RuvC_P5
  REGION 305..368: note = Tnp_domain
  SITE 313: note = Tnp_P1
  SITE 343: note = Tnp_P2
  SITE 351: note = Tnp_P3
  SITE 352: note = Tnp_P4
  SITE 365: note = Tnp_P5
MRGCRCSMIMSFTKPIEHANLITKEGNLMNPLYVGIDVSIVHFMLPNGDKHSNFSVANSHDGSTQLVKRICSALTSESLDTVSIGLEATSVYGDNLVYFLREDASLASFNRKIHVLNPKQVNKFKESYNDLPKNDWIDSFVIADCLRFGRINKEVYIGDYHSKALQNLTRARYFAVCNLTKEEQRFMNVLFKKYSTMTQEKVFSDTFSTTVLAVYDEFESTEALAYMDLQELTAFIIKKGKNRFPDPDAVAKAIQKAARSSYRLPKTVNDSVNQVLSISITSMKALESQIKEFDKAIATQMELLSNVLISIPGIGPVYSAGIMAEIGDINRFNNQAALAKYAGLAWTQHQSGGFEAQNTRLIHSGNRF

SEQ ID NO: 14968 - protein, 338 aa, unidentified
  source 1..338: note = protein_1247da0
  REGION 7..149: note = RuvC_domain
  SITE 10: note = RuvC_P1
  SITE 53: note = RuvC_P2
  SITE 88: note = RuvC_P3
  SITE 90: note = RuvC_P4
  SITE 93: note = RuvC_P5
  REGION 212..301: note = Tnp_domain
  SITE 220: note = Tnp_P1
  SITE 250: note = Tnp_P2
  SITE 258: note = Tnp_P3
  SITE 259: note = Tnp_P4
  SITE 271: note = Tnp_P5
MNKITTIGLDLAKNVFHLVGCDARGQRQLKKQLSRRQMLNYFANLPSCLIGMEACGTAHYWARELQALGHEVKLIPAQHVKAYLRGNKNDYNDAQAIAEAVVRPQMRFVAIKTPEEQDIQALHRLRTRRVAERTALCNQLRGLLSEYGIVIPRGITALKRYLPRLLEDAENGLSDRFRRFLKQASGQLEELEAHIDFFDEEMAQFSHQHEACQRLQTIPGFGVVVSSVFFAQVGNGEAFRRGRDVAASLGLVPRQYSSGGKEVLLGISKRGDSYLRGLLIHGARAVVRHAAGKQDRLSRWIQRLVERRGHNKAVVALANKMARMGWAILAHKTTYQEA

SEQ ID NO: 14969 - protein, 388 aa, unidentified
  source 1..388: note = protein_f76c3e2
  REGION 4..160: note = RuvC_domain
  SITE 7: note = RuvC_P1
  SITE 58: note = RuvC_P2
  SITE 98: note = RuvC_P3
  SITE 100: note = RuvC_P4
  SITE 103: note = RuvC_P5
  REGION 264..351: note = Tnp_domain
  SITE 272: note = Tnp_P1
  SITE 302: note = Tnp_P2
  SITE 310: note = Tnp_P3
  SITE 311: note = Tnp_P4
  SITE 324: note = Tnp_P5
MIYAGIDIAKLNHYAAVLSSDGTVLTEPFKFTNDGDGFKRLSEELSDYAPEPVIIGLESTAHYGDNLVRYLVANDYKVCVLNPIQTSSRRKDRIRKTKTDKVDAVVIAETLMMLRDRRYVTFYDLDLMDLKTLGRFRQKSLKQRTRLKIQLTSFVDQVFPELQYFFKSGLHQKSVYALLKEAPTPKTIASMHMTHLSHILQTASHGHFDKETARQLRALAQKSVGNSDSTVSIQITQTISQIELLDSQIEKVEAEMTEIMKFNDSPIMTIPGIGYINGGMILGEIGDIHRFSKPHQLLAYAGLDPSVKQSGNFNASRTRMSKRGSKVLRYALMNAAHNVVKNNATFKEYYDKKMAEGRTHYNALGHCAGKLVRIIWKMMTDDIDFNLD

SEQ ID NO: 14970 - protein, 392 aa, unidentified
  source 1..392: note = protein_d110a81
  REGION 4..163: note = RuvC_domain
  SITE 7: note = RuvC_P1
  SITE 60: note = RuvC_P2
  SITE 101: note = RuvC_P3
  SITE 103: note = RuvC_P4
  SITE 106: note = RuvC_P5
  REGION 267..354: note = Tnp_domain
  SITE 275: note = Tnp_P1
  SITE 305: note = Tnp_P2
  SITE 313: note = Tnp_P3
  SITE 314: note = Tnp_P4
  SITE 327: note = Tnp_P5
MIYVGIDVAKDKHDCFISNSHGEVLFNAFSIPNNREGFNALYQKIQSVTNDLSKVKVGLEATGHYSYNLLGFLFSKGLPTYVINPLHTNLYRKSLSLRKTKTDKVDARTIASMIMSDVNLKSYSDTSYHNEELKSLTRYRFEKVKERAKLKTSVSRLVCILFPELEKLVPALHMASVYALLSEFPSAAAVASAHLTRLSNLLSESSKGHYGKDTAVIFREAARSSIGSHMPAKSLELKHTIRLIRELDAEIDEIENEIKRIMDEEIHSPILTIPGISYRMGAMIIAEIGDFSRFDSPDRILAYAGMSPSTYQSGQLDNCYAHMEKRGSRYLRYALYNATKYVCKWDESFGAYLAKKRAEGKHYNVALSHATKKLVRLIYAMEKSGQPYNKAA

SEQ ID NO: 14971 - protein, 407 aa, unidentified
  source 1..407: note = protein_407555f
  REGION 4..160: note = RuvC_domain
  SITE 7: note = RuvC_P1
  SITE 59: note = RuvC_P2
  SITE 99: note = RuvC_P3
  SITE 101: note = RuvC_P4
  SITE 104: note = RuvC_P5
  REGION 273..360: note = Tnp_domain
  SITE 281: note = Tnp_P1
  SITE 311: note = Tnp_P2
  SITE 319: note = Tnp_P3
  SITE 320: note = Tnp_P4
  SITE 333: note = Tnp_P5
MIYGGIDVAKYRHEVCLVNDTGDVVLQMYIDNNQSGMDKLLQTLERLSIEPNDIKFCLEATGHYWLPIYCHLSELGFQLHVINPIQSDALRNLYVRKTKTDRKDALLLADLLRLGRAPETKLPSETILKLQNLSRLRFELVRQVAGLKNRVLGTLDRIFPEYPGCFSDVFIRTSRELLKSYPEPEDLVKVDLSELSAFLKQHSRGRFGEERAKKIQSLAKSTFGITLALDAFSLQLRLLIEQIEFIEEQIKVLEEAINQVMEELRPSKDTPYRHVIETIPGIGPVLAAAIIGEIGDISRFPNARALVAYAGLDASVKASGLFEGTRNRMSKRGSPVLRNSLWLAAVSARRFNPELKAYYELKRSQGKHSSVATGAVARRLVHLIYSLWKNNRAYDPDYQWSPPGDNV

SEQ ID NO: 14972 - protein, 399 aa, unidentified
  source 1..399: note = protein_fefeee3
  REGION 12..166: note = RuvC_domain
  SITE 15: note = RuvC_P1
  SITE 63: note = RuvC_P2
  SITE 103: note = RuvC_P3
  SITE 105: note = RuvC_P4
  SITE 108: note = RuvC_P5
  REGION 273..357: note = Tnp_domain
  SITE 281: note = Tnp_P1
  SITE 310: note = Tnp_P2
  SITE 318: note = Tnp_P3
  SITE 319: note = Tnp_P4
  SITE 331: note = Tnp_P5
MINDHKLVDIFIGVDVGKSNHHAVAIDRQGKKILDRALPQDEAKLRSIIKAVAGKGRVLLVVDQPSTIGALPVAVAQAEGIMVGYLPGLAMRRIADLHPGEAKTDARDAAIIAEAARSLPHTLRSIVVADEQAAELSMLCGFDDDLAKQATATSNRIRGLLAQVHPALERVIGMHLDHPAMAELLVKYPTPSTLRKAGQNRVATLLSRHAPRAGKAWAAEVFTALGEQTVVVAGTNAAGIVLPQLAAMLKQLRTSRDEILTQVEALVEAHPLHTVLTSIPAVGVRTEARIITEVAGKEFKTAGHLASYAGLAPVTWRSGTSIRGDHPSKKGNKSLKRAFFLSAFAALKDPLSRAYYDRKRAEGKRHNQALIALARRRCDVLFAMLRDGTLYEAPGTQSA

SEQ ID NO: 14973 - protein, 350 aa, unidentified
  source 1..350: note = protein_5ac4804
  REGION 12..163: note = RuvC_domain
  SITE 15: note = RuvC_P1
  SITE 66: note = RuvC_P2
  SITE 102: note = RuvC_P3
  SITE 104: note = RuvC_P4
  SITE 107: note = RuvC_P5
  REGION 231..315: note = Tnp_domain
  SITE 238: note = Tnp_P1
  SITE 268: note = Tnp_P2
  SITE 276: note = Tnp_P3
  SITE 277: note = Tnp_P4
  SITE 288: note = Tnp_P5
MTSLAERVDLVIGVDTHKHTHTAAVVDATTGGTLSELTVSTDPGGYGELLTWVGAIRGGSRVWALEGGGGYGAGLARFLGSAGEQVVELDRPKRAARRHGAKSDSLDAVRAAREALAREHLARIKDDGPRAELAVLMAARRSGVEAATLAQRQLLALVTAAPEELRAVLRGANTTVTVQTAARLRTRSAWDRQTVTTANVLRTLARRVLTLQGEARDHETAIGEIVRSWRPDLLTQPGIGALTAAQVLIAWSHPGRIRSEAAFAMLAGTAPIPASSGMTIRHRLNRSGDRQLNRALHVIALSRARYDQRTRDYIDRRRAQGKTDREIRRCLKRYIARDLFRQLEHGPLPA

SEQ ID NO: 14974 - protein, 407 aa, unidentified
  source 1..407: note = protein_a95012c
  REGION 6..169: note = RuvC_domain
  SITE 9: note = RuvC_P1
  SITE 63: note = RuvC_P2
  SITE 109: note = RuvC_P3
  SITE 111: note = RuvC_P4
  SITE 114: note = RuvC_P5
  REGION 280..366: note = Tnp_domain
  SITE 287: note = Tnp_P1
  SITE 317: note = Tnp_P2
  SITE 325: note = Tnp_P3
  SITE 326: note = Tnp_P4
  SITE 339: note = Tnp_P5
MNPLFVGIDVSSKNNVTYLMKPDGSKHSSFSVQNNLGGAKLMSEKIVLAMETMGLNDVVIGLEATSIYGDSLVYALREDRRLGRYQRKLHVLNPKQVRKFKESYPDLPKNDWVDAFVIADHLRFGRIGKEVYMDDYRYKSLQTLTRARFDVVQNLTREKQHFANYLFLKCCGMAQDKDIANSSATTIALMERFETVDELAYADLDELTKFIDETGRNFADPAAKAKAIQTAARNSYRLPITVNNSVNQAMAVSIATMRALGKQIKVLDKAIEQQFEIIPNTLTSIPGIGKVYSAGIIAEIGDIHRFSSQASVAKFAGLVWTQHQSGDFEAQHSKLIKSGNRYLRYYLLEAANSVRRCDSEFRRYYDLKFKEVNQFQHKRALALTARKLVRLIYRLLMDNRLYIPPES

SEQ ID NO: 14975 - protein, 428 aa, unidentified
  source 1..428: note = protein_0d94b95
  REGION 19..179: note = RuvC_domain
  SITE 22: note = RuvC_P1
  SITE 77: note = RuvC_P2
  SITE 118: note = RuvC_P3
  SITE 120: note = RuvC_P4
  SITE 123: note = RuvC_P5
  REGION 286..375: note = Tnp_domain
  SITE 294: note = Tnp_P1
  SITE 324: note = Tnp_P2
  SITE 332: note = Tnp_P3
  SITE 333: note = Tnp_P4
  SITE 345: note = Tnp_P5
MDSTQNNRLEQITDKTLIIGIDVAKDKHVARAIDDHGRDLAKRLVFENSLTGFQSLLDWAEHLAEQQQRPHFMFGMEPTGHYWLNLAYHLKAQGLHAVVVNPTKVKRTKELDDDSPTKNDTKDAKVIAQVVRAGRFHEPILLEGLYAELREGMKLHDIMEKDLTSIKAQVQNALDRYFPEFTTVFKDWTKKTPIHFLKKGYLPVDIASCSEEALLAEIKEAAKRGVGIKQARSLKHAAETSVGMTVGLTMAREEISYLIDQYVAIKGRIEAHEARLEELVLQVPGARQMIAIKGVGVMTVAGFFAEVGDLSNYQDPRQIIKLAGLNLQLNQSGKFKGQTTITKRGRRRLRSILYLAARPLSANNEGFKQLHHYYRNRPDHPLTGKESFVALGRKLIKIFYVMGTRNCAFDGERMMRDIPSLRSLQKVA

SEQ ID NO: 14976 - protein, 368 aa, unidentified
  source 1..368: note = protein_a551142
  REGION 4..160: note = RuvC_domain
  SITE 7: note = RuvC_P1
  SITE 57: note = RuvC_P2
  SITE 97: note = RuvC_P3
  SITE 99: note = RuvC_P4
  SITE 102: note = RuvC_P5
  REGION 275..363: note = Tnp_domain
  SITE 283: note = Tnp_P1
  SITE 313: note = Tnp_P2
  SITE 321: note = Tnp_P3
  SITE 322: note = Tnp_P4
  SITE 335: note = Tnp_P5
MISVGIDVSKEKSTVCILKPYGEIVSRPFEVSHVEKELSELAIMLQRLGDEVRVVLEATGIYHLPVLSYLKERGFFVAVINPFEMKKYRCQGLRRVKTDKQDAITISNYGIDHWYRLKDYEAEESVYAELKLLGRQYRHYMRLRVESVLGLTHLLDYTMPGIKSLLEGWNETNGKDKLSDFVEEYWHYNTITEQTLEQFMESYLIWTKKKGYHQSQDKAAKIYALAKESIPTIPSSNSSTKMLVQEAVRVLREVDNTLMTILTQMQLLAKSLPEYPVVRAMGGVGNVLAPKLIAEIGDVRRFHSGKALIAHAGIDAPPYQSGQFTGTERKISKRGSSSLRKIGYEVMRSLKTHKAPEDAAVYKFILKK

SEQ ID NO: 14977 - protein, 343 aa, unidentified
  source 1..343: note = protein_628678a
  REGION 5..153: note = RuvC_domain
  SITE 8: note = RuvC_P1
  SITE 55: note = RuvC_P2
  SITE 92: note = RuvC_P3
  SITE 94: note = RuvC_P4
  SITE 97: note = RuvC_P5
  REGION 212..300: note = Tnp_domain
  SITE 220: note = Tnp_P1
  SITE 250: note = Tnp_P2
  SITE 258: note = Tnp_P3
  SITE 259: note = Tnp_P4
  SITE 271: note = Tnp_P5
MDYYAGIDVSLELSSVCVMDSSGKIVRETKVASEPEALLQHFADLGLPVIRVGLEAGPLSQWLREGLVDAGFEVVLLETRHVKAALSAMPVKTDRKDARGIAQLLRMGWYRPVHAKSADAQEVRALLVGRKLLQAKLLDVELSIRGILRGYGLKVGEVSRGRFEARIRELIEGHDMLATVIGAMLQARAVLWNEFTRLHRAMLKIARVDPVCQRLMSAPGVGALVALTYRSAVDNPGRFAKSRTVGAYFGLTPKKYQSGETDIDGGISKVGDGMVRTALYEAAHIMLTRATRFSALKRWAMDVAKRRGMKRAKVALARKLATVLHRMWADVSQFRWGKDTVTA

SEQ ID NO: 14978 - protein, 400 aa, unidentified
  source 1..400: note = protein_23ad36f
  REGION 11..166: note = RuvC_domain
  SITE 14: note = RuvC_P1
  SITE 63: note = RuvC_P2
  SITE 103: note = RuvC_P3
  SITE 105: note = RuvC_P4
  SITE 108: note = RuvC_P5
  REGION 273..358: note = Tnp_domain
  SITE 281: note = Tnp_P1
  SITE 311: note = Tnp_P2
  SITE 319: note = Tnp_P3
  SITE 320: note = Tnp_P4
  SITE 332: note = Tnp_P5
MDDIDDVGVFLGLDVGKSTHHGHGLTPAGKKVFDKQLPNSEPKLRALFDKLATKFGTVLVIVDQPASIGALPLTVAREAGCKVAYLPGLSMRRIADLYPGEAKTDAKDAAVIADAARTMPHTLRSLQLTDEITAELTVLVGFDQDLAAEATRTSNRIRGLLTQFHPSLERVLGPRLDHPAVTWMLERYGSPASLRKAGRRRLVEVIRPKAPRLAARLIDEVFDALDEQTVVVPGTEAAALIVPSLAQSLTAVLDQRRLLEKRLDELLEAHPLSAVLTSMPGIGVRTAARLLIDVGDGTKFPSAAHLTAYAGLAPTTRSSGSSIRGEQPSHRGNKQLKRAFFLSAFAALHDPDSRAYYDMKIKEGKHHTQALLGLARRRADVLFAMLRDGTLYEPRTPRLA

SEQ ID NO: 14979 - protein, 324 aa, unidentified
  source 1..324: note = protein_5afc5f5
  REGION 20..166: note = RuvC_domain
  SITE 23: note = RuvC_P1
  SITE 67: note = RuvC_P2
  SITE 107: note = RuvC_P3
  SITE 109: note = RuvC_P4
  SITE 112: note = RuvC_P5
  REGION 199..284: note = Tnp_domain
  SITE 207: note = Tnp_P1
  SITE 236: note = Tnp_P2
  SITE 244: note = Tnp_P3
  SITE 245: note = Tnp_P4
  SITE 256: note = Tnp_P5
MVEVLSLPIVLWSEVMSIHVGIDTGKSMLDVGFYPDRRCERFANTPEGHRALLLALAPLDVPHIAIEATGGYERGVVDALVQAGYCVTRLASHRATAYARAMGTFAKSDALDAQILARMAAQVTPQPYEVPAPERAELAELVRCRLQMVSQRDDNKRRLLQTQLAAAQQALRGMIEAASVQIRELDRRIATATKAADPASRLREVPGVGPVVEATLIAYLPELGRLTRRQIAALVGVAPYVDQSGRRDGPRRVRAGRWIVRRAIYMATWAAIRTKGSALGQRYRALRARGKVAKVALVACMRCLITAINAMVRAQVGWRQPATV

SEQ ID NO: 14980 - protein, 404 aa, unidentified
  source 1..404: note = protein_25ae482
  REGION 11..166: note = RuvC_domain
  SITE 14: note = RuvC_P1
  SITE 63: note = RuvC_P2
  SITE 103: note = RuvC_P3
  SITE 105: note = RuvC_P4
  SITE 108: note = RuvC_P5
  REGION 273..358: note = Tnp_domain
  SITE 281: note = Tnp_P1
  SITE 311: note = Tnp_P2
  SITE 319: note = Tnp_P3
  SITE 320: note = Tnp_P4
  SITE 332: note = Tnp_P5
MFDTSGTGVFLGMDVGKGEHHAHGLTPAGKTVHDKRMPNSEPKLRALFDKLSAKFGTVLVIVDQIANIGALPLAVARDAGCQVAYLPGLAMRRAADLYPGEAKTDARDAFVIADIARSMPHTLRSIELTDETSAELAMLVGFDDDLAGEATRVSNRLRGMLTQIHPALERVLGPRIHHPAVLWLLERYGTPAQIRRAGRRALAERLRPHAPRMHERLVNDIFTALDEQTVVVTGTNAAATIVPKLAKNLGTVLDQRRELEAQISTLLEAHPLSQLLMSLPGVGIRTGAALLITIGDGSTFATAGHLASYAGLAPVTRSSGSSIRGEHAPHRGNRQLKRAMFLSAFAALHDDASRSYYDKQRATGKSHTQALLRLARQRINVIHAMLRNGTFYEARQPKTVELAA

SEQ ID NO: 14981 - protein, 342 aa, unidentified
  source 1..342: note = protein_1844399
  REGION 6..147: note = RuvC_domain
  SITE 9: note = RuvC_P1
  SITE 52: note = RuvC_P2
  SITE 87: note = RuvC_P3
  SITE 89: note = RuvC_P4
  SITE 92: note = RuvC_P5
  REGION 212..297: note = Tnp_domain
  SITE 220: note = Tnp_P1
  SITE 250: note = Tnp_P2
  SITE 258: note = Tnp_P3
  SITE 259: note = Tnp_P4
  SITE 271: note = Tnp_P5
MTIAVLGIDLGKNSCSLVGLDGTGRVVLRRRMRRETVIAFSAKLPGCVVAMEACCGAHHMGRALVEQGHTVRLMSPEYVRPYVKAQKNDDRDAEAIAEAATRPTMRFVALKSEAQLDVQTLHRVRDQLVGERTALMNQVRAILLERGYVVAQGRAKLAACLTELLDTEAGSSLTARMRTLVAELRERWQSLDRRIAALDAEFAEQARTDENARRLTTIPGIGALNATALVAAIGDVATFARGRDLAAWLGLVPRQVTTGGKPKLVGITKRGSKYLRKTLIQGARAAMPTLRQGDTRLGQWLRGLLARAHTNTAVVALAAKMARIVWALLRHGRVYEATAVAA

SEQ ID NO: 14982 - protein, 339 aa, unidentified
  source 1..339: note = protein_3e9fd00
  REGION 6..147: note = RuvC_domain
  SITE 9: note = RuvC_P1
  SITE 52: note = RuvC_P2
  SITE 87: note = RuvC_P3
  SITE 89: note = RuvC_P4
  SITE 92: note = RuvC_P5
  REGION 211..307: note = Tnp_domain
  SITE 219: note = Tnp_P1
  SITE 249: note = Tnp_P2
  SITE 257: note = Tnp_P3
  SITE 258: note = Tnp_P4
  SITE 270: note = Tnp_P5
MEIALMGVDLGKNSCSITGLDATGQVVFRRRVHRDGVVKLADKYPNCIVAMEACCGAHFLGRLLRAGGHEVRLMSPEYVRPYVKAQKNDDRDSEAIAEAATRPTMRFVELKSEEQLDMQILHRARDRLVAERTALANQIRAILLERGITIPQGRQKLESGLPKVLETHDLMLSDRIRTLLQELNEELQNLTRRITQFDKEFEMFSKSNDACRRLSTIPGIGALNATAFVAAIDNAQTFARGRDLAAWLGLVPRQMTTGGKPKLLGISKRGNSYLRRMLIHGARAAMPHIARLETPTGAWLRRLLARANPNVVVVALAAKMARVIWAVLQRRTTYQQAAA

SEQ ID NO: 14983 - protein, 312 aa, unidentified
  source 1..312: note = protein_608b61f
  REGION 6..157: note = RuvC_domain
  SITE 9: note = RuvC_P1
  SITE 53: note = RuvC_P2
  SITE 93: note = RuvC_P3
  SITE 95: note = RuvC_P4
  SITE 98: note = RuvC_P5
  REGION 189..273: note = Tnp_domain
  SITE 197: note = Tnp_P1
  SITE 226: note = Tnp_P2
  SITE 234: note = Tnp_P3
  SITE 235: note = Tnp_P4
  SITE 246: note = Tnp_P5
MIEHTIGIDVSKDTLDVHLHPAGDHRQFENTPKGFRAILKWIAGRPVARLVFEATGPYHRAFERAMGEAGLPLCKVNPRQAKRFGEAIGQLAKTDRMDAAMLARFGALIEPSVRAAPSKIISDLKDLHVARIALVKDRTAAKNREKNLTSSLLKKHVRQRLSSIESHLKEIEEAIRALIDTDDQLRRKFEILVSIPGIADRSAFAILIDMPELGTLEAQEAAALSGTAPMTRQSGKRTGKAFVSGGRVNVRQALYMPALVAARFNPDLRDKYKEFTARGKPPKVAITAIMRKLVILANALIRDDREWSPKVA

SEQ ID NO: 14984 - protein, 399 aa, unidentified
  source 1..399: note = protein_b952ea7
  REGION 8..173: note = RuvC_domain
  SITE 11: note = RuvC_P1
  SITE 62: note = RuvC_P2
  SITE 104: note = RuvC_P3
  SITE 106: note = RuvC_P4
  SITE 109: note = RuvC_P5
  REGION 273..358: note = Tnp_domain
  SITE 281: note = Tnp_P1
  SITE 311: note = Tnp_P2
  SITE 319: note = Tnp_P3
  SITE 320: note = Tnp_P4
  SITE 331: note = Tnp_P5
MNPQTLRVGIDVGSARHRVAVGLPDGQLIDEFDIEHHADGFSQFFQRINTHEDRHRLPVSVAMEGHNGWARPLDGQIRRRGWQLYNVNNLKLARYKEIFPAPAKTDTIDARRILELFQLSAHLPVARNALQEIAPTPAVNDKLKRLTRRRKQLVVERVRIVNRLHADLHAISPGLAASTGDVANVWFLNFLTCRDALPELAKLHMKSLLAIPAVGQKYASRIQAWQHHASFAPEVEFVGAMIQQDARRVQALNADIKTLDCSIQATALDSALAQTMLSIPGFGDTSAAELAGEIGTMDRFESEAGLAVYAGMAALDNSSGKKTAARAPRQVNTRAKAAMMVALARHYPQVGASRAYYNKKRAEGKKHNQAVRALGRHLIRVIWALVKSGRKYEDRSKNT

SEQ ID NO: 14985 - protein, 398 aa, unidentified
  source 1..398: note = protein_c027a85
  REGION 10..164: note = RuvC_domain
  SITE 13: note = RuvC_P1
  SITE 61: note = RuvC_P2
  SITE 101: note = RuvC_P3
  SITE 103: note = RuvC_P4
  SITE 106: note = RuvC_P5
  REGION 271..356: note = Tnp_domain
  SITE 279: note = Tnp_P1
  SITE 308: note = Tnp_P2
  SITE 316: note = Tnp_P3
  SITE 317: note = Tnp_P4
  SITE 329: note = Tnp_P5
MITSDVDIFLGLDVGKTDHWACAVTKDGTKIWNKTLPNDEAKLVSVYLKLMTQGTVLVVVDQPATIGALAVAVAQHLGIPVAYLPGLTMRRIADMYPGTAKTDEKDAFIIADAARTMPHTLRSIQVSDEDEATLGMLTGFDLDLARQITQTSNRIRGLFTQIHPPLERILGPWLEHDAVLEVLASWPTPAQLKHAGKARIDAKLKKQGARRHTAWAGAIMDALYEQTVVVVGTDAAGLVIPHLARQLISLHAQRVDVATHLETMVEAHPLYQVLTSMPGVAVRTAAIIIAETSGKTFPSAAALSSYAGLAPTTRQSGTSIKSERVSHSGNKRLKRALFLSAFASIRFDPTCRAYYDRKRAQGKRHNQALIALAHRRLTVLFAMIRDGSLYDVPELKIA

SEQ ID NO: 14986 - protein, 401 aa, unidentified
  source 1..401: note = protein_d5afd73
  REGION 14..168: note = RuvC_domain
  SITE 17: note = RuvC_P1
  SITE 65: note = RuvC_P2
  SITE 105: note = RuvC_P3
  SITE 107: note = RuvC_P4
  SITE 110: note = RuvC_P5
  REGION 276..359: note = Tnp_domain
  SITE 283: note = Tnp_P1
  SITE 312: note = Tnp_P2
  SITE 320: note = Tnp_P3
  SITE 321: note = Tnp_P4
  SITE 333: note = Tnp_P5
MQNFPLHDAVDVFIGVDVGKGYHHAVALDRNGRRLYNKALPNDEAQLRALINELKAHGQLLFIVDQPATIGALPLAVARDAGALVAYLPGLAMRRIADLHAGEAKTDARDAAVIADAARTMPHTLRSLRLADEPLAELTMLCGFDDDLAEQVNQTSNRIRGLLTQIHPALERVLGPRLDHPAVLDLLEHYPSPAALAAAAQKTLANRLIKLAPRIGKSLAADIAQALTEQTVVVPGTHAATLVMPRLAQQLAALRKQRDEMAAEVERLVQSNPLWPVLSSMPGVGLRTAARLLTEVAHKAFASAAHLAAYAGLAPVTRRSGSSIRGEHPSRRGNKVLKRALFLSAFAALRDPISKAYYSRKIQQGKRHNQTLIALARRRCDVLFAMLRNGTFYQPKTATSA

SEQ ID NO: 14987 - protein, 405 aa, unidentified
  source 1..405: note = protein_44d7cb6
  REGION 17..172: note = RuvC_domain
  SITE 20: note = RuvC_P1
  SITE 70: note = RuvC_P2
  SITE 110: note = RuvC_P3
  SITE 112: note = RuvC_P4
  SITE 115: note = RuvC_P5
  REGION 278..365: note = Tnp_domain
  SITE 286: note = Tnp_P1
  SITE 317: note = Tnp_P2
  SITE 325: note = Tnp_P3
  SITE 326: note = Tnp_P4
  SITE 338: note = Tnp_P5
MGGDSMSGLKGSFDGFVGIDVSKDKFDACGITGDETKLFQFSTTMDRKGFEKLKGHLAAVSISSVLIGMESTASYHVNLFSYLVSEGYRVILINPLLISNYVKMQLRKTKTDKKDAVVIAQFLLTNGDTLIQRATPSLISDLRDLSRQRESLVDEMTSLKIEIKQLLNITFPELEHMAGIFTKSILKLLQQYPSAFALRDADLGQLSQMLIADSYGHKREAFAAALIKAARSSIGSKSFAKEMILKQKIALLLHIEDALQEITGMFIEMSRKLMDEEIDLMTSLKGIGEKAAANFLIEMGGDINQFERSGKIIAMAGLDPAVYQSGKHEGKGRITKRGNRHLRKIIWLMTTKVIQYTDTFSVYYLKRRKEGLPYKMAVLATAHKLIRVIYAMLTHRTTFCAQVNS

SEQ ID NO: 14988 - protein, 324 aa, unidentified
  source 1..324: note = protein_9725171
  REGION 7..149: note = RuvC_domain
  SITE 10: note = RuvC_P1
  SITE 53: note = RuvC_P2
  SITE 88: note = RuvC_P3
  SITE 90: note = RuvC_P4
  SITE 93: note = RuvC_P5
  REGION 212..301: note = Tnp_domain
  SITE 220: note = Tnp_P1
  SITE 250: note = Tnp_P2
  SITE 258: note = Tnp_P3
  SITE 259: note = Tnp_P4
  SITE 271: note = Tnp_P5
MTEVTTIGLDLAKTVFQVHGVDASGVVRVRRALRRSRVLAFFAKLPPCLVGMEACATGHYWAREIAKLGHEVRLIAPAYAKAYVRRNKNDAADAEAICEAVSRPSMRFVAIKSETQQAAAGIHRVREMLVKQRTMLINTLRGLMAEYGIVVAERPRLVGELVAILADPADERIPAPLHDGLMALVETLRGLEQRIERIEQQIVGWGRDNATCRHLITIPGYGPILSTAMAAMVIDPAAFTSARHFAASLGLVPRQEGTGGKVKLGPISKRGNGYLRRLLVNGAMSVLCSRRAKEDPWLAKLLETKERRSSPVRSPTRWHASPGR

SEQ ID NO: 14989 - protein, 349 aa, unidentified
  source 1..349: note = protein_16edf85
  REGION 6..164: note = RuvC_domain
  SITE 9: note = RuvC_P1
  SITE 68: note = RuvC_P2
  SITE 106: note = RuvC_P3
  SITE 108: note = RuvC_P4
  SITE 111: note = RuvC_P5
  REGION 212..299: note = Tnp_domain
  SITE 220: note = Tnp_P1
  SITE 250: note = Tnp_P2
  SITE 258: note = Tnp_P3
  SITE 259: note = Tnp_P4
  SITE 272: note = Tnp_P5
MKKIIIGIDVSKEKIDASAIDVRNSQLGVLKLDYQAFENRPMGFRRMLVWARRLLKGVTLEEILFCCETTGGYDRSLCDYIYAKGLDIWRESSLQIKKSSGLRKGKDDKADSLTIAEYAMRHIDKAVSYISPSETVRELKALLLYRRKLEQEKTSKKVRVAELKSTAAKSRSVSFILRDAQKSIRVLEKSIKDCEKQILALYDSDEELKKSYDHLISIRGIGIVNATAMIAYSNNFKNITSSRKLASYYGIAPFRERSGTTIDKKAMVKCYSSSMLRAYLTQAAENTIREHGIYHDYYTRLSARGKCHGIALNNVKNKLLHLSLSLITNDMDYEENHEVLRAIRKVQAG

SEQ ID NO: 14990 - protein, 341 aa, unidentified
  source 1..341: note = protein_a4db85f
  REGION 7..148: note = RuvC_domain
  SITE 10: note = RuvC_P1
  SITE 53: note = RuvC_P2
  SITE 88: note = RuvC_P3
  SITE 90: note = RuvC_P4
  SITE 93: note = RuvC_P5
  REGION 209..298: note = Tnp_domain
  SITE 217: note = Tnp_P1
  SITE 247: note = Tnp_P2
  SITE 255: note = Tnp_P3
  SITE 256: note = Tnp_P4
  SITE 268: note = Tnp_P5
MDHATLVGIDLGKHSFHVHGQDSKGKAVFRRKLGRKQLIEFFATYATCTVVMEACAGSHYMARKLATFGHEVRLISPQFVRPFVKSNKNDFVDAEAICEAASRPAMRFVTPKTESQQTLSVLHRVRETMVRDRTRTINQMHGFLLEFGVSLPTGKTGVVRLPELLSFHALPPRLVAILERLHEHFKYLQQQITELDRELAHQLADDDVGQRLMSIPGIGPITASVLASEMGDGKQYRCSRDFAASLGLVPRQYSTGGRSNLLGISRRGDKNIRSLLVQCARAYMRCLEKRTGHLADWTRALLTRRHSNVVACALANKLARTAWAIVARHTTFDSGRATASA

SEQ ID NO: 14991 - protein, 414 aa, unidentified
  source 1..414: note = protein_f9f87b5
  REGION 14..166: note = RuvC_domain
  SITE 17: note = RuvC_P1
  SITE 65: note = RuvC_P2
  SITE 103: note = RuvC_P3
  SITE 105: note = RuvC_P4
  SITE 108: note = RuvC_P5
  REGION 273..359: note = Tnp_domain
  SITE 281: note = Tnp_P1
  SITE 312: note = Tnp_P2
  SITE 320: note = Tnp_P3
  SITE 321: note = Tnp_P4
  SITE 332: note = Tnp_P5
MSVAEEPTGTPPCAGVDWAKDDHAVCIVGAGGEALQRFMVSHDRAGLKDMVRRLLRSGVDEVGIERPDGPIVDALLMAGLTVLVISPGQVKSLRSRYGSAGNKDDRFDAYVLADVVRTDRRRLRPLERDTAATTALRTTVRARRDIVIHRVAVANQLRAHLQIVFPAAAGLFDKIDSDVSLQFLERFSTQGQADWLSPKRLGSWLASIGYSGGTDPAVIHARITAAPRGTTGPDAEILAGTTHAYVAVLRTLNMQIRTLAAGIAEQLDVHPDAKIFTSLPRSGSVRAARLLAEIGDARGRFPTASSLACLAGVAPSTRQSGKVKAVTFRWGANKELRDALCDFAGDSRHSNPWAAAVYAKAIARKCDHQHAVRILARAWAGIIWRCWQDNTTYDPANHGALQHLLNQDQQTVAA

SEQ ID NO: 14992 - protein, 338 aa, unidentified
  source 1..338: note = protein_483ae76
  REGION 2..144: note = RuvC_domain
  SITE 5: note = RuvC_P1
  SITE 48: note = RuvC_P2
  SITE 83: note = RuvC_P3
  SITE 85: note = RuvC_P4
  SITE 88: note = RuvC_P5
  REGION 206..293: note = Tnp_domain
  SITE 214: note = Tnp_P1
  SITE 244: note = Tnp_P2
  SITE 252: note = Tnp_P3
  SITE 253: note = Tnp_P4
  SITE 265: note = Tnp_P5
MIGVDLAKSVFQLHAASMTGQPKFRKKMPRSAFTAFMAAQPPAVIVMEACGSAHYWAREMIRLGHEVKLIAPHYVRPFVKRQKNDAADAEAIVIAAQRPEMRFVDPKSEEQQSSAILFRGRERLVHQRTELVNAVRAALYEYGHVVPQGINQLSRIADILDEKHSDLPTLMRDECRDLLAQIAEKTERINMRTKKIKALAAETDAARRLQTIPGVGPLTALAVRAFAPSMESFRCGRDFAAWLGLVPRQFSSGGRERLGRISKAGQADIRRLLIIGAMSRLNWMGRKSIPENSWLADMLARKPRMLVAIALANKMARTIWALIKNGNDYRIPAHAAVA

SEQ ID NO: 14993 - protein, 345 aa, unidentified
  source 1..345: note = protein_009a237
  REGION 6..147: note = RuvC_domain
  SITE 9: note = RuvC_P1
  SITE 52: note = RuvC_P2
  SITE 87: note = RuvC_P3
  SITE 89: note = RuvC_P4
  SITE 92: note = RuvC_P5
  REGION 211..310: note = Tnp_domain
  SITE 219: note = Tnp_P1
  SITE 249: note = Tnp_P2
  SITE 257: note = Tnp_P3
  SITE 258: note = Tnp_P4
  SITE 270: note = Tnp_P5
MEIFTLGIDLAKTTFHLVGMNQRGEVVVWKRMSRTQLLHFTANLKVELIGMEACGGSHFLGRALREQGHEVRIIPAQYVKPYVKTNKNDYIDAEAIAEAVGRPTMRFVLVKSEEQLDLQSVHRVRERWVMRRTAVVNQIRGLLLERGITLRKGRRYVDAALPGILADATSKLSGSLLVLLTELKLELAQLAEKIDRSDTAIAQIAGQNEACQRLVAMPGIGPVTATAIIATIGNGAAFRKGRDFAAWLGVVPEEHSTGGKQTLWELPRRGNKYLRRLFVQGARALMQHKAKQSSGLTAWLTQLTARTHHNIAIVVLANKLARMAWAVLAKNEVYRPPLIEVTAAT

SEQ ID NO: 14994 - protein, 343 aa, unidentified
  source 1..343: note = protein_5ee4888
  REGION 7..149: note = RuvC_domain
  SITE 10: note = RuvC_P1
  SITE 53: note = RuvC_P2
  SITE 88: note = RuvC_P3
  SITE 90: note = RuvC_P4
  SITE 93: note = RuvC_P5
  REGION 211..295: note = Tnp_domain
  SITE 219: note = Tnp_P1
  SITE 249: note = Tnp_P2
  SITE 257: note = Tnp_P3
  SITE 258: note = Tnp_P4
  SITE 270: note = Tnp_P5
MTKDTMIGVDLAKNVFQLHAASMTGQPQFCKKLSRQSFTRFMAEQPPAVVVMEACGSAHYWTREMIRLGHEVKLIAAQYVRPFVKRQKNDAADAEAIVIAAQRPEMRFVEPKSAEQQSRAILFRARERLVHQRTELVNALRASLYEYGHVVPQGIRQINRIAEILDAPGSDLPDLMREECQDLLEQIAEKTVRINSRTMKIKTLAAEAATARRLQTIPGVGPMTALAVEAFAPPMENFQCGRDFAAWLGLVPRQFSSGGKERLGRIFKAGQSDIRRLLIIGAMSRLNWLGSKSIPEGSWLARMAARKPRMLVAIALANKMARTIWALTTKNEDYRAPAQAVAA

SEQ ID NO: 14995 - protein, 344 aa, unidentified
  source 1..344: note = protein_f7efe0a
  REGION 5..151: note = RuvC_domain
  SITE 8: note = RuvC_P1
  SITE 53: note = RuvC_P2
  SITE 91: note = RuvC_P3
  SITE 93: note = RuvC_P4
  SITE 96: note = RuvC_P5
  REGION 211..296: note = Tnp_domain
  SITE 219: note = Tnp_P1
  SITE 249: note = Tnp_P2
  SITE 257: note = Tnp_P3
  SITE 258: note = Tnp_P4
  SITE 270: note = Tnp_P5
MNQYIGLDISLKETAISIRQDGKRIWRGKCPSDPTLLAGMIRKHAPHARRVVFETGPLSTWFYHALIAKGMPAICIEARHAQKVLNETLNKTDANDADGLAQLAEAGFYKAVRVKAFDSMLTRTLVGARNHLLNISIQLSNQIHGLMKTFGLIVPKGTGRVFDGQVKALLDGHDSLARIILPLLDAWRDIRRHAAELDRQLVLAARQSHAAKRLMTIPGIGAITALSYVAAIEDPANFRTSRSVGAWLGLTTRRYQSGEVDYDGHISRRGDSHLRGLLYEAATVLLTRTGTRAECNLRAWGLKLRERLGFKRAAVAVARKLAVIMHSMLTTGEEFNASAGADLA

SEQ ID NO: 14996 - protein, 333 aa, unidentified
  source 1..333: note = protein_9f7cb41
  REGION 4..152: note = RuvC_domain
  SITE 7: note = RuvC_P1
  SITE 55: note = RuvC_P2
  SITE 96: note = RuvC_P3
  SITE 98: note = RuvC_P4
  SITE 101: note = RuvC_P5
  REGION 197..284: note = Tnp_domain
  SITE 205: note = Tnp_P1
  SITE 235: note = Tnp_P2
  SITE 243: note = Tnp_P3
  SITE 244: note = Tnp_P4
  SITE 257: note = Tnp_P5
MNYAGIDVSHKELVIVVSVKGKAHKAKTFENTASGHKAIIQLLSKLKGESKVCIEATGVYHFDLAVALSRAEGIEVMVINPKASHNFAKVLMKRSKTDAVDAEILAVYCERMPFEAWQRPADEHIALRAIARRIAALTKLKTQTKNQLHALKATEETPVLVIEYTEELIEVVDKQIQVHRESARQLIQQHDELAEAFALITGIKGIAVASAVQMLGELMILPKDMSAKQWVAYAGLDPRQFESGSSVTKKPRISKAGNKFVRRALYMPALVATCHEPHIKGYYTHMIQDNGLKKIQAVCAVMRKLLHAIHGMLKAKKEFDGTRFYTFPVEANS

SEQ ID NO: 14997 - protein, 262 aa, unidentified
  source 1..262: note = protein_35abd0a
  REGION 7..149: note = RuvC_domain
  SITE 10: note = RuvC_P1
  SITE 53: note = RuvC_P2
  SITE 88: note = RuvC_P3
  SITE 90: note = RuvC_P4
  SITE 93: note = RuvC_P5
  REGION 209..262: note = Tnp_domain
  SITE 217: note = Tnp_P1
  SITE 247: note = Tnp_P2
  SITE 255: note = Tnp_P3
  SITE 256: note = Tnp_P4
MNEISIAGVDLAKQVFQLHGATSDGRAVFRKKLSRPQFAKFMAALPPCIVAMEACGTAHYWGRELARLGHDIRLIPPIYVKPFVKRQKNDSADAEAIAEAAQRPTMRTVVVKSAAQQARAMLFRTRDLLVGQRTQLVNALRGHLAEHGIVLGKGIGNVERLALRMEEDNLPDLVRHLGRLYLDQIARLGAEIEKLDNRIVAAAKENGVARRLQTMPGIGPICAMAITAFAPDMREFRRGRDFAAWLGLVPRQHSSGGKQKLG

SEQ ID NO: 14998 - protein, 325 aa, unidentified
  source 1..325: note = protein_3c30fe3
  REGION 6..147: note = RuvC_domain
  SITE 9: note = RuvC_P1
  SITE 54: note = RuvC_P2
  SITE 92: note = RuvC_P3
  SITE 94: note = RuvC_P4
  SITE 97: note = RuvC_P5
  REGION 197..284: note = Tnp_domain
  SITE 205: note = Tnp_P1
  SITE 235: note = Tnp_P2
  SITE 243: note = Tnp_P3
  SITE 244: note = Tnp_P4
  SITE 257: note = Tnp_P5
MKQVFIGIDVSAATLDICIKVNDSFTSVVINNQIKDIRKFLQPFQQQSVMIGMENTGRYNWAFYEALSGFEFTTYVISPLHLKKSMGLVRGKNDKIDAERIVHFLVKNYTELRPWVCPGSTIQKLKVLITERNYRIKSKRQLSTMDKDYAKMRTLGLEKPLARMNKRLKAALDAQILEIEKEIEQLLKGDPEIKKQVALIRSVPGVGKVLSWVIIAKTNGFSSIRTPREMACYCGVAPFEYQSGTSIYRRPAVSHLADKTLKSLLHMGAMSAIRLQNDLGEYYRRKVAEGKNKMSVINAVRNKIIHRIYAVIKNQIIYQNNLVLS

SEQ ID NO: 14999 - protein, 331 aa, unidentified
  source 1..331: note = protein_5827f70
  REGION 7..161: note = RuvC_domain
  SITE 10: note = RuvC_P1
  SITE 62: note = RuvC_P2
  SITE 100: note = RuvC_P3
  SITE 102: note = RuvC_P4
  SITE 105: note = RuvC_P5
  REGION 205..292: note = Tnp_domain
  SITE 213: note = Tnp_P1
  SITE 243: note = Tnp_P2
  SITE 251: note = Tnp_P3
  SITE 252: note = Tnp_P4
  SITE 265: note = Tnp_P5
MNYSHFVGLDVGKKTFDASLMSADEKELSHKSFDNTSEGIQSLLDWIAGYHLPLSQLLFCAENMGSYVTELSVSSVSMGFSLALVCPLTIKKSMGLQRGKNDRIDAKRIANYAVLHYRKLELYKLPDKDLVRLRGWIIIRDNLVKQKVSSIKLLETFSQMAKLADVTEFISFLEEQLKSIKEKILEVEEDMEQLIAASTSLYTNYLLLRNIKGIGIINAIVLLCVTNNFQRFDNPRRFACYCGVAPFEHTSGISIRGKTQTSSLANKEVKVYLTRAAITAISWDPQMKAYYKRKIAEGKHKASVINAVRAKIIARSFAVIRRQTPFVTLVV

SEQ ID NO: 15000 - protein, 346 aa, unidentified
  source 1..346: note = protein_c229f9c
  REGION 6..148: note = RuvC_domain
  SITE 9: note = RuvC_P1
  SITE 52: note = RuvC_P2
  SITE 87: note = RuvC_P3
  SITE 89: note = RuvC_P4
  SITE 92: note = RuvC_P5
  REGION 211..297: note = Tnp_domain
  SITE 219: note = Tnp_P1
  SITE 249: note = Tnp_P2
  SITE 257: note = Tnp_P3
  SITE 258: note = Tnp_P4
  SITE 270: note = Tnp_P5
MKITTIGIDLAKEVFQIHGVDMYGKAVLRKQLRRSEMARFFANLDPCLVGMEACGSSHHWARKLGEFGHTVKLMSPQFVKPYVKTNKHDMADAEAVCEAVSRPNMRFVPIKDVEQQAILSMHRARQGFVKARTAQANQMRGLLSEFGIVMPQGIRSINKRMPDILEDAENGLPGTMRRLLERLNDHLKELDRQVEELELQIKLWHKKNEASKKLEANPGIGPITASAIVATVWNATEFKNGRQLSAWFGLVPKQCSSGGKQKLLGISKRGDTYLRTLLIHGARAVIRFAENKVEPESWLSKLIARRNKNVAAVALANKNVRIIWALLAKDTTFHPNHTAAASAAVA

SEQ ID NO: 15001 - protein, 387 aa, unidentified
  source 1..387: note = protein_1bb6fa9
  REGION 4..159: note = RuvC_domain
  SITE 7: note = RuvC_P1
  SITE 58: note = RuvC_P2
  SITE 98: note = RuvC_P3
  SITE 100: note = RuvC_P4
  SITE 103: note = RuvC_P5
  REGION 263..350: note = Tnp_domain
  SITE 271: note = Tnp_P1
  SITE 301: note = Tnp_P2
  SITE 309: note = Tnp_P3
  SITE 310: note = Tnp_P4
  SITE 323: note = Tnp_P5
MIFIGIDIAKNSHFASAVNSDGEVLVKPFSFENSKDGFNIFLNKFKDYPIAECFVGLESTGHYGDNLINYLFPKGFRIGMINAIQTNSLRNSNIRKTKNDKIDTFLIAKCLILGDYTLVQEKDIKLIKLRTLCRFRFDIIQSQTRLKTQLTSCLDLVFPELYNFFKGNLHLNTSYKLLEKYSTPKEISKVRIDTLSKLFHSASRGKYRYEDAERLKGIAKESIGIDNTAISIQIKFLIKQLDLLKEQISDIDKNIKKFMDELNSPILTIPGVGYTIGAIILSEIGNINRFSNPTKLLAYAGLDPSVKQSGNFNAKTTRISKRGSKHLRYAINRAAFVIVYNNDVFYDYYITKRSKGKSHYNALGHVSNKLVRVIFKLLTENIPFNLS

SEQ ID NO: 15002 - protein, 373 aa, unidentified
  source 1..373: note = protein_89d0041
  REGION 14..148: note = RuvC_domain
  SITE 17: note = RuvC_P1
  SITE 65: note = RuvC_P2
  SITE 105: note = RuvC_P3
  SITE 107: note = RuvC_P4
  SITE 110: note = RuvC_P5
  REGION 251..335: note = Tnp_domain
  SITE 259: note = Tnp_P1
  SITE 288: note = Tnp_P2
  SITE 296: note = Tnp_P3
  SITE 297: note = Tnp_P4
  SITE 309: note = Tnp_P5
MTESRDYESVQVFIGVDVGKDTHHAVAVNRSGKRLFDKALPNDENKLRALISDLKQHGQILLVVDQPATIGALPVAVARSEGVLVGYLPGLAMRRIADLHSGEAKTDARDATIIAEAARTLPHALRSLKLADEQIAELSMLIHPALERVLGPRLDHPAVLDLLQRYPSPEKLALLGEKKLATQLCKLAPRLGKRLAADITQALTQQTVIVPGTNAAVVVLPRLALQLITLRKQREEVALEVEQRVLAHPLYPVLTSMPGVGVRTAARLLTEVACRAFASAAHLAAYAGLAPVTRRSGSSIRGEHPSRRGNKRLKRALFLSAFAALRDPISRAYYTRKMSQGKRHNQALIALARRRCDVLFAMMRDGTFYTPQV

SEQ ID NO: 15003 - protein, 425 aa, unidentified
  source 1..425: note = protein_34de4df
  REGION 9..158: note = RuvC_domain
  SITE 12: note = RuvC_P1
  SITE 63: note = RuvC_P2
  SITE 98: note = RuvC_P3
  SITE 100: note = RuvC_P4
  SITE 103: note = RuvC_P5
  REGION 260..348: note = Tnp_domain
  SITE 268: note = Tnp_P1
  SITE 299: note = Tnp_P2
  SITE 307: note = Tnp_P3
  SITE 308: note = Tnp_P4
  SITE 319: note = Tnp_P5
MKVTYQTCCGVDVHKSFLVATIIKTTAGIEPSYQKKRFSTFNNSIFRLLNRGFLKMNAMMSVWNPQVNTGFLSLIFSKIKSTLPLLIPNGLKAVKGNKDDTKDSKWIGDLFRLGLVKSSYIPCRLIRILREYTRYRYKLVSCRSSEKNRYQNALTVCNIALDSVVSDIFGKSSSSIIDYLLEQSGTTINHEEIASKLLKSLKSKEDAVIESIEGYQMTDAQKYRMRLIRAHMDYITAEINDIDKQIESLISSDPDYDKAIRLLTTIPGVKRDSAITIISEIGIDMSQFCNSKRLCCWAGLTPGNNESAGKKKSVRITRAGVYLKPALVQCAHAAVKSDKSPYYKTKYESLVKRRGKKRAVIAIARMILIAIYRMLSTGEVWNPSDLYKIDMPAPLAEKQKAKAIKQAKKLLQKEGLLPPDEPLAS

SEQ ID NO: 15004 - protein, 321 aa, unidentified
  source 1..321: note = protein_b39c6c4
  REGION 8..149: note = RuvC_domain
  SITE 11: note = RuvC_P1
  SITE 52: note = RuvC_P2
  SITE 92: note = RuvC_P3
  SITE 94: note = RuvC_P4
  SITE 97: note = RuvC_P5
  REGION 191..278: note = Tnp_domain
  SITE 199: note = Tnp_P1
  SITE 229: note = Tnp_P2
  SITE 237: note = Tnp_P3
  SITE 238: note = Tnp_P4
  SITE 251: note = Tnp_P5
MNKYKEIYGIDISKAVFDVYGSKSGHNQFKNDAKGFVSFLKHLPKDVLVVMEATGYYHYRLAQFLYTSGVSVSVINPLSVKRFIQMKLAKVKTDKSDAKAISEYGEMNEVPLYTALTDIQAECLQLFRLLDSYIKHRTATKNKLKGEEVLGVPSKIVYRSLKRNLKHLNKEVLELESRLLELVKQDQQHQLTLLKSIPGMGIKTALFLIVVTDGFKNFENASQLCSYVGITPTIRESGSSVRGRSRISKVGNKKLRNLLFLCAFSACKHNKACKEIYERLVAKGKSKKLALIAVANKLLKQAFAIAKSGLPYDENFVSKLA

SEQ ID NO: 15005 - protein, 339 aa, unidentified
  source 1..339: note = protein_53f61f4
  REGION 7..149: note = RuvC_domain
  SITE 10: note = RuvC_P1
  SITE 53: note = RuvC_P2
  SITE 88: note = RuvC_P3
  SITE 90: note = RuvC_P4
  SITE 93: note = RuvC_P5
  REGION 211..298: note = Tnp_domain
  SITE 219: note = Tnp_P1
  SITE 249: note = Tnp_P2
  SITE 257: note = Tnp_P3
  SITE 258: note = Tnp_P4
  SITE 270: note = Tnp_P5
MEEIRTIGLDLAKSVFQVHGISAAGGVVVRRKLRRSALLEFFAALPPALVGMEACDGAHHWARELTRLGHTVRLMPPAYVKPYVKRGKTDAADAEAICEAVTRPTMRFVPVKTEAQQASLMELKVRDMLVRQRTQTINALRSHLAEYGIVAAQGRKFAELIAVVRDGDDTRLPEMAREALGDLVAQIEALEGRIERLDSRMVRHAREDEAVRRLASIPGIGAISATALAAMLPNPHGFASGRHFAASLGLTPKPHSSGGKERLGRISRQGNSVLRRLLVPGATSRLRNARRNPEAADWATRLLARRPFKVVAVALANKMARITWALLARGGTYTTTATA

SEQ ID NO: 15006 - protein, 391 aa, unidentified
  source 1..391: note = protein_e5ead70
  REGION 6..163: note = RuvC_domain
  SITE 9: note = RuvC_P1
  SITE 61: note = RuvC_P2
  SITE 102: note = RuvC_P3
  SITE 104: note = RuvC_P4
  SITE 107: note = RuvC_P5
  REGION 265..351: note = Tnp_domain
  SITE 273: note = Tnp_P1
  SITE 303: note = Tnp_P2
  SITE 311: note = Tnp_P3
  SITE 312: note = Tnp_P4
  SITE 324: note = Tnp_P5
MALYFVGIDISKYKHDCCIISAADQQVVAKFTFRNDREGFDTLVDTLQSFAEPMDVRIGFEATAHYALNLELFLENALLTFMEVNPVLISKYHESLSLRKTKTDPIDCEIIARWLMTVDYKPHPKGFYHSYSLKSLTRLRDRLVRQRSLYLVKLTNVLDHTFPEFKPFFGERFSKTALYLLQNYGTAEKMSHMNSASYENLRSISRGKFSPQQFLKLKELARDTVGVSNSIFTTELNSLLDLYSNISENISDIEDQIIKLINDVHPHFMTIPGIGPLSAAVIYAEFGDISNFSSPAKMLAFAGLEPKINDSGTENHGGRMVKRGSAQLRYVIMNCTLPLIMHDMTFAKYYAKKRKEGKPHRVALTHLAKKLVRVIFALERQQIDYDPALIR

SEQ ID NO: 15007 - protein, 348 aa, unidentified
  source 1..348: note = protein_3c28aa5
  REGION 10..152: note = RuvC_domain
  SITE 13: note = RuvC_P1
  SITE 56: note = RuvC_P2
  SITE 91: note = RuvC_P3
  SITE 93: note = RuvC_P4
  SITE 96: note = RuvC_P5
  REGION 217..304: note = Tnp_domain
  SITE 225: note = Tnp_P1
  SITE 255: note = Tnp_P2
  SITE 263: note = Tnp_P3
  SITE 264: note = Tnp_P4
  SITE 276: note = Tnp_P5
MQSTATLPVIGMDIAKNVFQLHVVDAETGELERHKLRRDRVTTFFANRQRSLVALEACGGAHHWARTLQALGHEVKLLPAKHVRPFVLRDKTDARDAQAIWVAAQQLHIKAVPVKNEQQQACLTLHRMRAQLMKVRIMQTNALRGLLYEFGIVLPEGHRVLLKRVQDELAKAQEQARLPGVVVASVQDQLRRIDSLQDDIDQLDKRLASMVKQNQHMQALQAIPGIGPLTATALVSTATDLSSFESGRQFAAWLGLTPRQTGTGGKTRQLGISKRGDPYVRTMLMHGARAVIARRQRSSWIERLLLRRPYSVVVAALANKLARTVWAVLVKGKAFDQVKWNPVDLAAV

SEQ ID NO: 15008 - protein, 382 aa, unidentified
  source 1..382: note = protein_7b56e43
  REGION 12..137: note = RuvC_domain
  SITE 15: note = RuvC_P1
  SITE 58: note = RuvC_P2
  SITE 93: note = RuvC_P3
  SITE 95: note = RuvC_P4
  SITE 98: note = RuvC_P5
  REGION 216..301: note = Tnp_domain
  SITE 224: note = Tnp_P1
  SITE 254: note = Tnp_P2
  SITE 262: note = Tnp_P3
  SITE 263: note = Tnp_P4
  SITE 275: note = Tnp_P5
MSQKLNAAIAVIGIDIGKNSFHIVGHDHRGAIVLRQKWSRGQVETRLANLPPCLIGMEACVGAHHLSRKLQMLGHDARLMPAKYVRPYSKGQKNDFRDAEAIAEAVQRPTMKFVATKTADQLDLQARTASAIDWLVSVPASSIRSVRSCWSGASPCGGLRSLRFELPDILATRTDVLSPRMLRIIEGLAEDWRRLDERIEGLSSEIETLALQDKACERLMTVPGIGPIISSAMVAAIGTGDVFSKGRDFGAWLGLVPKQISTGDRTILGSISRRGNRYLRALFVQAAWVVLVKVRCWERYGLKSWIKPPRNDCTTTCWRLRSPTSSPGSPGRSSTRDAPSRASRRRRRRPDLLDPRAVLGAVKARPGSRRASKTSGQHDGRP

SEQ ID NO: 15009 - protein, 341 aa, unidentified
  source 1..341: note = protein_cee6a11
  REGION 7..149: note = RuvC_domain
  SITE 10: note = RuvC_P1
  SITE 53: note = RuvC_P2
  SITE 88: note = RuvC_P3
  SITE 90: note = RuvC_P4
  SITE 93: note = RuvC_P5
  REGION 209..296: note = Tnp_domain
  SITE 217: note = Tnp_P1
  SITE 247: note = Tnp_P2
  SITE 255: note = Tnp_P3
  SITE 256: note = Tnp_P4
  SITE 268: note = Tnp_P5
MQSTALVGIDLGKQSFHLHGQDARGKALWRKKLNRKQLTEFFATLEPCAVVMEACAGAHWMARKLTGFGHEAKLISPQFVRPFVKGNKNDFVDAEAICEAASRPSMRFVSPKTETQQTLSALHRVRESFIRDRTRAVNQIHGFLLEFGISLPTGMAVIKRLPVVLCEHTLPPRMVAILEGLHSHVGYLSERIAEIDKEMSRQLAEDDLGQRLLTMPGVGPVTASILAAEMGDGKQYGCGRDFAASLGLVPRQYSTGGKANLLGISKRGDKNIRRLLVQCARSYMQRLDRQTGQLAHWVRSMLLRRHSNVVACALANKLARIAWALATRHTEFNPGPDLKTA

SEQ ID NO: 15010 - protein, 345 aa, unidentified
  source 1..345: note = protein_001fad1
  REGION 5..152: note = RuvC_domain
  SITE 8: note = RuvC_P1
  SITE 55: note = RuvC_P2
  SITE 92: note = RuvC_P3
  SITE 94: note = RuvC_P4
  SITE 97: note = RuvC_P5
  REGION 212..300: note = Tnp_domain
  SITE 220: note = Tnp_P1
  SITE 250: note = Tnp_P2
  SITE 258: note = Tnp_P3
  SITE 259: note = Tnp_P4
  SITE 271: note = Tnp_P5
MKHYAGLDVSVKETSICIIDETGRICREMKASSHPEDLIKALKAPEWRFVRVGLEAGPLSQWLFSGLVEVGLPAICIETRHAKAFLKAQVNKTDRNDARGIAQMMRVNLFRPVHVKTLANQRRRALLNARRLLQEKAIAIENDVRGLLRNFGLKVGVVGTVGFDARVRELVAGMPELGEIMRPLLAARQKLREAFMELHRKLLAIVRDDEVCRRLMTIPGVGPVTSLAFNSTIDVPARFAHARSVGPALGLTPILHQSGENHQVGRVSLCGDGMMRSLLYEAAQVMLSRVKKWSWLKAWAMNVAKRRGRRKAIVALARRLAVIMHRMWSDGTEFRWTREELVKAA

SEQ ID NO: 15011 - protein, 399 aa, unidentified
  source 1..399: note = protein_d225501
  REGION 12..166: note = RuvC_domain
  SITE 15: note = RuvC_P1
  SITE 63: note = RuvC_P2
  SITE 103: note = RuvC_P3
  SITE 105: note = RuvC_P4
  SITE 108: note = RuvC_P5
  REGION 273..357: note = Tnp_domain
  SITE 281: note = Tnp_P1
  SITE 310: note = Tnp_P2
  SITE 318: note = Tnp_P3
  SITE 319: note = Tnp_P4
  SITE 331: note = Tnp_P5
MIKDHESVDIFIGVDVGKSNHHAVAIDRAGKKLLDRALPQDEAKLRAIIKAVAGKGTVLLVVDQPSTIGALPVAVAQSEGIMVGYIPGLAMRRIADLHPGEAKTDARDAAIIAEAARSLPHTLRSIVLADEQAAELSMLCGFDDDLAKQATATSNRIRGLLTQIHPALERVIGPHLDHPAMVELLLKYPSPDKLRKAGQARVGTLLGKHAPRAGKRWTADVFTALGEQSVVVAGTGAAGIVLAQLAGMLKQLRGAREELLEQVEALVEAHPLHQVLTSMPAVGVRTAARIITEVAGKEFRSSGHLASYAGLAPVTWRSGTSIRGDHPSRKGNKTLKRAFFLSAFAALKDPLSRAYYDRKRAEGKRHNQALIALARRRCDVLFAMLRDGTFYEAPVAKAT

SEQ ID NO: 15012 - protein, 424 aa, unidentified
  source 1..424: note = protein_70d67b2
  REGION 23..183: note = RuvC_domain
  SITE 26: note = RuvC_P1
  SITE 81: note = RuvC_P2
  SITE 122: note = RuvC_P3
  SITE 124: note = RuvC_P4
  SITE 127: note = RuvC_P5
  REGION 290..376: note = Tnp_domain
  SITE 298: note = Tnp_P1
  SITE 328: note = Tnp_P2
  SITE 336: note = Tnp_P3
  SITE 337: note = Tnp_P4
  SITE 349: note = Tnp_P5
MKFKMQNKQNQLIEKISVKHLVVGVDIAQQLHVARAVNFRGIVVGDPLTFKNNEEGFACLLTWIKNLQRLNNLDEAIVGMEPTGHYWINLSKWLLKKDIDVVTVNPHLVKRNKENRDNTQSKSDKKDALVIADMVKNGYYSEVRYSSETFEKLRVLMSNRDVVVKRLVSSINQLNRWVDIVFPELRQVFKDITAKGAIATLRLFPSPMDLEIMQTHEVITGWKSVMKRQPGLKKALLLLQLAKKSIGTRQALDAYKFHLTQLLEEYDLAVLQLDRVEEQVKSALNEIPFAKKLLTIKGISEISLAGILGEAGDLSGFSHGNSLLRHAGLHLAEASSGKWKGQIVISKRGRSRLRRFLYLATMSLVMNNPEFQAIHAHNVKVKKIKKMKSIMKLIGKLARVFVGIARRNESYCPDKLQTFSPLAA

SEQ ID NO: 15013 - protein, 287 aa, unidentified
  source 1..287: note = protein_363f02d
  REGION 6..148: note = RuvC_domain
  SITE 9: note = RuvC_P1
  SITE 52: note = RuvC_P2
  SITE 87: note = RuvC_P3
  SITE 89: note = RuvC_P4
  SITE 92: note = RuvC_P5
  REGION 208..254: note = Tnp_domain
  SITE 216: note = Tnp_P1
  SITE 246: note = Tnp_P2
MKLTTYGVDIAKRVFQIHWVAPETGEIQRKKLKRADVMTFFRLQASGRVVMEACGAAQYWARQLQSLGHTVQLIHPKFVRPFVLTNKNDTADAQAIWTAAQQPGMRFVPIKSEAAQAVLALHRIRSQLVKFRTMQMNQLRGLLGEFGIELPGGREAGLAALRDIDWEHVPALLHAALQMQVQRLRELDEQMAQIERQLAQWLRSDETCKRVAEIPGVGLLTATAMIAAMGEAHHYRSGRAFAASLGLVPRHSGTWWTCPAGWYQQTRGSLFAYLADAWRPFGHFAPG

SEQ ID NO: 15014 - protein, 320 aa, unidentified
  source 1..320: note = protein_a5acdb9
  REGION 7..149: note = RuvC_domain
  SITE 10: note = RuvC_P1
  SITE 50: note = RuvC_P2
  SITE 88: note = RuvC_P3
  SITE 90: note = RuvC_P4
  SITE 93: note = RuvC_P5
  REGION 209..267: note = Tnp_domain
  SITE 217: note = Tnp_P1
  SITE 247: note = Tnp_P2
  SITE 255: note = Tnp_P3
  SITE 256: note = Tnp_P4
MENIALIGIDLGKNSFHIHCQDRRGKAVYRKKFTRPKLIEFFGDMPRYNHRNGSLWRFSLYGTQVGRVGAFPKADITKFVRPFVKSNKNDFVDAEAICEAASRPSMRFVQPRTESQQAMRALHRVRESLVQDKVKTTNQMHAFLLEFGISVPRGAAVISRLSTILEDNSLPLYLSQLLLKLQQHYHYLVEQIKDLESQLKRKLDEDEVGQRLLSIPCVGTLTASTISTEIGDGKQYASSRDFAAATGLVPRQYSTGVGRHCWELVSEVIKRSELCWFNVPGYSYKNWNTSLANWPIGSGIYCAGKATLSSLVLWQTSWPE

SEQ ID NO: 15015 - protein, 375 aa, unidentified
  source 1..375: note = protein_7cdc829
  REGION 8..155: note = RuvC_domain
  SITE 11: note = RuvC_P1
  SITE 60: note = RuvC_P2
  SITE 96: note = RuvC_P3
  SITE 98: note = RuvC_P4
  SITE 101: note = RuvC_P5
  REGION 221..308: note = Tnp_domain
  SITE 229: note = Tnp_P1
  SITE 259: note = Tnp_P2
  SITE 267: note = Tnp_P3
  SITE 268: note = Tnp_P4
  SITE 280: note = Tnp_P5
MYQYSKYVGLDVHKEKIMLAVAETSRRGPVYYGEIANTPEAVAKAIKKIAGQEHVTFCYEAGPCGYGLYRQITAMGYQCEVVAPSLIPKKSGNRVKTDRRDSISLAGLLRAGELTRVWVPDREQEAMRDLTRAREDMKIMERHSRQRLGGFLLRHGKVYPGRSKWTKAHFRWLEGIRFETATQQIVFQEYVDMVKHTRGRVAAMEEEMRKALDSWKLKEVVEGLMALRGVDLIAAMTIIAELGDISRFSSPRQLMAHLGLVPSEHSSGEKRKRGGITKTGNSHARRVLVEASWSYRLPARKTAHLQRKAAKASKTVQEIAWKAQKRLCKRYWYLINKGKLPVESCTAVARELVGFIWAIVCQVMGKGTVSAKGNR

SEQ ID NO: 15016 - protein, 325 aa, unidentified
  source 1..325: note = protein_a73de33
  REGION 6..151: note = RuvC_domain
  SITE 9: note = RuvC_P1
  SITE 55: note = RuvC_P2
  SITE 93: note = RuvC_P3
  SITE 95: note = RuvC_P4
  SITE 98: note = RuvC_P5
  REGION 197..284: note = Tnp_domain
  SITE 205: note = Tnp_P1
  SITE 235: note = Tnp_P2
  SITE 243: note = Tnp_P3
  SITE 244: note = Tnp_P4
  SITE 257: note = Tnp_P5
MEKIVIGIDVSKLTLDICIQDNGSNHYENILNTEEAIKAFFRKLNKKHEIIIGMENTGRFNAILYRVLMHYSYAIYVINPFHLKRSIGLVRGKNDKVDSERIALFLSKNYMDLQQWKPNSHAIEKIKLLNAERKHRVKIRAGLLAQSQDELFLSSSIDKGILRLNTKLIDVLTKQISEIENKIYQLIFKDEELNNHYDRIRSIPGVGKVLAFNMLIKTDGFTNINSPRQMACYAGIAPFDFQSGTSIRRKPKVSSMADKDLKKLLHLAAMSAIRLKNDLAIYYHRKVEEGKNKMSVLNDVRNKIIHRIYALIKNQTIYKNSLLLS

SEQ ID NO: 15017 - protein, 309 aa, unidentified
  source 1..309: note = protein_076d454
  REGION 1..76: note = RuvC_domain
  SITE 13: note = RuvC_P3
  SITE 15: note = RuvC_P4
  SITE 18: note = RuvC_P5
  REGION 183..267: note = Tnp_domain
  SITE 191: note = Tnp_P1
  SITE 220: note = Tnp_P2
  SITE 228: note = Tnp_P3
  SITE 229: note = Tnp_P4
  SITE 241: note = Tnp_P5
MRRIADLHPGEAKTDARDAYIIAEAARTMPHTLRSIQVADEQVAELSMLCGFDDDLAKQITATSNRLRGLLTQIHPALERVLGPRLDHPAVLDLLRTWPTPEALKTAGRKRVAARLKRLAPRMYARLTEEIFDALDQQTVTVIGTNAAAVVVPQLASMLGDLRASRETLHAQVEALVEAHPLHSVLSSIPAVGIRTEARILTEIVGKEFATAGHLASYAGLSPVTWRSGSSIRGDHSSRRGNKILKRALFLSAFAALKDPLSRAYYDRKRAQGKKHNQALIALARRRCDVIFAMLRDGTLYEAQKPAAA

SEQ ID NO: 15018 - protein, 345 aa, unidentified
  source 1..345: note = protein_ec4ef67
  REGION 9..169: note = RuvC_domain
  SITE 12: note = RuvC_P1
  SITE 68: note = RuvC_P2
  SITE 108: note = RuvC_P3
  SITE 110: note = RuvC_P4
  SITE 113: note = RuvC_P5
  REGION 209..296: note = Tnp_domain
  SITE 217: note = Tnp_P1
  SITE 247: note = Tnp_P2
  SITE 255: note = Tnp_P3
  SITE 256: note = Tnp_P4
  SITE 269: note = Tnp_P5
MSSIVKQVVGIDVAQKELVVSLGRMSHDTGVEIYAYKIFSNTSNGFSSLSSWVDKKTVKNVDVRYVMEATGVYHEHLAYYLSDQDKRLSIVLPNKISNYFKTLDVRTITDKTASQAICQFGLEWKLEDWQPPKKIFRKLKQLTRERDQLITDRTVLKNQLHAELVERFPNQSSIKRISKRIQLINKQELEIRNELSKTLKEDSELVRKVDHITSIPGVGKLTALITLAETNGFELIKNKKQLVGYSGLDVRVKDSGTSVKGKPKISKRGNRHLRKAMHMPALTAIRHNQQHKAVFVRLVSKHGIKMKAVVAVQRKILGLIYTIYKTDKCFDANYSKIEVENEVNC

SEQ ID NO: 15019 - protein, 337 aa, unidentified
  source 1..337: note = protein_8e44878
  REGION 6..148: note = RuvC_domain
  SITE 9: note = RuvC_P1
  SITE 52: note = RuvC_P2
  SITE 87: note = RuvC_P3
  SITE 89: note = RuvC_P4
  SITE 92: note = RuvC_P5
  REGION 211..297: note = Tnp_domain
  SITE 219: note = Tnp_P1
  SITE 249: note = Tnp_P2
  SITE 257: note = Tnp_P3
  SITE 258: note = Tnp_P4
  SITE 270: note = Tnp_P5
MSLSIYGIDLAKHSFSIHGEDEQGKILIHKTITRSKVLSTFANIPPAIVGMEACGASHYWARELTKLGHTVRIMASKYVTPFRTGAKNDLNDAVAICVAVTRPSTRFVKIKSPDQQAILLLHRARDNWVHERTALLNQLRAMLAEFGIIAPKGRHAIQKAIPEALEDAENQLPDLARAILSDSYEHLLNINKRIADQERCFDMLVSRSHNAQKIMKVAGIGPITATAVIASIGKGEQFDKGRDFAAWLGLVPSQYSTGGKPRLGRITKKGDKYLRTLLVHGARAVISAIGNKTDRLSLWCKNLVERRGFKRAIVALAAKNARIIWSLLSNGTEYQPI

SEQ ID NO: 15020 - protein, 390 aa, unidentified
  source 1..390: note = protein_8babdf9
  REGION 4..162: note = RuvC_domain
  SITE 7: note = RuvC_P1
  SITE 60: note = RuvC_P2
  SITE 101: note = RuvC_P3
  SITE 103: note = RuvC_P4
  SITE 106: note = RuvC_P5
  REGION 265..352: note = Tnp_domain
  SITE 273: note = Tnp_P1
  SITE 303: note = Tnp_P2
  SITE 311: note = Tnp_P3
  SITE 312: note = Tnp_P4
  SITE 325: note = Tnp_P5
MFYAGIDVAMDKHDCVVLDSGGNIVFEVFTFENSRDGFRTLKKVLQACSKNPKKIKVGLEATGHYSDNILAFLNNSGYDPVLFNPLHTNLFRKGLSLRKTKTDHVDAHTIATMLRTEDLKSYSQQSYHLAELKSLTRYRSALVSDCSRHKISLVRLCQILFPEIKNLVPTLHMSSVYTLLSECPSADKIANCNLTHLTSLLSSASKGHYGRDKAIEIRDAARKSIGIKSTVKELELKQTIDLIQIYLQQIETVDEEINKHMDEIESPITSIPGIANRMAAVILAETNNFQDFERAEQVLAFAGLDPSVYQSGQLTSTHSKMVKRGSKYLRYAIFNAAKYVCHWDPTFRTYLHKKRAEGKPYNVAVSHAAKKLTRVMFHLVKTNKEFISQA

SEQ ID NO: 15021 - protein, 306 aa, unidentified
  source 1..306: note = protein_36d1cfe
  REGION 7..111: note = RuvC_domain
  SITE 10: note = RuvC_P1
  SITE 53: note = RuvC_P2
  SITE 88: note = RuvC_P3
  SITE 90: note = RuvC_P4
  SITE 93: note = RuvC_P5
  REGION 177..263: note = Tnp_domain
  SITE 185: note = Tnp_P1
  SITE 215: note = Tnp_P2
  SITE 223: note = Tnp_P3
  SITE 224: note = Tnp_P4
  SITE 236: note = Tnp_P5
MSESALIGIDLGKHTFHLHGQDKSGREVFRKKCSRAHMMQFFASSQSCVVAMEACAGSHCVARQLAAIGHTPKLISPQFVKPFVKGNKNDFVDAEAICEAASRRSMQMHGFLLEFGVSLPRGLAIMKRLAVVLAEHELPVRLTVLLQRLHNHLIYLDKQIKAMDKELACQVADDDLGSRLLSIPCVGPITASLLAVEMGDGEQYRCSRDFAASVGLVPKQYSTGGKANLLGISKRGDKHLRQLLVQCSRVYMQRLDHQKGALADWVRSLLSRRHSNVVACALANKLARIAWAIAAHHTQYEAGPGA

SEQ ID NO: 15022 - protein, 339 aa, unidentified
  source 1..339: note = protein_4d34292
  REGION 6..148: note = RuvC_domain
  SITE 9: note = RuvC_P1
  SITE 52: note = RuvC_P2
  SITE 87: note = RuvC_P3
  SITE 89: note = RuvC_P4
  SITE 92: note = RuvC_P5
  REGION 208..294: note = Tnp_domain
  SITE 216: note = Tnp_P1
  SITE 246: note = Tnp_P2
  SITE 254: note = Tnp_P3
  SITE 255: note = Tnp_P4
  SITE 267: note = Tnp_P5
MEISVIGLDVAKQVFQVHAADAAGRTVAQIKLRRAQVLDYFRTLPPCLVGLEACATAHYWARELSALGHTVRLMPPAYVKPYVKRNKTDAADAQAIAEALTRPTMRFVPVKSADQQAMLMLHRTRELLVRQRTMLATALRAHLAEFGIIAPQGIQRVEKLAAQLHDPSVPPLARDALNLLVEQLASTWKQIDTIEMQLIAIHRTQAVSRRLASIPGVGPITAMAITSTVSDPTMFRSGREFAAWLGLTPKSHSSGGKDRLGRISKRGDRYIRHLLYVGAGNAIRFAKARAAAGENWIRGLQQRRPPKVVIIALANKMARIAWALMVREQPFRSPAQSTL

SEQ ID NO: 15023 - protein, 264 aa, unidentified
  source 1..264: note = protein_6a05d42
  REGION 2..78: note = RuvC_domain
  SITE 17: note = RuvC_P3
  SITE 19: note = RuvC_P4
  SITE 22: note = RuvC_P5
  REGION 137..224: note = Tnp_domain
  SITE 145: note = Tnp_P1
  SITE 175: note = Tnp_P2
  SITE 183: note = Tnp_P3
  SITE 184: note = Tnp_P4
  SITE 196: note = Tnp_P5
MAPKFVSPYRLSGKKGKNDAADAAAICEAVTRPSMRFVPPKSLQQQSELLVHRARQGFVQQRTATINRIRGLLSEFGIVLPLKASTVRQEAMRQLEDLPGWANTVVGDLLSEVSRLDERIAQYDRHIEQIAKDSTPARQLMQLPGVGPTTATALVAMIGRGQEFKCGRQLSAWLGLVPGQYSSGGKQRTGRITKAGDPYLRMLLILGARSVLQSAKHRDDPLSRWAVQLEARAGYWKAIVAIAAKNARMCWAVLARGESFKLPA

SEQ ID NO: 15024 - protein, 401 aa, unidentified
  source 1..401: note = protein_f6c48e0
  REGION 14..168: note = RuvC_domain
  SITE 17: note = RuvC_P1
  SITE 65: note = RuvC_P2
  SITE 105: note = RuvC_P3
  SITE 107: note = RuvC_P4
  SITE 110: note = RuvC_P5
  REGION 275..359: note = Tnp_domain
  SITE 283: note = Tnp_P1
  SITE 312: note = Tnp_P2
  SITE 320: note = Tnp_P3
  SITE 321: note = Tnp_P4
  SITE 333: note = Tnp_P5
MDAIEHYDAVDVFIGVDVGKGEHHAVALSRAGKRLFDKTLPNDETRLRALICSLKEHGKLLLVVDQPSTIGALPVTVARAEGILVAYLPGLAMRRIADLHVGEAKTDARDAAIIAEAARSIPHALRSLRLDDEQLAELTMLCGFDDDLADHITQTSNRIRGLLTQIHPALERVLGPRLDHPAVLDLLQRHPSPASLAATSEKSLANKLSKLAPRMGKGLAHEIFLALSEQTVVVPGTNAATIVLPRLAHQLAALRGQRGEVAQEVERLVQAHPLYSVLTSMPGVGVRTAARLLTEVAAKAFSSAAHLAAYAGLAPVTRRSGSSIRGEHPSRRGNKVLKRALFLSAFAALRDPISRAYYARKISQGKRHNQALIALARRRCDVMYAMMRDGTLYCPAPLVNA

SEQ ID NO: 15025 - protein, 417 aa, unidentified
  source 1..417: note = protein_6adee18
  REGION 12..152: note = RuvC_domain
  SITE 15: note = RuvC_P1
  SITE 58: note = RuvC_P2
  SITE 93: note = RuvC_P3
  SITE 95: note = RuvC_P4
  SITE 98: note = RuvC_P5
  REGION 217..303: note = Tnp_domain
  SITE 225: note = Tnp_P1
  SITE 255: note = Tnp_P2
  SITE 263: note = Tnp_P3
  SITE 264: note = Tnp_P4
  SITE 276: note = Tnp_P5
MSQKLNSAVAVTGIDIGKNSFHIVGHDQRGAIVLRQKWSRRQVEARLANLPPCLIGMEACVGAHHLSRKLQMLGHDARLMPAKYVRPYSKGQKNDFRDAEAIAEAVQRPTMKFVATKTAEQLDLQALHRVRERLVGQRTGIINQIRAFLLERGVAVRQGLRYLRAELPGILATRTDVLSPRMLRIIEDLAGDWHRLDERIAGLSGEIEALARQDQACTRLMTVPGIGPIISSAMVAAIGSGDVFSKGRDFGAWLGLVPKQISTGDRTILGSISRRGNRYLRVLFVQAAWVVLVRSKQWERYGLKSWIEAAKKRLHHNRWRLRLPTSSPASPGRFSTRGAPSSASREMRWRPDPLDPRAVLGPVKAWPGNAGARGKASATASLDDPLRAARLHAQAGTKEQPSGTNKGTVRNEELSMT

SEQ ID NO: 15026 - protein, 390 aa, unidentified
  source 1..390: note = protein_7e7d064
  REGION 4..163: note = RuvC_domain
  SITE 7: note = RuvC_P1
  SITE 60: note = RuvC_P2
  SITE 101: note = RuvC_P3
  SITE 103: note = RuvC_P4
  SITE 106: note = RuvC_P5
  REGION 266..353: note = Tnp_domain
  SITE 274: note = Tnp_P1
  SITE 304: note = Tnp_P2
  SITE 312: note = Tnp_P3
  SITE 313: note = Tnp_P4
  SITE 326: note = Tnp_P5
MIYVGIDVAQDKHDCCILGSDGEIHFSPFTFRNDRQGFNELFEKIGSLTGNVSEVKVGLEATGHYHLNLLRTLLDNGFPCYVINPLHTNLYRKGQSLRKTKTDRVDASSIAMMLLTDRTLKPYSNISYHNEELKSLTRYRFEKVQERAKLKTSVSRLVSILFPELKKLVPSLHMNTVYALLSEFPGASFVASAHLTRLKHLVEDASKGHYGKDVAIQIRDAASSSIATVQPAKSLELKHTIALIRILDSEIDEIEAAINAIMEKMNSPITTIPGLKTRMGAMILAEIGDFSRFDSPDKILAYAGLSPSTYQSGQMTSSHSHMEKRGSRYLRYALFNATRFVCTWDPTFKAYLAKKRAEGKHYYVAISHACKKLVRLIYRMQLTNENYRAA

SEQ ID NO: 15027 - protein, 392 aa, unidentified
  source 1..392: note = protein_e345631
  REGION 4..163: note = RuvC_domain
  SITE 7: note = RuvC_P1
  SITE 60: note = RuvC_P2
  SITE 101: note = RuvC_P3
  SITE 103: note = RuvC_P4
  SITE 106: note = RuvC_P5
  REGION 267..354: note = Tnp_domain
  SITE 275: note = Tnp_P1
  SITE 305: note = Tnp_P2
  SITE 313: note = Tnp_P3
  SITE 314: note = Tnp_P4
  SITE 327: note = Tnp_P5
MIYVGIDVPKDKHDCFIINSDGEILFHTFTISNNHEGFNTLFQRIESVSDDFTKVKVGLEATGHYSYNLLGFLLDKGLPTYVINPLHTNLYRKSLTLRKTKTDKVDSRTIATMIMSDMNLKSYSDISYHNEELKSLTRYRFDKVKERAKLKTSISRLVNILFPELEKLVPSLHLSSVYALLSEFPGAAQIAASHLTKLTNLLSQASKGRYGKETAILFRETARSSIGSVMPAKSLELKHTIKLIQELTAEIDEIEVAIKQIMDEEIHSPILTIPGISYRMGAMILAEIGDFNRFDSADQILAYAGMSPSTYQSGQLNNCYSHMEKRGSRYLRYALYNATKYVCQWDESFSAYLAKKRSEGKHYNVALSHATKKLVRLIFAMEKSGRTYQPAA

SEQ ID NO: 15028 - protein, 390 aa, unidentified
  source 1..390: note = protein_b269f61
  REGION 4..163: note = RuvC_domain
  SITE 7: note = RuvC_P1
  SITE 60: note = RuvC_P2
  SITE 101: note = RuvC_P3
  SITE 103: note = RuvC_P4
  SITE 106: note = RuvC_P5
  REGION 266..353: note = Tnp_domain
  SITE 274: note = Tnp_P1
  SITE 304: note = Tnp_P2
  SITE 312: note = Tnp_P3
  SITE 313: note = Tnp_P4
  SITE 326: note = Tnp_P5
MIYVGIDVAKDKHDCFITNSEGEVLFDVFTIPNNADGFQNLYQKISSLSNDLSNIKVGLEATGHYNYNLLGFLIDKGLPTFVINPLHTNLFRKSLSLRQTKTDKVDAHTIAFMMMSGVNLQSYSDTSYHNEELKSLTRYRFDKVKERAKLKTSVSRLVNILFPELEKLVPTLHIASVYALLAELPSAKKIASCHLTHLTKLLQDASKGHYGREKALEIRAVARQSIGSNMPAKSLELKHTIKLIQELSSEISEIENSIKSIMDSIHSPILSIPGINYRMGAMIIAEIGDFNRFSSPDKILAYAGLSPSTYQSGQLDSSYSHMEKRGSRYLRYALFNATKFVCIWDNRFAVYLAKKRAEGKHYNVAISHAAKKLVRVIYRMEITGLSYQPS

SEQ ID NO: 15029 - protein, 319 aa, unidentified
  source 1..319: note = protein_129069c
  REGION 9..155: note = RuvC_domain
  SITE 12: note = RuvC_P1
  SITE 56: note = RuvC_P2
  SITE 96: note = RuvC_P3
  SITE 98: note = RuvC_P4
  SITE 101: note = RuvC_P5
  REGION 192..277: note = Tnp_domain
  SITE 200: note = Tnp_P1
  SITE 229: note = Tnp_P2
  SITE 237: note = Tnp_P3
  SITE 238: note = Tnp_P4
  SITE 249: note = Tnp_P5
MAQNDRIVVGIDVAKGKVDACIRPLSQRQTFPSTAAGHRQLVAWLRKHKVAKAVMEASGGYERDWARVLRQAGIEVRIVDPKRVRSFARSAGRLAKNDTIDAEMIAWFAETFDEVLDQIHDAARDELATLVKARKALVDLRIRLQSQNEHAVPGAVQKAHARVLKGLDIETAKIEDAITATIKATPAFAKRAEIIESVPGLGDVASAVLLAGLPELGTVREEVAAALLGAAPYDDDSGKRRGERHIKGGRRWVRNALYMPCIGAATQSNPVLKAYYERLIAKGKLKKVAVIACMRKLIVILNTMIARGEKWDPARYALR

SEQ ID NO: 15030 - protein, 406 aa, unidentified
  source 1..406: note = protein_2eb24df
  REGION 4..162: note = RuvC_domain
  SITE 7: note = RuvC_P1
  SITE 57: note = RuvC_P2
  SITE 99: note = RuvC_P3
  SITE 101: note = RuvC_P4
  SITE 104: note = RuvC_P5
  REGION 277..363: note = Tnp_domain
  SITE 285: note = Tnp_P1
  SITE 315: note = Tnp_P2
  SITE 323: note = Tnp_P3
  SITE 324: note = Tnp_P4
  SITE 337: note = Tnp_P5
MNAVGIDVSKGKSTVAVLRPFGEIIVSPFEVYHNPKELSELVTLLKSLDGDTKIVMEYTGNYYLPVALFLQNVGLFVSVVNPILVKEYSNKSLTVRKGKTDKKDSIKLAAFALDRWNELPVFSSQSDTRTLLKAFNRQYNQYNKLKIMLKNNLISILDQAFPGVNTLFNTPARKKDGHEKWIDFVLKFPHCDCISRKSYSVFSKCYLSWCRKYGYYFYETKAKEVYAFACNCAPSLVDSEAAHALVSTAILQLNTLNETLASLQKEMDLLASTLPEYDTVMSLYGVGSVLCSQLIAEIGDVSRFTNKKALIGFAGIDAPPFQSGNFNPQSRSISKRGSAALRKTLFQIMAVILQHEPSNEPVFLFMDKKRSEGKHFYVYMMAGANKFLRIYYARVMERLNSAQTAA

SEQ ID NO: 15031 - protein, 403 aa, unidentified
  source 1..403: note = protein_b1ff777
  REGION 4..162: note = RuvC_domain
  SITE 7: note = RuvC_P1
  SITE 60: note = RuvC_P2
  SITE 101: note = RuvC_P3
  SITE 103: note = RuvC_P4
  SITE 106: note = RuvC_P5
  REGION 274..360: note = Tnp_domain
  SITE 282: note = Tnp_P1
  SITE 312: note = Tnp_P2
  SITE 320: note = Tnp_P3
  SITE 321: note = Tnp_P4
  SITE 333: note = Tnp_P5
MYYVGIDVAKEKHYVCILDTSKELAVKPFWIYSDILGLRDLVKRFAELSLNNDDFIIGVESTGAFSENLYEYISDADYKVILLNSYQTAKYRDFSTMKKIKNDSIDAYVIAELLASGKYKESHISNDDYQSLKVLGRLKRSLDDKIKTIKREISTVMATVNPEITKVFPNIFSKTALSIIKAYPTAVDIAQSTPKKLTKIFRHIKGNNFNEEKAKFLIELASSSIYAGRTHEARALMIKTNIKILELLSQEKAEIEQQIESLVYGKIETIDSSIDNLKSIPGVADKTISAILGECGDIKRFDSAKAFIGYLGLYPTQYQSGNSMSVGRLAKRGIPIAKHALYMAAVSSVMHNTELNKLFRDKVSIGKSKKEALIIISKKLATIIYSVFKYNKPYEPKRVFIPR

SEQ ID NO: 15032 - protein, 281 aa, unidentified
  source 1..281: note = protein_ed5b900
  REGION 93..177: note = RuvC_domain
  SITE 120: note = RuvC_P3
  SITE 122: note = RuvC_P4
  SITE 125: note = RuvC_P5
  REGION 221..276: note = Tnp_domain
  SITE 228: note = Tnp_P1
  SITE 257: note = Tnp_P2
  SITE 265: note = Tnp_P3
  SITE 266: note = Tnp_P4
MNIIGIDVSKAKLDCAWFRDENKVKAKVVANRLDGWEELIKWARANTGAGISGLHFVMDDCMDAGGRAMQEQLPRPRARIMRIWQPGCMTTVQTCPSPILPLCPWVHVKHYAQSLGGRTKNDKKDSVVLARYGLKECPALWQPAPLEIRTLKALLARLSAVGKDLQREKNRQEKAAATDMPTFVLESIRQMVGHLETERETLEKFIGQPIKQHNTLKENTVLLESIPGVGKVVARQMLMVLGSHQFNSASQCAAYLGLIPVQREPCSSVKRRSQLALVPCG

SEQ ID NO: 15033 - protein, 392 aa, unidentified
  source 1..392: note = protein_a483766
  REGION 4..163: note = RuvC_domain
  SITE 7: note = RuvC_P1
  SITE 60: note = RuvC_P2
  SITE 101: note = RuvC_P3
  SITE 103: note = RuvC_P4
  SITE 106: note = RuvC_P5
  REGION 267..354: note = Tnp_domain
  SITE 275: note = Tnp_P1
  SITE 305: note = Tnp_P2
  SITE 313: note = Tnp_P3
  SITE 314: note = Tnp_P4
  SITE 327: note = Tnp_P5
MIYIGIDVAKDKHDCFITNSDGEILFNPFTISNNREGFETLFQRIKSVAEDFSKIKVGLEATGHYSYNLLGFLLDKGLPTYVINPLHTNLYRKSLSLRKTKTDKVDSRTIATMMMSDVNLKSYSDTSYHNEELKSLTRYRFDKVKERAKLKSSVSRLVCTLFPELEKLIPTLHLASVYALLSEFPSADAVANAHLTRLSNLLSESSKGRYGKDTAVMFRDVARSSIGSHMPTKSLELKHTIKLIQELTVEIDEIESAIKRIMDEQIQSPILTIPGISYRMGAMIIAEIGDFSRFDSADKILAYVGMSPSTYQSGQLDNCYSHMEKRGSRYLRYALYNATKYVCHWDESFGAYLEKKRSEGKHYNVALSHATKKLVRLIFAMEKSGKTYLPTA

SEQ ID NO: 15034 - protein, 387 aa, unidentified
  source 1..387: note = protein_baf5ab2
  REGION 4..159: note = RuvC_domain
  SITE 7: note = RuvC_P1
  SITE 58: note = RuvC_P2
  SITE 98: note = RuvC_P3
  SITE 100: note = RuvC_P4
  SITE 103: note = RuvC_P5
  REGION 263..350: note = Tnp_domain
  SITE 271: note = Tnp_P1
  SITE 301: note = Tnp_P2
  SITE 309: note = Tnp_P3
  SITE 310: note = Tnp_P4
  SITE 323: note = Tnp_P5
MIFIGIDIAKSTHFASAVNSDGEVLINPFKFTNDNQGFNLFINTFKDFDLSNCLVGLESTGIYGDNLTTFLFEKGFKIGRINPIQTDSLRSSNIRKTKNDKIDTFLIAQCLMLGHYTLITEKDIQLIKLKTICRFKFDIKKSQSKSKVQLVTCLDIAFPELANFFNNNLHIKSSYALLSKYPTARIIANTRIDALTNLLYSASKGHFKQDKAIALKELAKNSIAMDNPAIGIQIKMLIEQIQMLEKQIDLLDIEITNIMESLNSPISSIPGIGNWLGSIIISEIGDITRFSTSTKLLAFAGLDPSVRQSGNFNATNTKISKRGSKYLRYAINRAAQLIIWNDDTFYQYYTTKLAQGKSYLNVIGHVSHKLTRVIFKLLTTNTTFKNS

SEQ ID NO: 15035 - protein, 405 aa, unidentified
  source 1..405: note = protein_4e590f9
  REGION 6..162: note = RuvC_domain
  SITE 9: note = RuvC_P1
  SITE 58: note = RuvC_P2
  SITE 99: note = RuvC_P3
  SITE 101: note = RuvC_P4
  SITE 104: note = RuvC_P5
  REGION 271..357: note = Tnp_domain
  SITE 279: note = Tnp_P1
  SITE 310: note = Tnp_P2
  SITE 318: note = Tnp_P3
  SITE 319: note = Tnp_P4
MGKVFVGHDWAEAHHDVYAEDGEGRRLGKARLPEGVEGVARFHELVAPFAEEPADVVVATETDRGLFVGSLVAAGYTVLAVNPMSTSRYRERHSTSGAKSDPGDARVLAELARTDAHNHRPIAGDSDLAEAVKVLARAHQSMIWTRQRQTNQLRSTLREFYPGALSCFDDLDGADALAILAVAPTPSLGRALSRAKIASALRRGGRQRRVDERAAEIQAALRSAQLAAPALVSEAMGATVRALVAVIGELNVQIAQLEATLADRFEQHPDAKVVRSLPGLGTVLGARVLGEFGDDPNRYADAKSRKNYAGTSPITKASGTRRVVLARFARNRRLADACYLWAFAALTASPGARAFYDQHRQAGDTHHRALRALANRLVGILHGCLRHGVLYDEDMAWGHRMQEAA

SEQ ID NO: 15036 - protein, 341 aa, unidentified
  source 1..341: note = protein_a9e83ff
  REGION 7..148: note = RuvC_domain
  SITE 10: note = RuvC_P1
  SITE 53: note = RuvC_P2
  SITE 88: note = RuvC_P3
  SITE 90: note = RuvC_P4
  SITE 93: note = RuvC_P5
  REGION 211..295: note = Tnp_domain
  SITE 219: note = Tnp_P1
  SITE 249: note = Tnp_P2
  SITE 257: note = Tnp_P3
  SITE 258: note = Tnp_P4
  SITE 270: note = Tnp_P5
MGEVSTVGLDLAKNAFQAHGADGEGRTTLRKSLRRGQVLEFFSRLPRCVVAMEACGGSHYWAREIGKLGHEVRLIAPAYVKPFVKRQKNDAADAEAISEAAQRPNMRFVAVKSEEKQAAATVFRVRELLVRQRTQAIAALRGHLGEFGVIAAQGATNAVKLAARVEDQTVDLPAPARAALLVLIAALRYLEEHIAALDAEIARRAREDETARRLMTIPGVGPLIATAFAALAPDPTTFRRGRDFAAWLGLTPRQHSTGGKQRLGATTKMGERSLRRLLIIGANAVVQWRERKGAKPGTWLAGMLARKPPMLVRVALANKMARIVWALMAKGGIYKAPAAAA

SEQ ID NO: 15037 - protein, 421 aa, unidentified
  source 1..421: note = protein_1d2c8ff
  REGION 12..175: note = RuvC_domain
  SITE 15: note = RuvC_P1
  SITE 72: note = RuvC_P2
  SITE 112: note = RuvC_P3
  SITE 114: note = RuvC_P4
  SITE 117: note = RuvC_P5
  REGION 283..369: note = Tnp_domain
  SITE 291: note = Tnp_P1
  SITE 322: note = Tnp_P2
  SITE 330: note = Tnp_P3
  SITE 331: note = Tnp_P4
MDRKGEAWVLFVGDDWSEEHHDIEVQDEAGRVLVKTRLPEGVAGIDRLHTLIATHATDDVDLDDVDLEVAVGIETERGPWVQALVASGYRVQAMNPLQVARYRETHHISGAKSDKTDAHILAQMVRTEGHRLPTVAGDSEQAAAIKVVARGHKRVIWEQTRHMLRLRNMLREYYPAALAAFGDLTAPEALELLAKAADPAAGARLTITQITAALQHARRRQVAAKAQAIQYALRSPQLRLPELVTAAYAATVGSQVAILVTLNAQIQALEEQVEAHFGQHPDAEIYLSQPGLASILGARVLAEFGDDPHRYPDARSRKNYAGTSPITRQSGKTKLVAARHVHNDRLVDALGQQAFSSLSCSPGARAYYRQLRDRDVGHHAALRQLGNRLVGILHGCLKTHTRYDEATAWSHHGQHELTNAA

SEQ ID NO: 15038 - protein, 400 aa, unidentified
  source 1..400: note = protein_4166ad7
  REGION 11..168: note = RuvC_domain
  SITE 14: note = RuvC_P1
  SITE 66: note = RuvC_P2
  SITE 106: note = RuvC_P3
  SITE 108: note = RuvC_P4
  SITE 111: note = RuvC_P5
  REGION 274..361: note = Tnp_domain
  SITE 282: note = Tnp_P1
  SITE 313: note = Tnp_P2
  SITE 321: note = Tnp_P3
  SITE 322: note = Tnp_P4
  SITE 334: note = Tnp_P5
MDEKERFGYFLGIDISKETFDGCCINSQGEKLFSLSTSMDRKGFEELIKQLSSLSFGQESVLIGMESTACYHVNLYSFLISSGYSVVIINPLLISNFVKLQLRKTKTDKKDACVIAQFLLLNRDSLSQTILSSDLSDIRDLSRQRESLVDQMTSIKSEIKRLLTMTFPELEHLAGIFTKSMLRLLCQYPSAASIKYAKRSKIAKILIPGSYGKQTDASVERIIKAAETSIGTASPAKEIILKQKVSLLMQLEEHLQELTHILIEHCQGKMRRDMDILTSMKGIGEKTAMNFLIEMGGDIKQFESHKKLIAMAGLDPALYQSGKIDRKGKISKRGNRHLRRVIWLMTTKVIQFNERFKQYHLKRIKDGLPYKMAVLATAHKLIRVMFAMLTNRTLFNTRMN

SEQ ID NO: 15039 - protein, 341 aa, unidentified
  source 1..341: note = protein_7e662ec
  REGION 6..148: note = RuvC_domain
  SITE 9: note = RuvC_P1
  SITE 52: note = RuvC_P2
  SITE 87: note = RuvC_P3
  SITE 89: note = RuvC_P4
  SITE 92: note = RuvC_P5
  REGION 210..294: note = Tnp_domain
  SITE 218: note = Tnp_P1
  SITE 248: note = Tnp_P2
  SITE 256: note = Tnp_P3
  SITE 257: note = Tnp_P4
  SITE 269: note = Tnp_P5
MKDTMIGVDLAKRVFQIHGASTTGQVKFRKKLTREQFRRFMSEQPACIVVFEACGSASYWAREMETLGHDVKLIAPQYVRPFVKRQKNDAADAEAIVIAARQPEMRFVVPKTADQQARAVMFRSRERLVHQRTKLVNALRAVLYEYGHVFPTGLIHLKRIEAVLDDPACDLPALIIAEGHDLMAQIAEKTERIDAKTKELKALAAETDTARRLQTMPGVGPLTALAVEAFAPDMAQFKCGRDFAAWLGLVPRQHSSGGKERLGRISKAGQSDIRRLLIIGAMSRLNWLGRRSILEGSWLARMRARKPKILVAIALANKMARQLWAMLMKNEDYRDPALAAT

SEQ ID NO: 15040 - protein, 414 aa, unidentified
  source 1..414: note = protein_6263687
  REGION 4..161: note = RuvC_domain
  SITE 7: note = RuvC_P1
  SITE 57: note = RuvC_P2
  SITE 98: note = RuvC_P3
  SITE 100: note = RuvC_P4
  SITE 103: note = RuvC_P5
  REGION 275..362: note = Tnp_domain
  SITE 283: note = Tnp_P1
  SITE 313: note = Tnp_P2
  SITE 321: note = Tnp_P3
  SITE 322: note = Tnp_P4
  SITE 335: note = Tnp_P5
MFAVGVDVSNGRSMVAVLGARRSVVVQPHEVPHTADGFAELAARLHALDGEVRIVMEHTGRYYESFAMSMYRAGFFVSAVNPLAIKGYQEGISVRKVKTDKADALKIAQFAIDKWEILPHYTPMDTIRYDLKTLHRQFQLSSKTKTALNNNLIALLEQSYPGANRYFDSPVRPDGSQKWVDFVDTFWHVDCVARVSRKAFVERYQKWCKRPGYNFSEAKAVEIHEDARQRFPLVPKSDTCKLMVREAVAQLNAVSRTVETYRAEMDRLASQLPEYETVMAMTGVGKSMGPQLIAEIGDLRRFAHQKSLVGFAGTDPIKDDSGDKVSDSKPSSKRGSPYLRRTLFVIMTILLQLQPPDDPVYQFLDKKRSEGKPYYVYMTAGMTKFLRIYYGKVRDCLKEKGLWEQPNVDEVNPV

SEQ ID NO: 15041 - protein, 412 aa, unidentified
  source 1..412: note = protein_806accb
  REGION 5..164: note = RuvC_domain
  SITE 8: note = RuvC_P1
  SITE 63: note = RuvC_P2
  SITE 103: note = RuvC_P3
  SITE 105: note = RuvC_P4
  SITE 108: note = RuvC_P5
  REGION 274..374: note = Tnp_domain
  SITE 282: note = Tnp_P1
  SITE 312: note = Tnp_P2
  SITE 320: note = Tnp_P3
  SITE 321: note = Tnp_P4
  SITE 334: note = Tnp_P5
MNPVIGLDVSKGESQVQAFLDKGRPYRKSFSIKHTTEGLGSLLEFLKGVESSAGGYQPSVVLESTGHYHIPVIHFLEEQNYVYIVVNPLISHRAKSSSLRKVKTDAVDAYHLCELFYKEELEPYKKRGIQLLNLRNLTRQQESIAEISAKTKLQLHSLLDQVFPEYRGVFGSLYSKVSLLTLLAFPTSEAVLSVSEKELSEKIGSLCMSRSELWAKERAEKLKDAALRNPFQNNLYQSHIFNLELLVNMVLQYQEHLSKIAAEIDALAKEIEEYHILQSIPGIGEKIAATIISEIGEIDRFSDAKKLVAFAGVDPSVYSSGKFTASVNRITKRGSCRLRHALYMAVQSGIRDSRKKKTTDEIIARNKRLREFYDKKREEGKPFRVAVIACVNKLLHWIYALLKSRTNFQDID

SEQ ID NO: 15042 - protein, 399 aa, unidentified
  source 1..399: note = protein_ba2928e
  REGION 4..160: note = RuvC_domain
  SITE 7: note = RuvC_P1
  SITE 57: note = RuvC_P2
  SITE 97: note = RuvC_P3
  SITE 99: note = RuvC_P4
  SITE 102: note = RuvC_P5
  REGION 275..362: note = Tnp_domain
  SITE 283: note = Tnp_P1
  SITE 313: note = Tnp_P2
  SITE 321: note = Tnp_P3
  SITE 322: note = Tnp_P4
  SITE 335: note = Tnp_P5
MISVGIDISKGKSTVCILKPYGEVISKPFEISHTEKDLSELARMIERLDDEVRIVMEATGNYHLPVLAFLKVQGFFVAVINPLVMKKYASTVLRKGKTDKLDAIKIANYGLDYWFHLRSQEMSEETYIQLRLLGRQYAHYIKLRIESKQALTHMLDYTMPGIKSLLKNRSDKPEKDKLCDFVEKYWHYDNITNKSEKQFINSYKIWAKNKGYHQSESKALTIYALAQQGIPTLDSNAPSTKMLVLEAVRVLREVDRTLFMILAQMQELARSLKEYPVVRAMEGVGEILAPRLIAEIGDVRRFYNGKALIAYAGIDAPPYQSGQFTGTKRRISKRGSSTLRKTGYEVMKCLKSKKPETDAVYMFIIKKENEGKASKVAKVAGLNKFLRIYYARVKEVYQE

SEQ ID NO: 15043 - protein, 415 aa, unidentified
  source 1..415: note = protein_2b9b495
  REGION 33..186: note = RuvC_domain
  SITE 36: note = RuvC_P1
  SITE 84: note = RuvC_P2
  SITE 125: note = RuvC_P3
  SITE 127: note = RuvC_P4
  SITE 130: note = RuvC_P5
  REGION 248..333: note = Tnp_domain
  SITE 256: note = Tnp_P1
  SITE 286: note = Tnp_P2
  SITE 294: note = Tnp_P3
  SITE 295: note = Tnp_P4
  SITE 306: note = Tnp_P5
MAEEGFAQLEVAVPSRTDLTRRFGKDAPVSVIIGMDPHKRSATIEIIDLNGEILATGRYGTDNAGYNEMLTTAQRYNERVWAIEGCNGIGRHIAHRLVHDRETVIDVPAKLSAQIRVFATGNGRKTDPVDAHSVALAALRVPDLRRVQADSELIALGMLADRRDELGRARTDTVNRLHRLLLELLPGGAKKFLTAMQARKLVATVKPRDPAGKVRRRLVVELIGELETIDRKIKAANKELRQLVNERGSSLTDLNGIGPAGAARLLADVGDIHRFRDRNRFASWNGTAPLDASSGQQQRHRLSRAGNRKINRVLHTMAIVQLRNPSAGRTYYDRRRAAGKTSMEAMRALKRRLSNVVYRRMLADQRRGETASPGGQSGTTIDSSATGSTPHTGTSDKPQPGLTTNQNSPDLQTAS

SEQ ID NO: 15044 - protein, 345 aa, unidentified
  source 1..345: note = protein_60ed130
  REGION 6..146: note = RuvC_domain
  SITE 9: note = RuvC_P1
  SITE 52: note = RuvC_P2
  SITE 87: note = RuvC_P3
  SITE 89: note = RuvC_P4
  SITE 92: note = RuvC_P5
  REGION 211..294: note = Tnp_domain
  SITE 219: note = Tnp_P1
  SITE 249: note = Tnp_P2
  SITE 257: note = Tnp_P3
  SITE 258: note = Tnp_P4
  SITE 270: note = Tnp_P5
MQIAVLGIDLGKNSCSVVGLDERGQVVLRRRLRREGVIKLGSTLPTCIMAMEACCGAHHVGRQLQSQGHDVRLMSPEYVRPYIKAQKNDDRDAEGIAEAATRPTMRFVEIKDENQLDMQTLHRARDRLVAERTALINHLRAILLERGLTVPQGRRKLEIWLDMKTDEGKPALSRRTITLIADMRAQWSEMDRRIAAFDDEFKAHARSDQPCRLLATIPGIGPLNATALVASVGYAQSFGRGRDLAAWLGLVPRQITTGGKPKVLGITKRGNGYLRKMLIHGARAALPMLSKSETPLGDWLRGLLGRPHKNKVIVALAAKLARIVWAVLQSGRPYKENGLGSVIQA

SEQ ID NO: 15045 - protein, 404 aa, unidentified
  source 1..404: note = protein_ac9a76d
  REGION 4..157: note = RuvC_domain
  SITE 7: note = RuvC_P1
  SITE 56: note = RuvC_P2
  SITE 94: note = RuvC_P3
  SITE 96: note = RuvC_P4
  SITE 99: note = RuvC_P5
  REGION 265..351: note = Tnp_domain
  SITE 273: note = Tnp_P1
  SITE 304: note = Tnp_P2
  SITE 312: note = Tnp_P3
  SITE 313: note = Tnp_P4
MWYVGLDWADTHHDVEVLDEAGKRVGARRFAHSHDGLNELKQFLLSIAASPERLACIVETNHGLLITFLLEAGIPVYPVNPKSVNQLRKSAGAKTDQIDAHLLAKIGRLELAELRRLEPDSPIVAELKTLTRDQDALVQTQTRLVNQLTACLKEYYPAALHLFAKLQQRSTLVFLQTYSTPQAAQAASLEEITATLRTGKHTNPTRGAPKIVEELHRPQLVANEVIVRAKSRLMLSLVKQLLVVIEEIASYDQAITTLFLNHSDQAIWRSLPRAGKRLAPRMLAEWGDDRRRYADAASVQALAGTAPVPFQSGNYAKAHKRFACLKPLRNALHQFAWQSTLKEAWALAYYQRKRVEGKTHSMAVRALANVWVRIIYRMWENKTCYQTATLEAAKLAHAPRQHAA

SEQ ID NO: 15046 - protein, 317 aa, unidentified
  source 1..317: note = protein_449acf1
  REGION 8..150: note = RuvC_domain
  SITE 11: note = RuvC_P1
  SITE 53: note = RuvC_P2
  SITE 93: note = RuvC_P3
  SITE 95: note = RuvC_P4
  SITE 98: note = RuvC_P5
  REGION 189..273: note = Tnp_domain
  SITE 197: note = Tnp_P1
  SITE 226: note = Tnp_P2
  SITE 234: note = Tnp_P3
  SITE 235: note = Tnp_P4
  SITE 247: note = Tnp_P5
MQESNLYIGVDVSKAELVIAMGPQRRPCSVANDAPSISRWLREVPAHALIAMESTGRYHGLLAHLASQAGFQVFVLNARDVFFYARALGTRAKTDGVDAGVIARYLAEHHDQLHPWQPANPLQQRLQDLLTRRAQVATHRSALRQVFADVDQQGIETDKLQKAFDALLHSIDDQVRALIASDAQMAERCERLRTITGIGPQTTAVLAALLSRFEFANSDALVAYSGLDPRPNDSGTKRGRRRLSKKGPALLRRQMYLTGMSASHSKALKPLYQSIRAKGFATTEAFVILGRKLLRVAFAVWKGSEIFDPTRLMPKTA

SEQ ID NO: 15047 - protein, 340 aa, unidentified
  source 1..340: note = protein_1360a04
  REGION 6..148: note = RuvC_domain
  SITE 9: note = RuvC_P1
  SITE 52: note = RuvC_P2
  SITE 87: note = RuvC_P3
  SITE 89: note = RuvC_P4
  SITE 92: note = RuvC_P5
  REGION 211..297: note = Tnp_domain
  SITE 219: note = Tnp_P1
  SITE 249: note = Tnp_P2
  SITE 257: note = Tnp_P3
  SITE 258: note = Tnp_P4
  SITE 270: note = Tnp_P5
MEITTVGIDLAKSVFQVHAVDQHGKVALKRQLKRGQMAEFFANLPACLIGMEACGSAHFWARKLQALGHTVKLMAPQFVKPYVKTNKHDAADAEAICEVVRRPNMRFVPIKNLEQQAVLALHRVRQGWVKARTAQANQIRGLLSEFGFVVPQGIGHITSRVPAILDDATNELPGAFKELVLRLLEHFRDLDRQVNEMEHQIQHWHRTNALSRKLEKIPGIGPITASALIASVGDAKNFANGRQLAAWLGLVPKQHSSGGKTNLQGISKRGDTYLRTLLIHGVRAVIRQFEHKTNIQGWLAKLLGRRNKNVAAVALANKNARIAWALLAHDSDFRSDYAAA

SEQ ID NO: 15048 - protein, 250 aa, unidentified
  source 1..250: note = protein_6972775
  REGION 4..148: note = RuvC_domain
  SITE 7: note = RuvC_P1
  SITE 52: note = RuvC_P2
  SITE 92: note = RuvC_P3
  SITE 94: note = RuvC_P4
  SITE 97: note = RuvC_P5
  REGION 191..236: note = Tnp_domain
  SITE 199: note = Tnp_P1
  SITE 229: note = Tnp_P2
MTYVGIDVSKATFVVAYSSAKNSKTKTFKNTTKGVHEFIQTLSANEHHCVLEATGNYSSLLVYLLSRANITVSLENPLKIKNFARVMLSVTKTDETDARLIALYGERMQPAPYKLRSDAILTLKQKRTVIRQLKKQLIATQNLKGSMEALPFFDPKCKKAIEKTIVFLEKQTKGLEEELAALAQSEYKKQIDLLTSIKGIGVTLAAALIMATGGFTYFDNAKQLTRYLGLSPLPTIRYVSQCQRSHQSQR

SEQ ID NO: 15049 - protein, 364 aa, unidentified
  source 1..364: note = protein_15cd353
  REGION 50..173: note = RuvC_domain
  SITE 77: note = RuvC_P2
  SITE 112: note = RuvC_P3
  SITE 114: note = RuvC_P4
  SITE 117: note = RuvC_P5
  REGION 236..322: note = Tnp_domain
  SITE 244: note = Tnp_P1
  SITE 274: note = Tnp_P2
  SITE 282: note = Tnp_P3
  SITE 283: note = Tnp_P4
  SITE 295: note = Tnp_P5
MVPAPTNAVMRHTAVVMDSKRMEPPHASYNYRHRPSQEYISGSWYHESEEVAFNRPLRRAQVLPFFTRIDPCLIGMEACATSHYWARELTKLGHEVRLIHPMYVKPYVKRGKSDAIDAEAICEAVTRPTMRFVESKSIEQQALLSLHRARNLMVRQRTQLINALRSMLAEFGVYIAKGPASAIGFSQGVLAGNKLELPEIVQDVVHNLCGQLDILQEKVRWYETRLRFEAKRDPRVKLLQTIPGIGPVTASALVASIGNGHQFKSGREFAAWLGLTPTNRSSGGKERLGRITKMGDQYLRQLLVVGMTSLIRLTKHHPDRANNWLTTLLERKPARLASVAMANKTARIVWAVLTKNEPYMPRSA

SEQ ID NO: 15050 - protein, 342 aa, unidentified
  source 1..342: note = protein_2e443c5
  REGION 6..148: note = RuvC_domain
  SITE 9: note = RuvC_P1
  SITE 52: note = RuvC_P2
  SITE 87: note = RuvC_P3
  SITE 89: note = RuvC_P4
  SITE 92: note = RuvC_P5
  REGION 211..297: note = Tnp_domain
  SITE 219: note = Tnp_P1
  SITE 249: note = Tnp_P2
  SITE 257: note = Tnp_P3
  SITE 258: note = Tnp_P4
  SITE 270: note = Tnp_P5
MKITTVGIDLAKNVFQVHGVDQRGKPVVERRLKRKQVLAFFAQLPPCLIGMEACGGAHYWARMLQAQGHTVKLMAPQFVKPYVKTNKTDAADAEAICEAVTRPNMRFVPIKNADQQSVLSLHRARQGFVRARTAQANQIRGLLAEYGITLPQGIGHVTKQLPGIIEDTENDLPGVFRELLKRLGAHLRELNRQVKELEEQINAWHRANKESQKLAHIPGIGPLTASALIASIGDARNFRNGRELAAWLGLVPRQHSSGGKVLLQGISKRGDSYLRTLLVHGARSVIRVAESKTTPTDRWSMEILGRRHKNIAAVARANKNARVAWALLAHGRDYNAGYELTS

SEQ ID NO: 15051 - protein, 411 aa, unidentified
  source 1..411: note = protein_7d65c68
  REGION 5..163: note = RuvC_domain
  SITE 8: note = RuvC_P1
  SITE 62: note = RuvC_P2
  SITE 102: note = RuvC_P3
  SITE 104: note = RuvC_P4
  SITE 107: note = RuvC_P5
  REGION 273..373: note = Tnp_domain
  SITE 281: note = Tnp_P1
  SITE 311: note = Tnp_P2
  SITE 319: note = Tnp_P3
  SITE 320: note = Tnp_P4
  SITE 333: note = Tnp_P5
MNPVVGLDVAKGESQVQAFLEKKNPYKTSFKILHTLEGLEMLSKFLIEIENLTGMKPPIVLESTGHYHIPVVQYFEERGYLLIIVNPLVSYRAKSSSLRKVKTDIIDAKHLCELFYKEDLEPYKKRGIQILNLRNLTRQNESMTGMYVQTKLQFQAVLDQVFPEYENVFGDMYSVVSLLILLEFPTSKEVLEVEEETLANRINELCRSRSSNWARTQAKKLIEAAGRNPFKEVLYQSHIVSLKMHINMLLVYQKHLSTLEAEIDALAKEMEEYKILQSIPGIGQKIAATIISEIGEIERFYHPKKLVAFAGIDPSIFESGRFKGTVNRITKRGSSRLRHALYMAVQCAIRDSRKKKMTPESIPCNRKMREYYDKKRDEGKPYKVAIIACANKLLHWIYALLKSNSTFQDIV

SEQ ID NO: 15052 - protein, 386 aa, unidentified
  source 1..386: note = protein_fd767ff
  REGION 10..161: note = RuvC_domain
  SITE 13: note = RuvC_P1
  SITE 66: note = RuvC_P2
  SITE 101: note = RuvC_P3
  SITE 103: note = RuvC_P4
  SITE 106: note = RuvC_P5
  REGION 238..321: note = Tnp_domain
  SITE 245: note = Tnp_P1
  SITE 275: note = Tnp_P2
  SITE 283: note = Tnp_P3
  SITE 284: note = Tnp_P4
  SITE 295: note = Tnp_P5
MELKVTNKAFAIDISQSKLTAAKGELVVEQEKSAVYVKEVKEFNHDNEGIEELIKFLGEYKEGIIEATGIYYFYLHEKLTEKGYKVTVINPLHLTEILGKKTDKLDAQRLLVAHMTGVIKGSYIPTGEIMELRELTRYRESLVEKTTQVKNEIRKILEFAGYKIQPFDKKGRKLLEKLVKGEGLSKEEKEELKEKLGRNLNDAEKLALKQLVELLKNLEKMIKEVEDMIISKIPKPVIELSKIPGIGLISAATIYAEFGDVSRFSSSKAARAYASFAPKTKQSGDSESHSGMIRGNKYLRRALYLVAKVARGLEPFKGYYERLIARGKSVTQATCALAGKLASICYHVIKDGVYKGVVKKSFRIPRGKEVNVKDFDVGDALDSLSP

SEQ ID NO: 15053 - protein, 321 aa, unidentified
  source 1..321: note = protein_4a14d08
  REGION 4..150: note = RuvC_domain
  SITE 7: note = RuvC_P1
  SITE 52: note = RuvC_P2
  SITE 92: note = RuvC_P3
  SITE 94: note = RuvC_P4
  SITE 97: note = RuvC_P5
  REGION 191..278: note = Tnp_domain
  SITE 199: note = Tnp_P1
  SITE 229: note = Tnp_P2
  SITE 237: note = Tnp_P3
  SITE 238: note = Tnp_P4
  SITE 251: note = Tnp_P5
MVYIGIDISKSSFVAAYPSAKGYRTQTYPNTAAGVRKFIATLSVTEHHCVMEATGNYGFLLLYLLHQTGIAVSLVNPKQIKHFARMMMTVTKTDEKDACMIAMYGEKMNPPIYKMPSQAILLLKQKKTVIRQLRKQLVASKNLRESLVVLPYRDKACVRTLDKTIDFLTKQIEQLETELADIASSEFDKQLKALTSIKGTGITLATALILTTGGFTYFDNAKQLSRFIGICPTYQQSGTSVNIKGHINRNGDEQLRALLYIASWTALRYNAACKECYVRLKANGKPSKVALIAVANKLVRQAFAIATNDSTYIDGFVSTKK

SEQ ID NO: 15054 - protein, 340 aa, unidentified
  source 1..340: note = protein_9ce66df
  REGION 6..147: note = RuvC_domain
  SITE 9: note = RuvC_P1
  SITE 52: note = RuvC_P2
  SITE 87: note = RuvC_P3
  SITE 89: note = RuvC_P4
  SITE 92: note = RuvC_P5
  REGION 210..297: note = Tnp_domain
  SITE 218: note = Tnp_P1
  SITE 248: note = Tnp_P2
  SITE 256: note = Tnp_P3
  SITE 257: note = Tnp_P4
  SITE 269: note = Tnp_P5
MNIKRIGLDLAKNVFQIHGVDHHEKVVLRKTLRRAHMMTFFSGLSPCLIGIEACGSSHYWARELTRMGHTVRIIPPKLVKPYLKGNKNDANDAAAICEAISRPGMRFVALKSEAQQTLQAEHRVRARIIRERTALCNEIRGLLSEFGLVLPVGINHVRKALPEILSQQEQWNDRFIRLLCELSEEMQMLDERISRHDRRLQQAARDDIRIKRLMEIEGFGPIVASALVAAVGDAKQFKSGREMSAFIGLVPRQHSSGGKERLGHISKRGDSYLRTLIIHGARAVLRFSAGKTDRRSLWLQSVAERRNNNIAVVALANKNIRIAWAILSRSEEYRGVENAA

SEQ ID NO: 15055 - protein, 343 aa, unidentified
  source 1..343: note = protein_3868a9a
  REGION 7..149: note = RuvC_domain
  SITE 10: note = RuvC_P1
  SITE 53: note = RuvC_P2
  SITE 88: note = RuvC_P3
  SITE 90: note = RuvC_P4
  SITE 93: note = RuvC_P5
  REGION 211..296: note = Tnp_domain
  SITE 219: note = Tnp_P1
  SITE 249: note = Tnp_P2
  SITE 257: note = Tnp_P3
  SITE 258: note = Tnp_P4
  SITE 270: note = Tnp_P5
MQKDTMIGVDLAKAVFQVHGASMTGEPRFRKKLSRQSFPKFMAEQPPALVVMEACGSAHYWAREMIRLGHEVKLIAPRYVKPFLKRQKNDAADAEAIVIAARQPEMRFVEPKGAEQQSRAILFRARERLVHQRTELINALRAALYEYGHVVPQGIRQVGRIEEILQAPQNALPELMRDECRDLLEQIAEQTVRIDARTEKIKVLAAEADTARRLQTIPGVGPMTALAVEAFAPSMETFTCGRAFAAWLGLVPRQFSSGGKERLGRTSKAGQADIRRLLIIGAMSRLNWRGRKAIPENSWLAQITSRKPRMLVAIALANKMARTIWAMLMKKEDYRVSAQVGVA

SEQ ID NO: 15056 - protein, 349 aa, unidentified
  source 1..349: note = protein_7dbb137
  REGION 6..147: note = RuvC_domain
  SITE 9: note = RuvC_P1
  SITE 52: note = RuvC_P2
  SITE 87: note = RuvC_P3
  SITE 89: note = RuvC_P4
  SITE 92: note = RuvC_P5
  REGION 211..298: note = Tnp_domain
  SITE 219: note = Tnp_P1
  SITE 249: note = Tnp_P2
  SITE 257: note = Tnp_P3
  SITE 258: note = Tnp_P4
  SITE 270: note = Tnp_P5
MQIVRIGLDLAKYVFHLHGVDERGKVVLRKTLRRPSLAPFFANLPPCIVGMEASNGAHYWAKTLSELGHDVRLISPQFVTPYVKSNKNDRNDAEAICEAVGRPNMRFVAVKSSEQLAIQAVHRIRSRLVGNRVRLVNQIRGLLGEHGVVIAQAIGNLRRALPRVVDDESNGLTSIVRALIGELREELSDLDGRIAIYDRKIMELYRTSEACQRLGEVEGIGPITATALVAAAGDGRCFRNGRQFAAWIGLVPRQRSSGGRSRLLGISKRGDRYLRTLLIHGARAVMGRIRGKQDPRSLWLLKVRERHHANVVAVALANKNARIAWSLLARGLNYDQRQTVSSASAPRAV

SEQ ID NO: 15057 - protein, 340 aa, unidentified
  source 1..340: note = protein_7aea9c9
  REGION 7..149: note = RuvC_domain
  SITE 10: note = RuvC_P1
  SITE 53: note = RuvC_P2
  SITE 88: note = RuvC_P3
  SITE 90: note = RuvC_P4
  SITE 93: note = RuvC_P5
  REGION 211..296: note = Tnp_domain
  SITE 219: note = Tnp_P1
  SITE 249: note = Tnp_P2
  SITE 257: note = Tnp_P3
  SITE 258: note = Tnp_P4
  SITE 270: note = Tnp_P5
MEKVSIVGLDLAKNTIQVHGAAADGSIIFRRKVSNGKLLEFLSGINPCTVAMEACAGSHYWGREIGRLGHHVRLIAPIYVKPFVKRQKNDAADAEAICEAALPPTMRFVAVKSEAKQASGTLFKVRDLLVRQKTQIINALRGLLAEFGVVVAQGPAHVGILIEYVEDPCSNLPEAARAPCLGLVATLRSLVGEVRELDQEIARRARQDDVAKRLMTIPGVGPIIATALEALAPPAETFSRGRDFSAWMGLTPRQHSTGGKAKLGKTSKMGQRDLRRLLIIGASAVVRWASRHGAAEGSWLSRMIGTKPPMLITVALANRMARIAWALMTNGSRYEATRTA

SEQ ID NO: 15058 - protein, 399 aa, unidentified
  source 1..399: note = protein_c0ad4a4
  REGION 4..162: note = RuvC_domain
  SITE 7: note = RuvC_P1
  SITE 57: note = RuvC_P2
  SITE 99: note = RuvC_P3
  SITE 101: note = RuvC_P4
  SITE 104: note = RuvC_P5
  REGION 270..357: note = Tnp_domain
  SITE 278: note = Tnp_P1
  SITE 308: note = Tnp_P2
  SITE 316: note = Tnp_P3
  SITE 317: note = Tnp_P4
  SITE 330: note = Tnp_P5
MNAVGIDVSKGKSTVAVLRPFGESIVSPFDVSHNPKELSELVTLLKTLDGDTKVVMEYTGNYYLPIALFLRNNGLFVSVVNPILVKDYSTKSLTVRKVKTDKKDSVKLASFAIDRWKELSPFSVQSEARLLLKSYNRQYNQYIKLKVSLKNNLISLIDQTFPGANTLFSTPTRKSDGHEKWVDFILKYHHAACISKKSFSSFAKSYLAYFSESKAKSVYDFACNCSPSLSFTESTALLVSNATSQLNCINETLASLASEMNKLASTLPEYDTVMSMFGVGSVLGSQLIAEIGDVSRFSNKKALVGFAGLDASPFQSGNFNPQSRSISKRGSSALRKTLFQIMSVILQQAPLENSVFQFMDKKRSEGKHFYVYMIAAANKFLRIYYARVTEHLNSLKHTA

SEQ ID NO: 15059 - protein, 342 aa, unidentified
  source 1..342: note = protein_fe0befa
  REGION 6..147: note = RuvC_domain
  SITE 9: note = RuvC_P1
  SITE 52: note = RuvC_P2
  SITE 87: note = RuvC_P3
  SITE 89: note = RuvC_P4
  SITE 92: note = RuvC_P5
  REGION 211..296: note = Tnp_domain
  SITE 219: note = Tnp_P1
  SITE 249: note = Tnp_P2
  SITE 257: note = Tnp_P3
  SITE 258: note = Tnp_P4
  SITE 270: note = Tnp_P5
MEIRSVGIDLGKTSFHLVALGDKGKVLLKKKFTQKQLITFTANLQSCLIGMESCSGSHFLGRALREQGHEVKLIPAQFVKPFVKSHKNDFVDAEAIAEAVERENMRFVPIKTDDQLDLQSLHRVRERLMTRRTALINLIRGFLLERGIVFAKSPIRLREAMPEVLENANENLTPRMRNLIAILWSEWKDLELQIGEMNDEVERIASSDAACQRLRQIPGIGPLVATAIVASIGNGAAFSKGREFAAWLGLLPNQHSTGGKAKLGAISRRGNCYLRKILIHGARAVVLRSKRDRIAMGAWMTSLETRAPRNILIVATAHKLARIAWAVLSTGQDYRADVPAAA

SEQ ID NO: 15060 - protein, 276 aa, unidentified
  source 1..276: note = protein_d574801
  REGION 1..80: note = RuvC_domain
  SITE 21: note = RuvC_P3
  SITE 23: note = RuvC_P4
  SITE 26: note = RuvC_P5
  REGION 145..229: note = Tnp_domain
  SITE 153: note = Tnp_P1
  SITE 182: note = Tnp_P2
  SITE 190: note = Tnp_P3
  SITE 191: note = Tnp_P4
  SITE 203: note = Tnp_P5
MGYAIRLIPTQHVKALTRHQKNDANDALAICETAFRPGIHFVAVKTVEPQDIKALRCARQLMVEQRTAAANQIRSLAAEQGFEFPVGIHTLQQRLPGLIEDAEKPVSPVLRHLLSTLLGNIHTLNEYISSTEYEIAALYQQQPRYRILMTIPGVGPLIAAAFLSEVDAEQFANGRQLSAWCGLVPRQHSSGGKHILTSMTKNGNCDLRTLIIHGARAVIRCAQKRDDSLGRWLNHVTERRGKMKATVALANKLTHIVWRLLSEPVDFDMDKAFAAR

SEQ ID NO: 15061 - protein, 345 aa, unidentified
  source 1..345: note = protein_aea95f2
  REGION 6..147: note = RuvC_domain
  SITE 9: note = RuvC_P1
  SITE 52: note = RuvC_P2
  SITE 87: note = RuvC_P3
  SITE 89: note = RuvC_P4
  SITE 92: note = RuvC_P5
  REGION 211..310: note = Tnp_domain
  SITE 219: note = Tnp_P1
  SITE 249: note = Tnp_P2
  SITE 257: note = Tnp_P3
  SITE 258: note = Tnp_P4
  SITE 270: note = Tnp_P5
MEIHTIGIDLGKTIFHLVGLNQRGEVVERKKFSRAQLLRFTANRQVHLIGMEACGGSHFLGRALREQGHEVRLIPAQYVKPFVKTNKSDFIDAEAIAEAVGRPTMRFVPIKSDDQLDLQSLHRVRERWVMRRTAVVNQIRGLLLERGITVRKGRRHLDATLPEILEDASGKLSAALRLLLKQLSLELEQLATRLEEAETLIQLTAKNSEACRRLDAIPGIGPVTATALIAAIGNGAAFRKGREFAAWVGLVPREHSTGGRQKLLSISKRGNAYLRKLFVQCARSVLQQSSKQSARLSAWLGQLTARAHRNVVCVALANKLARIAWAVLATGQDYRPPELTAVAPD

SEQ ID NO: 15062 - protein, 422 aa, unidentified
  source 1..422: note = protein_776db52
  REGION 4..157: note = RuvC_domain
  SITE 7: note = RuvC_P1
  SITE 59: note = RuvC_P2
  SITE 94: note = RuvC_P3
  SITE 96: note = RuvC_P4
  SITE 99: note = RuvC_P5
  REGION 285..371: note = Tnp_domain
  SITE 292: note = Tnp_P1
  SITE 323: note = Tnp_P2
  SITE 331: note = Tnp_P3
  SITE 332: note = Tnp_P4
  SITE 344: note = Tnp_P5
MLGIGIDWAEEFHDVALGTVEKGVIEQFRVQHGPDGVAALIERALRLEPDPAEVRVVIETRHGLLVEALLDAGFTVLPVNPDLVARRRGPARKKDDAEDARICCLLALDRHQTLKTLVPHGEISGELRAIGRDDERAARDQRRLLNRLRADLQTTYPAALTLAGTDLGAPTVLRLLQRWSTQAELAQASRDELEAFARAGRHGWPARFADRVIDALAAPSLPTRDYLVRAKAAAIRLAAVQLLALHEARRGWEARMGELLLGGRRTGRDHIVEDPDPGKAFPGGDIYLSFPGLGDRLAARVAGEIGEHIDQFDSPNGLQCYAGQAPVTRRSGKSDFVVARRLAHNRYLGAAVHQWAFCSLTRSGWAREFYDAKIAAKKGHHAALRALGNRWLEILWHCLTKGMLYDENVHVANRNRALGRAA

SEQ ID NO: 15063 - protein, 392 aa, unidentified
  source 1..392: note = protein_94aae73
  REGION 4..163: note = RuvC_domain
  SITE 7: note = RuvC_P1
  SITE 60: note = RuvC_P2
  SITE 101: note = RuvC_P3
  SITE 103: note = RuvC_P4
  SITE 106: note = RuvC_P5
  REGION 267..354: note = Tnp_domain
  SITE 275: note = Tnp_P1
  SITE 305: note = Tnp_P2
  SITE 313: note = Tnp_P3
  SITE 314: note = Tnp_P4
  SITE 327: note = Tnp_P5
MIFVGIDVAKDKHDCFITNSDGEVLYKVFTITNNLEGFHDLYQKISSVMVDASKVKAGLEATGHYSYNLLGYLIDKGLTAYVINPLHTNLYRKSLSLRQTKTDKVDARTIASMLMSDVNLKSYSETSYHNQELKSLTRYRFDKVKERAKLKVSIARLINILFPELEKLVPTLHMASVYSLLSEFPGASHVASAHLTRLTNLLSEASKGHYDKDTAIHFREAAKHSIGSVMPAKSLELKHTIKLIQELTTEIDEIETAVKRIMDEEIRSPILTIPGISYRMGAMIIAEIGDFHRFDSADKILAYAGMSPSTYQSGQLDNGYSHMEKRGSRYLRYALYNATKYVCHWDEFFGAYLEKKRSEGKHYNVALSHAAKKPVRTIFAMEKSGQAYKATP

SEQ ID NO: 15064 - protein, 361 aa, unidentified
  source 1..361: note = protein_939af4a
  REGION 18..165: note = RuvC_domain
  SITE 21: note = RuvC_P1
  SITE 67: note = RuvC_P2
  SITE 105: note = RuvC_P3
  SITE 107: note = RuvC_P4
  SITE 110: note = RuvC_P5
  REGION 236..322: note = Tnp_domain
  SITE 244: note = Tnp_P1
  SITE 274: note = Tnp_P2
  SITE 282: note = Tnp_P3
  SITE 283: note = Tnp_P4
  SITE 295: note = Tnp_P5
MKRVQSNTLDFSGQNIYVGIDVHLKSWSVAILSKHSVLRRFRQDPEPEALHKYLVSNYPGANYFSVYEAGFCGFWIHEKLTDLGINNIVVNPADVPTMSKEKLRKTDAVDCNKLARELRSGSLEGIYVPGTDILEMRSLIRLRNLIVKDSTRAKNRIKSLLRFHGVEIPEEFTRSSIGCWSKRFLNWLHCLELSTEYGKKTLELHLEQFIRLRKMLLQETRAIREISRKAPFDKPIRLLTSVPGIGVTTAATLMVEIDDIVRFSNADHLASFIGLVPMCHSSGDNDNVGDITPRRHFMLRCLLVEAAWVAIRKDPAMTMAYTEYRKRMNPQKAIVKIARRLVNRVYFVLKHEKEYVPCVIK

SEQ ID NO: 15065 - protein, 345 aa, unidentified
  source 1..345: note = protein_46b837f
  REGION 6..147: note = RuvC_domain
  SITE 9: note = RuvC_P1
  SITE 53: note = RuvC_P2
  SITE 86: note = RuvC_P3
  SITE 88: note = RuvC_P4
  SITE 91: note = RuvC_P5
  REGION 210..305: note = Tnp_domain
  SITE 218: note = Tnp_P1
  SITE 250: note = Tnp_P2
  SITE 258: note = Tnp_P3
  SITE 259: note = Tnp_P4
  SITE 272: note = Tnp_P5
MNNTRIGVDLAKDVIQVCIYARNKVLSNTEMTYQAFALWLINTKPTTIIFEVCSTSNYWNQVALSLGYDAKLICPKFVSSIRKKQKTDANDALAIVQASFVTDITFISGKSIEQQQLQSIMRLRDLATKQKTALSNQLGALLLEFSIRCSPKLGGLRGAIESVLENAENEFSWALRASLKAAWDHYLMICQSVATYDESLIKAINEHPECKKLLKLEGVGVINAVNLYIALGCSEIGVFAKGKDAAACIGLTPIQHSSGGKTKLGSVGKYVKNSILRSQLVVGSMAAIRMIVKRDAKTKKERWIQELVSRRGIRCAAVALANKNVRTAYAMMTKGTDYKAELLAV

SEQ ID NO: 15066 - protein, 320 aa, unidentified
  source 1..320: note = protein_bc40741
  REGION 10..154: note = RuvC_domain
  SITE 13: note = RuvC_P1
  SITE 57: note = RuvC_P2
  SITE 97: note = RuvC_P3
  SITE 99: note = RuvC_P4
  SITE 102: note = RuvC_P5
  REGION 193..278: note = Tnp_domain
  SITE 201: note = Tnp_P1
  SITE 230: note = Tnp_P2
  SITE 238: note = Tnp_P3
  SITE 239: note = Tnp_P4
  SITE 250: note = Tnp_P5
MMAQNDLVVVGIDVAKDKVDACIRALGLRQTFPSTIQGHRKLVAWLRKHQVNKAVMEASGGYERAWAKVLREAGLEVRIVDPKRVRSFALSAGRLAKNDTIDAEMIAWFAETFSDAPGQKHDAAHEELQALVKARLSLIDLRMRLVSQSEHAAPGLVQKAHAHILKSLASEIAKLEAAICAKIKSLPDFAERAEIIESVPGFAETSSANLVAGMPELGQVSDEIAAALIGVAPYDDDSGKRRGERHIKGGRRWVRNAIYMPCVGAATLNNPVLKAYYQRLIAKGKEPKVAIIACMRKLIVILNTMIARRQKWDPSRYALS

SEQ ID NO: 15067 - protein, 341 aa, unidentified
  source 1..341: note = protein_0800b9c
  REGION 6..146: note = RuvC_domain
  SITE 9: note = RuvC_P1
  SITE 52: note = RuvC_P2
  SITE 87: note = RuvC_P3
  SITE 89: note = RuvC_P4
  SITE 92: note = RuvC_P5
  REGION 211..296: note = Tnp_domain
  SITE 219: note = Tnp_P1
  SITE 249: note = Tnp_P2
  SITE 257: note = Tnp_P3
  SITE 258: note = Tnp_P4
  SITE 270: note = Tnp_P5
MKIHSIGIDLGKTTFHLVALGAAGKVLVMKKFTQKQLLVYTANLQTSLIGLEACSGAHFLGRALRKQGHDVRLIAAQFVKPFVKTNKNDFIDAEAIAEAVERRNMRFVPIKTDDQLDLQAIHRVRDRLISRRTAVINQIRAFLLERGLVFAQTPAKLKAAMAEVLENADADLTPMMRNLIDALWSEWKQVEQQIEGLTDKLEEISAGDAGCSRIRKIPGIGPVVATAIVAAIGNGAAFSKGREFAAWLGVVPRQYSTGGKPRLLSISKRGNVYLRKVLIHGARAAVGRMKRDGLAVGAWLDRLDARAHKNVVVVAMANKLARTAWAVLSSGDDYRPKAISA

SEQ ID NO: 15068 - protein, 350 aa, unidentified
  source 1..350: note = protein_6409a54
  REGION 23..158: note = RuvC_domain
  SITE 63: note = RuvC_P2
  SITE 98: note = RuvC_P3
  SITE 100: note = RuvC_P4
  SITE 103: note = RuvC_P5
  REGION 221..305: note = Tnp_domain
  SITE 229: note = Tnp_P1
  SITE 259: note = Tnp_P2
  SITE 267: note = Tnp_P3
  SITE 268: note = Tnp_P4
  SITE 280: note = Tnp_P5
MHAFPGNRRIRNECYACWNRHCKSVFQVHYVAPETGEIVNKQIKRSQFLEYFANRAPCMIGMEACGSAYHWARQLMQMGHQVKLMPAKFVKAFNVGNKNDAMDAQAIWLAVQQPRKAVAVKSEMQQAVLMMHRQREQLVKFRTMQINGLRGMLAEFGEVMGKGRTAMIKAVQDALARAEARLPKLLIDTLREQWARVNKLDEEIATIERRLREWKKDDKAVQAVIEIPGVGLLTATAAVAMMGDPKAFKSGREFAAWAGLVPKQTGTGGKVSLHGISKRGDTYLRTLLIHGARSVLTNAKEPGPWVEGMKKRRPSNVVVVALANKMARTIWTVLAHDRPYRKDHVSVKSA

SEQ ID NO: 15069 - protein, 342 aa, unidentified
  source 1..342: note = protein_74fbc22
  REGION 6..148: note = RuvC_domain
  SITE 9: note = RuvC_P1
  SITE 52: note = RuvC_P2
  SITE 87: note = RuvC_P3
  SITE 89: note = RuvC_P4
  SITE 92: note = RuvC_P5
  REGION 211..298: note = Tnp_domain
  SITE 219: note = Tnp_P1
  SITE 249: note = Tnp_P2
  SITE 257: note = Tnp_P3
  SITE 258: note = Tnp_P4
  SITE 270: note = Tnp_P5
MNITTIGLDIAKNVFQIHGVDANGKVAFRKQLKRIQVLSFFANLSPCLIGLEACGGAHYWARELLKLGHDARLISPQFVKPYVKGNKNDANDAEAICEAVGRPSMRFVPVKSIEQQDIQMVHRVRSGLVKERAAQANRLRGLLSEYGIVMGQGLTQLRKRLPEILEDGENVLTMAARQIFADLQQQLIELDKQVSVYGEKILTLHRSSAVSKTLGTVPGIGPITATALLASLGDGKAFDKARQVPAWLGLVPRQDSSSGKPKLLGISKHGDTYLRTLLIHGARAVVKAAAKKDDVQSRWINDLVKRRNANIAAVAVANKNARIVWALLTRTESYHAPIPAGS

SEQ ID NO: 15070 - protein, 402 aa, unidentified
  source 1..402: note = protein_1b78105
  REGION 16..169: note = RuvC_domain
  SITE 19: note = RuvC_P1
  SITE 67: note = RuvC_P2
  SITE 108: note = RuvC_P3
  SITE 110: note = RuvC_P4
  SITE 113: note = RuvC_P5
  REGION 232..317: note = Tnp_domain
  SITE 239: note = Tnp_P1
  SITE 269: note = Tnp_P2
  SITE 277: note = Tnp_P3
  SITE 278: note = Tnp_P4
  SITE 289: note = Tnp_P5
MSGSDDQVVSRSQVVIGMDPHKRSVTIEMMTGVEEIVGGGRFGTDGAGFADLLRCAQEWPERVWAVEGCNGIGRHVATRLVEAGERVIDVPPKLSARVRIFATGQGRKTDATDAHSIALVGVRMSGLAPVVRDEQREVLRLLVDRRRRIGEEHTVKTCQLHSLLLELVPGGAKKDLSAAQARALLATVRPRDLVGKTRRRVAAELVTDLERIYARKKDADKELRQVLDDVGTGLLDLYGIGPSGAARLLVEVGDVTRFPDRGHFASWTGTAPIDASSGDHVRHRLSRKGNRQINQVLHIMATVQLRHRDTEGRAYYDRKTAAGKTSGEAMRALKRRLSDIVFTALLNDAAKAAAGPAAGPGGHSGTSTNSSVTSSHPDAGSSKKSLPEPATTQPRTTLPTAS

SEQ ID NO: 15071 - protein, 398 aa, unidentified
  source 1..398: note = protein_e04bf4c
  REGION 10..164: note = RuvC_domain
  SITE 13: note = RuvC_P1
  SITE 61: note = RuvC_P2
  SITE 101: note = RuvC_P3
  SITE 103: note = RuvC_P4
  SITE 106: note = RuvC_P5
  REGION 271..356: note = Tnp_domain
  SITE 279: note = Tnp_P1
  SITE 308: note = Tnp_P2
  SITE 316: note = Tnp_P3
  SITE 317: note = Tnp_P4
  SITE 329: note = Tnp_P5
MITNDVQIFLGLDVGKTDHWACAVTKDGTKIWNRTLPNDEAKLTAVYQDLSAKGTVLVVVDQPATIGALAVALAQHLGIPVAYLPGLSMRRIADMYPGSAKTDEKDAFIIADAARTMPHTLRSIEVADEDEATLAMLTGFDLDLARQITQTSNRIRGLFTQIHPPLERVIGPWLDHDAVLEVLATWPTPTQLRQAGKARIAAKLKKHGARRHTAWATTILAALEKQSVIVVGTDAAALVIPHLANQLISLHAQRSDVATHLEKMVEAHPLYPVLTSMPGVAVRTAAIIIAEISGKTFANAAAMASYAGLAPTTRQSGTSIKSERVSHSGNKRLKRALFLSAFASIRFDPTSRAYYDRKRAQGKRHNQALIALAHRRLTVLFALLRDKTLYDLPELKAA

SEQ ID NO: 15072 - protein, 391 aa, unidentified
  source 1..391: note = protein_1570bf4
  REGION 4..163: note = RuvC_domain
  SITE 7: note = RuvC_P1
  SITE 60: note = RuvC_P2
  SITE 101: note = RuvC_P3
  SITE 103: note = RuvC_P4
  SITE 106: note = RuvC_P5
  REGION 266..353: note = Tnp_domain
  SITE 274: note = Tnp_P1
  SITE 304: note = Tnp_P2
  SITE 312: note = Tnp_P3
  SITE 313: note = Tnp_P4
  SITE 326: note = Tnp_P5
MVSVGIDVSKDKHDCFIVNSEGEVLADVFTISNTMDGFNSLLEKIQNCTTPQDNIKVGLEATGHYSYNILGFLLDNGLATYVLNPLRTNLYRKSLSLRKTKTDRVDARTIAAMLLSDVGLKPYTDTAYHNEELKSLTRYRFDKVKERAKLKSSFSRLVCILFPELEKLVPTLHMASVYALLAEFPGAKQIAGAHLTRLKSLLTDASRGRYGRDMAVEIRDAARNSIGSVMPAKSLELKHTIHLIRELDAEIDEIEAAIQSIMDEINSPITTIPGIGYRMGAMILAEVGDFSRFGSSDKLLAYAGLSPSTYQSGQLKNCYPHMEKRGSRYLRYAIYNATKYVCLWNPTFAAYLAKKRAEGKHYNVAISHVAKKLVRLIFALEKSGQPYRLTA

SEQ ID NO: 15073 - protein, 416 aa, unidentified
  source 1..416: note = protein_e0caf22
  REGION 16..174: note = RuvC_domain
  SITE 19: note = RuvC_P1
  SITE 72: note = RuvC_P2
  SITE 113: note = RuvC_P3
  SITE 115: note = RuvC_P4
  SITE 118: note = RuvC_P5
  REGION 286..372: note = Tnp_domain
  SITE 294: note = Tnp_P1
  SITE 324: note = Tnp_P2
  SITE 332: note = Tnp_P3
  SITE 333: note = Tnp_P4
  SITE 345: note = Tnp_P5
MRTLKLTHKGFKMYYVGIDVAKEKHYVCILDDSGEIATKPFWIYTDIVGLRELVKRLADVSLKNDDFLIGVESTGAYSENLYEYITDSDYKVVLLNSYQTAKYRDFSTLKKIKNDTIDALVIAQLLHSGKYKESYISDDAYHSVKVLGRVKGSLDKKIKTIKREISTVIATVNPEITKVFPNIFTKTALEVIKAYPTATDIAQATPKKLTRLFRHIKGNNFSEEKAKLLIELAKTSVYAGRACDARASLLSSHIRILELYCQEKKEIEAQIKQFIEEEIDSIDNRVENLKSIPGVSDKTIASILGECGDLRRFTSAKAFIGYLGLYPTQYQSGNSLSVGRLAKRGIPIAKHALYMATVGSVLHNPQLNKLFHDKVSSGKSKKEALIILSKKIATIMYSIVIYNKPYDAQRVFIPNR

SEQ ID NO: 15074 - protein, 339 aa, unidentified
  source 1..339: note = protein_1808287
  REGION 6..147: note = RuvC_domain
  SITE 9: note = RuvC_P1
  SITE 52: note = RuvC_P2
  SITE 87: note = RuvC_P3
  SITE 89: note = RuvC_P4
  SITE 92: note = RuvC_P5
  REGION 209..295: note = Tnp_domain
  SITE 217: note = Tnp_P1
  SITE 247: note = Tnp_P2
  SITE 255: note = Tnp_P3
  SITE 256: note = Tnp_P4
  SITE 268: note = Tnp_P5
MHIKTIGLDLAKSVFQAHGVDEAGNAVLIKKLHRKQMIPFFSKLPPCLIGVEACATAHHWARTLTAMGHEVRIMPPSYVKGYVKRGKSDAIDAEAICEAVERPTMRFVPMKTIEQQSILMAHRTRALIVRQRTMAANALRAHLAEFGLVANPGIANLVKLADKAFADETLPPFAHRALEILIRRMAELTDEIGMLDEELKAWHVSNEASRRLAAIPGIGVITATAIAATVTDPEQFRSGRQFAAWLGLTPQQQSTGGKTRLGGISKQGDRYLRRLLVVGATAVMRHAKRNPTPMTDWVNNLLEKKPFRLVSVALANKLARVAWAILTRGETYRPYGLAA

SEQ ID NO: 15075 - protein, 319 aa, unidentified
  source 1..319: note = protein_bed1440
  REGION 6..152: note = RuvC_domain
  SITE 9: note = RuvC_P1
  SITE 57: note = RuvC_P2
  SITE 97: note = RuvC_P3
  SITE 99: note = RuvC_P4
  SITE 102: note = RuvC_P5
  REGION 192..278: note = Tnp_domain
  SITE 200: note = Tnp_P1
  SITE 230: note = Tnp_P2
  SITE 238: note = Tnp_P3
  SITE 239: note = Tnp_P4
  SITE 251: note = Tnp_P5
MSNVIIGVDIAKLKFDVARLYESKYKHAKFTNDAQGYANFIIWLASFGDINVRICMEATGAYSIPLAKFMADRGYFVSVINPAQIHAFGKSELIRAKTDKADAKLIARYGLQAELKAWVPLPINIRDLQAMTRRIEHLLEMQQMEQNRLDTADPAIIPSINAVLLTLDTELKATRKAIHDHIDNDPDLKNRSDLLDSIPGIGPAAIAHLLVALSLHHGYASAKQAVAHAGLAPKISESGTWTGKTRIAKNGDSRLRKALYMPALVAWQHNPVIRIFCERLKANGKNGKAIACAAMRKLIHLAFAILKSGEKFDPNFLLA

SEQ ID NO: 15076 - protein, 321 aa, unidentified
  source 1..321: note = protein_dc199ea
  REGION 4..150: note = RuvC_domain
  SITE 7: note = RuvC_P1
  SITE 52: note = RuvC_P2
  SITE 92: note = RuvC_P3
  SITE 94: note = RuvC_P4
  SITE 97: note = RuvC_P5
  REGION 191..278: note = Tnp_domain
  SITE 199: note = Tnp_P1
  SITE 229: note = Tnp_P2
  SITE 237: note = Tnp_P3
  SITE 238: note = Tnp_P4
  SITE 251: note = Tnp_P5
MTYVGIDVSKATFVVAYSSAKTGRTKTFKNTVKGVHEFIQTISAAEHHCVLEATGNYSALLVYLLSEAGITVSLENPLKIKNFARVMLSVTKTDEIDARLIALYGERMQPAPYKLRSDSILILKQKRTVLRQLKKQLVATHNLKGSLEVLPSFDPECKKTIEKTIAFLEKQIKAMEEKITSLAQSEYKKQMDLLTSIKGIGVTLAAALIVATGGFSYFDNAKQLTRYLGLSPTYQQSGTSVNVKDHINRNGDSNLRSQLYVAAFSSFRCNTECKACFDRLRSNGKPGKVAIVAVANKLVRQAFAVVTQGKPYVDGFKSEKT

SEQ ID NO: 15077 - protein, 386 aa, unidentified
  source 1..386: note = protein_777fc4c
  REGION 40..185: note = RuvC_domain
  SITE 79: note = RuvC_P2
  SITE 118: note = RuvC_P3
  SITE 120: note = RuvC_P4
  SITE 123: note = RuvC_P5
  REGION 255..342: note = Tnp_domain
  SITE 263: note = Tnp_P1
  SITE 292: note = Tnp_P2
  SITE 300: note = Tnp_P3
  SITE 301: note = Tnp_P4
  SITE 313: note = Tnp_P5
MQTPNDLSQSRIVLKQDTTLIAVIEMSLSSWLVAGIVPGVKRQPLKKLPVDESALLKLLNRWREEAEKAGRKIERIAVAFEAGRDGFWLARWLRARGIEAHVIHASSVAVSREHRRAKTDRLDTELLKRAFLGWLRGERDHSKMVAIPTIGDEDAKRPNRERESLVGEQTRIVNRMKAALSRLGIRGFNPKLKKAAERLEDLRTPEDEPIPPNTLAELRRDMERRRLVRSQIRDIEDARLGRLEKAPGDGPHAMVRLLARVIGVGIETADMLVQEVLSRNLRDRRAVARYGGLTGSPDESGKKRREKGLARSGNARVRRGMIQLAWRFLMFQKDSALAHWFYARTKQAPQTRKTMIVALARKLLIALWRLVREGVIPEGIVLRPAL

SEQ ID NO: 15078 - protein, 341 aa, unidentified
  source 1..341: note = protein_6f15fca
  REGION 7..148: note = RuvC_domain
  SITE 10: note = RuvC_P1
  SITE 53: note = RuvC_P2
  SITE 88: note = RuvC_P3
  SITE 90: note = RuvC_P4
  SITE 93: note = RuvC_P5
  REGION 209..295: note = Tnp_domain
  SITE 217: note = Tnp_P1
  SITE 247: note = Tnp_P2
  SITE 255: note = Tnp_P3
  SITE 256: note = Tnp_P4
  SITE 268: note = Tnp_P5
MSESALIGIDLGKHTFHLHGQDKSGRELFRKKCSRAQMMQFFASSPSCVVAMEACAGSNYVARQLAAIGHTAKLISPQFVKPFVKGNKNDFVDAEAICEAASRPSMRFVTPKTESQQTLSVLHRMRETLVRDRTRTANQMHGFLLEFGVSLPKGLAIMKRLAVVLAEHELPVRLTVLLQRLHDHFVYLDEQIKELDKEVAGQLADDDLGRRLLSIPCVGPITASLLAVEMGDGQQYGCSRDFAASVGLVPRQYSTGGRANLLGISKRGDKNLRRLLVQCARVYMQHLERQKGALADWVRSLLTRRHSNVVACALANKLARIAWAISAHHTEYEAGPDALNA

SEQ ID NO: 15079 - protein, 339 aa, unidentified
  source 1..339: note = protein_a7d5799
  REGION 6..147: note = RuvC_domain
  SITE 9: note = RuvC_P1
  SITE 52: note = RuvC_P2
  SITE 87: note = RuvC_P3
  SITE 89: note = RuvC_P4
  SITE 92: note = RuvC_P5
  REGION 211..297: note = Tnp_domain
  SITE 219: note = Tnp_P1
  SITE 249: note = Tnp_P2
  SITE 257: note = Tnp_P3
  SITE 258: note = Tnp_P4
  SITE 270: note = Tnp_P5
MNATTFGLDLAKRVMQVHWVEGETGEICRRQLKRGQVLEFFARRAPAVIAMEACGSAHYWGRKLVGLGHQVRLVAAQFVRPFVKTNKTDAADAQAIWEAAQRPGMRWVAVKSEGQQAVLMLHRMRSQLVEMRTMQVNQLRGLLYEFGAELPPGRRAGLARMPEELAKLEAVLPAMVIDTVREQLKRIGGLDQDIAEIERRLAAWKQDDAASRRLMAIPGVGLLTATAAVATIGEAKAFRSGREFAAFVGLVPRQSGTGGRVKLLGISKRGDVYLRTLLIHGARAVITHGKQHDAWLERLLARRPFNAAVVALANKMARTIWALLAHERTYQRNYAAAAA

SEQ ID NO: 15080 - protein, 408 aa, unidentified
  source 1..408: note = protein_b3015a8
  REGION 15..172: note = RuvC_domain
  SITE 18: note = RuvC_P1
  SITE 71: note = RuvC_P2
  SITE 111: note = RuvC_P3
  SITE 113: note = RuvC_P4
  SITE 116: note = RuvC_P5
  REGION 277..364: note = Tnp_domain
  SITE 285: note = Tnp_P1
  SITE 315: note = Tnp_P2
  SITE 323: note = Tnp_P3
  SITE 324: note = Tnp_P4
  SITE 337: note = Tnp_P5
MPVDSSREVTRMFYAGIDIAKRKHEVSIIDTEGRALSQSLSFTNDREGSDRLLALFERLSISPQELVIGMEATGHYWLSLYSWLLEKGYDVKVINPIQSDAFRRLSIRKTKNDSKDSLVIAQLMRFGEYSATRLSEENIHALKQLSRYRLSLVEECGNCKRRVIALLDQVFPEYETLFSDTFGTTSKELLLNCPTPEDMLTISSRKLTTLLTKTSKGRFRDEKANQIRKTASNSFGVTFSRDAFSFQIRQLIEQITFLEKQTEELEKKIAALLRKTNTVITTIPGIGETIGAAIIGEIGDINRFDTPGKLVAFAGLDAAVHQSGEFSGTKGGISKRGSPYLRRAIWMAASRAVFCDPILSKYYQGLKERGKHHLTAVSAVARKMCNIIFTILKENRPYEVNPPKPLRN

SEQ ID NO: 15081 - protein, 421 aa, unidentified
  source 1..421: note = protein_1972316
  REGION 39..194: note = RuvC_domain
  SITE 42: note = RuvC_P1
  SITE 93: note = RuvC_P2
  SITE 133: note = RuvC_P3
  SITE 135: note = RuvC_P4
  SITE 138: note = RuvC_P5
  REGION 297..384: note = Tnp_domain
  SITE 305: note = Tnp_P1
  SITE 335: note = Tnp_P2
  SITE 343: note = Tnp_P3
  SITE 344: note = Tnp_P4
  SITE 357: note = Tnp_P5
MLPGDHLPSTYFNQVYEDKRLWIVTASNTLGKEGFMIYAGIDIAKLNHFASAISSDGEVALKPFKFTNDYDGFSKLKSSLDSFDPDQLIIGLESTAHYGNNLVEFLVNNNYKVCVINPIQTSTLRKNNIRKTKTDKVDTLVIAKALMMNPTRFFTKYDITLLHLKELGRFRLKQIKKRTQAKIQLTSYVDQAFPELQYYFNGIHHKSCYALLKEAPTAAKVASMHMTHLSHLIEVASHGHFNKKTAKELRVLAQTSVGIDDSSVALQITQTIELIELLDKQVKTVESDMESLVKSLDSVIMTIPGIGYINGGMILGEIGDISRFSNPSKVLAFAGLDPAVYQSGFFEARSTKMSKRGSKALRFALVNAAHNVVKNNKTFKDYYAQKRSEGKSHYNALGHCAGKLVRIIYKMLTDNVAFNLD

SEQ ID NO: 15082 - protein, 381 aa, unidentified
  source 1..381: note = protein_0f23c64
  REGION 4..160: note = RuvC_domain
  SITE 7: note = RuvC_P1
  SITE 57: note = RuvC_P2
  SITE 97: note = RuvC_P3
  SITE 99: note = RuvC_P4
  SITE 102: note = RuvC_P5
  REGION 275..360: note = Tnp_domain
  SITE 283: note = Tnp_P1
  SITE 313: note = Tnp_P2
  SITE 321: note = Tnp_P3
  SITE 322: note = Tnp_P4
  SITE 335: note = Tnp_P5
MISVGIDVSKGKSTVCILKEYGEVISEPHEINHTEADLKALVESISELNEETRVVMEATGAYHLPLLTYLKNHGIFVAVINPLIMKKYSAIGLRKGKTDKLDSIKIANYGIDNWFKLTDYEATDEVYSELKLLGRQYSHYIAMRIESKLVLSNLLDRTMPGIKNLLKNRSDKPEKDKLNDFVKEYWHYDNITKKNEKQFINSYFKWAKNKGYHQSETKAKQIYALAQEGIPTLSSSTPSTKMLVLEAVRVLSEIDRTLSMILSQMQELASSLKEYNVVRNMPGVGDTLAPRLIAEIGDLKRFYNKKALIAYTGIDSPPFESGQFVANKRRISKRGSALLRKTGYEIMKCIKSAKPKDDPIFLYMLKKKQKENLKKLLKLLH

SEQ ID NO: 15083 - protein, 331 aa, unidentified
  source 1..331: note = protein_36985b4
  REGION 1..103: note = RuvC_domain
  SITE 2: note = RuvC_P2
  SITE 42: note = RuvC_P3
  SITE 44: note = RuvC_P4
  SITE 47: note = RuvC_P5
  REGION 207..294: note = Tnp_domain
  SITE 215: note = Tnp_P1
  SITE 245: note = Tnp_P2
  SITE 253: note = Tnp_P3
  SITE 254: note = Tnp_P4
  SITE 267: note = Tnp_P5
MESTAHYAENLTFFLFTRGFKLCIINPIQTASLRKSSIRKTKTDSIDTFLIIKALSLNHFRLFTQHDFDSMQLKSLCRFRQKLMKVRTKVKIQLVSYVDLLFSELQFFFKSGIHIKACYALLKEEPNPDKIASMHLTRLSNLLKKTSKGHFGKQHAIALKELAAQSVGIKNDTLSLQILQSINQIELFSSQLDEVEKLINQIMDNMDSVIKTIPGIGNLNGAMIIGEIGDITRFEKPCQLLAYAGLDPSVFQSGKFTASRTRMSKRGSKILRYALINAAWQTTLVNQTFRDYYNLKISQGRGHYSALGHVAHKLVRVIHKMMTDNVEFNLD

SEQ ID NO: 15084 - protein, 343 aa, unidentified
  source 1..343: note = protein_fc4050b
  REGION 6..150: note = RuvC_domain
  SITE 9: note = RuvC_P1
  SITE 54: note = RuvC_P2
  SITE 89: note = RuvC_P3
  SITE 91: note = RuvC_P4
  SITE 94: note = RuvC_P5
  REGION 213..299: note = Tnp_domain
  SITE 221: note = Tnp_P1
  SITE 251: note = Tnp_P2
  SITE 259: note = Tnp_P3
  SITE 260: note = Tnp_P4
  SITE 272: note = Tnp_P5
MTIIRVGVDIAKSVFHVHGADRQGKTCWQGKYSRSKWLDAISNKAPAGAEIGMEACASSHHWARELQKRGYRVRLIAAQFVKPYVKSNKNDRVDAEAICEAMSRPNMRFVTPKSVEQQDIQAMHRIREELVAQRTAKANQIRGLVGEYGIIAPIGIHQLRLALPNWLEDAENGLTYPFRQLLSDLAEDLRYLDGRVQKLDEQIRESVQCDPVAKRLMTLRGVGPLIASALSGALGDGKAFKKGRDFAASLGLTPRQHSTGGRDRLLGISKRGDSYLRKLLVHGARAVLRHATNKEDGLSRWLKGLASRKHTNVAVVALANKTARIAWALIYKKVDYDEALAAA

SEQ ID NO: 15085 - protein, 398 aa, unidentified
  source 1..398: note = protein_b8405a4
  REGION 4..163: note = RuvC_domain
  SITE 7: note = RuvC_P1
  SITE 61: note = RuvC_P2
  SITE 102: note = RuvC_P3
  SITE 104: note = RuvC_P4
  SITE 107: note = RuvC_P5
  REGION 269..356: note = Tnp_domain
  SITE 277: note = Tnp_P1
  SITE 307: note = Tnp_P2
  SITE 315: note = Tnp_P3
  SITE 316: note = Tnp_P4
  SITE 329: note = Tnp_P5
MLYVGIDIAKYKHDIAVIDSEGTIFVRHLQIQNTREGFTQLQATLTNLQKSTGEDIQLALEDTGHYCFNILRFLRTQGYPTYSYNPLLIKEFAKHHSLRKTKTDKKDAMTIARKLRADIDKQLFEAQTIMIELKYATRHAKRVKENCIRQKVSYTRLLDILFPELASFLSSPTAKHDAYVYELLKEFPSASKLATAHLTKLTNLISTHSRGRFGKEHAIQLKRLAYDSIGTISPALEFELLQTINAIEYFSAMRKAADNEIQKLMKEIDSPLLSIPGIGNNLGSILLAEIRDIRNFKSPSQLLAYAGAEPSISTSGTHQTETGHMVKRGSSQLRWALHEAARLCAIWSPSMRQYLDKKLSEGKHFNVALSHVVKKLVRIIFRVLKTGEPFEEDKMIVN

SEQ ID NO: 15086 - protein, 392 aa, unidentified
  source 1..392: note = protein_7525de3
  REGION 4..164: note = RuvC_domain
  SITE 7: note = RuvC_P1
  SITE 62: note = RuvC_P2
  SITE 103: note = RuvC_P3
  SITE 105: note = RuvC_P4
  SITE 108: note = RuvC_P5
  REGION 267..354: note = Tnp_domain
  SITE 275: note = Tnp_P1
  SITE 305: note = Tnp_P2
  SITE 313: note = Tnp_P3
  SITE 314: note = Tnp_P4
  SITE 327: note = Tnp_P5
MIYIGIDVAKAKHDCCIIDSDGVIINDSLRISNSREGFELLYSSILSVLPNKDISNVKIGLESTGHYSTNLQNYLYAKGFHLSILNPLATNLFRKAQTLRKTKTDKTDALVIAKMLFSDDTKSYSPVSYQIQELKSLTRHRYRLIGYRSRLKLSITRLIDIIFPELPKYVWSIHQVSVYALLSELPSPKEISNCHLTKLTNLLTKSTKGKYSRAKAIEIKEVASNSIGTSTRSLSFELQQIIRLIRSVQAEIDALDKQIKDVVIEIDSPLMSIPGISYTLASIILAEIGDIDRFTDPAKLLAFSGLDPSTYQSGKYNATHTPMVKRGSTYLRWAILTASRTVSMRDYTFGDYLAKKQSEGKHYYIAMSHVAKKLIRVIFYLLKTNTSFVSQI

SEQ ID NO: 15087 - protein, 382 aa, unidentified
  source 1..382: note = protein_e07f105
  REGION 49..190: note = RuvC_domain
  SITE 52: note = RuvC_P1
  SITE 95: note = RuvC_P2
  SITE 130: note = RuvC_P3
  SITE 132: note = RuvC_P4
  SITE 135: note = RuvC_P5
  REGION 253..340: note = Tnp_domain
  SITE 261: note = Tnp_P1
  SITE 291: note = Tnp_P2
  SITE 299: note = Tnp_P3
  SITE 300: note = Tnp_P4
  SITE 312: note = Tnp_P5
MNASHPINGCGLQKEVRCGASQIFGIKVPMMEMNYIPDWRLHTMKYTPIGVDIAKHLMQIHYVDPHSGELVDKKVKRNAFLTFFSNREPCLIGMEACGGSQFWARELKKMGHEVRLLQGKFVKAFVMGNKNDVMDARAIWMAVQQPGKSVPVKSAEQQAILALHKMRSQLVKFRTAQINAIHGILLEFGETINKGRTSLDKALPEVLERLKITLPPFFIYQIEDQHRRLKDLDAQINGIEKQLAAWARQDDDCQRLMQIPGVGALVATAALATMGNTGAFRSGREFAAYIGLVPKQTGTGGKIKLLGISKRGDKYLRMLLIHGARAAALLSKEPSPWVTELLKRRPVSVAVVAMANKIARTIWALIHYKRSYDKGDISVMPG

SEQ ID NO: 15088 - protein, 322 aa, unidentified
  source 1..322: note = protein_203c970
  REGION 1..148: note = RuvC_domain
  SITE 2: note = RuvC_P1
  SITE 50: note = RuvC_P2
  SITE 88: note = RuvC_P3
  SITE 90: note = RuvC_P4
  SITE 93: note = RuvC_P5
  REGION 193..280: note = Tnp_domain
  SITE 201: note = Tnp_P1
  SITE 231: note = Tnp_P2
  SITE 239: note = Tnp_P3
  SITE 240: note = Tnp_P4
  SITE 253: note = Tnp_P5
MDISKKYFDTVLFFSGEHARFTNEKKGFSCLIKWLKKHKLGPDNVLICFENTGYYSLQLSFYLSEKGFDYVQEHALHIKRSIGFRRGKSDKADAVDIARYSWVNRESIHLSKPPSRVLLKLQQIKTTRELLVKHMVAIKNQIHALAVLGDKNVSRIAGRSLNCVLRAIEKQIFKLEAEIEVLISQDDQLASTFELCRSVKGVGLVLAVELILHTQNFTCFNEWRKFAAYCGTVPYPYQSGTSVKGKSHVHPASDKRMKCLLTMASISALRADPELKIYYKRRIEEGKPKMSVINMVRNKMLARIFATVNRGTPFITLSKFAA

SEQ ID NO: 15089 - protein, 343 aa, unidentified
  source 1..343: note = protein_8872eb8
  REGION 6..148: note = RuvC_domain
  SITE 9: note = RuvC_P1
  SITE 52: note = RuvC_P2
  SITE 87: note = RuvC_P3
  SITE 89: note = RuvC_P4
  SITE 92: note = RuvC_P5
  REGION 211..297: note = Tnp_domain
  SITE 219: note = Tnp_P1
  SITE 249: note = Tnp_P2
  SITE 257: note = Tnp_P3
  SITE 258: note = Tnp_P4
  SITE 270: note = Tnp_P5
MEITTIGLDLAKSIFQVHAVDERGEPVVRKALRRAQVLPFFAKLPSCLVGMEACGTSHHWARELTKLGHQVRLMPPAYVKPYVKRGKTDAADAEAICEAVQRPTMRFVPVKSGEQQAALALHRTRDLLVKQRTQLVNMVRGLLAEFGIEMARGLHHALALARRLVAGEAPEVPVLAQRVVTRLADQIAALQLQLGKLEQELLAWHRSNDLSQRLATIPGVGVISATALAASVIEPERFRSGRQFAASLGLTPLQNCSGGKERLGRISRMGDRYLRRLLVVGMTSLIRRARTKPESVDPRLPAMLQRKPARLVSVAAANRTARVAWAIMTRGGTYRAPMVAGVA

SEQ ID NO: 15090 - protein, 391 aa, unidentified
  source 1..391: note = protein_681d42f
  REGION 4..163: note = RuvC_domain
  SITE 7: note = RuvC_P1
  SITE 60: note = RuvC_P2
  SITE 101: note = RuvC_P3
  SITE 103: note = RuvC_P4
  SITE 106: note = RuvC_P5
  REGION 266..353: note = Tnp_domain
  SITE 274: note = Tnp_P1
  SITE 304: note = Tnp_P2
  SITE 312: note = Tnp_P3
  SITE 313: note = Tnp_P4
  SITE 326: note = Tnp_P5
MIYVGIDVAKDKHDCFITNSDGEVLFKSFTIPNNRDGFETLFQKIQSVSDDLTKIKVGLEATGHYSYNLLGFLLDKGLTTFVINPLHTNLYRKSLSLRKTKTDKVDSRTIATMMMSDMNLKSYSDTSYHNEELKSLTRYRFDKVQERAKLKTSVSRLVCILFPELEKLVPSLHMASVYALLSEFPSAHSVASAHLTRLTNLLSESSRGRYGKDTAITFRESARNSIGSNMPAKSLELKHTIKLIQELTSEIDEIETKIKSIMDEINSPILTIPGISYSMGAMILAEIGDFSRFDSADKILAYAGMSPSTYQSGQLDNCYSHMEKRGSRYLRYALYNATKYVCHWDESFGAYLAKKRSEGKHYNVALSHATKKLVRTIYAMEKSRQTYRITA

SEQ ID NO: 15091 - protein, 344 aa, unidentified
  source 1..344: note = protein_bfd203b
  REGION 7..148: note = RuvC_domain
  SITE 10: note = RuvC_P1
  SITE 53: note = RuvC_P2
  SITE 88: note = RuvC_P3
  SITE 90: note = RuvC_P4
  SITE 93: note = RuvC_P5
  REGION 210..296: note = Tnp_domain
  SITE 218: note = Tnp_P1
  SITE 247: note = Tnp_P2
  SITE 255: note = Tnp_P3
  SITE 256: note = Tnp_P4
  SITE 268: note = Tnp_P5
MSHISRIGIDTSKSVFTLHCVDETGRQVLQTNLRRAQVATFFKKLLPTEVALEACGSSHHWARELVALGHDVRLIPPQYVKPFVKRAKNDRNDAEAICEAAGRPGMRFVPVKSADQQAQGMVLKVRETLVHQRTQLVNALRGHAAEFGVIAAKGISQITALLETIKATATIPPEARAMLALLGEEIKHLDTRLEEMATKLAAAHKANPVSQLLATIPGVGPIIALTLAVEIDPSAFQSGRHLAAWIGLTPKEHSTGGKQRMGGISRAGNERLRRLLVTGATSVIRFATRPGHKVASAWLLNLLQRKPRKLVAVALANKIARTAWAMMVSGEVWRRPSPAAQAAA

SEQ ID NO: 15092 - protein, 387 aa, unidentified
  source 1..387: note = protein_2cdedd8
  REGION 4..159: note = RuvC_domain
  SITE 7: note = RuvC_P1
  SITE 58: note = RuvC_P2
  SITE 98: note = RuvC_P3
  SITE 100: note = RuvC_P4
  SITE 103: note = RuvC_P5
  REGION 263..350: note = Tnp_domain
  SITE 271: note = Tnp_P1
  SITE 301: note = Tnp_P2
  SITE 309: note = Tnp_P3
  SITE 310: note = Tnp_P4
  SITE 323: note = Tnp_P5
MIYVGIDIAKQKHFAAAMTADGEVLIQPFGFTNDSEGFSLLVSKLKILDQENFLIGLESTSHYGENLICYLYNMGYHIAVINPIQTATLRKSNIRKTKTDKVDTILIIKSMILNNHRIFTKADIDSIRLKSLCRFREKTKKSKARLKIQLVSYVDIIFPELQCFFKSGIHINTCYELLKRHSNPNDIAALHLTYLGNLLKKASHSRFGKEEAIALKGLAKSSVGTGDAYLFIQITQTISQIELLEKQINELDESIKSIMIELDSVILTIPGIGFLNGAMILGEIGDISSFSNPSKLLAYAGLDPTVNQSGQFNAKTTRMSKRGSKLLRYALINAAWNVSLNNKTFNDYFMLKKSQGNNHYAALGHVAHKLVRVIFKILKDNVAFNLD

SEQ ID NO: 15093 - protein, 342 aa, unidentified
  source 1..342: note = protein_0839a2d
  REGION 1..105: note = RuvC_domain
  SITE 2: note = RuvC_P2
  SITE 42: note = RuvC_P3
  SITE 44: note = RuvC_P4
  SITE 47: note = RuvC_P5
  REGION 219..306: note = Tnp_domain
  SITE 227: note = Tnp_P1
  SITE 257: note = Tnp_P2
  SITE 265: note = Tnp_P3
  SITE 266: note = Tnp_P4
  SITE 279: note = Tnp_P5
MEYTGHYHYPVLKKLQEEGFPVCLVNPYQMKKYGDVEIHKAKTDKKDALRIAKYALEKSYMLTPYTSLEQKYEDLKFLSRQYNQRISMVSYTKTQLTNLLDETMPGITSLLKLKSRKPNECALLLFIKKYGSFDRVKAMGKSRFLSSYATLMKKSHDRYAPQKSLSIYELACDSITTRGDNDYIIAAQNQLVDLLATVQNAADEEIAQMQNIAETIPEYRILRAMNGVGDRLGPIILAEIGDIRRFHSAKALNSYAGNDAPPYQSGQFESRNRHISKRGSSALRKACFEVMQALKLTKPQDDPVYLFILKKEQEGKPYNVAKMAGVNKFLRIYYARAMELYK

SEQ ID NO: 15094 - protein, 382 aa, unidentified
  source 1..382: note = protein_73934a5
  REGION 3..158: note = RuvC_domain
  SITE 4: note = RuvC_P1
  SITE 56: note = RuvC_P2
  SITE 97: note = RuvC_P3
  SITE 99: note = RuvC_P4
  SITE 102: note = RuvC_P5
  REGION 261..344: note = Tnp_domain
  SITE 266: note = Tnp_P1
  SITE 296: note = Tnp_P2
  SITE 304: note = Tnp_P3
  SITE 305: note = Tnp_P4
  SITE 317: note = Tnp_P5
MYFDISKYKHDCFICTETGEVICENLSFQNTSEGFSQLLDLLKSLDNNKIIRIGFEATGHYGMNLKLFLEKNNYSFMEFNPALVKEFIKGQTLRRTKTDKKDAYQITRYLISVDYKPHPKQFYHKYSLKSLSRMREKFVKQRSYYEVALTNVLDHTFPEFKPFFNNEFSKTALFILDKYKSADKIGHMKDFDSIRKVSRGKFTSAHFIKLKELAKNTVGSSNDIFETELESLLLLHSQIDEQIKKLEDKIEIIIKELNPPTLSIKGIGIVSCAGIISEFGNISRFKSADAMVAFAGIEPSISQSGTESHNGHMVKHGSGHLRYFLLNAADYVFMHEPIFTEFYYKKRNEGKTHQVALNHVAKKLVRIIYKLESENIKFDHNI

SEQ ID NO: 15095 - protein, 342 aa, unidentified
  source 1..342: note = protein_3dd82b6
  REGION 6..147: note = RuvC_domain
  SITE 9: note = RuvC_P1
  SITE 52: note = RuvC_P2
  SITE 87: note = RuvC_P3
  SITE 89: note = RuvC_P4
  SITE 92: note = RuvC_P5
  REGION 211..296: note = Tnp_domain
  SITE 219: note = Tnp_P1
  SITE 249: note = Tnp_P2
  SITE 257: note = Tnp_P3
  SITE 258: note = Tnp_P4
  SITE 270: note = Tnp_P5
MKITTVGIDLAKNVFQVHGVNERGKTMLKKQLKREQMMLFFTNLPPCLIGMEACGSAHYWANQLQRVGHIVKLMAPQFVKPYVKTNKNDAADAEALCEAVTRPTMRFVPIKSREQLAVLALHRARQGFVKARTAQANQIRGLLAEQGIIIPKGIVHISLCLPKILEESENDLPGTFRQLLNRLGEHLKELDRHTKELEVQIQRWHRENAASKKLAQIPGIGPITASALVASVGNATNFENSRQLAAWLGLVPRQHSSGGKQNLLGISKRGDSYLRTLLIHGARAVLRVAERKAEHAGSWLAGIMERRNQNVAAVALANKNARIVWALLAHDRVFEANYGATT

SEQ ID NO: 15096 - protein, 341 aa, unidentified
  source 1..341: note = protein_858664b
  REGION 5..154: note = RuvC_domain
  SITE 8: note = RuvC_P1
  SITE 57: note = RuvC_P2
  SITE 95: note = RuvC_P3
  SITE 97: note = RuvC_P4
  SITE 100: note = RuvC_P5
  REGION 216..302: note = Tnp_domain
  SITE 224: note = Tnp_P1
  SITE 254: note = Tnp_P2
  SITE 262: note = Tnp_P3
  SITE 263: note = Tnp_P4
  SITE 275: note = Tnp_P5
MSIVGAFDVHRRQLTFEYLDSSTGELKRGRVIPADRQHLRAWLARFDGQGEVHFALEGCTGWRYVTEELLAAGITPHLAEPAGTAALRGRKRHAKTDKTDSRHLRVHLLAGDLPECWIPPEHVLEARATVRLYKDLLDERGAWHQRIAATLFHQGVPVIGSMAKPEGRAAVEQVELSPAGRQAVQTGLRQIDRLTGELDPLRRQLGMLSRRQPGCAALRATQFGVGPVTSVAIWAELGDVRRFANSGDVVRHTGLDITVYSSDTKRSAGHLSRQGPQLLRWALYESAKCAARPAAPDYGYYTAARDRRTAGLATLSVARKLARRCYHTLRELGEEALRPAA

SEQ ID NO: 15097 - protein, 344 aa, unidentified
  source 1..344: note = protein_d2616de
  REGION 9..148: note = RuvC_domain
  SITE 52: note = RuvC_P2
  SITE 87: note = RuvC_P3
  SITE 89: note = RuvC_P4
  SITE 92: note = RuvC_P5
  REGION 211..303: note = Tnp_domain
  SITE 219: note = Tnp_P1
  SITE 249: note = Tnp_P2
  SITE 257: note = Tnp_P3
  SITE 258: note = Tnp_P4
  SITE 271: note = Tnp_P5
MSKFNLISIDLAKNVFQVGKFFHQKLQSNKAVGRKELLTILTTSPRCKVVMESCGGAHYWARKARSVGHEVVILDPRFVKAFRVGQKTDANDVIAIAAASFSPNVRPCKSLTQAQQSLQSIERMRALAEKQKRQLANQIRGLLLEFGIVIKQSECAFRQAIPEILEDSDNGLTAGLRQCLAQCYELFKAQSTLKETLNELLTGLVKQDEQCERLLELEGVGPITAVGLLISLSDTTHFTSGRNAAANVGVTPRQHSSGGKVRIGHIAKYRGEITLRSHLFLGARAVISQLKHREPKTKKEQWLKALVERRGVKCAAIALANKTVRTAYAMLKKGTSYEPSLLAN

SEQ ID NO: 15098 - protein, 316 aa, unidentified
  source 1..316: note = protein_49d1c3f
  REGION 2..142: note = RuvC_domain
  SITE 48: note = RuvC_P2
  SITE 86: note = RuvC_P3
  SITE 88: note = RuvC_P4
  SITE 91: note = RuvC_P5
  REGION 187..274: note = Tnp_domain
  SITE 195: note = Tnp_P1
  SITE 225: note = Tnp_P2
  SITE 233: note = Tnp_P3
  SITE 234: note = Tnp_P4
  SITE 247: note = Tnp_P5
MVIYDSAKKHADTENYKQLSNSKEGYDTLLSWLKKKKAALDQIVVGLEHTGTYSFDLRLYLEKHQIDYCTFNPLHLKRSLGLVRGKNDKVDAERIAYFTYLHREELTYSKLSGSTVLRLQDLSAERKRFVTQQAEYKALLTDNKERPRTSTLLRAQNMVDVLEGEIKTVEEEMIALVGKDPAIAKNYELLTGIKGIGSVNAISTLIHTNNFEAFETARQYACYLGIAPFEHTSGTSVKGATRVSHIGAKLLKADLSQAAKSAIVWDKELKEYYIRKTMQGKAFGVVLNAVKFKLICRMFAVVKRGTPFVELNTYKS

SEQ ID NO: 15099 - protein, 311 aa, unidentified
  source 1..311: note = protein_8806643
  REGION 6..153: note = RuvC_domain
  SITE 9: note = RuvC_P1
  SITE 53: note = RuvC_P2
  SITE 92: note = RuvC_P3
  SITE 94: note = RuvC_P4
  SITE 97: note = RuvC_P5
  REGION 188..272: note = Tnp_domain
  SITE 196: note = Tnp_P1
  SITE 225: note = Tnp_P2
  SITE 233: note = Tnp_P3
  SITE 234: note = Tnp_P4
  SITE 245: note = Tnp_P5
MTDDTIGIDISKATLDIHRLSDGKTMSFSNCPAGFKALSRFCAKTAVARVVYEATGAYHSGLERALGAHLPLVKVNPLQARRFAQAQGLRAKTDAVDAKMLADMGNAFALEPDEPAAEIQHDLKELRSFRSGLIKDRTGIMSRMKTQTLSITRRQSKARLAQVDKQIAEINAEIERLINSSDKLAHSMKILRSIPGVGAICAATILIEMPETGSMDRKQVASLTGLAPMTRQSGQWRGKSFIQGGRKIVRDALYMPALVAMRHNPDFKAKYQALIKAGKPPKVAITALMRKLIELANALIKADRNWVTKGA

SEQ ID NO: 15100 - protein, 394 aa, unidentified
  source 1..394: note = protein_6b74b90
  REGION 4..164: note = RuvC_domain
  SITE 7: note = RuvC_P1
  SITE 59: note = RuvC_P2
  SITE 99: note = RuvC_P3
  SITE 101: note = RuvC_P4
  SITE 104: note = RuvC_P5
  REGION 267..354: note = Tnp_domain
  SITE 275: note = Tnp_P1
  SITE 305: note = Tnp_P2
  SITE 313: note = Tnp_P3
  SITE 314: note = Tnp_P4
  SITE 327: note = Tnp_P5
MILVGIDIGKNQHTFSIVDKNTGKILSNPSLFTNNQEGFLCLIKKLNRYSKSDLLIGMEDTGHYHFALLKYLLDIRYTVALINPTTTDLTRKLQGGITKNDPLDSLTICDVIGSNQRKKPYRITKVNRFDLYEQKQLTRHHHNLKEELNIYKNRLQKCIDIVFPEFNFLFQSKYGIVYMNVLKAFASAEKIATSDIRTIRKYFEYEGRGKRITLSAEQLKAAAKTSVGIPSVAEEIQIRHLVCQIEMIEEQLSEIDKKIEEFSLQNNSPILSIPGISHFSGTSILAELGDICNYTKASQIIKFAGVAPYHYESSQFTAQHTAITKKGSRYLRKTLYQIILPVINHNKVFTAYYNKKLIEGKGYRCAQGHCIRKLLRIIYHLLSTGQTFDPALLI

SEQ ID NO: 15101 - protein, 308 aa, unidentified
  source 1..308: note = protein_a5acb34
  REGION 5..151: note = RuvC_domain
  SITE 8: note = RuvC_P1
  SITE 52: note = RuvC_P2
  SITE 91: note = RuvC_P3
  SITE 93: note = RuvC_P4
  SITE 96: note = RuvC_P5
  REGION 185..269: note = Tnp_domain
  SITE 193: note = Tnp_P1
  SITE 222: note = Tnp_P2
  SITE 230: note = Tnp_P3
  SITE 231: note = Tnp_P4
  SITE 242: note = Tnp_P5
MKDSIGIDISKAHLDVCRPATGQTARFENSAAGLTAFKRWVGSSQPDLVIYEATGAYHGLLEKRCSGDLPLVKVNPLQARRFAQARGTRAKTDAVDAHVLALMGEALDLQPDSPASEDHHDLKQLQVARTAMIKARTRLKNRLATQTLSLLRRQAKVQLALLDRQLKAIDAEIASRLSRDQARSLDILQSIPGLGSVVAATILIECPEIGAMDRKQAASLAGLAPMARQSGQWRGKAFIQGGRKFLRDALYMPALVATRFNPDMKQKYNAMRKAGKPAKVALTAIMRKLIELANTLIKQDRKWAPNPA

SEQ ID NO: 15102 - protein, 409 aa, unidentified
  source 1..409: note = protein_663b69c
  REGION 24..177: note = RuvC_domain
  SITE 27: note = RuvC_P1
  SITE 75: note = RuvC_P2
  SITE 115: note = RuvC_P3
  SITE 117: note = RuvC_P4
  SITE 120: note = RuvC_P5
  REGION 283..370: note = Tnp_domain
  SITE 291: note = Tnp_P1
  SITE 322: note = Tnp_P2
  SITE 330: note = Tnp_P3
  SITE 331: note = Tnp_P4
  SITE 343: note = Tnp_P5
MEAWPEAIPLFRFLIEEVCMALFVGIDVSKDKFDACGIGEEGEKVFSLTATMDRKGFEKLIVHLKMKSSLLLGLESTACYHIALFSYLTAKGYKVVIINPLLISNFVKLQLRKTKTDKKDALTIARFLMLRREVLEKQTFSADLMELRDLARRRERLTDQVTKLKGNMKRILSVTFPELEQLTGIFTKSILQLLTRFPSADALRKADVDTIAAIVVPRSWGRKSRAWVETLMATASTSVGLSSPAKELILKQDASLLLYVEEQIKETTKLLMSVCNDRVKKDIEILTSIKGIGKTTAMNFLIEMGGDVRLYENDKKLIAAAGLDPSTYQSGKYEGASRISKRGNRHLRRVIWLMAKSTVLSNAPFRAYFYKRRKEGLPYKKAVLATAHKLIRVMFSMLVHQKCFEQGGK

SEQ ID NO: 15103 - protein, 407 aa, unidentified
  source 1..407: note = protein_007b3fc
  REGION 5..163: note = RuvC_domain
  SITE 8: note = RuvC_P1
  SITE 62: note = RuvC_P2
  SITE 102: note = RuvC_P3
  SITE 104: note = RuvC_P4
  SITE 107: note = RuvC_P5
  REGION 276..365: note = Tnp_domain
  SITE 284: note = Tnp_P1
  SITE 314: note = Tnp_P2
  SITE 322: note = Tnp_P3
  SITE 323: note = Tnp_P4
  SITE 336: note = Tnp_P5
MNPVIGLDISKEESHGQAFLDRGKTYRGIFYFQHTRDGLEILLQVIQDIERESGHRPTIILEATGHYQSPVVQFLEEHHYVFIVINPLISNRFRKTNLRKVKTNAADAYLLGELYYREEFEPFKKRGVQLLNIRYLTRQHESFSKMCVQTKLQFQAVLDQVFPAYKGVFGAMYSNVSLRFLHEFPTSSYVLKVSEETLKMTINALLSSKRGRSERWINERVQRLMVAAKQNPFQQTMYESHVINLKILISLILQYQEHLAMLEQTIDALATEIEEYDLIQSIPGIGPKIAATILSEIGEVDRFDHPKKLVAFAGIDPSVFASGKFTATRNRITKRGSRQLRYALVMAVQCGLIRSRNTRIKEFYERKRAEGKPHKVALVACANKLVHWLYAILKSKKRSVRYNKIMV

SEQ ID NO: 15104 - protein, 289 aa, unidentified
  source 1..289: note = protein_940ccaf
  REGION 17..98: note = RuvC_domain
  SITE 37: note = RuvC_P3
  SITE 39: note = RuvC_P4
  SITE 42: note = RuvC_P5
  REGION 160..246: note = Tnp_domain
  SITE 168: note = Tnp_P1
  SITE 198: note = Tnp_P2
  SITE 206: note = Tnp_P3
  SITE 207: note = Tnp_P4
  SITE 219: note = Tnp_P5
MEACAGAHHWGREIGKLGHDVRLIAPQYVMPFVKRQKNDAADAEAIAEAASRPTMRFVGVKTQRQQSQAMAFKTRDLLMAQRTQTINALRGHFAEYGIVVLTGPQNIRQLAAVLHEPEPDLTEAVVELGRELLKHLQMLSERIQTLDEVVRKAGQSDETARRLMKVPGIGPITAAAMVALSPDTSTFSKGRDFAAWLGHAPKQNSTGGKTRLGKTSKKGQRDPRRPLIIGAMAVVRHTAKQVSEKESWLGPMLARKPKMLVAVALANKIARVYIALLARGGVYESPATV

SEQ ID NO: 15105 - protein, 347 aa, unidentified
  source 1..347: note = protein_a49b8b8
  REGION 7..150: note = RuvC_domain
  SITE 10: note = RuvC_P1
  SITE 55: note = RuvC_P2
  SITE 90: note = RuvC_P3
  SITE 92: note = RuvC_P4
  SITE 95: note = RuvC_P5
  REGION 214..301: note = Tnp_domain
  SITE 222: note = Tnp_P1
  SITE 252: note = Tnp_P2
  SITE 260: note = Tnp_P3
  SITE 261: note = Tnp_P4
  SITE 273: note = Tnp_P5
MEIISRVGVDLAKNVFQLHGADRKGKTVWKRKLSRDKWLTVLFATVKPGAVIGMEACAGSHHWSRILMSKGYEVKIIPPQFVKPFVKSNKNDANDAQAICEAMVRPDMYPVNVKTIEQQDIQAIHRVRNEIKSHRIAKGNQIRGLVAEYGLVAPKELSSLRRAIPEWLEDASNGLTIFFRQLLQGLYEDLCSLDKRMTELDKQIALIAQQNPIAKRLQQLRGVGPLIATALVATMGDGKQYRKGRDMAAAIGLTPRQHSSGGKDRLLGISKRGDAYLRCLLVHGARSAMRTAKDKDDRLSRWITSLQDRRHANVAACAMANKMVRMAWAMMTRGVDYDPNFNVVSAN

SEQ ID NO: 15106 - protein, 339 aa, unidentified
  source 1..339: note = protein_d06b5e5
  REGION 6..147: note = RuvC_domain
  SITE 9: note = RuvC_P1
  SITE 52: note = RuvC_P2
  SITE 87: note = RuvC_P3
  SITE 89: note = RuvC_P4
  SITE 92: note = RuvC_P5
  REGION 211..299: note = Tnp_domain
  SITE 219: note = Tnp_P1
  SITE 249: note = Tnp_P2
  SITE 257: note = Tnp_P3
  SITE 258: note = Tnp_P4
  SITE 270: note = Tnp_P5
MQPIIVGLDLAKSVFQVHGVDAEGQVVVRRKLRRREVIPFFEKLDPCLIGMEACATAHFWTRELSKLGHDVRMMPPSYVKAYLRRQKNDAADAEAICEAVQRPNMRFVPLKSAERQSVLTLHKARELLVRQRTMLINAIRGHCAEFGLIAPLGARKVDELIEDVRSADEAIVPDIARTALLALADQLALLADEIGRMDRRLLAWHRQDELSQRLATIPGVGVIGATALSASIPNPTMFRSGREFAAFLGLVPRQNSSGGKDRLGRISKMGDGYLRKLLVVGATSVVRRAKTDALAAAPWVRSLLERRPARVATVAMANKTARIAWAVMARGEVYRPIAA

SEQ ID NO: 15107 - protein, 285 aa, unidentified
  source 1..285: note = protein_c6d4cbd
  REGION 9..162: note = RuvC_domain
  SITE 12: note = RuvC_P1
  SITE 60: note = RuvC_P2
  SITE 101: note = RuvC_P3
  SITE 103: note = RuvC_P4
  SITE 106: note = RuvC_P5
  REGION 224..284: note = Tnp_domain
  SITE 232: note = Tnp_P1
  SITE 262: note = Tnp_P2
  SITE 270: note = Tnp_P3
  SITE 271: note = Tnp_P4
MQHMEQIIIGVDPHKLSATIEVVDRHEQRLGSGRFMTDRSGYMAMRTYAKAWPERVWAIEGANGAGRPLTQRLLEAGESVVDVPAKLAARVRLFDTGHNRKTDALDAHSIAVVAVRTEGLRVLKVDGELEALRMLTDRREALTRRRIQTVNRLQALLAELLPGQAKKDITPLQAKAMLASIRPRDIAGKTRRSIAAEELAELAAVDAKIKKATVELKAIVLARDSHLMDIHGVGPVVAARVLADVGDVTRFADRNRFASWTGTAPLDASSGEQTNTGSPAPGTAE

SEQ ID NO: 15108 - protein, 391 aa, unidentified
  source 1..391: note = protein_f1b754d
  REGION 4..163: note = RuvC_domain
  SITE 7: note = RuvC_P1
  SITE 60: note = RuvC_P2
  SITE 101: note = RuvC_P3
  SITE 103: note = RuvC_P4
  SITE 106: note = RuvC_P5
  REGION 266..353: note = Tnp_domain
  SITE 274: note = Tnp_P1
  SITE 304: note = Tnp_P2
  SITE 312: note = Tnp_P3
  SITE 313: note = Tnp_P4
  SITE 326: note = Tnp_P5
MISVGIDVSKSKHDCFIMNSDGQVLADVFTIPNTLDGFHSLLQKISSCCQPQEIIKIGLEATGHYSYNLLGFLLDNGLPTYVLNPLRTNLYRKSLSLRKTKTDKVDARNIAAMLLSDLSLKPYSDTAYHNEELKSLTRYRFVKVKARAKLKASISRLVCILFPELEQLVPTLHMTSVYALLEAFPGAGKISEAHLTRLKTLLHDASKGRYGKDMALKLREASKTSIGSTLPAKSLELRHTIHLIRILDSEINDIEKEINKIMESINSPITTIPGLGARMAAMIIAETGDFSRFESADKLLAYAGLSPSTYQSGQLKNCYPHMEKRGSRYLRYAIFNATKFVCHWDSVFSVYLAKKRSEGKHYNVAISHAAKKLVRLIFALERSKQPYQLAI

SEQ ID NO: 15109 - protein, 427 aa, unidentified
  source 1..427: note = protein_a6f6994
  REGION 19..179: note = RuvC_domain
  SITE 22: note = RuvC_P1
  SITE 77: note = RuvC_P2
  SITE 118: note = RuvC_P3
  SITE 120: note = RuvC_P4
  SITE 123: note = RuvC_P5
  REGION 286..372: note = Tnp_domain
  SITE 294: note = Tnp_P1
  SITE 324: note = Tnp_P2
  SITE 332: note = Tnp_P3
  SITE 333: note = Tnp_P4
  SITE 345: note = Tnp_P5
MKYTQNEKILQVTEDTLIAGVDIAKESHYARAFDYRGVEYGKYLRFENNREGMTKFFKWAKDLMERHKKNKLIVGIEPTGQYWLCFAQYLKDNNIKVVLVNPFHVKRSKELDDNSPTKSDRKDPKTIAMLVKDGRYVEPIIPEGVYAELRVAMDIKDRLNKQIGMTKNQITRWLDIYFPEFNTVFSDWEGKAALITLREFPTPEKIAKKSAEEIISIWKKEVQRGVGEKRAIKLIETAKESIGKKQGIKMAEYEIKTLIEQYEFLKKQIEEVEKKIEELIVEIPGVKELLEIKGIGINTVAGFIAEVGDIEKYEHPKQIQKLGGLNLVENSSGKHKGETTISKRGRKRLRRVLFNAVMALVAKNEEFRELHKYYTTRAQNPLKKKQSLIVLCNKLIRVFYVILKKGVKYDPIKMMKDIKRPALQEAA

SEQ ID NO: 15110 - protein, 392 aa, unidentified
  source 1..392: note = protein_be09c4b
  REGION 4..164: note = RuvC_domain
  SITE 7: note = RuvC_P1
  SITE 62: note = RuvC_P2
  SITE 103: note = RuvC_P3
  SITE 105: note = RuvC_P4
  SITE 108: note = RuvC_P5
  REGION 268..354: note = Tnp_domain
  SITE 275: note = Tnp_P1
  SITE 305: note = Tnp_P2
  SITE 313: note = Tnp_P3
  SITE 314: note = Tnp_P4
  SITE 327: note = Tnp_P5
MIFVGIDVSKAKHDCCIIDSNGSVLADSLRIDNSKEGFETLYSAILSSLDYKDISKVKIGLESTGHYSTNITNYLYSKGFEVHTLNPLATNLFRKAGTLRKTKTDKTDAKVIATMLFSDESKSYSPVSYHIQELKSLTRHRFRLIGYRSKLKISVTRLIDVIFPELPDLFWSIHQASSYSLLLELPTPNDIKSCHLTKLTNIISKASNGRYDKEKAIALKELASNSIGSANRSVAFELQQTIRLIQSVQNEIDILDKQIKIVVDEIDSPIITIPGIGYTLAAIILAEIGDIERFLTPAKLLAFAGMEPSTYQSGKFNASKTPMVKRGSTYLRWAILQAARLVPMRDATFSAYLAKKRSEGKHFNVAQSHVGKKLLRVIFYLLKNNTAFVPQM

SEQ ID NO: 15111 - protein, 281 aa, unidentified
  source 1..281: note = protein_d4773fc
  REGION 1..76: note = RuvC_domain
  SITE 13: note = RuvC_P3
  SITE 15: note = RuvC_P4
  SITE 18: note = RuvC_P5
  REGION 187..273: note = Tnp_domain
  SITE 195: note = Tnp_P1
  SITE 225: note = Tnp_P2
  SITE 233: note = Tnp_P3
  SITE 234: note = Tnp_P4
  SITE 247: note = Tnp_P5
MKRFCSQSIRKVKTDRIDAMQIALYGLAYWQELQPARLPEDTYRELQLLARQYYQMTSLLIKAKVDFNALCDQVLPGMQELMSDHAGRHKLSDFVLRYCHTTHILEMGETRFRKDYCKWAEKKGYRNCERMAALIFATAQNGIPVLPNAPSTQIVITEAIRVLHTVEASRDAILTQMQALAKTLPEYSLVREMPCIGDTLAPRLIAEIGDVRRFHSKRALIAYAGIDAPPYQSGKFRANNRHISKRGNRYLRKTGYEVMQSYVMHKPANDPIFTFIEKKTQ

SEQ ID NO: 15112 - protein, 397 aa, unidentified
  source 1..397: note = protein_dc790d4
  REGION 7..162: note = RuvC_domain
  SITE 10: note = RuvC_P1
  SITE 67: note = RuvC_P2
  SITE 107: note = RuvC_P3
  SITE 109: note = RuvC_P4
  SITE 112: note = RuvC_P5
  REGION 208..296: note = Tnp_domain
  SITE 216: note = Tnp_P1
  SITE 246: note = Tnp_P2
  SITE 254: note = Tnp_P3
  SITE 255: note = Tnp_P4
  SITE 268: note = Tnp_P5
MTIKYSIGLDISSKKVNGSISLINESQKVTVKSSIVFNNTIKGFSELLLWIKKWHIEPEIPLVICMEATGVYHENYALFLFEKGYNVSIILPNKAKHYLISMGLKSKNDSIDAKGLSKMGAEQCLDLWQPAGKYFYELRQYTRQHQNLQEQKTVINNQLHALEFGMYDIKPVVKQLKKVVQLFNKQIKELEKIIKNHLESDQIVKQKVDNICQIKGIGILTLATILAETNGFELFKNYKQLVSYSGFDVVESESGSSVTGKTRISKKGNSHIRRALFMPAFTAVKYQEPAFFELYERTYAKHAIKMKSYVAVQKKLLTTIYHLWKKNEKYNPNYILTIQEKDQELSSLLGFEKAASIQKNSPNQVEAIQGKHPVKITVGFLFTNTNLEKYSQVKFVF

SEQ ID NO: 15113 - protein, 385 aa, unidentified
  source 1..385: note = protein_bbad913
  REGION 4..157: note = RuvC_domain
  SITE 7: note = RuvC_P1
  SITE 56: note = RuvC_P2
  SITE 96: note = RuvC_P3
  SITE 98: note = RuvC_P4
  SITE 101: note = RuvC_P5
  REGION 261..348: note = Tnp_domain
  SITE 269: note = Tnp_P1
  SITE 299: note = Tnp_P2
  SITE 307: note = Tnp_P3
  SITE 308: note = Tnp_P4
  SITE 321: note = Tnp_P5
MVYIGIDIAKFKHFASVVSSDGKVIVKPFSFENSRQGFMKLVEEIENFQDCLIGLESTGHYAENLIDFLYDRGYKIGVINPIQTDALRDSNIRKTKTDKIDTTLIVQCLMLNKYSLVNSKDIDMIKLKRLSRFRMEMVQQQTRIKTQLTSCLDIVFPELPLFFKGNIHLNSAYALLEKYSSAKTISSTRIDGLTNILYNNSRGKYNYDKAVELKALAKNSVGLYNPAIELQIQCLIKQLRLYKKQIAEIDEGIATIMKILNSPILTIPGIGYTLGAMILSEINDIKRFSNPSKLLAFAGLDPVVKQSGNFQASSTKISKRGSTYLRYAIYRVAFLIIYNNETFHNYYLDKRAQGKSHRSALGHVSNKLIRVIFKILTDQIPFNLS

SEQ ID NO: 15114 - protein, 271 aa, unidentified
  source 1..271: note = protein_821a299
  REGION 2..73: note = RuvC_domain
  SITE 14: note = RuvC_P3
  SITE 16: note = RuvC_P4
  SITE 19: note = RuvC_P5
  REGION 138..221: note = Tnp_domain
  SITE 146: note = Tnp_P1
  SITE 176: note = Tnp_P2
  SITE 184: note = Tnp_P3
  SITE 185: note = Tnp_P4
  SITE 197: note = Tnp_P5
MSPEYVRPYIKAQKNDDRDAEGIAEAASRPTMRFVELKSREQLDIQTLHRVRSRLVAERANLLNQMRAILLERGVIFSAGGRRFELELDSMLSEGSEMLSQRMLQLIKGLRGEWKELDAKIGALNDEFVQLARNDDATRRLTSIPGIGVLNAAALVAAVGKASRFAKARDLGSWLGLVPRQYSTGGKARLLGISKRGNTYLRTLLIHGARAALPSLSKSDTPLGRWLTAMIERGVHRNAMVVALANKLARIAWAALRKETYFERGYLAATA

SEQ ID NO: 15115 - protein, 344 aa, unidentified
  source 1..344: note = protein_58202d3
  REGION 7..148: note = RuvC_domain
  SITE 10: note = RuvC_P1
  SITE 53: note = RuvC_P2
  SITE 88: note = RuvC_P3
  SITE 90: note = RuvC_P4
  SITE 93: note = RuvC_P5
  REGION 211..295: note = Tnp_domain
  SITE 219: note = Tnp_P1
  SITE 249: note = Tnp_P2
  SITE 257: note = Tnp_P3
  SITE 258: note = Tnp_P4
  SITE 270: note = Tnp_P5
MAIDKMIGIDLAKRVFQFHVATMTGEVLLRRKLSRDKVHEFMATHEPAIVVMEACGSAHYRAREFRQMGHVVKLIAAQYVRPFVKRQKNDAADAEAIVIAAQRPEMRFIEPKTEEQQAKAVLFRTRERLVHQRTEIINGLRAALYEFGYVVPQRIVHLRLIREIIEGPNCDLPELVRTECEDMLDQIDGLNVRIDAKAAAIRSPALKTDVSRRLESMPGVGPMTALAIEAYAPPMEVFQNGRAFAAWLGLVPRQHSSGGKEKLGRMSKAGQADIRKLLVIGAMSRLTWLGRKAIQPGSWLDRMLARKPLMLVAIALANKMARQIWSMLMKGEDYRNPTSFALAR

SEQ ID NO: 15116 - protein, 398 aa, unidentified
  source 1..398: note = protein_d861d18
  REGION 4..160: note = RuvC_domain
  SITE 7: note = RuvC_P1
  SITE 57: note = RuvC_P2
  SITE 97: note = RuvC_P3
  SITE 99: note = RuvC_P4
  SITE 102: note = RuvC_P5
  REGION 271..358: note = Tnp_domain
  SITE 279: note = Tnp_P1
  SITE 309: note = Tnp_P2
  SITE 317: note = Tnp_P3
  SITE 318: note = Tnp_P4
  SITE 331: note = Tnp_P5
MICVGIDIAKGKSTVCFLKPGGEVLRTPYDIEHTAEEIGKLIRDIRSYDEEVRVVLEATGHYHLPVVAQLLEANIFVCVVNALRMKKFCSQDIRKAKTDKIDSMKIAAFGLTYWQDLKAAKPTDEVYRELRLLSRQYFQLTSMLTKAKITMGNVLDNVMPGITKLLYDRAPNHKLTDFVLRYLHFDKISAMGERRFTTDYCKWAKKQGYILYERQAKEIFALVQNGIPALPMTASTTIVVKEAIRVVRELENSRASILAQMQTFAKSLPEYSLIRSMACVGDTLTPLVIAEIGDVRNFHSKHALIAYAGIDAPPYQSGGFYGTERHISKRGNGYLRRVGFEIMQCKLRFKPEGDVVYDFVQKKRSEGKCGKEAMVAGINKFLRIYYGKVTELYRELEA

SEQ ID NO: 15117 - protein, 397 aa, unidentified
  source 1..397: note = protein_d872f49
  REGION 9..163: note = RuvC_domain
  SITE 12: note = RuvC_P1
  SITE 60: note = RuvC_P2
  SITE 100: note = RuvC_P3
  SITE 102: note = RuvC_P4
  SITE 105: note = RuvC_P5
  REGION 270..355: note = Tnp_domain
  SITE 278: note = Tnp_P1
  SITE 308: note = Tnp_P2
  SITE 316: note = Tnp_P3
  SITE 317: note = Tnp_P4
  SITE 329: note = Tnp_P5
MDTSYAVFCGIDVGKGEHHAAGLTAAGKKIYDKALPNDETKLRAVFDGLAAHGPVLVIVDQPNTIGALPVTIARACGHDVAYLPGLSMRRIADLYPGQAKTDARDAFIIADTARTMPHTLRRVDTGDEALAELEVLVGFDDDLAGEATRISNRIRGLLTSIHPALERALGPRVTHPAVLEILSRCGGPAGIRQAGKRKLTTLAVKHAPRMGARLATEILTALETQSVTVPGSKAAEIVLPKLADSLKEVLLQRKTIGDDVERMLDDHPLSRVLTSMPGIGVRTAARILLEVGDGSAFKSAGHLAAYAGIAPVTHRSGSSIRGEHPARSGNRKLKRALFLSAFAALGDPTSRGYYDRKRAEGKKHNAALICLARRRCDVLYAMLKNKTLYQPPVTAAA

SEQ ID NO: 15118 - protein, 288 aa, unidentified
  source 1..288: note = protein_7b0f907
  REGION 1..119: note = RuvC_domain
  SITE 21: note = RuvC_P2
  SITE 59: note = RuvC_P3
  SITE 61: note = RuvC_P4
  SITE 64: note = RuvC_P5
  REGION 163..250: note = Tnp_domain
  SITE 171: note = Tnp_P1
  SITE 201: note = Tnp_P2
  SITE 209: note = Tnp_P3
  SITE 210: note = Tnp_P4
  SITE 223: note = Tnp_P5
MFLKWIKGEHCPIETTLICMEHTGLYKNILVDVLTSNQCNLWVEMAYRIIRSSGIQRGKNDKVDSARIAQYAKKNQEEVKLFKCSKEVLDKIKGLLNLRELNVSYKTAVQVNIQELKGYNDPVYNLLSKSKKNAAKAVKKTIEDIDKQLEELVKQDSEISQVYNCITSVKGVGSITALFLLCYTDSFTSFDSPRELASYCGVVPFEYTSGKSIRGKAKVHFMANKKLKKLLHLCALSSIRYDPEIKTYYEKKVEEGKHKMLVLNNVRNKLIHRICSCVRNNKRYEVAA

SEQ ID NO: 15119 - protein, 389 aa, unidentified
  source 1..389: note = protein_5c935d1
  REGION 4..163: note = RuvC_domain
  SITE 7: note = RuvC_P1
  SITE 60: note = RuvC_P2
  SITE 101: note = RuvC_P3
  SITE 103: note = RuvC_P4
  SITE 106: note = RuvC_P5
  REGION 266..349: note = Tnp_domain
  SITE 274: note = Tnp_P1
  SITE 304: note = Tnp_P2
  SITE 312: note = Tnp_P3
  SITE 313: note = Tnp_P4
  SITE 326: note = Tnp_P5
MIYVGIDVAKDKHDCSILGSEAEKLFPVFTIPNNKAGYDELYQKISELTKNKAEIKVGLEATGHYSLNILGSLIDKGLTTYVINPLHTNLYRKGLSLRKTKTDKVDAYSIAMMLMTDKTLKPYSDTSYHSEELKSLTRYRFDKVQERAKLKSSVSRLVNILFPELEKLVPTLHMASVYALLSEMPGASYIASCHLTHLKSVLYTASRGRYGDEVARTIRNAARDSIGSVMPSKSLELKHTIHLIDVLTAEIEEVEKSIKSIMDTCNSPIMTIPGISYRMGAMILAEIGDFTRFSSADKILAYAGMSPSTYQSGQLNSSHSHMEKRGSSYLRYALFNATKFVCKWDESYGIYLSKKIGEGKHYSVAVSHAAKKLVRLIYRMELTGEPYHG

SEQ ID NO: 15120 - protein, 406 aa, unidentified
  source 1..406: note = protein_c929b10
  REGION 4..160: note = RuvC_domain
  SITE 7: note = RuvC_P1
  SITE 57: note = RuvC_P2
  SITE 97: note = RuvC_P3
  SITE 99: note = RuvC_P4
  SITE 102: note = RuvC_P5
  REGION 274..361: note = Tnp_domain
  SITE 282: note = Tnp_P1
  SITE 312: note = Tnp_P2
  SITE 320: note = Tnp_P3
  SITE 321: note = Tnp_P4
  SITE 334: note = Tnp_P5
MNAVGIDVSKGKSTVTIRRPGDIVIMPPRDIPHTQSAINSLIEQIRALDGETKVCMEHTGRYYEPVATWLSDAGIFVSAVNPILIKDFGDDSLRTPKTDKADSKKIARYTLDRWAKLKQYGSMDKTRNQLKTMNRQFGFFMAQKTAMKNNLIALLDQTYPGANNFFDSPARNDGSQKWVDFVHTYWHVDCVRSKTLNTFTEHYRNWCKRKGYNFSAAKAEKIYQSSSDLIAVFPKDDSTKLLIRQAVAMLNTASETVESLRLKMDETASSLPEYTVVMAMNGVGPTLGPQLMAEIGDVTRFTHRGALTAFAGVDPGKNDSGQHIQKSVHTTKKGSPSLRRTLFQIMDGLIKRSPIDDPVYAFMDKKRAQGKPYYVYMTAGANKFLRIYYGRVKEYLSTLTESEKLK

SEQ ID NO: 15121 - protein, 300 aa, unidentified
  source 1..300: note = protein_d5ac63d
  REGION 6..147: note = RuvC_domain
  SITE 9: note = RuvC_P1
  SITE 52: note = RuvC_P2
  SITE 87: note = RuvC_P3
  SITE 89: note = RuvC_P4
  SITE 92: note = RuvC_P5
  REGION 211..294: note = Tnp_domain
  SITE 219: note = Tnp_P1
  SITE 249: note = Tnp_P2
  SITE 257: note = Tnp_P3
  SITE 258: note = Tnp_P4
  SITE 270: note = Tnp_P5
MQIHSVGIDLGKTTFHLVALSAAGKVLLRKKFTQKQLITFTANMQTSLIGMEACSGAHFLGRALRAQGHDVKLIPAQFVKPFVKSNKNDFLDAEAIAEAVDRQNMRFVPIKTDDQLDLQAMHRVRDRLVARRTSVINQLRAFLLERGMVFAKTPIKLRQAMPEILENAESNLTPRMRNLVSLLWSEWKDLQQQIVAMNEEVEQIASSDPACQRLRQIPGIGPLVATAIVAAIGNGAAFHKGREFSAWLGLVPRQHSTGGKARLFGISKRGNRYLRKLLVHGARSAVLIVKRDAFPVWALA

SEQ ID NO: 15122 - protein, 392 aa, unidentified
  source 1..392: note = protein_29091ab
  REGION 4..165: note = RuvC_domain
  SITE 7: note = RuvC_P1
  SITE 59: note = RuvC_P2
  SITE 100: note = RuvC_P3
  SITE 102: note = RuvC_P4
  SITE 105: note = RuvC_P5
  REGION 266..353: note = Tnp_domain
  SITE 274: note = Tnp_P1
  SITE 304: note = Tnp_P2
  SITE 312: note = Tnp_P3
  SITE 313: note = Tnp_P4
  SITE 326: note = Tnp_P5
MFYIGIDVSKDKHDCFCCNDDLQPVFQFQFSNDSIGFNLLFEAIKSLDSSFDNIKIALEATGHYSYNITSFILDNDLPLAIINPLHSNLFRKSISLRKTKTDKVDANVLARMLVAYPDLKFSTSLDDNDIILSELKSLTRFRLSLVKDLSKLKTSVSRIINIIFPEIEKAFSSTNSLYELLYNFPSAKEIANAHLTKLTNVLIKASRGHFSKEKAIQIKELAKNTVGNSSCASTFELKHTIKLINEYNYSIDKIDKEINTIMDKIASPITSIPGIGITLASIIIAEIGNFDNFDSPDKILAFAGMSPTIYQSGKYVASSAKMEKRGSKALRYALYNAARLTSIYCPVFKEHLARKRSQGKHFNVAISHVVKKLVRVIYHLQTKNELFKNIIN

SEQ ID NO: 15123 - protein, 364 aa, unidentified
  source 1..364: note = protein_7c1db41
  REGION 10..164: note = RuvC_domain
  SITE 13: note = RuvC_P1
  SITE 61: note = RuvC_P2
  SITE 101: note = RuvC_P3
  SITE 103: note = RuvC_P4
  SITE 106: note = RuvC_P5
  REGION 272..356: note = Tnp_domain
  SITE 280: note = Tnp_P1
  SITE 310: note = Tnp_P2
  SITE 318: note = Tnp_P3
  SITE 319: note = Tnp_P4
  SITE 331: note = Tnp_P5
MEDTTYDVYLGLDVGKTDHYGCALTSSGTKIYDKALPQDEASLRAVFDELATHGRVLLIVDQPNTIGALPIAVARACDCGVAYLPGLAMRKAADLYPGQAKTDPRDAFIIANTARTMPHTLRAVDRNAEVFSALKMLSGLDDDIARDCTRTINRLRSILVQIYPSLERVFAGEIIQRAFVLDLLIHYGGPTKLKRSGKNRVLAWSRKRAKKDPESLVDAIFQALAAQTVTVPGTAAAEVAIPMLATNIKALKAQRDSIAGQVEEMLDDFPLAEVLMSMPGVGIKTAANILLAVGDCSDFPDAAHLAAYAGIAPITRRSGTSIKGEFPARSGNKRLKNALFRSARVASNCHEAFPVVLHQEAGRG

SEQ ID NO: 15124 - protein, 311 aa, unidentified
  source 1..311: note = protein_4fab5d1
  REGION 1..66: note = RuvC_domain
  SITE 5: note = RuvC_P3
  SITE 7: note = RuvC_P4
  SITE 10: note = RuvC_P5
  REGION 179..266: note = Tnp_domain
  SITE 187: note = Tnp_P1
  SITE 217: note = Tnp_P2
  SITE 225: note = Tnp_P3
  SITE 226: note = Tnp_P4
  SITE 239: note = Tnp_P5
MRKAKTDQKDALLLADLLRLGRTPTTKLPSETVLKLQTLSRLRFEFVRQVGGLKNRVLGILDRIFPEYPGCFSDVFIRTSRELLKSYPEPEELATVDLSELAAFLKEHSRGRFGEERAKKIQSLAKGTFGITLALDAFALQLRLLLEQIEFIEEQVKVIEEAINEVMEELRPDRDTPYRHVIETIPGIGPVLAAAIIGEIGDVSRFPNARALVAYAGLDASVRVSGLFEGTRNRMSKRGSPMLRNSLWLSAVLARRFNQELKEYYELKCSQGKHSSVATGAVARRLVHLIYALWKENRPYDPNYQWSPPRK

SEQ ID NO: 15125 - protein, 346 aa, unidentified
  source 1..346: note = protein_92136ed
  REGION 13..155: note = RuvC_domain
  SITE 16: note = RuvC_P1
  SITE 59: note = RuvC_P2
  SITE 94: note = RuvC_P3
  SITE 96: note = RuvC_P4
  SITE 99: note = RuvC_P5
  REGION 218..306: note = Tnp_domain
  SITE 226: note = Tnp_P1
  SITE 256: note = Tnp_P2
  SITE 264: note = Tnp_P3
  SITE 265: note = Tnp_P4
  SITE 277: note = Tnp_P5
MKDCTVKGDIKVLGVDLSKSSIQLHGINESGKPALKKKFSRNKVTEFIAKLPPCLIGLEACGGAHYWVRTFAKFGHEVRMIAPQFVKPYVKSNKNDAVDAEAICEAVQRPSMRFVPNKSIEQQDIQSMHRIRSLLVSRRTAQANQIRGLLMEYGVVIPKGIACIRKAIPEILEDAENNLTSIFRELLSELYEEMVHLDERVATLEKKLQSISLQNKDCQRLLTIPGVGLLTATAMVAAVSDIKAFKNGRELAAWLGLVPKQHSTGGKPTLMGISKRGDNYLRTLLIHGGRTVVRVADKYKDKRNRWISELDQRRGKNISAVAVANKNARIAWALLSKKVNYDAAVG

SEQ ID NO: 15126 - protein, 345 aa, unidentified
  source 1..345: note = protein_99006af
  REGION 6..147: note = RuvC_domain
  SITE 9: note = RuvC_P1
  SITE 52: note = RuvC_P2
  SITE 87: note = RuvC_P3
  SITE 89: note = RuvC_P4
  SITE 92: note = RuvC_P5
  REGION 213..300: note = Tnp_domain
  SITE 221: note = Tnp_P1
  SITE 251: note = Tnp_P2
  SITE 259: note = Tnp_P3
  SITE 260: note = Tnp_P4
  SITE 272: note = Tnp_P5
MDIIRIGLDLAKTVFQVHGVDSDDRILVRKTLHREAVVPFFAQLPPCLVGMEACSGSHYWARVLSELGHEVRLIAPQFVTPYVKSNKNDRNDAEAICEAVGRPSMRFVPQKSPEQLEIQAVHRIRQRLISGRTRLVNQVRGLLAEHGVVIARNISRLRQALGQIEDGCRRDDGVPDMIRELVIEIRAELTGLDKRIACFDRKIRVVFRTNENCRRIGRIEGIGPITATALVAAAGDQSCFRNGREFAAWLGLVPRQRSSGGKARLFGISKRGDRYLRTLMIHGARAVLGKAHGKTDARSLWIGRLRERRHPNVVAVALANKNARIVWSVLARNEQYDPTRGAAVS

SEQ ID NO: 15127 - protein, 302 aa, unidentified
  source 1..302: note = protein_650b95c
  REGION 2..110: note = RuvC_domain
  SITE 15: note = RuvC_P2
  SITE 50: note = RuvC_P3
  SITE 52: note = RuvC_P4
  SITE 55: note = RuvC_P5
  REGION 174..260: note = Tnp_domain
  SITE 182: note = Tnp_P1
  SITE 212: note = Tnp_P2
  SITE 220: note = Tnp_P3
  SITE 221: note = Tnp_P4
  SITE 233: note = Tnp_P5
MAFFANYPTSLIGIEACGSAHHWARELIKLGHEVILLNARYVKGFVIGNKNDFNDAAGIFDAVTRPNKRSVPIKTIEQQDIQLVHTIRNGLIRKRTTLANQTRGLLSERGIVIPKSINQLRKQLPLILEDAENNLTPLSREMFAEHYERLRGLDDEIKTQDQRINRLCQANELSERFTEVRGVGALVATAVLFDIGDGKGYARSSDYSANLGLVPRQHSSGDKQVFLGISKRGNRYIRTLLIHGARAVLTHCGKKQDKLSLWLHALIERRGFNRAAVALANKNARILWAMTTQGTKYDASLV

SEQ ID NO: 15128 - protein, 341 aa, unidentified
  source 1..341: note = protein_af81ef5
  REGION 6..148: note = RuvC_domain
  SITE 9: note = RuvC_P1
  SITE 52: note = RuvC_P2
  SITE 87: note = RuvC_P3
  SITE 89: note = RuvC_P4
  SITE 92: note = RuvC_P5
  REGION 211..299: note = Tnp_domain
  SITE 219: note = Tnp_P1
  SITE 249: note = Tnp_P2
  SITE 257: note = Tnp_P3
  SITE 258: note = Tnp_P4
  SITE 270: note = Tnp_P5
MNIKRIGIDLAKQVFQVHGVDGQEKVVLRKQLRRVQLLDYFKKLPPCLIGMEACGGAHYWARELQKLGHTVKLMAPQFVKPYVKSNKNDANDAEAICEAVARPNMRFVAIKTIAQQDIQALHRIRSEQVKQRTAKVNQIRGLLAEYGIVVGRRVDVLRNALPQLLEETENGLTADFKVLLDGLRQDLVTLDERVDDLDKKIKTLATSNPAAKRLQQIPGIGPIIATALICAIGDGKQFQRGRDMASWLGLTPRQHSSGGKDRLLGISKRGDAYLRTLLIHGARSALKVVGKKDDPRSRWLQNLCSRRNKNIAAVALANKNARIAWALLSKETDYLPEGEPA

SEQ ID NO: 15129 - protein, 400 aa, unidentified
  source 1..400: note = protein_2cdd456
  REGION 12..167: note = RuvC_domain
  SITE 15: note = RuvC_P1
  SITE 65: note = RuvC_P2
  SITE 105: note = RuvC_P3
  SITE 107: note = RuvC_P4
  SITE 110: note = RuvC_P5
  REGION 273..360: note = Tnp_domain
  SITE 281: note = Tnp_P1
  SITE 312: note = Tnp_P2
  SITE 320: note = Tnp_P3
  SITE 321: note = Tnp_P4
  SITE 333: note = Tnp_P5
MSGFMCGFAGFVGIDVSKDKFDACGIRSDEAKLFQFSATMDRKGFDKLKGHLAAVSISSVLIGMESTASYHVNLFSYLVSEGYNVILINPLLVSSYVKMQLRKTKTDKKDAFVIAQFLRANGDTLTQRVTPSLISDLRDLSRQRESLVDDMTALKMEIKRLLNITFPELEHMTGIFTKAILKLLLRYPSAHSLKGVDLGHLTQMLIADSQGRKRDAFAEDLLKAAQSSIATDSPAKDMILRQNIMLLLYLEDALEEITDMLIEMSRNLMEEDINILTSIKGIGDKAAATFLIEMGGSINQFERSGKIIAMAGLDPSVYQSGKHEGKGKITKRGNRHLRKIIWLMTTKVIQYTDIFNVYYLKRRKEGLPYKMAVLATAHKLIRVVYAMLTQRTTFSLQVNS

SEQ ID NO: 15130 - protein, 411 aa, unidentified
  source 1..411: note = protein_6414c48
  REGION 5..163: note = RuvC_domain
  SITE 8: note = RuvC_P1
  SITE 62: note = RuvC_P2
  SITE 102: note = RuvC_P3
  SITE 104: note = RuvC_P4
  SITE 107: note = RuvC_P5
  REGION 273..373: note = Tnp_domain
  SITE 281: note = Tnp_P1
  SITE 311: note = Tnp_P2
  SITE 319: note = Tnp_P3
  SITE 320: note = Tnp_P4
  SITE 333: note = Tnp_P5
MNPVIGLDVAKGESQVQAFLDKKQPYKKSFKVTHTLEGLANLLDFIREVEDVSGERPPIVLESTGHYHTPVVQYFADRGYLLIIVNPLISYRTKSSSLRKVKTDIIDAHHLCELYYKEDLEPYKQRGIQLLNLRNLTRQHENITGMFVQTKLQFQAVLDQVFPEYCGVFGALYSDVSLLTLQAFPTSEDILNVGEETIANKIKELCKSRSQKWANNQAKKLIATASQNPFQETLYQSLILSLNMYIKMLLEYKKHLSKLEDEIDALAKGIEEYRIIQSIPGIGEKIAATIISEIGEIDRFNHPKKLVAFAGIDPSVFESGTFKGTLNRITKRGSSRLRHALYMAVRCAIRDCRKKKTTDELIPRNKRLREFYDKKREEGKPFKVAVIACANKLLHWIYALLKSKSEFQDLS

SEQ ID NO: 15131 - protein, 402 aa, unidentified
  source 1..402: note = protein_01f707c
  REGION 5..161: note = RuvC_domain
  SITE 8: note = RuvC_P1
  SITE 58: note = RuvC_P2
  SITE 98: note = RuvC_P3
  SITE 100: note = RuvC_P4
  SITE 103: note = RuvC_P5
  REGION 275..362: note = Tnp_domain
  SITE 283: note = Tnp_P1
  SITE 313: note = Tnp_P2
  SITE 321: note = Tnp_P3
  SITE 322: note = Tnp_P4
  SITE 335: note = Tnp_P5
MKNAVGIDVSKGKSVVAILRPYGEIVYSPFELKHTASDISSLIELIKSIDGESRIVMEHTGRYYEVLANQFSNANLFVSAVNPKLIKDFDNESLRKVKSDKADSVKIARYALDKWNLLQQYSDMDELRNQLKTMNRQFNFYMKHKTAMKNNLIGILDQTYPGVNTYFDSPARSDDSQKWVDFASTYWHVDCVRKMSLNAFVDHYQKWCKHKKYNFSQLKAEEIYGKAKELVPVLPKDDITMFIIKQAIDQLNSASTTVEELRKLMNGTAAKLPEYHVVMQMKGVGPSLGPQLMAEIGDVMRFTHRNAITAFAGVDPGVNESGSYAQKSVPTSKRGSAELRKTLFQIMDVLIKTMPQDDPVYKFIDKKRSQGKPYYVYMTAGANKFLRIYYGRVKEYLTTLQS

SEQ ID NO: 15132 - protein, 379 aa, unidentified
  source 1..379: note = protein_bfd8fcd
  REGION 47..189: note = RuvC_domain
  SITE 50: note = RuvC_P1
  SITE 93: note = RuvC_P2
  SITE 128: note = RuvC_P3
  SITE 130: note = RuvC_P4
  SITE 133: note = RuvC_P5
  REGION 252..340: note = Tnp_domain
  SITE 260: note = Tnp_P1
  SITE 290: note = Tnp_P2
  SITE 298: note = Tnp_P3
  SITE 299: note = Tnp_P4
  SITE 311: note = Tnp_P5
MEWSASLYRPAREGEDGHFEPRVEEVKQSMTNNDTSQKSASHEIKVLGVDLAKQSFHVYGVDEAGRKIVSKKLSRNQLTSFVAKLAPCLIGLEACGGAHHWVRVFTRFGHRVRMIAPQFVKPYVKSNKNDAVDAEAICEAVQRPNMRFVPAKSLEQQDIQSLHRVRSQWVARRTAQANQIRGLLLEYGLIVPQGIGHVRKAIPDMLEDGDNALTPVFRELLNELYEALVYLDQRIKAIEHKLTTISVQHEDCQRLLTIPGVGLLTATALLAAIGDVTVFKNGRELAAWLGLVPKQHSTGGKPTLLGISKRGDTYLRTLLIHGGRSVSRVAHQHQDARNRWIDSIKQRRGENISNVAVANKNARIAWALLTKKECYRAAA

SEQ ID NO: 15133 - protein, 389 aa, unidentified
  source 1..389: note = protein_49cf8cc
  REGION 4..163: note = RuvC_domain
  SITE 7: note = RuvC_P1
  SITE 60: note = RuvC_P2
  SITE 101: note = RuvC_P3
  SITE 103: note = RuvC_P4
  SITE 106: note = RuvC_P5
  REGION 267..353: note = Tnp_domain
  SITE 274: note = Tnp_P1
  SITE 304: note = Tnp_P2
  SITE 312: note = Tnp_P3
  SITE 313: note = Tnp_P4
  SITE 326: note = Tnp_P5
MFYVGIDVAKDKHDCCILSSDGEILFSPFTIPNTLYGFDELYEKIGSLTDDVSEIKVGLEATGHYHLNLLRSLLDNGLPSFVINPLHTNLFRKGQSLRKTKTDKVDAASIAMMLLTDKTLKPYSETSYHNEELKSLTRYRFDKVQERSQLKVSVSRLVSVLFPELEKMVPTLHMNSIYTLLSEFPGASYIADAHLTRLKHLLYEASKGHYGRDMAISIRDVATASIGTAMPSKSMELRHTIHLIEVISQEIDEIESAINTIMESIGSPITTIPGIKNRMGAMIIAEIGDFSRFDSADQILAYAGLSPSTYQSGQMTSSYSRMEKRGSRYLRYALFNATQYVCIWDPSFKAYLAKKRNEGKHYYVAISHACKKLVRLIYRMQITGESYRG

SEQ ID NO: 15134 - protein, 413 aa, unidentified
  source 1..413: note = protein_10a6249
  REGION 9..165: note = RuvC_domain
  SITE 12: note = RuvC_P1
  SITE 62: note = RuvC_P2
  SITE 102: note = RuvC_P3
  SITE 104: note = RuvC_P4
  SITE 107: note = RuvC_P5
  REGION 281..366: note = Tnp_domain
  SITE 289: note = Tnp_P1
  SITE 319: note = Tnp_P2
  SITE 327: note = Tnp_P3
  SITE 328: note = Tnp_P4
  SITE 341: note = Tnp_P5
MKSTVITAVGIDVSKSKSTVAVRRPGGEIVMRPFDVRHTNSDLKKLVSTLKELGGDIRIVMEHTSMYWRPIALTLKKAGFFVSVVNAMLIHDFSDNTIRKLKTDRADALKIANYALTFWDTLPQLNGEDETRLLLKMQSRANERITATVTLLRNGLIALADQTFSGVNLVFDQNTKNATDGHEKWVDFFLCYWHRDCVCQYSIDVFTESYQGWCKRKNYKFRTDTAHKIYFLAQECVATLPKCESTKVLITQACKSLNAVCEVRRSTQLEMQRLAALLPEYEIVMQMEGAGPVTGPALMAEIGDVRRFKNKKALVAFAGIDAPPFQSGAFESKSRHVSKRGSPHLRRTIFLVSNIILTLSNPENAVFCFMDKKRSEGKHFYVYTIAGSAKFLRIYYARVNEYLRSQAATTVCK

SEQ ID NO: 15135 - protein, 392 aa, unidentified
  source 1..392: note = protein_d12d443
  REGION 5..163: note = RuvC_domain
  SITE 8: note = RuvC_P1
  SITE 62: note = RuvC_P2
  SITE 102: note = RuvC_P3
  SITE 104: note = RuvC_P4
  SITE 107: note = RuvC_P5
  REGION 267..356: note = Tnp_domain
  SITE 275: note = Tnp_P1
  SITE 305: note = Tnp_P2
  SITE 313: note = Tnp_P3
  SITE 314: note = Tnp_P4
  SITE 327: note = Tnp_P5
MQPVVGIDVAKGVSVIQDFIGREEPYGRIEKLQHGKEGFEQLGELLGMLKHKCDDEPVVVLEATGHYHRSLVGYLKRCGWTYCIVNPLQAKRSKGTQLRKVKTDAADAWHLAEMYYRGDVKAHREWEESYTELQHLTRQHEFVTAMYVQAKLNSRALLEQVFPEFIGLFHNLYATTSLKVLERCLENKIGDVGDLIRECVGKSHSNGWIEEKTKRLKELMQGWKAQERSQSQSIALTSMVSLLLEFDKQLNHLEKQMEERAGELPEVELVKSIPGVGNKLAAAIVAELGEVSQFKDAKQLVAYAGLDPGIYSSGKFTATSNRITKRGSKRLRRALYLAVQCGIRRCANRRISEYYDKKRKEGKPYKVVVIACANKLLHHIYAILSKSEPYKA

SEQ ID NO: 15136 - protein, 304 aa, unidentified
  source 1..304: note = protein_4a38bee
  REGION 2..109: note = RuvC_domain
  SITE 15: note = RuvC_P2
  SITE 50: note = RuvC_P3
  SITE 52: note = RuvC_P4
  SITE 55: note = RuvC_P5
  REGION 175..260: note = Tnp_domain
  SITE 182: note = Tnp_P1
  SITE 212: note = Tnp_P2
  SITE 220: note = Tnp_P3
  SITE 221: note = Tnp_P4
  SITE 233: note = Tnp_P5
MAFIAQQPSSRIVMEACGSANYWARQFSQYGHEVKQISPQYVAPSRMGCKNDKNDAIAIVEADSRPGMRYVPEKSVEQQDIQCLHRVRQRLMKNKAALINQIRGLGLEYGIAMPEGAHKIMACLPDYLEDAENELTTLSRQLIHEMLQELQNCQQRIKELDVRLAHISQQNKDTVRLESIPGIGPLGASALTVAQGDSSDFQNGRHFASYLGLVPKEHSSGGKVRLLGITKRGDGYLRGLLIHGARSVVYRVVNLPDERCNGLQRWLKGIITRSGVNKAVVALANKNARMAWTLVNQKTVYIPK

SEQ ID NO: 15137 - protein, 273 aa, unidentified
  source 1..273: note = protein_6dfc214
  REGION 1..88: note = RuvC_domain
  SITE 27: note = RuvC_P3
  SITE 29: note = RuvC_P4
  SITE 32: note = RuvC_P5
  REGION 151..237: note = Tnp_domain
  SITE 159: note = Tnp_P1
  SITE 189: note = Tnp_P2
  SITE 197: note = Tnp_P3
  SITE 198: note = Tnp_P4
  SITE 210: note = Tnp_P5
MFESFGFTVKLIAAQHVKAFLRNRRVKNDERDAEAIYTCGIQPDTKFVRIKTVEEQTVALLHTLRKAAVSQRVELSNRIRGILAEFGIVVARGKGSFNSEIEAMFNECEKIHDVNLIAAISSLFEDYHYLEQREKELSEKIESLNKDNELVKIALTCPGVGPLTASAIVAEVGDASQFRNGREMAAWNGVVPSQHSTGGRSTLGGITKTGNRYLRALLAQCACAVIQNASRHLEQGKDTHLDRFALRLKLNGKPAKKIMIAVANKIIRILWQC

SEQ ID NO: 15138 - protein, 401 aa, unidentified
  source 1..401: note = protein_c9a2081
  REGION 5..162: note = RuvC_domain
  SITE 8: note = RuvC_P1
  SITE 59: note = RuvC_P2
  SITE 99: note = RuvC_P3
  SITE 101: note = RuvC_P4
  SITE 104: note = RuvC_P5
  REGION 273..362: note = Tnp_domain
  SITE 281: note = Tnp_P1
  SITE 311: note = Tnp_P2
  SITE 319: note = Tnp_P3
  SITE 320: note = Tnp_P4
  SITE 333: note = Tnp_P5
MKYGVGIDISKGKSTVVILSTAGEVIEEPFEITHDLEGLKTLEDKLKGISKEDLKIVMEETGTYHLPVFSYLIDKGYFVVSENALKIKKYLDRGLRKAKTDKKDAYKLAEYCCDNWYKLNKQYENEEIYDNLRFLSRQYITSIEIQVQEKVNFSNLCDLLFPGYYQLLDDNTFILGLEVFKKYYHPEIVTNKKQSQFVNEIDILAKKLGHKGAGITLANKIYNLALNTISVRPNNKYSQLSAINCADALILQIKTSKEIISNMDELARELPEYNKISEILGCGNKLTSRIIAEIGDIRRFKNAGSLIAYAGLDAPPYQSGQFEATNKHISKRGNRYLRKTGYEIMKSIKASCTENSEIKTYILKKETEGKAKKVAKIAGLNKFLRQYYGIVKKKYKELEIW

SEQ ID NO: 15139 - protein, 389 aa, unidentified
  source 1..389: note = protein_b721984
  REGION 4..161: note = RuvC_domain
  SITE 7: note = RuvC_P1
  SITE 59: note = RuvC_P2
  SITE 100: note = RuvC_P3
  SITE 102: note = RuvC_P4
  SITE 105: note = RuvC_P5
  REGION 265..349: note = Tnp_domain
  SITE 271: note = Tnp_P1
  SITE 301: note = Tnp_P2
  SITE 309: note = Tnp_P3
  SITE 310: note = Tnp_P4
  SITE 322: note = Tnp_P5
MYLVGIDISKYKHDCFILKETGEVVLNPFSISNNQDGFQSLLTVLNSLNPHEEIRIGFEATSHYSLNLKLFLEKAHHSFMEFNPLLLAKFNKSQTLRRTKTDAIDSISIARWLMTVDYKPYPVGFYHIYSLKSLTRLRDSLVKQRSFYIVKLTNVLDHTFPEFKPFFANRFSKTALYLLETYGSAENMAQMNPSSYENLRKISRGKFSMQKFIKLKELAANTVGADNEIFSLQLQSLLTLYNQCAKEVERLEEQIISLITNIQPKSMTIPGIGPLSAAVIYSEYGDIQKFHSPSAMLSFAGLEPGYYQSGTSEHAGRMVKHGSSKLRFTLMNLCIPLIQYNMVFAEFYAKKRSEGKPHRVACSHIIKKLIRIIYHLEKENIDFDSSKLR

SEQ ID NO: 15140 - protein, 341 aa, unidentified
  source 1..341: note = protein_58cb5ee
  REGION 7..149: note = RuvC_domain
  SITE 10: note = RuvC_P1
  SITE 53: note = RuvC_P2
  SITE 88: note = RuvC_P3
  SITE 90: note = RuvC_P4
  SITE 93: note = RuvC_P5
  REGION 209..295: note = Tnp_domain
  SITE 217: note = Tnp_P1
  SITE 247: note = Tnp_P2
  SITE 255: note = Tnp_P3
  SITE 256: note = Tnp_P4
  SITE 268: note = Tnp_P5
MENVALIGIDLGKHSFHLHGQDRHGKAVFRKKMGRKQMLEFFATLHACSVVMEACAGAHYMARKLAGFGHMVKLISPQFVKPFVKSNKNDFVDAEAICEAASRPSMRFVTPKSESQQTLSALHRTRESLVRDRTKTINQIHGFLLEFGINLPVGQAVMTRLPAVLAEHSLPPRLVSTLERLHEHFKYLSGQIADLEKEIKHQLAEDDLGQRLMSIPGVGPITASVLTTEMGDGKQYGCSRDFAASVGLVPRQYSTGGRSNLLGISKRGNKNLRRLLVQCARSYMRRLERQNGLLADWVRRMLTRRHANVVACALANKLARTAWALATHHTTFNAGEAATPS

SEQ ID NO: 15141 - protein, 343 aa, unidentified
  source 1..343: note = protein_5e1a9d4
  REGION 6..149: note = RuvC_domain
  SITE 9: note = RuvC_P1
  SITE 54: note = RuvC_P2
  SITE 89: note = RuvC_P3
  SITE 91: note = RuvC_P4
  SITE 94: note = RuvC_P5
  REGION 213..300: note = Tnp_domain
  SITE 221: note = Tnp_P1
  SITE 251: note = Tnp_P2
  SITE 259: note = Tnp_P3
  SITE 260: note = Tnp_P4
  SITE 272: note = Tnp_P5
MKITRVGVDLAKKVFQVHGVDENGRRVWQRQLKRSNWLSVLTETVEPDCEIGMEACGGAHHWARELKSRGFKVRLISPQFVKPYLKSLKNDVNDAEAICEAMTRHHMRFVAVKTVEQQYIQAMHRVREGLMNHRKAKANQIRGLVAEYGLVAPRQMGPLRKAIPCWLEDAENGLRPAFRVLLHGLWEDLQSLDVRLKVLDKEIFVLSESHPDAKRLKQLRGIGPLTATAMVAQFGDGRHFKRGRQASASVGITPRHAGTGGKNWLFGITKKGNPYLRSILIHGARSVVSKAKHKDDRLSRWVTELARRKHPNVAAVALANKTVRIAWAMLRNGTDYDPELAMA

SEQ ID NO: 15142 - protein, 349 aa, unidentified
  source 1..349: note = protein_edd7b03
  REGION 12..152: note = RuvC_domain
  SITE 15: note = RuvC_P1
  SITE 58: note = RuvC_P2
  SITE 93: note = RuvC_P3
  SITE 95: note = RuvC_P4
  SITE 98: note = RuvC_P5
  REGION 217..302: note = Tnp_domain
  SITE 225: note = Tnp_P1
  SITE 255: note = Tnp_P2
  SITE 263: note = Tnp_P3
  SITE 264: note = Tnp_P4
  SITE 276: note = Tnp_P5
MANREPTNVAVYGVDLGKNVFHIAGADADGAIIGNWKFRRDKLLQFFREAQPALIGMEACPGSQWLARHLQTFGHRVRIIPAQFVKPYVKSNKNDVIDAAAIAEAVTRPTMRFVEIKTETQAELQALHRIRDRMVTGRTRLICQMRALCIEFGVAIHQGVGKFKADMPRVLANEENDLTPMMRRLLGDLFGDLRHLEERITEVTREIEANAAQDERSRRLMTVPGIGPLIATAILASAGDGRQFRTARDMAAWLGLVPRQHSTGGKTTLLGISRRGNRYLRRLLIHGARSCVIHLDRSRDRLGAWIDTLQKRMHINKVTVALAAKIARVAWVILNRPGATYERRDPTVA

SEQ ID NO: 15143 - protein, 341 aa, unidentified
  source 1..341: note = protein_bb59b40
  REGION 6..148: note = RuvC_domain
  SITE 9: note = RuvC_P1
  SITE 52: note = RuvC_P2
  SITE 87: note = RuvC_P3
  SITE 89: note = RuvC_P4
  SITE 92: note = RuvC_P5
  REGION 211..298: note = Tnp_domain
  SITE 219: note = Tnp_P1
  SITE 249: note = Tnp_P2
  SITE 257: note = Tnp_P3
  SITE 258: note = Tnp_P4
  SITE 270: note = Tnp_P5
MQITTIGLDIAKNVFQVHGIDAAEKVVVRKQLRRGQVMKFFAALPPCLIGMEACASAHYWARELRKLGHQVRLMPAKDVKAYVKRSKNDAADAEAICEAVGRPTMRFVEVKSAAQQGRLMQHRTRDLLLRQRTQVINALRAHMAELGIVAAQGREGLKSLLTIIADEKDERLPVDARASLIVLAAQLQALQTMIGSIEKRIIVQHRASEESKRVATVPGIGTLGASAITATVTDASAFRSGRDFAAWIGLVPRQDSTGGKPKLGPISKQGDRYLRRILVVGAHSVLRRAKQNPEKHPWLMQLLARRPFKVVAIALANKMARVAWALLARGGIYQAPRLAAA

SEQ ID NO: 15144 - protein, 354 aa, unidentified
  source 1..354: note = protein_609d3a4
  REGION 6..148: note = RuvC_domain
  SITE 9: note = RuvC_P1
  SITE 52: note = RuvC_P2
  SITE 87: note = RuvC_P3
  SITE 89: note = RuvC_P4
  SITE 92: note = RuvC_P5
  REGION 210..296: note = Tnp_domain
  SITE 218: note = Tnp_P1
  SITE 248: note = Tnp_P2
  SITE 256: note = Tnp_P3
  SITE 257: note = Tnp_P4
  SITE 269: note = Tnp_P5
MKVTMIGVDLAKNVFQLHGASMTGEVLFRKKLSRGQFLRFMESQPAAVVVMEACGSVHHWARELITLGHEVKLIAPQYVRPFVKRQKNDAADAEAIVIAARQPEMRFVEPKTRDQQARAILFRARERIVHQRTELVNALRAMLYEFGHVVPVGIGHVKRLEAVLNDKTNNLPELVCEEGLDLVAQISEKTARIDSKTQKLSSLAKQTDVARRLQTMPGIGPMTAVAVEAFAPAMENFKSGRDFAAWLGLVPRQFSSGGKERLGKVSRAGQVDIRRLLIIGAMARVNWASRKETSTDPWMIRMLGRKPRMLVAIALANKMGAYDLGDADAAERLSESGADSGCINAAIVNVGKEV

SEQ ID NO: 15145 - protein, 341 aa, unidentified
  source 1..341: note = protein_391af82
  REGION 6..161: note = RuvC_domain
  SITE 9: note = RuvC_P1
  SITE 67: note = RuvC_P2
  SITE 105: note = RuvC_P3
  SITE 107: note = RuvC_P4
  SITE 110: note = RuvC_P5
  REGION 211..299: note = Tnp_domain
  SITE 219: note = Tnp_P1
  SITE 250: note = Tnp_P2
  SITE 258: note = Tnp_P3
  SITE 259: note = Tnp_P4
  SITE 272: note = Tnp_P5
MKNLFIGIDFSKEKVDVAIISAEGLVETSMRVFNEFKNSVSGYRQLVKWVDKNAGGIDPSMWLFCGENTGDYSKPLCNHLYGKGYDMWLENAKCIKDNSGIRRMKSDRADATMIAEYAMRNHDRAVLYEPLSESLAQLREYYLYRQMVVRHRCSFEVRRGEKRLMMEESAAKTVIAQSGKHIVSELNKEIAKIDKKIASLIESSDELSEVYQIVTSVPGIGTQNAVCLMVYTDNFRRFNYDARSIACYYGIAPFGKDSGTSVHVDPHVHYMANRHIKAMLTQAALAAVRFNPNIAQYYQRLIGRGKKKPVAMNNVKNKLLHIVTSMVKNKQVYNMEYRLSA

SEQ ID NO: 15146 - protein, 345 aa, unidentified
  source 1..345: note = protein_3636a1f
  REGION 6..147: note = RuvC_domain
  SITE 9: note = RuvC_P1
  SITE 52: note = RuvC_P2
  SITE 87: note = RuvC_P3
  SITE 89: note = RuvC_P4
  SITE 92: note = RuvC_P5
  REGION 211..298: note = Tnp_domain
  SITE 219: note = Tnp_P1
  SITE 249: note = Tnp_P2
  SITE 257: note = Tnp_P3
  SITE 258: note = Tnp_P4
  SITE 270: note = Tnp_P5
MELHTIGIDLGKTVFHLVGLDLRGEVVVRKKFSRTQLLRFTANVRVELIGMEACGGAHFLGRALREQKHEVRLIPAQYVKPYVKTNKSDYIDAEAIAEAVARPTMRFVPIKTDEQLDMQSLHRVRERWVMRRTAVINQIRSLLLERGITLRKGRRYVDVGLPLILENADAKLSGALRMLLAQLKLDLDQLAIRIDEADAVIQKTAHENEACRRLVAIPGIGPVTATALIAAIGNGGAFRKGREFAAWLGIVPREHSTGGQQKLLGISKRGNSYLRRLFVQGARAVMQQHTKQSSGLSAWLAQLISRTHRNVAAVALANKLARMAWAVLAKNEHYRPPVLADTAAA

SEQ ID NO: 15147 - protein, 411 aa, unidentified
  source 1..411: note = protein_e0050ce
  REGION 5..163: note = RuvC_domain
  SITE 8: note = RuvC_P1
  SITE 62: note = RuvC_P2
  SITE 102: note = RuvC_P3
  SITE 104: note = RuvC_P4
  SITE 107: note = RuvC_P5
  REGION 273..373: note = Tnp_domain
  SITE 281: note = Tnp_P1
  SITE 311: note = Tnp_P2
  SITE 319: note = Tnp_P3
  SITE 320: note = Tnp_P4
  SITE 333: note = Tnp_P5
MNPVVGLDVSKGESEVQAFLDKGKPYRKSFSIKHDVDGLGSLLEFLESLKDKTGIQPAVVLEATGHYHAPVVQFLEEHQYLLIIVNPLISYRAKSSSLRKVKTDAIDAYRLCELYYKEDLEPYKKRGIQLLNLRNLTRQHENITGMYVQTKLQFQAVLDQIFPEYRGVFGDLYSVVSLLTLKEFPASEDILTVSEETLATRIKELCKSRSKRWALEKAQKLKAAADRNPFQRALYQSHLLSLSMYINMLLQYKEHLSELDAEIDTLSKKIEEYKIIQSIPGIGEKIAATIISEIGEIDRFNHPKKLVAFAGVDPEVFESGKFKATLVRITKRGSSRLRHALYMAVLSGIRDCRKQKTTDEIIPKNKRLRAFYDKKRDEGKLYKVAVIACVNKLLHWIYAILKNRTPFQDVD

SEQ ID NO: 15148 - protein, 402 aa, unidentified
  source 1..402: note = protein_e393d0d
  REGION 5..163: note = RuvC_domain
  SITE 8: note = RuvC_P1
  SITE 62: note = RuvC_P2
  SITE 102: note = RuvC_P3
  SITE 104: note = RuvC_P4
  SITE 107: note = RuvC_P5
  REGION 276..365: note = Tnp_domain
  SITE 284: note = Tnp_P1
  SITE 314: note = Tnp_P2
  SITE 322: note = Tnp_P3
  SITE 323: note = Tnp_P4
  SITE 336: note = Tnp_P5
MNPVVGLDISKAESHGQAFLARGKPLRGTFHFEHTRDGLADLYKVLKDVESASKQRPLIILEATGHYQSPVVQFLEEHHYIYIVINPLISNRLRKSQLRKVKTDAADAYLLGELYYKEEFEAFEKRGVQLLNLRYLTRQYESLSKMCVQTKLQFQAVLDQVFPVYKGVFGAIYSGISLRFLSEFPTSYSVLQTDEDTLKAKMKELLSTKRGRSEEWINQRVQRLVDAARQNPFQQDHVCKSFNHLKILITLNLQYQEHLTELEQNIDALAEEIEEYELIQSIPGIGHKIAATILSEIGEVDRFDHPKKLVAFAGIDPSVFASGKFTATRNRITKRGSRQLRYALMMAVQCGLIRSRNTRLKEFYERKRTEGKPHKVALVACANKLVHWLHAILKSKKPFHLA

SEQ ID NO: 15149 - protein, 248 aa, unidentified
  source 1..248: note = protein_9ead38f
  REGION 6..152: note = RuvC_domain
  SITE 9: note = RuvC_P1
  SITE 53: note = RuvC_P2
  SITE 91: note = RuvC_P3
  SITE 93: note = RuvC_P4
  SITE 96: note = RuvC_P5
  REGION 211..248: note = Tnp_domain
  SITE 219: note = Tnp_P1
MTITTVGIDLAKNVFAVHCVDQHGKTVLVKPKVTRAALPELIASLPPCVIGMEACSGAHYWARLFRQYGHEPRLMAAKFVSPYRMAVKSGKNDAADAQAICEAVRRPHMRFVPVKDESQQAMQCLHRTRQGFIEEKTATYNRLRGLISEFGVIAPQSTDALRHMVSEQKKSLPLQVQQCVDDLLEHIDRIENNVTEYDRILSCMAKADHRSQRLMELKGIGPTTACALVASIGNAHDFKNGRQLAAWL

SEQ ID NO: 15150 - protein, 402 aa, unidentified
  source 1..402: note = protein_01103c4
  REGION 4..157: note = RuvC_domain
  SITE 7: note = RuvC_P1
  SITE 56: note = RuvC_P2
  SITE 94: note = RuvC_P3
  SITE 96: note = RuvC_P4
  SITE 99: note = RuvC_P5
  REGION 265..351: note = Tnp_domain
  SITE 273: note = Tnp_P1
  SITE 304: note = Tnp_P2
  SITE 312: note = Tnp_P3
  SITE 313: note = Tnp_P4
  SITE 324: note = Tnp_P5
MYFVGIDWADLHHDVAVLDEKGQELKYFTVPHNREGLEQLKQTLLGINPDPESFACLVETKNGLLVQFLLEAGFPVYPLNPKVVDYRRKPSGAKSDPIDARLLASIGRSDLAQLKRLKPDTELVCELKILTRDQDSLIQESTRLNNKLIACLKEYYPAALEFFSKPTLPVALEFYKRYPTPELVREATVPEIAAFLKKHKHPRPNQTAISIWQKAQEPQLNASAPTVRAKCRLMLALVGQLEVVKEQIAAYDKEIDRLFQQHSDSKIFASLPGAARRLAPRLLAEWGDERDRYENAAVVQALAGTSPVLFQSGKYRFARQRKSCVKPFRRVMHLFSFQSIRWVPWAREYYYAKRCQGKTHHEALRALANIWVRTIFAMWKNRTCYDEAAFIAARSRHFNRVA

SEQ ID NO: 15151 - protein, 346 aa, unidentified
  source 1..346: note = protein_dbea7d4
  REGION 7..149: note = RuvC_domain
  SITE 10: note = RuvC_P1
  SITE 53: note = RuvC_P2
  SITE 88: note = RuvC_P3
  SITE 90: note = RuvC_P4
  SITE 93: note = RuvC_P5
  REGION 212..299: note = Tnp_domain
  SITE 220: note = Tnp_P1
  SITE 250: note = Tnp_P2
  SITE 258: note = Tnp_P3
  SITE 259: note = Tnp_P4
  SITE 271: note = Tnp_P5
MNKITVVGLDLAKNVFQVHGADARGQAVVRKPLKRKDVLAFFAKLPPCLIGMEACGGAHHWARRFQAQGHTVKLMAPQYVKPFVQRHKTDARDAQAICEAANRASIPTVAVKTTEQQAVLALHRVRQSLMKARVAQINQIRGLLTEFGIVLPVGVRKLKAELPGVLEDGENALPDMLRALLQSLREHLHVLEQHIAQIEQRLTHWHRSNDASRRLEALPGVGMLTATALVAEVGDAKHFARGRQFAAWVGLTPREHSSGGQSIRLGISKRGNRYLRTLLIHGARAVLKARMNKPEHVQDWAVRVSDRRGHNVAAVAQANKTARRAWALLTKGEEFNPEYVRERAAA

SEQ ID NO: 15152 - protein, 323 aa, unidentified
  source 1..323: note = protein_5913cba
  REGION 4..150: note = RuvC_domain
  SITE 7: note = RuvC_P1
  SITE 52: note = RuvC_P2
  SITE 92: note = RuvC_P3
  SITE 94: note = RuvC_P4
  SITE 97: note = RuvC_P5
  REGION 191..278: note = Tnp_domain
  SITE 199: note = Tnp_P1
  SITE 229: note = Tnp_P2
  SITE 237: note = Tnp_P3
  SITE 238: note = Tnp_P4
  SITE 251: note = Tnp_P5
MTYIGIDIGKSSFVAAYPTVSGYRTRTYPNTVKGIRSFIGSLCVSEHHCVMEATGNYGFLLLYLLDRQGIAASMVNPKQIKHFSRMMMTVTKTDTKDACLIAMYGVKMNPPAYKMPSESLMLLKQKKTIIRQLKKQLTASRNLKCSLVVLPFQDRNGMKALDKTISFLAAQIKALESELADLASSEFDRQLRLLTSIKGIGITLATALIVATGAFACFDNAKQVSRFIGICPTYQQSGTSVYVKGGINRNGDANLRSLLYVASWSALRGNSACKECYERLKANGKPSKVALIAVANKLVRQAFAVIKSDTPYVDGFISSHQLK

SEQ ID NO: 15153 - protein, 339 aa, unidentified
  source 1..339: note = protein_be41ecc
  REGION 4..148: note = RuvC_domain
  SITE 7: note = RuvC_P1
  SITE 52: note = RuvC_P2
  SITE 88: note = RuvC_P3
  SITE 90: note = RuvC_P4
  SITE 93: note = RuvC_P5
  REGION 211..297: note = Tnp_domain
  SITE 219: note = Tnp_P1
  SITE 249: note = Tnp_P2
  SITE 257: note = Tnp_P3
  SITE 258: note = Tnp_P4
  SITE 270: note = Tnp_P5
MLYVGLDVHVKHITICVLNKNGKLLQRCQLPCLDDVIKFLMNLRGRCEVCFEASTGYGIYFEALSKIASRVAVAHPGLLKLIFRSKQKNDRADAEKLAKLLFLDEVPTVHVPTADVRAWRELITFRGKLIQKRTRAKNGIRSLLRSVGCRVPKEFGLWTIRGMEWLKQKDLKQPMQNLKRDMLVEEIETLTRQTRLVETELARYSKENIAVQQLQSIPGIGLRTAEAFVAFVDDPHRFANSKKVGAYFGLIPIQDQSGSTNRLGHITREGCAEVRHLVTEAVWQGIRYSPTIKAYYERIHRHEKDRKKIAIVATSHYLVRVMWSMLKNGTLWKERSLAV

SEQ ID NO: 15154 - protein, 349 aa, unidentified
  source 1..349: note = protein_f2e7d86
  REGION 6..148: note = RuvC_domain
  SITE 9: note = RuvC_P1
  SITE 52: note = RuvC_P2
  SITE 87: note = RuvC_P3
  SITE 89: note = RuvC_P4
  SITE 92: note = RuvC_P5
  REGION 211..299: note = Tnp_domain
  SITE 219: note = Tnp_P1
  SITE 249: note = Tnp_P2
  SITE 257: note = Tnp_P3
  SITE 258: note = Tnp_P4
  SITE 270: note = Tnp_P5
MNIKRIGIDLAKTVFQLHGVDSREQPVLRKKLKREQMLSFFRTIAPCLIGMEACSGAHYWARELQKLGHTVKLMAPQFVKPYVKANKNDAKDAEAICEAVSRPTMRFVTIKTIAQQDLQASHRIRKELVGQRTAKVNQIRGLLAEYGIVVGQAIEVLRKALPCLLEDAENGLSADFRILLKGLQEDLLALDERVAELDKRIHTLAHTHEDAKRLLQIPGVGPLTATAIISAVGDGSQFKRGRDLAAWIGLTPRQNSSGGKEQLLGISKRGDHYLRTLLIHGGRSVLRVAGSKDDPRSRWLTGISERRHKNIAAVALANKNARIIWALLTQKTDYEQKAGELSSGESVCA

SEQ ID NO: 15155 - protein, 391 aa, unidentified
  source 1..391: note = protein_ab4a58b
  REGION 6..163: note = RuvC_domain
  SITE 9: note = RuvC_P1
  SITE 61: note = RuvC_P2
  SITE 102: note = RuvC_P3
  SITE 104: note = RuvC_P4
  SITE 107: note = RuvC_P5
  REGION 267..351: note = Tnp_domain
  SITE 273: note = Tnp_P1
  SITE 303: note = Tnp_P2
  SITE 311: note = Tnp_P3
  SITE 312: note = Tnp_P4
  SITE 324: note = Tnp_P5
MSMYFVGIDISKYKHDCCIISAADQKVVSKFTFKNDKAGFEELLTVLNSLSNPEDIKIGFESTAHYALNLELFLENAHHSFMEVNPVLIKEYKKSTTLRRTKTDSVDCESIARWLMTVEYKPHSKGFYHSYSLKSLTRLRDRLIRQRSFYLVKITNVLDHTFPEFKPFFNERLSKTALYLLENYGSAEKMARMNSASYDKLRCISRGKFSIQQFLRLKELVANTVGVNNSIFDIELISLLTLYKSLVKEIDTLESEIHKLIEEVHPHYLTIPGIGPISAAVIYAEYGDISNFSNPGQMLAFAGIEPGINDSGTESHGGRMVKHGSSQLRYVLLNACLPLIRFDLTFATYYAKKRAEGKKHRVAITHVAKKLIRVIYALERQDIDFNTQKLR

SEQ ID NO: 15156 - protein, 343 aa, unidentified
  source 1..343: note = protein_8377831
  REGION 5..152: note = RuvC_domain
  SITE 8: note = RuvC_P1
  SITE 55: note = RuvC_P2
  SITE 92: note = RuvC_P3
  SITE 94: note = RuvC_P4
  SITE 97: note = RuvC_P5
  REGION 212..300: note = Tnp_domain
  SITE 220: note = Tnp_P1
  SITE 250: note = Tnp_P2
  SITE 258: note = Tnp_P3
  SITE 259: note = Tnp_P4
  SITE 271: note = Tnp_P5
MGYFAGLDVSVKETSVCIVDDTGRLVREVKVASEPEALLQVLITPGRTFKRIGLEAGPLSQWLFSALAEAGLPVICVETRHMRAVLKAQINKTDRNDARGMAQMMRVGLYRPVHVKTLRSQKLRMLLTHRKLLQSKAIAIDNDLGATLRNFGLKVGMVGRTKFEARIKELVEDLPDLAVLVEPLLIVRRVLREQIGILHRRLLVIVRDDDVCRRLMTVPGVGPVVALTYRATVDVPARFRNSKAVGAVFGLTPAKYQSAEVNRTGAISRCGDEMMRMMLYEAAQIVLVRSTKWSWLKAWAMKIARHRGMKKAIVALARRLAVIMHRIWVDGTEFRWTREVAAA

SEQ ID NO: 15157 - protein, 252 aa, unidentified
  source 1..252: note = protein_c16d787
  REGION 6..148: note = RuvC_domain
  SITE 9: note = RuvC_P1
  SITE 52: note = RuvC_P2
  SITE 87: note = RuvC_P3
  SITE 89: note = RuvC_P4
  SITE 92: note = RuvC_P5
  REGION 210..252: note = Tnp_domain
  SITE 218: note = Tnp_P1
  SITE 248: note = Tnp_P2
MNIKRIGLDLAKQVFQLHAVDHQERVVLRKTLHRARMLTFFTRLEPCLIGIEACGSSHYWARELTRLGHTVRIIPPQFVKPYLKGNKNDANDAEAICEAVSRPGMRYVAIKSEAQQSMQAEHRVRARLIHDRTALSNEIRGMLGEFGFVLPAGLSALRKALPEILSQQEKWDNRFIRLLSELTEELQALDERLNRYDRRLKQLAQEDERIRRLQEIGGIGPVTASALVAAVGDAKQFKSGREMAAWLGLVPR

SEQ ID NO: 15158 - protein, 349 aa, unidentified
  source 1..349: note = protein_6088069
  REGION 42..119: note = RuvC_domain
  SITE 57: note = RuvC_P3
  SITE 59: note = RuvC_P4
  SITE 62: note = RuvC_P5
  REGION 222..311: note = Tnp_domain
  SITE 230: note = Tnp_P1
  SITE 260: note = Tnp_P2
  SITE 268: note = Tnp_P3
  SITE 269: note = Tnp_P4
  SITE 284: note = Tnp_P5
MICVGIDVAKDKYDCFILSSEGEVLADVFTIPNNAEGFDTLLQTNLYRKSLSLRKTKTDRVDARTIAAMLMSDVDLKSYTDTAYHNEELKSLTRYRFDNVRERAKLKQSVSRLVTILFPELEKLVSTLHTASVYALLSEFPGAKQVAGAHLTHLKAVLYDASKGRYGRDMATTFRDAARCSVGSVMPAKSLELRHTIRLIHELDAEIEDIEAAIQSMMDEIQSPITTIPGMGVRMGAMILAEIGDFSRFDSPDKILAYAGMSPSTYQSGQLSLSGAYSHMEKRGSRYLRYALYNATKYVCLWNPTFAAYLAKKRAEDKHYNVALSHAAKKLVRLIYALEKSKRPYSTAA

SEQ ID NO: 15159 - protein, 408 aa, unidentified
  source 1..408: note = protein_9e04a8a
  REGION 4..160: note = RuvC_domain
  SITE 7: note = RuvC_P1
  SITE 57: note = RuvC_P2
  SITE 97: note = RuvC_P3
  SITE 99: note = RuvC_P4
  SITE 102: note = RuvC_P5
  REGION 274..361: note = Tnp_domain
  SITE 282: note = Tnp_P1
  SITE 312: note = Tnp_P2
  SITE 320: note = Tnp_P3
  SITE 321: note = Tnp_P4
  SITE 334: note = Tnp_P5
MNAVGIDVSKGKSMVAALRPMGEVALVPWEFLHTASGLYQVAHAILALGEDTRVVMEATGRYHEPVAAALSAYGIYVCVLNPLYIKQSGAGSIRKVKTDKADSLKIAKYGLDNWVDLREHTAMDTIRQQLKLCSRQYNIYMKTEVSLQNNLISLTDKTFPDVNELFSSPTRADGHQKWIDFVMTFWHRDCVCHISENAFTSRHEKWCKRKGYHFRADKAAEIYARSCELFTTLPKDDNTKLLITTAAQQLLAGKVTLAALRAEMTRLAQQLPEYDTVRAMYGVGETTAAQLMAEIGDVRLFPRRSSIVAFAGVDPAVAQSGKHEVQSTATTKHGSPHLRKTLYQIVCTYLRKAPGDEPVYQFLDKKRDEGKPYFVYMTAAQNKFLRIYYARVKDCLEAFDTQQNTVQD

SEQ ID NO: 15160 - protein, 367 aa, unidentified
  source 1..367: note = protein_5a75301
  REGION 22..165: note = RuvC_domain
  SITE 25: note = RuvC_P1
  SITE 70: note = RuvC_P2
  SITE 105: note = RuvC_P3
  SITE 107: note = RuvC_P4
  SITE 110: note = RuvC_P5
  REGION 229..316: note = Tnp_domain
  SITE 237: note = Tnp_P1
  SITE 267: note = Tnp_P2
  SITE 275: note = Tnp_P3
  SITE 276: note = Tnp_P4
  SITE 288: note = Tnp_P5
MKKDTTINQSLSSADLSSCTTLAVDLAKRVFQLAGENVLGEVIYEKRIKSREAFYTFLRALSPSMVVLMETGPGAQAWARQLQSQGNLARILPAQHVADHRSGAKNDRNDALAILRAGRDSSIASVPIKSATALAMQALHRARQSYVRRRTAMSNQMRGLLLEHGVALAQGEVAISQGIPRILEDATQPVPDLLRELIDEMLGEWRQLGERIKVLTGRLEMAANDDATAKRLMTVRGIGPIIATALIAKECDPKSFANARQFAAYFGMVPEQHSSGERVRLGKMSKRGDRYLRSLAIQGAHAVLRQIKPDSEQADDQRLQRWMNRLGRKEAAVRLANRNLRIVWVLLQNDQTYRRQPVNDQRMAMSS

SEQ ID NO: 15161 - protein, 336 aa, unidentified
  source 1..336: note = protein_1b6c328
  REGION 6..147: note = RuvC_domain
  SITE 9: note = RuvC_P1
  SITE 52: note = RuvC_P2
  SITE 87: note = RuvC_P3
  SITE 89: note = RuvC_P4
  SITE 92: note = RuvC_P5
  REGION 211..298: note = Tnp_domain
  SITE 219: note = Tnp_P1
  SITE 249: note = Tnp_P2
  SITE 257: note = Tnp_P3
  SITE 258: note = Tnp_P4
  SITE 270: note = Tnp_P5
MEPTTIAIDLAKRVFQIHFVDPDTGAIHSKVLKRAQLVPFFANRPASRVVMEACGSAHHWARVLARLGHDVRLIAAQFVRPFVKSNKNDAADAAAIWEAAQRPGMRFVAVKTEDQQAMLALHRIRQQLVRIRVMQINQLRGLLYEFGVVLPQGRRASIEAAKVALGSLADQLPAMLTHSLQDQLSRLRVLDEQIARIEQRILDWRRNDDACRRISEIPGVGVLTATAAVSVIGQAKTFRSGREFAAYLGLVPRQNGSGGKVKLGGISKRGDVYLRTLLIHGARSVISAAKHLPERLRALLTRRPTNVVAVALANKMARTIWALLAYGRTYQAAPAQ

SEQ ID NO: 15162 - protein, 340 aa, unidentified
  source 1..340: note = protein_be57e26
  REGION 6..148: note = RuvC_domain
  SITE 9: note = RuvC_P1
  SITE 52: note = RuvC_P2
  SITE 87: note = RuvC_P3
  SITE 89: note = RuvC_P4
  SITE 92: note = RuvC_P5
  REGION 211..298: note = Tnp_domain
  SITE 219: note = Tnp_P1
  SITE 249: note = Tnp_P2
  SITE 257: note = Tnp_P3
  SITE 258: note = Tnp_P4
  SITE 270: note = Tnp_P5
MNHTVYGIDIAKSVFQLHTVDMTTGEIVSIKLKREKFLAHFINLPPCLIGMEACGGAQHWARELIKLGHQVKLLAGKYVKSFVMGNKSDTADAKAIWTAVQQPGIKPIAIKTEQQQAILALHRLRQGLVKTRTMQINALRGLLTEYGFVMPKGKAGLRRDIATTLESLRLRLPSIVVDALTDQWQRINEQDKQIAEIEHKLHIWLKQDKAAQAIAKIPGVGLLTATVAVAAMGDTKTFKSGREFAAWAGLVPKQTGTGGKTKLLGISKRGDTYLRTLLIHGARAVLTHAKQPSQWIKEIGQRRPPNVVIVALANKMARTIWAILAHDRPYRSDWVSVKPA

SEQ ID NO: 15163 - protein, 339 aa, unidentified
  source 1..339: note = protein_4ac6402
  REGION 6..147: note = RuvC_domain
  SITE 9: note = RuvC_P1
  SITE 52: note = RuvC_P2
  SITE 87: note = RuvC_P3
  SITE 89: note = RuvC_P4
  SITE 92: note = RuvC_P5
  REGION 211..298: note = Tnp_domain
  SITE 219: note = Tnp_P1
  SITE 249: note = Tnp_P2
  SITE 257: note = Tnp_P3
  SITE 258: note = Tnp_P4
  SITE 270: note = Tnp_P5
MQVTTIGVDLAKNIFQVHGIARDEEVVFNRPLRRAQLLPFFTKLEPCLIGMEACSNAHHWAREFTALGHIVRLIPPKYVKPYVKRGKSDAIDAEAICEAVTRPTMRFVAIKTVEQQALLSLHRARALLVRQRTQLINGLRGMVAEFGVYIAKGLARVIGFAEDILVGEVLDLPEIANEVIHNLCEHLVALHARIRWYEERLKLVAKEDARVRLLRTIPGVGVVTASAIIASIGDGHQFRNGREFAAWLGLTPANKSSGGKEKLGRITKMGDQYLRCLLVVGMTSLVRQTKSHPERASKWLTSLLERKPARVATVAMANKTARIVWAVLTRNEPYTPHTV

SEQ ID NO: 15164 - protein, 414 aa, unidentified
  source 1..414: note = protein_731277f
  REGION 7..166: note = RuvC_domain
  SITE 10: note = RuvC_P1
  SITE 65: note = RuvC_P2
  SITE 105: note = RuvC_P3
  SITE 107: note = RuvC_P4
  SITE 110: note = RuvC_P5
  REGION 276..375: note = Tnp_domain
  SITE 284: note = Tnp_P1
  SITE 314: note = Tnp_P2
  SITE 322: note = Tnp_P3
  SITE 323: note = Tnp_P4
  SITE 336: note = Tnp_P5
MMMNPVVGLDVSKGESQVQAFLDKGQPFRKSFSVKHTVEGFENLLGFLKEIERVADGKQPSVILESTGHYHSPVIQFLEEQQYVYIIVNPLISHRARSTSLRKVKTDAVDAYLLCELYYKEEVEPYKKRGIQLLNLRNLKRQQETISSISAQTKVQLLTVLDQIFPEYRGVFGNLYSKVSLQTLFLFPTSEHVLNTTESVLTEKIVSLCTRRSEKWAKEKAQKLIEAAVRNPFQNNLYESHIFNLKMFITIVLQYQEHLSQLETEIDAHAKEIEEYKIIQSIPGIGEKIAATIISEIGGIDRFNHPKKLVAFAGIDPSVYSSGRFTATNNRITKRGSRRLRQALYMAVYCGIRDARKQKKSDTVIPRDKRLREFYDKKRDEGKPYRVAIIACANKLLHLIYALLKNKTTFQELT

SEQ ID NO: 15165 - protein, 338 aa, unidentified
  source 1..338: note = protein_0a7991d
  REGION 7..149: note = RuvC_domain
  SITE 10: note = RuvC_P1
  SITE 53: note = RuvC_P2
  SITE 88: note = RuvC_P3
  SITE 90: note = RuvC_P4
  SITE 93: note = RuvC_P5
  REGION 209..295: note = Tnp_domain
  SITE 217: note = Tnp_P1
  SITE 247: note = Tnp_P2
  SITE 255: note = Tnp_P3
  SITE 256: note = Tnp_P4
  SITE 268: note = Tnp_P5
MNTGTLLGIDIGKNTFHLHGQDARGNQLMRKKLNRCQLLPYLAQLPSCKIAMESCGGSQWLARQIEGLGHRVQLIAAQHVKAYVTGNKNDFIDAEAICEAASRPRTRSVPVKTLEQQILSTEHKLRKSWVDNRTRIINQVHGVLLELRIIFPIGHAALEQVPALMERHELPIRLRNAVERMLLDIQRLTRDIKGIDVEIKQQLSEDAAGMRLLSIPGIGPLTTSALVADVGDASTYKRSRDFAASLGLVPRQYSSGGKTSLLGISKRGDKYLRCLLVQGAHALMIRIDKRDDALGAWVRNLLARKPPNKVACALANKTTRIVWAVLARGGSYNVKQMA

SEQ ID NO: 15166 - protein, 390 aa, unidentified
  source 1..390: note = protein_20beca2
  REGION 4..163: note = RuvC_domain
  SITE 7: note = RuvC_P1
  SITE 60: note = RuvC_P2
  SITE 101: note = RuvC_P3
  SITE 103: note = RuvC_P4
  SITE 106: note = RuvC_P5
  REGION 266..353: note = Tnp_domain
  SITE 274: note = Tnp_P1
  SITE 304: note = Tnp_P2
  SITE 312: note = Tnp_P3
  SITE 313: note = Tnp_P4
  SITE 326: note = Tnp_P5
MILVGIDVAKDKHDCFICNSDGEVLFKAFTISNSMEGFNDLYAKIKSVSDDLSKLKVGLEATGHYSYNLLGFLLDKGLPTYVINPLHTNLFRKSQTLRKTKTDKVDAHTIAKMLLSDENLKPYSDTLYHNEELKSLTRYRFDKVRERAALKNSIARLVNILFPEIEKLVPTLHMKSIYALLLEFPSARHIAKAHLTRLTNLLNEASKGHYNRDTAIRFRDTARNSIGSFMPAKAMELKHTIELIQIISSEIDEIEFEIKRIMNDINSPILSIPGISYHMGAMIIAEIGDFSNFSSPDKILAYSGMSPSTYQSGHLTNCYAHMEKRGSRYLRYALYNATQHVCRWDKTFADYLAKKRSEGKHYNVAISHATKKLLRVLYHLEKTGELYQIA

SEQ ID NO: 15167 - protein, 341 aa, unidentified
  source 1..341: note = protein_85615d4
  REGION 6..148: note = RuvC_domain
  SITE 9: note = RuvC_P1
  SITE 52: note = RuvC_P2
  SITE 87: note = RuvC_P3
  SITE 89: note = RuvC_P4
  SITE 92: note = RuvC_P5
  REGION 210..296: note = Tnp_domain
  SITE 218: note = Tnp_P1
  SITE 248: note = Tnp_P2
  SITE 256: note = Tnp_P3
  SITE 257: note = Tnp_P4
  SITE 269: note = Tnp_P5
MKDTIIGVDLAKRVFQLHGSTTTGHVIFRKKLTREQFRRFMAEHPPCLVVFEACGSASYWAREMAKLGHDAKLIAPQYVRPFVKRQKNDAADAEAIVIAARQPEMRFVFPKTEDQQAKAMLFRGRERLVHQRTELVNALRAVLYEYGHVFPAGIGHLKRIEALFDDPTCDLPILIITECRDLLAQIAEKTGRIDAKTKALKALAAETDTARRLQTMPGVGPITALAVEAFAPDMAQFKSGRDFAAWLGLVPRQHSTGGKARLGRISKAGQTDIRRLLIIGAMTRIMGRARHKVPAESWIGRKLASKPKMLVGIALANRMARAIWAMLRKNEDYRDPTLAAA

SEQ ID NO: 15168 - protein, 343 aa, unidentified
  source 1..343: note = protein_951b32f
  REGION 5..153: note = RuvC_domain
  SITE 8: note = RuvC_P1
  SITE 55: note = RuvC_P2
  SITE 92: note = RuvC_P3
  SITE 94: note = RuvC_P4
  SITE 97: note = RuvC_P5
  REGION 212..300: note = Tnp_domain
  SITE 220: note = Tnp_P1
  SITE 250: note = Tnp_P2
  SITE 258: note = Tnp_P3
  SITE 259: note = Tnp_P4
  SITE 271: note = Tnp_P5
MNYYAGIDVSLKESSVCVVDAKGKVVREVKVASEPEVLVRFFGGLGFPVSCIGLEAGPLSQWLRAGLVVASFEVVLLETRHVKAALSAMTVKTDRKDARGIAQLLRMGWYRPVHAKSIDAQDTRALLVGRKLLQGKLLDVELSIRGILRGYGLKVGEVSRGRFEARIRELAAGHVMLETVIGAMLTARATLWSEFTKLHRQMLKIARADRICHRLMSTPGVGALVALTYRSAVDDPTRFSKSSTVGAYFGLTPKKYQSGETDRDGGVSKVGDAMVRTALFEAAHIMLTRATRFSSLKRWALGVAQRRGMKRAKVALARKLGVVLHRMWMDATDFRWGATAMAT

SEQ ID NO: 15169 - protein, 344 aa, unidentified
  source 1..344: note = protein_a31af5a
  REGION 6..148: note = RuvC_domain
  SITE 9: note = RuvC_P1
  SITE 52: note = RuvC_P2
  SITE 87: note = RuvC_P3
  SITE 89: note = RuvC_P4
  SITE 92: note = RuvC_P5
  REGION 211..301: note = Tnp_domain
  SITE 219: note = Tnp_P1
  SITE 249: note = Tnp_P2
  SITE 257: note = Tnp_P3
  SITE 258: note = Tnp_P4
  SITE 270: note = Tnp_P5
MKITTIGIDLAKNIFQIHGVDQYGKTQVRKQLKRAEMSPYFANLPACLVGMEACGSAHYWARKLQGYGHTVKLMAPQFVKPYVKTNKNDMADAEAICEAVARPNMRFVPIKNVEQQAILSVHRARQGFVKARTAQANQIRGLLSEFGIVIPQGIHSVMKQIPDILEDGENDLPGTFRHLISRLADNLKEMDHQVDELEKQINLWHRQNEASRKLGDIPGIGPITASAIVATVGKAQEFKNGRQLAAWMGLVPRQKSSGGKQNLLGISKRGDTYLRTLMIHGARSVIRYAESKAAPDSWLRKLMDRRNKNIAAVGLANKNARVIWALLAHDRIFHPDYTPAAAAV

SEQ ID NO: 15170 - protein, 386 aa, unidentified
  source 1..386: note = protein_8b8bb8e
  REGION 4..159: note = RuvC_domain
  SITE 7: note = RuvC_P1
  SITE 58: note = RuvC_P2
  SITE 98: note = RuvC_P3
  SITE 100: note = RuvC_P4
  SITE 103: note = RuvC_P5
  REGION 263..350: note = Tnp_domain
  SITE 271: note = Tnp_P1
  SITE 301: note = Tnp_P2
  SITE 309: note = Tnp_P3
  SITE 310: note = Tnp_P4
  SITE 323: note = Tnp_P5
MIFIGIDIAKNSHFASAVNSDNEVIVKPFKFTNDDKGFNLFINTFKDFDLSNCLVGLESTGIYGDNLTTFLFSKGFKIGRINPIQTDSLRSSNIRKTKNDKIDTLLIAKCLMLGNYTLVTEKDIEIIKLRTICRFKFDIKKSQSKAKIQLVTCLDIVFPELSNFFNGNLHIKSSYALLTKYPSAKIIANTRIDILTNLLYSASKGHFKTDKAIALKELAKHSIAMDNPAIGKQIQMLIEQIQMLQKQIDLLDIDITNIMEKLNSPILSIPGIGIWLGAIIISEIGDITRFSSATKLLAFAGLDPSVRQSGNFNATNTKISKRGSKHLRFAINYAAELIIWNDDTFYQYYTMKLAQGKSYLNAIGHVAHKLTRVIFKLLTTNTTFKA

SEQ ID NO: 15171 - protein, 370 aa, unidentified
  source 1..370: note = protein_49f01a7
  REGION 7..147: note = RuvC_domain
  SITE 10: note = RuvC_P1
  SITE 53: note = RuvC_P2
  SITE 88: note = RuvC_P3
  SITE 90: note = RuvC_P4
  SITE 93: note = RuvC_P5
  REGION 210..297: note = Tnp_domain
  SITE 218: note = Tnp_P1
  SITE 248: note = Tnp_P2
  SITE 256: note = Tnp_P3
  SITE 257: note = Tnp_P4
  SITE 269: note = Tnp_P5
MNDLIRIGIDTSKSVFVLHGVDAAEQPVLRRKLRRQQMLDFFAKLAPVQIGIEACGAAHYWARELMALGHEVRLLPPQYVKPYVQRGKNDAADASAICEAMSRPRMRFVPVKTADQQAALMLVGVRDQLVARRTQLSNTIRGYAAEFGIAAAKGLDKVEPLLVRIAREPGVPELAKGLFAALGEEFAALKPKLRKLEAQLLAWHRHNELSRRLAEIPSIGPIGATLLVMKVTNPQAFRCGRDFSAWVGLTPKDHSTAGKQRLGVITRAGDETLRRVLVVGATAVIQQVRKGRGNPSPWLIELMRRKPPKLVAVALANKTARIAWKLMVSGERYHREHARGDFVPPTGSLAPGTRRQGRVAPPAAVACGQP

SEQ ID NO: 15172 - protein, 405 aa, unidentified
  source 1..405: note = protein_a7143ca
  REGION 9..162: note = RuvC_domain
  SITE 12: note = RuvC_P1
  SITE 62: note = RuvC_P2
  SITE 102: note = RuvC_P3
  SITE 104: note = RuvC_P4
  SITE 107: note = RuvC_P5
  REGION 268..354: note = Tnp_domain
  SITE 276: note = Tnp_P1
  SITE 306: note = Tnp_P2
  SITE 314: note = Tnp_P3
  SITE 315: note = Tnp_P4
  SITE 327: note = Tnp_P5
MSQNFSIFVGIDISKHKFNACAIQNPNSIIFESAFDMSKQGFSSFVQKLSVFPKSSVLIAMESTGCYHLNLLSFLSLNDFSCVVLNPLLVNKSLPVGLRKTKTDKIDARSIALTIFYTHHILPTSSFLNSDFRDIARKKESITHQISRVKNDIEKLLSLLFPELEKVTNIYNDAILDLLSSFPSAKAIQKASIDSLRVFFSKTIGRKLKLTPETLKELANNSIAQYWPVKEKILIQTIKELRFLQQQLNEFDEMLKEYCKCASLNQDVEILTSIDGIGENSALYFLAEVGDISRFSTYKKLIAYCGLDPSVDESGKHKGESRISKRGNAHLRRIIWLMSVNVVRHNEYFKAYFQRKRAQGLVYKKAMMSVAHKLLRTIFAMMKKREKFNIDHTFSSSTQNLILHS

SEQ ID NO: 15173 - protein, 354 aa, unidentified
  source 1..354: note = protein_ad72ff3
  REGION 7..144: note = RuvC_domain
  SITE 10: note = RuvC_P1
  SITE 53: note = RuvC_P2
  SITE 88: note = RuvC_P3
  SITE 90: note = RuvC_P4
  SITE 93: note = RuvC_P5
  REGION 210..296: note = Tnp_domain
  SITE 218: note = Tnp_P1
  SITE 248: note = Tnp_P2
  SITE 256: note = Tnp_P3
  SITE 257: note = Tnp_P4
  SITE 269: note = Tnp_P5
MKDFSAIGIDTSKAHFAVSGADAGGREVWREGGTPARIMKKLAALPPTLIGIEACQGAHALARELVAMGHDARIVPPQLAKPFVGRNKHDAADARAICRAVREPDTTFVPIKSEAEQADAMLVGHRRALHERRTEIGNRIRGYAGEHGLKAPQGVRHVPALLGRLLAREDLPAHARLVVEDLADEWERLGPRIAAAEAQLVKAARTKPECRRLMEVPSVGPVVAWRTVLAVGDPRRFRTGRAFAAWLGLTPRNHTTANKQRLGAITRAGDMALRADLVCAATSLLQQVNRRGAQACGGGRLVAWAAQILPRKKFKEAAVALANRVARILWKLLASGARYDRDHGPALEPLEAAA

SEQ ID NO: 15174 - protein, 347 aa, unidentified
  source 1..347: note = protein_7fb4b8c
  REGION 15..167: note = RuvC_domain
  SITE 18: note = RuvC_P1
  SITE 67: note = RuvC_P2
  SITE 108: note = RuvC_P3
  SITE 110: note = RuvC_P4
  SITE 113: note = RuvC_P5
  REGION 209..296: note = Tnp_domain
  SITE 217: note = Tnp_P1
  SITE 247: note = Tnp_P2
  SITE 255: note = Tnp_P3
  SITE 256: note = Tnp_P4
  SITE 269: note = Tnp_P5
MKKTETTKLGVQDFAGIDVSAHELDVVVRRSIDDQLTIAPFANTTAGHKALLRLLLHGKAQVRVCVEASGNYTLDLALTLQAHPQVEISVVNPRRARRFAESLGKRNKTDRVDAQVLGEYAWRMPWVPWQPPSAVALHLRAITRAIADLSSIHTQQKNRAHAVAASQALPALVVREMEHHQKYLEQRMTQLRRQALRLITQDSELGRRFRLMLTATGIAETSALQILGELAVLPDTLDARQWVAFSGLDPRLFKSGKSVEKRPRISRGGSRHLRRALYMPALVALRRDPYLGRFYQTLVLRGKARLQAIVAVMRKLLHALCAIFRTNQPYDGSKLCPLSPIGIAACA

SEQ ID NO: 15175 - protein, 342 aa, unidentified
  source 1..342: note = protein_095e39a
  REGION 6..148: note = RuvC_domain
  SITE 9: note = RuvC_P1
  SITE 52: note = RuvC_P2
  SITE 87: note = RuvC_P3
  SITE 89: note = RuvC_P4
  SITE 92: note = RuvC_P5
  REGION 211..297: note = Tnp_domain
  SITE 219: note = Tnp_P1
  SITE 249: note = Tnp_P2
  SITE 257: note = Tnp_P3
  SITE 258: note = Tnp_P4
  SITE 270: note = Tnp_P5
MEISTIGLDLAKSVFQIHGVSDAGDVVVRKALRRSQVLPFFAKLPPCLVGMEACGTSHHWAREILKLGHEVRLMPPAYVKPYVKRGKTDANDAEAICEAVTRPTMRFVPVKSPEQQAALALHRTRDLLVKQRTQLVNMIRGLLAEFGIEMARGLHHALALAKRLTEGHAADVPALAQRVVASLARQIGILQEELATLEKELLTWHRSSELSQRLATIPGVGVISATALAASVSEPERFRSGRQFAASLGLTPLQQSSGGKEKMGRITKMGDRYLRRLLVVGMTSLVRRARTAPESVDPRIPAMLERRPARVVTVAAANRTARIAWAIMTRGGSYRRPAAAIA

SEQ ID NO: 15176 - protein, 409 aa, unidentified
  source 1..409: note = protein_b9f0dbf
  REGION 5..166: note = RuvC_domain
  SITE 8: note = RuvC_P1
  SITE 63: note = RuvC_P2
  SITE 108: note = RuvC_P3
  SITE 110: note = RuvC_P4
  SITE 113: note = RuvC_P5
  REGION 282..369: note = Tnp_domain
  SITE 290: note = Tnp_P1
  SITE 320: note = Tnp_P2
  SITE 328: note = Tnp_P3
  SITE 329: note = Tnp_P4
  SITE 342: note = Tnp_P5
MKLFVGIDVSSKDLVTSIISKEKHEVVFRGNFVNDLKDATELKKQTINTANSNQIDQVIIGMEATSIYSFHPAMFFQEDIDLKAFNTQSVVVDPKKTKRFHDVFAEDKNDQIDAYYIADYLRVGHYSIGIVRQENYIALQRLTRSRYEIVQSLVRAKQHFIENLYYKLNKLVISDELNTSIFGSTMMQLLTEDLTTDDLLNISINDLTDYLAEHGRGRFADPEALAKMIQKAVRSSYRLDKVVANSVDAVLSVYAEEIKAFQKMIKDLDKSIEKVVKVTDDEQILRSIPGIGPVYAAGILAKIGQIDRFDNEAKLAKYAGLSWREKQSGSYTSDNTPLKRTGNTYLRYYLVEAANLVRTHDPAFGEYYQRKYKEVKHTPSKRALVLTARKLIRVIYFLLKNHQIYQEKR

SEQ ID NO: 15177 - protein, 387 aa, unidentified
  source 1..387: note = protein_3cd8382
  REGION 4..159: note = RuvC_domain
  SITE 7: note = RuvC_P1
  SITE 58: note = RuvC_P2
  SITE 98: note = RuvC_P3
  SITE 100: note = RuvC_P4
  SITE 103: note = RuvC_P5
  REGION 263..350: note = Tnp_domain
  SITE 271: note = Tnp_P1
  SITE 301: note = Tnp_P2
  SITE 309: note = Tnp_P3
  SITE 310: note = Tnp_P4
  SITE 323: note = Tnp_P5
MIYVGIDIAKQTHYASIMNSDGEILVAPFSFTNDHSGFQKLLSHLDPFPQKETLIGMESTAHYAENLTSFLFTRGFQVCIINPIQTSSLRKSNIRKTKTDSIDTYLIIKALTLNHYRLFTERDFDSLQLKNLCRFRQKLMKARTKVKIQLVTYVDLLFPELQYFFKSGIHGKACYALLKEQPNPDRIAKMHLTRLTNLLSKSSHGHFKQSNAVRLKELASQSVGIKNSTLSLQILQSIEQIEMYTEQLAEVEASINEIMNKMDSVIKTIPGIGSLNGAMIIGEIGDITRFEKPCQLLAYAGLDPSVYQSGNFTASRTRMSKRGSKLLRYALINAAWQATLVNKTFKDYYDLKISQGRRHYNALGHVAHKLVRIIHKMMTDSVAFNLA

SEQ ID NO: 15178 - protein, 348 aa, unidentified
  source 1..348: note = protein_773c8ae
  REGION 9..150: note = RuvC_domain
  SITE 12: note = RuvC_P1
  SITE 55: note = RuvC_P2
  SITE 90: note = RuvC_P3
  SITE 92: note = RuvC_P4
  SITE 95: note = RuvC_P5
  REGION 214..299: note = Tnp_domain
  SITE 222: note = Tnp_P1
  SITE 252: note = Tnp_P2
  SITE 260: note = Tnp_P3
  SITE 261: note = Tnp_P4
  SITE 273: note = Tnp_P5
MNATPKPVVGVDTAKNVFQLYTVDKQSGELICQQLKRPKFLAWFVNREPCVVGMEACGGSQHWARKLKELGHEVKLMRPKMVKAFVPGNKNDVADARAIWMAAQQPGVKAVAVKTEEQQAVIALHRIRQQLVKSRIAQCNELRGLVGEHGETFAVGQAAFDAGLKAALARLAERLPSFFIDTLREQWEEIAKLTERIARIEARLRAWMRQDRAAQAIAQIPGVGVLTATAAVATMGDAKAFRSGREFAAWIGLVPAQTGTGGKVRLLGISKRGDSYLRMLLIHGARSVLYHAKEPSKWLQGICQRRPSNVVTVALANKIARTIWAVLAHERTYDKDHISIRPGMTTTI

SEQ ID NO: 15179 - protein, 341 aa, unidentified
  source 1..341: note = protein_aff69fe
  REGION 6..147: note = RuvC_domain
  SITE 9: note = RuvC_P1
  SITE 52: note = RuvC_P2
  SITE 87: note = RuvC_P3
  SITE 89: note = RuvC_P4
  SITE 92: note = RuvC_P5
  REGION 211..295: note = Tnp_domain
  SITE 219: note = Tnp_P1
  SITE 249: note = Tnp_P2
  SITE 257: note = Tnp_P3
  SITE 258: note = Tnp_P4
  SITE 270: note = Tnp_P5
MLILVLGIDLGKNVCSLVGLDEAGAVVLRRRLRREGVAQFVGKLPACIVAMEACCGAHYLGRVLGAAGHTIRLMSPEYVRPYVMANKNDDHDAEAIAEAATRPTMRFVPVKSEPQSDIQALHRARSRLVAERTALINHLRALLLERGIVAPKGRKQLEAQLVAFADEYDIRLSPRMRRLIEDLRSEWRSLDERIAASDAEFVQMARTDEAARRLSMIPGIGVINATALVAAVGDARSFGRGRDLAAWLGLTPRQATIGGKPRLLGISKRGNRYLRANLIHGARAVLPRIAAQDTPLGCWIRGLLERTHKNVVVVALAAKLARIVWAVLRKEQGFDPKIAAA

SEQ ID NO: 15180 - protein, 354 aa, unidentified
  source 1..354: note = protein_fc92dc9
  REGION 12..152: note = RuvC_domain
  SITE 15: note = RuvC_P1
  SITE 58: note = RuvC_P2
  SITE 93: note = RuvC_P3
  SITE 95: note = RuvC_P4
  SITE 98: note = RuvC_P5
  REGION 217..302: note = Tnp_domain
  SITE 225: note = Tnp_P1
  SITE 255: note = Tnp_P2
  SITE 263: note = Tnp_P3
  SITE 264: note = Tnp_P4
  SITE 276: note = Tnp_P5
MPRQSTDTVAVLGIDIGKNTFHLVGLNERGAIILRRKLSRGQLEAKLANLPPCLVGMEACVGAHHLSRRLKALGHDARLMPARYVRAYLKGNKNDFRDAEAIAEAVQRPTMRFVATKTAEQLDLQALHRVRSRLVGERTAIANEIRAFLLDRGIAVAKGLNRLRAALPGILGTRTEVLSPRLLHIIEDLVADWRHLDQRIDNVSLQIEALAKQDAGCERLMTVPGVGPIISSATVAAIGSGDVFAKGRDFSAWLGLVPKQISTGDRTILGKISKRGNKYLRTLFVQAARVVLLWPRSWERYGLKPWIEAAARRLHHNVLAIALANKLARIAWSVLHHGRNFEVRKMSEPVSRSA

SEQ ID NO: 15181 - protein, 399 aa, unidentified
  source 1..399: note = protein_44b0c00
  REGION 4..160: note = RuvC_domain
  SITE 7: note = RuvC_P1
  SITE 57: note = RuvC_P2
  SITE 97: note = RuvC_P3
  SITE 99: note = RuvC_P4
  SITE 102: note = RuvC_P5
  REGION 275..362: note = Tnp_domain
  SITE 283: note = Tnp_P1
  SITE 313: note = Tnp_P2
  SITE 321: note = Tnp_P3
  SITE 322: note = Tnp_P4
  SITE 335: note = Tnp_P5
MNAVGIDVSKGKSTVAVMQPLGVVAASPFEVAHNESELRELAKFLKRLPGETKVVMEYTGSYYEPIARFLHNEGIYVSVVNAILIHNYSGNSVRRAKTDKKDSVRIAQYALDRWLDLREYIPAEETRSTLTLLNRQYSAICKHKTQLINNLISLIDQSFPNANEFFDSPVRQSDGHMKWVDFIIKFPHCDCVSGISRAAFKDKYSRWCKKQNYNYADGKADEIYDHARSCVATLPDSECVRAMIQQSAKLLNSTLETAESLRKLMTATAEQLPEYDTVLGMYGVGRVLAPQLMAEIGDTRRFHSRKAITAFAGLDAPPYQSGTVDVKSRSISKRGSPHLRRTLFLVVETYLKRKPADEPVYQFLDRKRSEGKLYKVYMTAAANKFLRIYYAKVNQVLNA

SEQ ID NO: 15182 - protein, 347 aa, unidentified
  source 1..347: note = protein_5fc713e
  REGION 6..149: note = RuvC_domain
  SITE 9: note = RuvC_P1
  SITE 54: note = RuvC_P2
  SITE 89: note = RuvC_P3
  SITE 91: note = RuvC_P4
  SITE 94: note = RuvC_P5
  REGION 213..299: note = Tnp_domain
  SITE 221: note = Tnp_P1
  SITE 251: note = Tnp_P2
  SITE 259: note = Tnp_P3
  SITE 260: note = Tnp_P4
  SITE 272: note = Tnp_P5
MKIRRVGVDLAKNVFQVHGVDQHEQPVWQRSVKRAQWLGEIQKHVPQTAEIGMEACAGAHHWARALESRGYRVKLIAPQFVKPYVKSNKTDRNDAEAICEAMSRPSMRFVAIKSVEQQDIQAVHRVRSELVSQRTGKANQIRGLVGEYGLVAPVRLGQLRMAVPLWLEDAENGLTPRFRRVLAGLWRDLTALDERVGELDQELKELAEEHPAARRLQQLRGVGPVIATALVAALGDGSGFRKGRDFAVSLGLTPRQHSSGGKAHLMGISKRGDSYLRQLLVHGARAAVRTAKLHDDALSCWIQNLNARKHTNVVVVALANKTARMAWAMIHNDVDYEPQLAASAATS

SEQ ID NO: 15183 - protein, 322 aa, unidentified
  source 1..322: note = protein_94be3e9
  REGION 9..157: note = RuvC_domain
  SITE 12: note = RuvC_P1
  SITE 56: note = RuvC_P2
  SITE 96: note = RuvC_P3
  SITE 98: note = RuvC_P4
  SITE 101: note = RuvC_P5
  REGION 195..279: note = Tnp_domain
  SITE 203: note = Tnp_P1
  SITE 232: note = Tnp_P2
  SITE 240: note = Tnp_P3
  SITE 241: note = Tnp_P4
  SITE 252: note = Tnp_P5
MSQPNPLCVGIDVSKATLDIAASSDVAQFTVSNDSDGFNAIITGLRRHSVALVLMEATGGLEVAVACSLQAEGFEVAVVNPRQARDFARAMGYLAKTDRIDARVLTQMAEVINRHPERKRFIRALPDAERQALAAMVVRRRQLIAMLVAERNRLHPFHPQNKKSINTIIKALEDELVRLEKEMDSHIRNHFKEIAERLSSIKGVGTMTVSAMLAEIPELGTLSRREISALIGVAPVNRDSGTMRGRRTIFGGRAGVRSALYMAALVATRFNPVIKTFYVCLLAAGKAKKVALVACMRKLLTILNAMLRKNEEWDESYHHVAP

SEQ ID NO: 15184 - protein, 300 aa, unidentified
  source 1..300: note = protein_793e085
  REGION 8..149: note = RuvC_domain
  SITE 11: note = RuvC_P1
  SITE 54: note = RuvC_P2
  SITE 89: note = RuvC_P3
  SITE 91: note = RuvC_P4
  SITE 94: note = RuvC_P5
  REGION 213..298: note = Tnp_domain
  SITE 221: note = Tnp_P1
  SITE 251: note = Tnp_P2
  SITE 259: note = Tnp_P3
  SITE 260: note = Tnp_P4
  SITE 272: note = Tnp_P5
MSDYSYFCGIDLAKNHFSLHAVDQNGKVILHKSVTRSKLLTTIANMPLMRIGVEACGGAHYWARTLNKLGHDARIMAVKYVIPYRTKGKNDLNDAVAICEAVQRPSTRFVPVKSPEQQAILSVHRMREHWVRERTALMNRMRALLSEFGLIIPVGRSSLMKHVPLMLEDAENELPHLARTVIADAYHHLGELNQRIADTEQVFDSFAKVSTNVQRVMKVRGIGPQTATAILASIGNGSQFDQSRDFSAWLGLVPKQYSTGGKPRLGRITKHGDKYLRTLLVHGARTVIANLGDKQDKLSQ

SEQ ID NO: 15185 - protein, 329 aa, unidentified
  source 1..329: note = protein_13bc6ef
  REGION 4..163: note = RuvC_domain
  SITE 7: note = RuvC_P1
  SITE 60: note = RuvC_P2
  SITE 101: note = RuvC_P3
  SITE 103: note = RuvC_P4
  SITE 106: note = RuvC_P5
  REGION 266..310: note = Tnp_domain
  SITE 274: note = Tnp_P1
  SITE 304: note = Tnp_P2
MIYVGIDVAKDKHDCCILGSEADKLFPVFTIPNNKAGFDELYEKMFSVTDDKTKIKVGLEATGHYSLNLLGSLIDKGLPTCVINPLHTNLYRKGLSLRKTKTDKVDARSIAMMLMTNKTLKPYSDISYHNEELKSLTRYRFDKVQERAKLKSSVARLVNILFPALEKLVPSLHMASVYSLLSKLPGASYITECHLTHLKNLLETASKGHYGRDMAITLRNTARDSIGSVIPAKSMELKHTIHLIKVMTEEIDEIEDSIKSIMDTCNSPIMTIPGISYRMGAMILAEIGDFTRFNYADQILALQGCHLLPTNQVNWILAILIWRNEVLVI

SEQ ID NO: 15186 - protein, 339 aa, unidentified
  source 1..339: note = protein_f25807e
  REGION 4..164: note = RuvC_domain
  SITE 7: note = RuvC_P1
  SITE 58: note = RuvC_P2
  SITE 101: note = RuvC_P3
  SITE 103: note = RuvC_P4
  SITE 106: note = RuvC_P5
  REGION 279..339: note = Tnp_domain
  SITE 287: note = Tnp_P1
  SITE 317: note = Tnp_P2
  SITE 325: note = Tnp_P3
  SITE 326: note = Tnp_P4
  SITE 339: note = Tnp_P5
MLSVGIDVSKGESMVCALNQFGKVVLTPRRYKHVKSALGSLVERLRSFGDNDIRIIMEATGIYSLPVAKYFKEQGFFVAVINPYAMSRFRIGGQGSLRNVKTDKADSMTIAGYGRQCWDTLMEYNPAAETYWKLDYLLRLYQKILAYRVSILQELYGIIEQTMPGIKEIGIKSPQVSTAKDILLDFAKTFWHYDQITGMSEKKFISRYLVWAKKKGHRPDVGKAAAIYAMAKDGIPCLPADPIVKQSIHTNIEALERVGTTLRDILSQMSGLAKTLPEYDIVRAMGGVGDVLVVKLIAVIGDIKRFRKAKSLVAYAGIDPPPYSSGKFEGNKRRISKRG

SEQ ID NO: 15187 - protein, 315 aa, unidentified
  source 1..315: note = protein_ec7157d
  REGION 8..157: note = RuvC_domain
  SITE 11: note = RuvC_P1
  SITE 53: note = RuvC_P2
  SITE 93: note = RuvC_P3
  SITE 95: note = RuvC_P4
  SITE 98: note = RuvC_P5
  REGION 188..272: note = Tnp_domain
  SITE 196: note = Tnp_P1
  SITE 225: note = Tnp_P2
  SITE 233: note = Tnp_P3
  SITE 234: note = Tnp_P4
  SITE 246: note = Tnp_P5
MTSPTPVIGIDVAKDSLSLFCAASGQAIEIGNDTRSIHTWLKQLPASSAIAIEATGIYHLDVASLAQAQGHQVYIINGYRLSNYRKGIGGRNKDDRSDARLLSRYLTHEREQLQPWQPPPEAYRRLQILLHRRAVLVRSGVSLRQSFSQEPLLKDVLKPLLEQLSAVEKRLEKLINQVLSESGLAEQSKRCQAVEGIGPLTAAGLNMAFLRGTFRNSDAFIAFLGLDVRMKESGRYCGQRKITKQGDPEIRRLLHNAAMAAARTQRWQEVYQGYLKRGLKRTEALTILARKLARIAFALMQKQVDYNPRQGGSLT

SEQ ID NO: 15188 - protein, 434 aa, unidentified
  source 1..434: note = protein_5e7c22e
  REGION 25..186: note = RuvC_domain
  SITE 28: note = RuvC_P1
  SITE 84: note = RuvC_P2
  SITE 125: note = RuvC_P3
  SITE 127: note = RuvC_P4
  SITE 130: note = RuvC_P5
  REGION 293..381: note = Tnp_domain
  SITE 301: note = Tnp_P1
  SITE 331: note = Tnp_P2
  SITE 339: note = Tnp_P3
  SITE 340: note = Tnp_P4
  SITE 352: note = Tnp_P5
MNYNTQNAKIASITEKTLIAKTLIVGIDVGSETHYARAFDWRNYEYSKKPFAFNNDEAGFAAFKAWMEDMADKHGKEAVIPGMEPTGHYWLNLGAYLQEQGMKPVHVNPHHVKKSKELDDNNPNKNDRKDPKTIAGLVNEGRFSYPYIPTGIYAEIRNLSNLRIQTQEELTRIKNRIARWFSIYFPEIKDVYKNPDAVSGMMVIKKAPLPCDIKELGVDGVNQVWRDAKLKGAGLKRARTLVSAAEHSIGSTEAPGSARIEIRNLLNDYEVYKNRMDDLMREIEAKLSEIPYIDKLMEINGIGLKTVSCFIAEVGDIRRFDNPKQLQKLAGYAIVADSSGKHNGESRISHRGRKRLRYALYEAAISVIGKNKEFREIHDYYRTRKQNPLKKMQSVIAIACKLIRIFYTILTKGVDYDGQKMLSDIVSPETIMAA

SEQ ID NO: 15189 - protein, 398 aa, unidentified
  source 1..398: note = protein_e93c3af
  REGION 4..160: note = RuvC_domain
  SITE 7: note = RuvC_P1
  SITE 57: note = RuvC_P2
  SITE 97: note = RuvC_P3
  SITE 99: note = RuvC_P4
  SITE 102: note = RuvC_P5
  REGION 274..362: note = Tnp_domain
  SITE 282: note = Tnp_P1
  SITE 312: note = Tnp_P2
  SITE 320: note = Tnp_P3
  SITE 321: note = Tnp_P4
  SITE 334: note = Tnp_P5
MISVGIDVSKGKSTVCIMKPYGEVIKTPYEIKHTEKDLSDLAELILSFEEECRVVLEATGAYHLPVLNYLKQKGSFVAVINPLMMKKYSSLTIRKGKTDKIDSIKISNYGIDNWFHLMDYCASDTLYAELDALCRQYNQYVSMKIKCKVNLSNLLDKTMPGITNLLRNHDYVGKYKLNSFVKEYWHYDNITKKSETQFIESYLKWAKKEGYHANESKAKSIYKLASESVTTLSSKMKSTKMLVVEATRVFKEVEKTLRMILLQMQELAKKLAEYNVVREMSGVGDVLAPRLIACIGDVRRFHNAKALIAYAGIDAPAYESGNFKGTQRRISKRGSAYLRKTGYEVMASIKAIKPIQDSAVYDYILKKELEGKAKKVAKIAGLNKFLRIYYARVKEVYK

SEQ ID NO: 15190 - protein, 342 aa, unidentified
  source 1..342: note = protein_2aaf7a5
  REGION 7..149: note = RuvC_domain
  SITE 10: note = RuvC_P1
  SITE 53: note = RuvC_P2
  SITE 88: note = RuvC_P3
  SITE 90: note = RuvC_P4
  SITE 93: note = RuvC_P5
  REGION 212..298: note = Tnp_domain
  SITE 220: note = Tnp_P1
  SITE 250: note = Tnp_P2
  SITE 258: note = Tnp_P3
  SITE 259: note = Tnp_P4
  SITE 271: note = Tnp_P5
MSNIQTIGVDLAKNVFSIHGVDAYGKCVLRKTVKRNKLLDTFATLPPCIVGMEACSGAHHWSRELRKLGHTPKIMASKFVIPYRQSEKNDANDAEAICEAVSRPKTRFVSVKSEEQQAVLCLHRIRHSLVKNRTATINQLRGLLSEFGIIIPQGRYPLQKMVPDILEDAENGIPFLARELLSSLVNNIRQLNEEILRYDRKVYLLSKEMKQAAKLMAVPGVGEHSATAIVATVCDGKQFGSSRQFAAWIGLVPRQYSTGGHVHLGRISKRGEKHIRTLLIHGARAVIARCKEKTDRNSLWLQQLVERRGYKRAAVALAAKNARIIWALLTTENEYKANYISG

SEQ ID NO: 15191 - protein, 261 aa, unidentified
  source 1..261: note = protein_82fea0c
  REGION 7..149: note = RuvC_domain
  SITE 10: note = RuvC_P1
  SITE 53: note = RuvC_P2
  SITE 88: note = RuvC_P3
  SITE 90: note = RuvC_P4
  SITE 93: note = RuvC_P5
  REGION 153..223: note = Tnp_domain
  SITE 174: note = Tnp_P2
  SITE 182: note = Tnp_P3
  SITE 183: note = Tnp_P4
  SITE 195: note = Tnp_P5
MNTIALIGIDLGKHSFHVHCQDQSGKALLRKKFTRTKLMEFLAACSPATVVMEACAGTHFMARRITDLGHEARLISPQFVRPFVKSNKNDFIDAEAICEAASRPSMRFVQPRTETQQAMRALHRVWESLVRDKVKATNQMQAFLLEFGISMPKGIAVIKQLATVLSRDFAASTGLVPRQYSTGGKTTLMGISKRGNKILRQLLVLCARTFILHIEHRKGKLADWVKQQLERKHSNIVACALANKLARIAWAITTRNTVFVA

SEQ ID NO: 15192 - protein, 338 aa, unidentified
  source 1..338: note = protein_1991336
  REGION 6..147: note = RuvC_domain
  SITE 9: note = RuvC_P1
  SITE 52: note = RuvC_P2
  SITE 87: note = RuvC_P3
  SITE 89: note = RuvC_P4
  SITE 92: note = RuvC_P5
  REGION 209..295: note = Tnp_domain
  SITE 217: note = Tnp_P1
  SITE 246: note = Tnp_P2
  SITE 254: note = Tnp_P3
  SITE 255: note = Tnp_P4
  SITE 267: note = Tnp_P5
MEFKRISIDTSKHVFTIHGVDGQERPALRREIRRAQLEPFFAKLAPTEVVLEACAGSHHWGRVLCGMGHRVRLIPPQYVKPFVKRSKNDRNDAEAISEAASRPTMRTVPVKSADEQAATIILKHRELMVNQRTQAINALRGHAAEFGVVAAKGCASVTSLLAVLSAEEAIPAVAKAMFEQMGQHIADLDLKIDVLERQLLEQNKANAVSKLLAAIPGVGPITAITMALTVNPASFETGRHFAAWIGLTPREHSTGGKHRLGRISKAGSERLRQLLVVGAMAVIRYAKPGSKSATAWLLQLLERRPRKVAAVALANKMARIIWAMMARGEAYRRQSVAA

SEQ ID NO: 15193 - protein, 321 aa, unidentified
  source 1..321: note = protein_e7a052a
  REGION 4..148: note = RuvC_domain
  SITE 7: note = RuvC_P1
  SITE 52: note = RuvC_P2
  SITE 92: note = RuvC_P3
  SITE 94: note = RuvC_P4
  SITE 97: note = RuvC_P5
  REGION 191..278: note = Tnp_domain
  SITE 199: note = Tnp_P1
  SITE 229: note = Tnp_P2
  SITE 237: note = Tnp_P3
  SITE 238: note = Tnp_P4
  SITE 251: note = Tnp_P5
MTYIGIDISKDTFVVAYSPNKNSKTKTFKNTTKGIHEFIKTISKEEHHCVMEATGNYSALLVYLLSEAGITTSLENPLKVKNFARAMLSTVKTDEIDARLIALYGEKMNPAPYKMRSDAILTLKQKRTVIRQLKKQLIATRNLKGSMEALPFFDAKCKRSVEKTIAFLEKQIKDLEEDLANLACSEYKKQMDLLTSIKGIGVTLAAALIITTGGFTYFDNAKQLTRYLGLSPTYQQSGTSVNFKGHINRNGDSYLRGQLYVAAFSSILYNAECKACYERLRSKGKHGKVALIAAANKLIRQAFAVITQDKPYIDGYVSSKN

SEQ ID NO: 15194 - protein, 394 aa, unidentified
  source 1..394: note = protein_9266ab1
  REGION 4..162: note = RuvC_domain
  SITE 7: note = RuvC_P1
  SITE 60: note = RuvC_P2
  SITE 101: note = RuvC_P3
  SITE 103: note = RuvC_P4
  SITE 106: note = RuvC_P5
  REGION 267..354: note = Tnp_domain
  SITE 275: note = Tnp_P1
  SITE 305: note = Tnp_P2
  SITE 313: note = Tnp_P3
  SITE 314: note = Tnp_P4
  SITE 327: note = Tnp_P5
MFYLGIDIGKNNHVASMMDDAGKIAFKAFSFPNTSEGGEALFSKLTSHSDNPANFEIGMEATGHYWLAVYSFLYDKGFLIHVINPIQTDGWRKGTEIRKRKNDTIDSILIADLIRYGSFVETVLSDETIFSLRTLTRFRGYLVSSISDLKRKIICVLDQVFPEYQSIFSNIFGKTSKEILLQFSSPSDFESISADTLAQLLAELSRKKIGDAKAEKLKSTASNSFGITFCKDSFSFQLKALIEQMSFIEQQVKDTETEIKKLMVSLESPITTIPGIGPVTGATILGEIGDINKFDSPKKLVAYAGIDASVSQSGEYENIHNVMSKRGSPYLRKALFQAALVAAFNDPVLNAFYQKKRVEGKHHLTCIGAVSRKLCHITYAVLKNNKPYEIKETS

SEQ ID NO: 15195 - protein, 250 aa, unidentified
  source 1..250: note = protein_12a37c6
  REGION 2..64: note = RuvC_domain
  SITE 11: note = RuvC_P4
  SITE 14: note = RuvC_P5
  REGION 110..197: note = Tnp_domain
  SITE 118: note = Tnp_P1
  SITE 148: note = Tnp_P2
  SITE 156: note = Tnp_P3
  SITE 157: note = Tnp_P4
  SITE 170: note = Tnp_P5
MRTLNVRTITDKTASQAICQFGLERKLECWTKPKKVFKKLQQLTRERSQIVDERVIVKNQLHAEKTEAEPNKSSLKRLKTRIEFLNQQEKEIKIEIQNIVNKDTQLKKELKNICTIPSVGMLTAVIVIAETNGFELIRNKKQITSYASLDIKEKQSGTSIRSKIRISKKRNRNLRKAIHLPSLSAVKYNKSHKELYLRLTAKSGVKMKGLIAVQRKLLELIYVVYKNKEGFIQNYEQQKRATLLEIETAL

SEQ ID NO: 15196 - protein, 412 aa, unidentified
  source 1..412: note = protein_1694f91
  REGION 6..166: note = RuvC_domain
  SITE 9: note = RuvC_P1
  SITE 65: note = RuvC_P2
  SITE 105: note = RuvC_P3
  SITE 107: note = RuvC_P4
  SITE 110: note = RuvC_P5
  REGION 278..370: note = Tnp_domain
  SITE 286: note = Tnp_P1
  SITE 316: note = Tnp_P2
  SITE 324: note = Tnp_P3
  SITE 325: note = Tnp_P4
  SITE 338: note = Tnp_P5
MKKYVLAIDIGKGTSKIGLYGLNTENMRTIKIMKPRNFKHSIEGLDGIGKALAGIPMDQIGVMMESTYVYQMPVVEYFKRKGFDEITVVNPLKIKRTCGDIQKVKTDMVDCDRISAYYFFSQWKKPLTVSKEQREARELSRYIDFLQKEATRVGNKIRQNLSNVFPELERIGDSKGSLFKAGFLNLIEKTPHPLSIRKKTKAGIISTMAGKGRRDSSYAEYASLIIEAAKESLFSAPEGGIEASLILPDLARRLRELSKQIEDAEDKLESMTKEMPLFKVLQSFKGIGKGIASHLTAEIWSTEQYATPQKLIASAGINPSRSQSAASIDRYGRIVKAGNRYIRHWLFTAVGCILQQNGLGRGDKRLAEYYIKKHSSERDHHYVATIACANKLLRQVFYRSRDLAKTGQLIVK

SEQ ID NO: 15197 - protein, 386 aa, unidentified
  source 1..386: note = protein_a322813
  REGION 16..171: note = RuvC_domain
  SITE 19: note = RuvC_P1
  SITE 67: note = RuvC_P2
  SITE 107: note = RuvC_P3
  SITE 109: note = RuvC_P4
  SITE 112: note = RuvC_P5
  REGION 258..344: note = Tnp_domain
  SITE 266: note = Tnp_P1
  SITE 296: note = Tnp_P2
  SITE 304: note = Tnp_P3
  SITE 305: note = Tnp_P4
  SITE 317: note = Tnp_P5
MERESVNWSGGYMIYVGIDIAKKKFDYCIINSEMNLIKRGILINNNYGFSEFLKIIKNYRNIKIGMESTSIYHVNLYNYLIENSRSAIILNSLETKLLKSSRIRKNKTDKIDAEAIAKYIIIRKNNIITMDKNTENTYTNLKEYVYTYIRINRKITMAKNQLIVDMDLLYPGLTAVANVNSKYFMEIISNIDQIIENNYKIKYISDSKHSEIRNILINSNTNNAVKYDIDINIETLELLNKQLMKTKNIIEDEYNSMDSKIKTIPGIGTITGSIILSSIGDINRFDSIIKLRAYSGMDPVVKQSGDYNITSKISKRGNPLIRYALYLSTVSAIRFNPVIKRYYTRKKNDGMKGNKLLIACSNKLLNIIYSVLKNNKDFEDPLNNIN

SEQ ID NO: 15198 - protein, 339 aa, unidentified
  source 1..339: note = protein_135e79b
  REGION 6..146: note = RuvC_domain
  SITE 9: note = RuvC_P1
  SITE 52: note = RuvC_P2
  SITE 87: note = RuvC_P3
  SITE 89: note = RuvC_P4
  SITE 92: note = RuvC_P5
  REGION 211..296: note = Tnp_domain
  SITE 219: note = Tnp_P1
  SITE 249: note = Tnp_P2
  SITE 257: note = Tnp_P3
  SITE 258: note = Tnp_P4
  SITE 270: note = Tnp_P5
MQIHSVGIDLGKTTFHLVALGAAGNVLVRKKFTQKQLLAYTANMQTSLIGMEACSGAHFLGRALHKQGHDIRLIPAQFVKPFVKSNKNDFIDAEAIAEAVERKNMRFVPIKTDDQLDLQAIHRVRDRLIARRTAVINQLRAFLLERGLVFARTPAKLKAAMADILENAESNLTSRMRNLISGLWSEWKLVEQQIEELNDELERISAADAGCTRIRKIPGIGPVVATAIVAAIGNGAAFRKGREFAAWLGVVPRQYSTGGKAKLFGISKRGQEYLRRILIHGARAAVLHIKRDRAPIGAWLDALDARAHKNVVVVAMANKLARIAWAVLSSGNEYRPVAT

SEQ ID NO: 15199 - protein, 389 aa, unidentified
  source 1..389: note = protein_db13065
  REGION 4..161: note = RuvC_domain
  SITE 7: note = RuvC_P1
  SITE 59: note = RuvC_P2
  SITE 100: note = RuvC_P3
  SITE 102: note = RuvC_P4
  SITE 105: note = RuvC_P5
  REGION 265..349: note = Tnp_domain
  SITE 271: note = Tnp_P1
  SITE 301: note = Tnp_P2
  SITE 309: note = Tnp_P3
  SITE 310: note = Tnp_P4
  SITE 322: note = Tnp_P5
MYYVGIDVSKYKHDCIVVSNDGEIICDTFSFDNDYDGFQAPSSMLSSLGEHENIRIGFEATAHYTLNLKLFLENAHYSFMEFNPVLLSKFNKSQTLRRTKTDAIDCAAIARRLMTVEYKPHPVGFYHAYSLKSLTRLRDSLVRQRSFYLVKITNVLDHTFPEFKPFFGNKFSKTAIYLPENYGNADRMSRMNSLSYENLRRISRGKFSPKKFIELKNLAATTVGESNEIFDLQLSGLLSLYKLSANEIDSLEQKITELICKIDPRSLSIPGIGPLSAAVIYAEFGDIAKFSSPQKMLSFAGLEPGYYQSGTSAHGGHMVKRGSSHLRFTLMNLCVPLIQYNIVFAEYYAKKRAEGKPHRVACSHLVKKLLRVIYTLETKRIDFDPEKLR

SEQ ID NO: 15200 - protein, 403 aa, unidentified
  source 1..403: note = protein_0a0299b
  REGION 4..160: note = RuvC_domain
  SITE 7: note = RuvC_P1
  SITE 57: note = RuvC_P2
  SITE 97: note = RuvC_P3
  SITE 99: note = RuvC_P4
  SITE 102: note = RuvC_P5
  REGION 274..361: note = Tnp_domain
  SITE 282: note = Tnp_P1
  SITE 312: note = Tnp_P2
  SITE 320: note = Tnp_P3
  SITE 321: note = Tnp_P4
  SITE 334: note = Tnp_P5
MNAVGIDVSKGKSMVSILRPFGEVVAKPFEVRHTASELRQLANYLKSLNGETRAILEHTGRYYEPVALMLYDAGVFVSAVNPKLIKDYGNNSLRKVKTDKADSRKIARYGLDNWVELRQHTPMDTIRYQLKTMNRQYGLYSKTKVSMKNNLISLLDQTYPGVNAFFSSPAREDGSQKWVDFAASFWHLDCVRGIILAAFTERYRKWCKRHGYNFNSGKAAEIHENAKNQIAMLPKDAMTKLLIHQAIDQLNAASRTVELLRTEMNRLAQQLPEYPVVMAMGGVGKSLGPQLMSEIGDVTRFAHKGSLAAYAGVDPGANQSGTHAAKSTASSKTGSPELRKTLFLVMSVLLQTSLVDDPVYQFLDKKRAEGKPYYVYMTAGANKFLRVYYGRVKEYLASLEPTE

SEQ ID NO: 15201 - protein, 391 aa, unidentified
  source 1..391: note = protein_c053750
  REGION 4..163: note = RuvC_domain
  SITE 7: note = RuvC_P1
  SITE 60: note = RuvC_P2
  SITE 101: note = RuvC_P3
  SITE 103: note = RuvC_P4
  SITE 106: note = RuvC_P5
  REGION 266..353: note = Tnp_domain
  SITE 274: note = Tnp_P1
  SITE 304: note = Tnp_P2
  SITE 312: note = Tnp_P3
  SITE 313: note = Tnp_P4
  SITE 326: note = Tnp_P5
MIYVGIDVAKDKHDCFITNSDGEALFNVFTIANNLEGFNNLFNKIISVETNPDNVKIGLEATGHYNYNLLGFLIDKGLPTFVINPLHTNLFRKSLSLRLTKTDKVDARTIALMMMSGVNLQSYSDKSYHNEELKSLTRYRFDKVQERAKLKTSVARLMVILFPELEKLVPTLHMASVYALMTEFPSAKAIAEAHLTRLSNLLQKTSRGHYTKNDALLIREAARTSIGTSMPAKSLELKHTIKLIQEISSEIDEIEQQIELIMNTLNSPITTIPGINLRMGAMILAEIGDFSRFDSPDKILAYAGLSPTTYQSGQLDSSYSHMEKRGSRYLRYSLFNAAKFVCIWDSTFSAYLAKKRAEGKHYNVAVSHAAKKLVRVIYQLEKTGQPYIKAS

SEQ ID NO: 15202 - protein, 391 aa, unidentified
  source 1..391: note = protein_8b218e0
  REGION 4..163: note = RuvC_domain
  SITE 7: note = RuvC_P1
  SITE 60: note = RuvC_P2
  SITE 101: note = RuvC_P3
  SITE 103: note = RuvC_P4
  SITE 106: note = RuvC_P5
  REGION 266..353: note = Tnp_domain
  SITE 274: note = Tnp_P1
  SITE 304: note = Tnp_P2
  SITE 312: note = Tnp_P3
  SITE 313: note = Tnp_P4
  SITE 326: note = Tnp_P5
MICVGIDVAKDKHDCFILNSEGVILADVFTISNNMEGFNTLLDRLHTCSTPQDSIKVGLEATGHYSYNILGFLLDNGLATYVLNPLRTNLYRKSLSLRKTKTDRVDARTIAAMLLSDAGLKPYTDTAYHNEELKSLTRYRFDKVKERAQLKQSVSRLVCILFPELERLVSSLHTASVYALLEEFPGAKQIAAANLTRLKSMLADSSKGRYGRDMAMEIRDAARCSIGSKMPAKSLELQHTIRLIRELDAEIKEIETAIQAIMDELHSPITTIPGIGCRMGAMILAEVGDFSRFDSADKLLAYAGMSPSTYQSGQLKNCYPHMEKRGSRYLRYALYNAAKYVCLWDPAFAAYLAKKRAEGKHYNVALSHAAKKLVRLIFALEKSRQPYCPAA

SEQ ID NO: 15203 - protein, 371 aa, unidentified
  source 1..371: note = protein_4d6af83
  REGION 7..162: note = RuvC_domain
  SITE 10: note = RuvC_P1
  SITE 62: note = RuvC_P2
  SITE 101: note = RuvC_P3
  SITE 103: note = RuvC_P4
  SITE 106: note = RuvC_P5
  REGION 226..312: note = Tnp_domain
  SITE 233: note = Tnp_P1
  SITE 263: note = Tnp_P2
  SITE 271: note = Tnp_P3
  SITE 272: note = Tnp_P4
  SITE 284: note = Tnp_P5
MKSIIYIGMDVHKKTYSLCALLKETGEIIGETKIPADVSLIIKFIENAKKSVDSDDVQIKTGYEAGCLGYSLYWQLAEKGIECDILAPSTMHRSAKNKVVKNDKRDAKNIATNLANGTYKSVYVPTKEDVEIKEYIRMMHDFKIELKKVKQHINAFLLRFGHQYPGKSKWIPAHIKWLKELELSDMYREILDEYLSQLEILSEKIERFKYRLEELSQKETYNEKIGQLRCIKGIDTTAAMTMHAETSDFDRFPTANAFASYCGLTPGEDSSGESYHRLGITKQGNSMIRTTLVEAAQVLVRGTIGKKGKKVKSKQKDQDVKVIDYADKAVIRLQKKYHRMIFRGVKRNVAITAVARELACFVWGIETGHIS

SEQ ID NO: 15204 - protein, 344 aa, unidentified
  source 1..344: note = protein_c11e491
  REGION 7..149: note = RuvC_domain
  SITE 10: note = RuvC_P1
  SITE 53: note = RuvC_P2
  SITE 88: note = RuvC_P3
  SITE 90: note = RuvC_P4
  SITE 93: note = RuvC_P5
  REGION 212..306: note = Tnp_domain
  SITE 220: note = Tnp_P1
  SITE 250: note = Tnp_P2
  SITE 258: note = Tnp_P3
  SITE 259: note = Tnp_P4
  SITE 272: note = Tnp_P5
MEKDNIIAIDLAKSVFQVCKVSPRGKIIYNREVSRKRLKELLVKETKSLVAMEACATAHYWARYAERAGHQVKVINARIVKGFQTKQKTDKNDAIAIATAAPLEHIQSIRIHSVEEQAMQSTERARNLALTHVIAQSNQIRGLLLEFGIVIPQGINSLRRNLPMILEDAENDLPDSFRQIVMSLWEHLEVQIEHADAITSSLKGTIESNQVCQKLMKLEGVGPIGALGLSLRLGKGEHYSNGRNAAASIGLTPKQHSSGGKENIGHISKQCADKRLRATLYQGALSVVSLVINRPPKTNKEQWLKALIARRGKKVAAIALANKTVRTAYAILKSDSEYEPQVIV

SEQ ID NO: 15205 - protein, 339 aa, unidentified
  source 1..339: note = protein_c171558
  REGION 6..147: note = RuvC_domain
  SITE 9: note = RuvC_P1
  SITE 52: note = RuvC_P2
  SITE 87: note = RuvC_P3
  SITE 89: note = RuvC_P4
  SITE 92: note = RuvC_P5
  REGION 210..297: note = Tnp_domain
  SITE 218: note = Tnp_P1
  SITE 248: note = Tnp_P2
  SITE 256: note = Tnp_P3
  SITE 257: note = Tnp_P4
  SITE 269: note = Tnp_P5
MKYIPVGVDIAKHLIQVHFINEHSGEVVDKQLRRKDFLTFFSNREPSLIGMEACGGSQHWARELEKLGHKVRLMQGRFVKAFVMGNKNDVMDARAIWMAVQQPGKEIAVKTEEQQSVLVLHRSRRQLVKFRTAQINALHGTLLEFGETLHKGRATLDRELPAVLERMKTRLPPYLITVLEDQHNRLSELDSLIDGFEKQLHSVARQNETCKRLMEIPGVGPLIATAAIATMGEALAFKSGREFAAYVGLVPKQTGSGGKVRLLGISKRGDTYLRTLFIHGARASALLAKEPGPWITELKKRRPASVAIVAMANKLARTVWAIAAHNRQYDKNHVSIRPF

SEQ ID NO: 15206 - protein, 418 aa, unidentified
  source 1..418: note = protein_301cc76
  REGION 6..168: note = RuvC_domain
  SITE 9: note = RuvC_P1
  SITE 65: note = RuvC_P2
  SITE 110: note = RuvC_P3
  SITE 112: note = RuvC_P4
  SITE 115: note = RuvC_P5
  REGION 286..373: note = Tnp_domain
  SITE 294: note = Tnp_P1
  SITE 324: note = Tnp_P2
  SITE 332: note = Tnp_P3
  SITE 333: note = Tnp_P4
  SITE 346: note = Tnp_P5
MNKLFIGIDVSSKDLQVAITDSENYQTPLVNKSFSNDLIGASEVKEIILDLAQKNGYDKVIIGMEATSIYSFHPAYFFSNDDDLKKLNVETDVINPRQTKRFHDVFEENKNDPVDAYFIAEYLRYGKYRVTIARQDEYLALQRLTRTRYEFTQSLVRAKQHFIEALYYRVNKLVTVDKDKVNTSIFGATMMSIISDSHTLDEIAQMPVEKLVEYLQEKGHGRFSDPETLAKAIQKAVRGSYRLGQVIKDSIDSVLAVYSNEIRTYKKLIADLDKAISKIILTLPEAKILESIPGIGKVYSAGIIAEIGSIDRFDTEAQLAKYAGLAWNQKQSGSFDSEHTPLSKTGNRYLRYYLVEAANLIRLKDPVFAQYYRKKYDEATFSSHKRASHKRACVLTARKLIRVIFTLLKNGQIYQTPR

SEQ ID NO: 15207 - protein, 283 aa, unidentified
  source 1..283: note = protein_aa3032b
  REGION 1..58: note = RuvC_domain
  SITE 2: note = RuvC_P5
  REGION 168..245: note = Tnp_domain
  SITE 194: note = Tnp_P2
  SITE 202: note = Tnp_P3
  SITE 203: note = Tnp_P4
  SITE 216: note = Tnp_P5
MDAFHLCELFYKVDLEPNKKRGVNLLNLRHLTRQHEAITGLYVQAKLQFHTMLDQIFPECRRVFGDLFSKVSLNLLNEFPTSETFLEVSEVTLADKIHSLCKTRSYQWALKKAAKLNEAAKNNPFENIVYQSHLVSLKMFIKMLLQYQEHLSILDEQIDTLARDIEEYEIIQSIPGIGEIERFNLPKKLVAYAGIDPSVHQSGKFTATINRITKRGSSRLRHVLYMAVLCGIRSSRNKRLKEFYDRKREEGKPSKVAIIACVNKLLHWIYTLMKRKETFLDLS

SEQ ID NO: 15208 - protein, 305 aa, unidentified
  source 1..305: note = protein_33b79cc
  REGION 1..76: note = RuvC_domain
  SITE 7: note = RuvC_P3
  SITE 9: note = RuvC_P4
  SITE 12: note = RuvC_P5
  REGION 176..261: note = Tnp_domain
  SITE 184: note = Tnp_P1
  SITE 214: note = Tnp_P2
  SITE 222: note = Tnp_P3
  SITE 223: note = Tnp_P4
  SITE 234: note = Tnp_P5
MFPGAAKTDPIDTRKILELFHLKDHLPLAKDTLQKVVSAPPVNDRLKRLSRRRRQLVNDKVRVANRIQSDLQAVCPELRAITKDMCNLWFLRFLTCRNDLTQLARLRRTTLLKIRGIGQKYASIIQQWQRKASFSSEVSYVGPMIICDARRILELLEQIVALDKAMEGLADNSEMARRLDSIPGFGNTCVAELAGEIGTTKRFSSESSLALYVGMSPLSKDSGQHHGSKCPRQVNHRAKGAMMTAVARHIDCVPESRVYYDKKRAEGKGHNQAVRALGRHLVRVIWSMVNNERDYELRTQEVTPM

SEQ ID NO: 15209 - protein, 304 aa, unidentified
  source 1..304: note = protein_bde7da5
  REGION 2..112: note = RuvC_domain
  SITE 14: note = RuvC_P2
  SITE 52: note = RuvC_P3
  SITE 54: note = RuvC_P4
  SITE 57: note = RuvC_P5
  REGION 172..259: note = Tnp_domain
  SITE 180: note = Tnp_P1
  SITE 210: note = Tnp_P2
  SITE 218: note = Tnp_P3
  SITE 219: note = Tnp_P4
  SITE 231: note = Tnp_P5
MIRKKAPRARRVIFETEPLSTWFYHALASEGLPAVCIEARHAQKALNETLNKTDANDADGLAQLAEAGLYKAVRVKSFDAMIARTLVVAREQLLYISTQLCNQIRGLMKTFGLIIPKGKGGVFDGDVRKLLDGNNELAKIILPLLEGWHDIRKRAADLGRQLLIVARRSEATKLLMTILGIGAVTAVSYVTVVENPENFRTSRSVGAWLGLTPRRYQSGEVDYDGHISRRDDNRLRGLLYEAATVLLTRTSARTESSLKRWGLKLRERLGFKRAAVAVARKLAVIMHSMLKTREAFNASASATA

SEQ ID NO: 15210 - protein, 341 aa, unidentified
  source 1..341: note = protein_adf4187
  REGION 6..148: note = RuvC_domain
  SITE 9: note = RuvC_P1
  SITE 52: note = RuvC_P2
  SITE 87: note = RuvC_P3
  SITE 89: note = RuvC_P4
  SITE 92: note = RuvC_P5
  REGION 211..298: note = Tnp_domain
  SITE 219: note = Tnp_P1
  SITE 249: note = Tnp_P2
  SITE 257: note = Tnp_P3
  SITE 258: note = Tnp_P4
  SITE 270: note = Tnp_P5
MNIKRIGIDLAKQVFQVHGVDNQEKVVLRKQLRRAQLLDYFKKLPPCLIGLEACGGSHYWARELQKQGHTVKLMAPQFVKPYVKSHKNDANDAEAICEAVARPNMRFVAIKTIAQQDIQAIHRIRSEVVRQRTAKVNQIRGLLAEYGIVVGRRVEVLRKALPQLLEDAENSLTVDFRMLLEGLQQDLVALDERVDDLDKKIKSLANDNPTAKRLQQIPGIGPTIATALVCAIGDGKQFKRGRDMAAWLGLTPRQHSSGGKDRLLGISKRGDVYLRTLLIHGARSVLNVAGKKDDPRSRWLNSLCGRRNKNIAAVALANKNARIAWALLSKETDYLPESEPA

SEQ ID NO: 15211 - protein, 323 aa, unidentified
  source 1..323: note = protein_5abeb6a
  REGION 1..78: note = RuvC_domain
  SITE 15: note = RuvC_P3
  SITE 17: note = RuvC_P4
  SITE 20: note = RuvC_P5
  REGION 192..279: note = Tnp_domain
  SITE 200: note = Tnp_P1
  SITE 230: note = Tnp_P2
  SITE 238: note = Tnp_P3
  SITE 239: note = Tnp_P4
  SITE 252: note = Tnp_P5
MLIKDFGDDSLRSPKTGKADSKKIARYTLDRWAKLKQYGSMDKTRNQLKTMNRQFGFYIDQKTAMKNNLIALLDQTFPGANDFFDSPARSDGSQKWVDFVHTYWHVDYVRSRSLDAFTVHYRNRCRRKGYNFSADKTEKIYQLSSDMIAVFPKDDSTKLLIRQAVAMLNTASETVESLRLKMDETASTLPKYPVVMAMDGVDHTLGPQLMAEIGDVTRFTHRGALTAFAGVDPGKHDFGQHIQKSVPTTKKGSPSLRRTLFLIMEGLIKRSPTNDPVYAFMDKKRAQGKPYYVYMTAGANKFLCIYYGRVKEYLSILTETEET

SEQ ID NO: 15212 - protein, 302 aa, unidentified
  source 1..302: note = protein_2594669
  REGION 1..89: note = RuvC_domain
  SITE 28: note = RuvC_P3
  SITE 30: note = RuvC_P4
  SITE 33: note = RuvC_P5
  REGION 199..286: note = Tnp_domain
  SITE 207: note = Tnp_P1
  SITE 237: note = Tnp_P2
  SITE 245: note = Tnp_P3
  SITE 246: note = Tnp_P4
  SITE 259: note = Tnp_P5
MEEQGILYILLNPIISYQAKKSSLRKVKTDAIDAYQLCVLYYKEDFEPHKIRGIQLLDLRNLSRQQEIVTNMYVEAKLQFHTILDQVFPEYRKVFGDLYSMVSLLMLKEYPTSEAVLTAGESRLAERVIEFCSSRSGEWAWEKAKKIMDSASRNPFQKNVYESHVINLRMYIELLFHYQGHLSDLEDHIVALANELEEYKIIQSIPGIGEKIAATIISEIGEIDRFNHPKKLVAFAGVDPSVHSSGKFTATINRITKRGSSRLRHSLYLAVLCGIRSSRNKKLSLIRKNRKESQPKCRSLPV

SEQ ID NO: 15213 - protein, 377 aa, unidentified
  source 1..377: note = protein_e402d67
  REGION 4..160: note = RuvC_domain
  SITE 7: note = RuvC_P1
  SITE 58: note = RuvC_P2
  SITE 98: note = RuvC_P3
  SITE 100: note = RuvC_P4
  SITE 103: note = RuvC_P5
  REGION 264..351: note = Tnp_domain
  SITE 272: note = Tnp_P1
  SITE 302: note = Tnp_P2
  SITE 310: note = Tnp_P3
  SITE 311: note = Tnp_P4
  SITE 324: note = Tnp_P5
MIYVGIDIAKLNHFASAISSDGEELIKPFKFTNDNDGFQLLISKLAPLDKDSLIIGLVSTAHYGDNLVRYLVAKNYKVCVLNPIKTSTMRKNNIRKTKTDKVDTYIICKTLMMQESLRFVTFYDLDLMDLKALGRFRQKTIKQRTRLKIQLTSYVDEIFPELQYFFKSGLHQKSVYALLKEAPTPEAIASMHMTHLAHLLKVNSHGRFDKEMAQQLRVLAQKSVGASDSSLSIQVTHTIQQIELLDSQLERVEAEMTEIMKFNDSVIMTIPGIGYINGGMILGEIGDIRRFSSPNKLLAYAGLDPSVYQSGNFQAKKTRMSKRGSKVLSYTLVNAAHNVVKNNATFKAYYDARWLKAGLTIMLLGTVPASSSESSGK

SEQ ID NO: 15214 - protein, 387 aa, unidentified
  source 1..387: note = protein_c0865ec
  REGION 4..159: note = RuvC_domain
  SITE 7: note = RuvC_P1
  SITE 58: note = RuvC_P2
  SITE 98: note = RuvC_P3
  SITE 100: note = RuvC_P4
  SITE 103: note = RuvC_P5
  REGION 263..350: note = Tnp_domain
  SITE 271: note = Tnp_P1
  SITE 301: note = Tnp_P2
  SITE 309: note = Tnp_P3
  SITE 310: note = Tnp_P4
  SITE 323: note = Tnp_P5
MIYIGIDIAKLNHFAFAMNSDGEILLEPFAFTNDHIGFQKLLTKLSKFPKEDLLIGMESTAHYAENLTYFLFSMDFKLCIINPIQTSGIRKGGIRKTKTDSIDTFIIIKSMIMNNHRIFSQRDMYTLQLKSLCRFRRKLMKSRTKVKIQLVTYVDLLFPELQYFFKSGIHGKACYALLKEEPNPDKIAKMHLTRLSNLLNKTSNGHFGKQTAIALKELASQSVGTKNDTLSLQIFQSIIQIELFTSQLKEVDKDISVIMDSIDSVIKTIPGIGNLNGAMILGEIGDINRFDKPCQLLAYAGLDPSVYQSGNFNASGTRMSKRGSKLLRYALINAAWQLTLNNDTFKTYYNLKCSQGHRHYCALGSTSHKLVRVIHKMLTDELEFNLN

SEQ ID NO: 15215 - protein, 341 aa, unidentified
  source 1..341: note = protein_dc8cbab
  REGION 6..148: note = RuvC_domain
  SITE 9: note = RuvC_P1
  SITE 52: note = RuvC_P2
  SITE 87: note = RuvC_P3
  SITE 89: note = RuvC_P4
  SITE 92: note = RuvC_P5
  REGION 210..297: note = Tnp_domain
  SITE 218: note = Tnp_P1
  SITE 248: note = Tnp_P2
  SITE 256: note = Tnp_P3
  SITE 257: note = Tnp_P4
  SITE 269: note = Tnp_P5
MIDTMIGVDLAKRVFQLHGATKAGEVKFRKKLTRDQFRAFMAEQPAALVVFEACGSASYWAREMEALGHEVRLIAPQYVRPFVKRQKNDAADAEAIVIAARQPEMRFVAPKTADQQAKAVLFRGRERLVHQRTELVNALRAVLYEYGHVFPVGFCHVKRIAAVLEDPRCDLPALVIAECQDVLAQIAEKTERIEAKTKALKALAAETNTARRLQTMPGVGPLTALAVEAFAPDMAQFKSGRDFAAWLGLVPRQHSTGGKARLGRISKAGQSDIRRLLIIGAMTRIMGRARDRVSAESWIGQKLASKPKMLIGIALANKMARQIWAMLTKNEDYRDPALATA

SEQ ID NO: 15216 - protein, 403 aa, unidentified
  source 1..403: note = protein_a277cf9
  REGION 4..160: note = RuvC_domain
  SITE 7: note = RuvC_P1
  SITE 57: note = RuvC_P2
  SITE 97: note = RuvC_P3
  SITE 99: note = RuvC_P4
  SITE 102: note = RuvC_P5
  REGION 275..361: note = Tnp_domain
  SITE 282: note = Tnp_P1
  SITE 312: note = Tnp_P2
  SITE 320: note = Tnp_P3
  SITE 321: note = Tnp_P4
  SITE 334: note = Tnp_P5
MNAAGIDVSKGKSMVSVMRPLGEVVAKPFTVCHTGSELKELADYLKSLDGETRVIMEHTGRYYEPVAQFLHDAGLYVSAVNPKLIKDYGNNSLRKVKTDKADSKKIAKYGLDNWGELRQYASMDTIRYQLKTLNRQHTLYTKMKTAMKNNLIALLDQTYPGVNALFGSPAREDGTQKWVDFATSFWHVDCVRGMSQTAFTERYRKWCKRNRYNFSSDKAAEIYTGAKDQIAMIPKDDLTKRLIRQTIDSLNTVSKTVEQLKAEMLKLASQLPEFPVVMKMHGVGDSLGPQLMAEIGDVTRFVHRGSITAFAGVDPGANQSSEREAKSVRTSKSGPPELRRTLFLVMDGLLKSMPQDDPVYQFIDKKRAEGKPYLVYMTAGANKFLRIYYGRVKEYLASLETAD

SEQ ID NO: 15217 - protein, 338 aa, unidentified
  source 1..338: note = protein_8923514
  REGION 6..146: note = RuvC_domain
  SITE 9: note = RuvC_P1
  SITE 52: note = RuvC_P2
  SITE 87: note = RuvC_P3
  SITE 89: note = RuvC_P4
  SITE 92: note = RuvC_P5
  REGION 211..298: note = Tnp_domain
  SITE 219: note = Tnp_P1
  SITE 249: note = Tnp_P2
  SITE 257: note = Tnp_P3
  SITE 258: note = Tnp_P4
  SITE 270: note = Tnp_P5
MTIDVLGIDLAKNVFQLHGVDRKGNAIFKRRVMRDQLLSVLAGIEPCTVAIEACTGAFCWARQFEELGHNVKIVSPQYVKPFVRRQKNDGNDAEAICTAVRQPHIPLVPKKSVEQQDIQALHRARQRLVNHRTALVSQMRGLLLDRGIAFAKSITRVRRMIPEILARADSGLSTMARETIAELWDFFCDLERRIEHFDKKIEAVFKSSEPCQRVARIKGVGPKTATAIVAAVGDGSDFRNGRHMAAWLGLVPRQFSSGDKAVLMGISKRGSQHLRSLLVHGARAVVRTAPNKNDPISQWANQLRERRGFNRATVAIANKNARIIWAVLRTGDQYRAAA

SEQ ID NO: 15218 - protein, 303 aa, unidentified
  source 1..303: note = protein_d13b637
  REGION 6..146: note = RuvC_domain
  SITE 9: note = RuvC_P1
  SITE 52: note = RuvC_P2
  SITE 87: note = RuvC_P3
  SITE 89: note = RuvC_P4
  SITE 92: note = RuvC_P5
  REGION 211..287: note = Tnp_domain
  SITE 219: note = Tnp_P1
  SITE 249: note = Tnp_P2
  SITE 257: note = Tnp_P3
  SITE 258: note = Tnp_P4
  SITE 270: note = Tnp_P5
MNIVYLGIDLAKNVFQLCGLNQAGKPVYSKRTGRKGLLQTVANIPACLTGVEASTGAFYWQREFEKLGHKVKVISPQYVKPFGRGQKNDGNDAQVIAVALMQPTMQFVPPKSPEQQDIQALHRARQRIVNHRTATVCQFRGLLLDRGITIGAAVSGVRRAVPLIPEDAENGLSARMRRTIAELYDLFNDLAHRINFFDKEIDAVFKQSEACQRIAKVKGIGPKTATAVVAATGKGTEFKNGRHFAAWLGLVPRQHSSGDRQVLMNMTKKGDKHLRTLLFMVPALSSGLPRIAMMAVCISGLIS

SEQ ID NO: 15219 - protein, 402 aa, unidentified
  source 1..402: note = protein_68c02ff
  REGION 5..162: note = RuvC_domain
  SITE 8: note = RuvC_P1
  SITE 59: note = RuvC_P2
  SITE 99: note = RuvC_P3
  SITE 101: note = RuvC_P4
  SITE 104: note = RuvC_P5
  REGION 273..360: note = Tnp_domain
  SITE 281: note = Tnp_P1
  SITE 311: note = Tnp_P2
  SITE 319: note = Tnp_P3
  SITE 320: note = Tnp_P4
  SITE 333: note = Tnp_P5
MFYSIGIDVSMGKSTISIISTDGEVISEPFEIEHTKSGFNLILEKIKNIPKDNVKFVMESTGNYCKSILKIIIDNGYFVTVENPLTIKKYCDINIRKVKTDKKDALKIACYGSERWHKLIEYTPSDEIYSELRFLSRQYDEQMTLKVMKKIHLSGLIEVTFPGLKKIFNGDSVYMLMLDVYKKYYHPSLVLSKSKSSFIKDVEKISKKTGHRVGTRVAEEMYSLASECIPSSPCNESTQLAVSNCVLLLQNLEEITNNIIAKMDKLARNLPEFEIVSNMSGVGNKIRSRLIAEIGDVRRFKNSNCLIAYAGIDVPPFQSGQFIATNRRITKRGNKHLRKVGYEVMKSLKTVKPTKDNAVYLFILKKENEGKGSITAKIAGLNKFLRIYYARVMEVYKNLENT

SEQ ID NO: 15220 - protein, 392 aa, unidentified
  source 1..392: note = protein_17bd441
  REGION 4..163: note = RuvC_domain
  SITE 7: note = RuvC_P1
  SITE 60: note = RuvC_P2
  SITE 101: note = RuvC_P3
  SITE 103: note = RuvC_P4
  SITE 106: note = RuvC_P5
  REGION 268..354: note = Tnp_domain
  SITE 275: note = Tnp_P1
  SITE 305: note = Tnp_P2
  SITE 313: note = Tnp_P3
  SITE 314: note = Tnp_P4
  SITE 327: note = Tnp_P5
MIYVGIDVAKDKHDCFISNSDGEVLFNAFTIPNNREGFDSLFQIIKAASENLTQVKVGLEATGHYSYNLLGFLLDKGLTTFIINPLHTNLYRKSLSLRQTKTDKVDAHTIASMLMSDVNLKSYSDTSYHNEELKSLTRYRFDKVKERAKLKTSVSRLVNILFPELEKLVPSLHMSSVYALLAEFPGSADIASAHLTRLTHLLEETSKGRYSKDTAILFREAAKTSIGSHMPAKSLELRHTIRLIQELSAEIDEIETQIRQIMDLEIKSPILTIPGINYRMGAMIIAEIGDFNRFDSPDKILAYAGMSPSTYQSGQLDNCYAHMEKRGSRYLRYALYNATKYVCLWDETFAAYLAKKRAEGKHYNVAISHAAKKLVRVIYQLERSGQTYRTSS

SEQ ID NO: 15221 - protein, 391 aa, unidentified
  source 1..391: note = protein_1d8f3cd
  REGION 5..162: note = RuvC_domain
  SITE 8: note = RuvC_P1
  SITE 60: note = RuvC_P2
  SITE 101: note = RuvC_P3
  SITE 103: note = RuvC_P4
  SITE 106: note = RuvC_P5
  REGION 266..351: note = Tnp_domain
  SITE 273: note = Tnp_P1
  SITE 303: note = Tnp_P2
  SITE 311: note = Tnp_P3
  SITE 312: note = Tnp_P4
  SITE 324: note = Tnp_P5
MTRFIGLDIAKYKHDCFIMDENGNVITDSFSFSNDAEGFNTLLNELQKLDPIQEKRIGLESTGHYGSNLKIFLETNGYSFMEFNPLLVHRFFNGQTLRRTKTDKVDARKIAIYLQSKEYKPNPNSSYHLECLKSLCRLRWSLVDERSLQLVRMTNVLDKTFPEYKAFFEDSLDSATSLYLLENYPGASKMARMSQKSYKKMASELRHAISYARFCKLKDLAKNTIGNEDEILMFELSVYLELFKELDKRINEVESKIQKEFSLMKCHIQTIRGISDITAASILSEIGDINRFDSPNQLQAYAGMEPSKNQSGTHDSGGHMVKHGSSHLRRYLMMAAGNMLKFNPVLYDYYIKKRDEGKTHNVAVSHVARRLIRIIYYLEKNDSDFDIEKMR

SEQ ID NO: 15222 - protein, 343 aa, unidentified
  source 1..343: note = protein_489888b
  REGION 1..105: note = RuvC_domain
  SITE 2: note = RuvC_P2
  SITE 42: note = RuvC_P3
  SITE 44: note = RuvC_P4
  SITE 47: note = RuvC_P5
  REGION 220..307: note = Tnp_domain
  SITE 228: note = Tnp_P1
  SITE 258: note = Tnp_P2
  SITE 266: note = Tnp_P3
  SITE 267: note = Tnp_P4
  SITE 280: note = Tnp_P5
MEYTGTYYEPIANALHNAGIFVSVVNPLLIDDYGTNRVRKVKTDKKDAFKIANYALDKWTQLREYIPAEDTRKTLKVLNRQYTQYNKLLIMQKNSLIALLDSCFPNANTLFSSPRRESDGHEKWVDFVLQFPHLNTVSKLCPSIFKAKYQSWCKANHYKYSETKATQIHAYSRTQVSSLPITDAMMKAVELSAALLNSTLETLAAIRTEMDKLSSTLPEYETVMSLYGVGRVMCSQLIAEIGDVRRLKCSKSLVAIAGIDPPPDQSGQHDSKSRSISKRGSPLLRKTLFQIIQVILQKQPVNEPVYQFLDRKRSEGKPYRVYMIAAANKFLRIYYARVMEVIS

SEQ ID NO: 15223 - protein, 326 aa, unidentified
  source 1..326: note = protein_0b09eb4
  REGION 19..187: note = RuvC_domain
  SITE 22: note = RuvC_P1
  SITE 67: note = RuvC_P2
  SITE 107: note = RuvC_P3
  SITE 109: note = RuvC_P4
  SITE 112: note = RuvC_P5
  REGION 203..287: note = Tnp_domain
  SITE 211: note = Tnp_P1
  SITE 240: note = Tnp_P2
  SITE 248: note = Tnp_P3
  SITE 249: note = Tnp_P4
  SITE 260: note = Tnp_P5
MTHRVAASKAELPPASITIGIDVSKDYLDAARHPGGDTVRIANTRKGQTALLCWIGNIKAVARVVFEPTGPYHRTLEERLAAVGIPLIKVNPRQARRFAGATAKLSKTDCVDASMLARYGALLEPAARPVRTDLQNRLAELVAARRSLMRDRTSTLNRLKTLTIGLLQRHARHRLRQIEAQITSLDAATDALVAEDAHLFRRRDVLASIPGLGTVTAHALLADMPELGTMEEGQAASLAGLAPITRQSGTWRGRSFIQGGRATLRQALYMPAIVSMRFNPDLKRVYDRLVAKGKHPKIAITTIMRKLVVLANALLRKDRLWTPKET

SEQ ID NO: 15224 - protein, 344 aa, unidentified
  source 1..344: note = protein_b8a1a17
  REGION 6..149: note = RuvC_domain
  SITE 9: note = RuvC_P1
  SITE 53: note = RuvC_P2
  SITE 88: note = RuvC_P3
  SITE 90: note = RuvC_P4
  SITE 93: note = RuvC_P5
  REGION 212..298: note = Tnp_domain
  SITE 220: note = Tnp_P1
  SITE 250: note = Tnp_P2
  SITE 258: note = Tnp_P3
  SITE 259: note = Tnp_P4
  SITE 271: note = Tnp_P5
MSIKVVGIDIAKNLFQVCVLGTNGQILSNRKVKRDKLLDTVRQLPEQTALAMESCATSHHWGRIFQELGYTVALIPAQHVKPFVGRQKNDANDARAICEAYSRPNLHFVPVKSVEQQDLKAIRSVRKRLVENRTALANQIRGLAAEYGVVFPLSIKALRSHLPLALEDAENALSPVMRNLLQTLYCDFVSLSEEIDEMTQSVTMLSQQNPKYEAIRNIPGFGPILTAALISEVGVGNQFKNGRQFSAWCGLVPKQNSTGGKSSLGSLSKNGNRELRALLIHGARAVVRCGANKTDAMGAWLRGLIARRGKAKAIVALANKLGRVAWHILAKNSEYDINQAFKPV

SEQ ID NO: 15225 - protein, 342 aa, unidentified
  source 1..342: note = protein_741974f
  REGION 6..148: note = RuvC_domain
  SITE 9: note = RuvC_P1
  SITE 52: note = RuvC_P2
  SITE 87: note = RuvC_P3
  SITE 89: note = RuvC_P4
  SITE 92: note = RuvC_P5
  REGION 211..303: note = Tnp_domain
  SITE 219: note = Tnp_P1
  SITE 249: note = Tnp_P2
  SITE 257: note = Tnp_P3
  SITE 258: note = Tnp_P4
  SITE 270: note = Tnp_P5
MQPVTIGLDIAKSVFQVHGVDAQGTVVIRRQLKRRQVLPFFKKLPPCLIGIEACATSHHWSRELQGLGHTARLMPPAYVKPYVKRQKNDATDAEAICEAVTRPSMRFVETKTTEQQSVLVLHRSRQLFMKQQTSLINALRAHLAEFGIVAPVGRNGVEDLLYVIADPDDERLPEVARECLAALGAELQRVKAQLLEFDRMIMAWHRSNEVSRRLDAIPGVGPALATALVASVPDPKIFRSARDFAAWIGLVPKQNSSGGKDRLGGVTKQGDRYLRSLLTIGALAVIRRAKINGAKHRPWLSALLARRPTKVAAVALANKIARMAWAMMAKGERYKEPAALAA

SEQ ID NO: 15226 - protein, 407 aa, unidentified
  source 1..407: note = protein_07c80b5
  REGION 14..170: note = RuvC_domain
  SITE 17: note = RuvC_P1
  SITE 68: note = RuvC_P2
  SITE 108: note = RuvC_P3
  SITE 110: note = RuvC_P4
  SITE 113: note = RuvC_P5
  REGION 276..363: note = Tnp_domain
  SITE 284: note = Tnp_P1
  SITE 315: note = Tnp_P2
  SITE 323: note = Tnp_P3
  SITE 324: note = Tnp_P4
  SITE 336: note = Tnp_P5
MTRTEVVVAQQLWAGVDAGKSEHHCVVIDADGNRLLSQRVLNDETALLELITSVTTLADGGEITWAIDLNGGGAALLICLLMTAEQRLLYIPGRTVYHASGSYRGEGKTDAKDAAIIADQARMRRDLQPLRTGDDIAVELRILTSRRTDLVADRTRAINRLRAQLLEYFPALERAFDYSKSRSALILLTGYQTPDGLRRAGAARLTDWLRKRKARNTDAIVAKALAAANTQHTIVPGQHLAATVVARLAKEVIALDIEISDTETMIEERFRRHRHAEIILSMPGFGIILGAEFIAATGGDLSVFNSVDRLAGVSGLAPVPRDSGRINGNLKRPRRYDRRLLRSCYLSAQIAIRTDPASRTYYDRKRAEGKTHTQAVLALARRRLNVLWAMLRDRKPYQSTATTPAAA

SEQ ID NO: 15227 - protein, 342 aa, unidentified
  source 1..342: note = protein_62bf87e
  REGION 6..148: note = RuvC_domain
  SITE 9: note = RuvC_P1
  SITE 52: note = RuvC_P2
  SITE 87: note = RuvC_P3
  SITE 89: note = RuvC_P4
  SITE 92: note = RuvC_P5
  REGION 210..293: note = Tnp_domain
  SITE 218: note = Tnp_P1
  SITE 248: note = Tnp_P2
  SITE 256: note = Tnp_P3
  SITE 257: note = Tnp_P4
  SITE 269: note = Tnp_P5
MNDLMIGVDLAKNVFQLHGASMTGQVRFRKKLSRQNLSVFMAEHPPALVVMEACGSAHYWARELVKFGHEVRLIAPQYVKPFVKRQKNDAADAEAIVIAAQRPEMRFVEPKSEEQQARAVLFRNRERLVHQRTELVNALRSCLYEYGHTVPQGIAQVKRIEEIIDAPNSDLPELVREECRDLLKQIVEKTVRIEARTKKVIALAAEADTAQRLQTMPGVGPLTALAVEAFAPDMASFKRGRDFAAWLGLVPRQHSSGGKERLGRISKAGQTDIRRLLIIGAMSRLNWLGRRSIPDGSWLGRMLATKPRMLVAIALANKMARAIWAMLTKKEDYRDPAQAVAA

SEQ ID NO: 15228 - protein, 424 aa, unidentified
  source 1..424: note = protein_054c5ea
  REGION 9..157: note = RuvC_domain
  SITE 12: note = RuvC_P1
  SITE 63: note = RuvC_P2
  SITE 97: note = RuvC_P3
  SITE 99: note = RuvC_P4
  SITE 102: note = RuvC_P5
  REGION 259..347: note = Tnp_domain
  SITE 267: note = Tnp_P1
  SITE 298: note = Tnp_P2
  SITE 306: note = Tnp_P3
  SITE 307: note = Tnp_P4
  SITE 318: note = Tnp_P5
MKVTYPTCCGVDVHKSFLVATIIKTTGSIEPSYQKKRFSTFNNSILEFKSWLLENDCHDVCMESTGKYWVPVFNLLEDQINVTIANPKWVKAVKGNKDDTKDSKWIGDLFRLGLVKGSYIPCKPIRILREYTRYRYKLVSCRSSEKNRYQNALTVCNVALDSVVSDIFGKSSTSIIDYLLEQSGTTINHEEIASKLLRSLKSKEDTVIESIEGYQMTDSQKYRMRLVRAHMDYITAEINDVDKQIDFLISSDPNYDKAIQLLTTIPGVKRDSAITIISEIGIDMSQFCNSKRLCCWAGLTPGNNESAGKKKSVRITRAGVYLKPALVQCAHAAVKSDKSPYYKKKYESLVKRRGKKRAIIAIARMILTAIYQMLSTGEVWNPSDLYKIDMPAPLVEKQKAKAIKQAKKLLQKEGLLPPDAPLAS

SEQ ID NO: 15229 - protein, 343 aa, unidentified
  source 1..343: note = protein_9f84aa4
  REGION 6..146: note = RuvC_domain
  SITE 9: note = RuvC_P1
  SITE 52: note = RuvC_P2
  SITE 87: note = RuvC_P3
  SITE 89: note = RuvC_P4
  SITE 92: note = RuvC_P5
  REGION 211..297: note = Tnp_domain
  SITE 219: note = Tnp_P1
  SITE 249: note = Tnp_P2
  SITE 257: note = Tnp_P3
  SITE 258: note = Tnp_P4
  SITE 270: note = Tnp_P5
MKIFALGIDLGKTVFHLVGLDERGQVVVRKRCSRTQLLAFTANVQVQLIGMEACSGAHFLGRALRAQGHEVRLMPAQYVKPYVQTNKSDYIDAEAIAEAVQRPRMRFVPIKTEEQLDLQALHRVRERWVMRRTAVVNQVRSLLLERGLTVPKGRRYLEQALPRILEDAELKLSGSFRVLLAQLRLELEQLAGRIEKMDRVIEQEAREHEACQRLTTIPGVGPVTATALIGAIGNGSAFRKGRDLSTWMGIVPGEYTTGGKQKLLGISKRGNKYLRRLFVQGARSVLQQRDKQAPGLSQWLAQLLASKHQNVVVVALANKLVQIAWAVLSKNEAYRSPVLAEST

SEQ ID NO: 15230 - protein, 340 aa, unidentified
  source 1..340: note = protein_5618365
  REGION 6..147: note = RuvC_domain
  SITE 9: note = RuvC_P1
  SITE 52: note = RuvC_P2
  SITE 87: note = RuvC_P3
  SITE 89: note = RuvC_P4
  SITE 92: note = RuvC_P5
  REGION 211..299: note = Tnp_domain
  SITE 219: note = Tnp_P1
  SITE 249: note = Tnp_P2
  SITE 257: note = Tnp_P3
  SITE 258: note = Tnp_P4
  SITE 270: note = Tnp_P5
MQVTTIGLDLAKNIFHIHGVTADGNVAFNRALRRGQVVPFFAKLAPCLIGMEACGTSHFWARELTKLGHRVRLMPPIYVKPYVKRGKTDAADAEAICEAVTRPTMRFVAIKSSEQQALLCQHRARQLMIGQRTQLSNMIRGLLGEFGCIVAKGLTHITALAEVIEMGDGPALPETAQGVITCLCKQLLGLDHRIKTLEKKIFTASRKDARVRLLETIPGIGPVTASAIVATVGTPDQFSSGREFAAWLGLTPLNRSSGGKERLGRISKMGDRYLRQLLVVGMTSRVRAARSRPDRVEPWLASLLERKPVRLATVAMANKTARIVWAVLTRGQPYKQPVAV

SEQ ID NO: 15231 - protein, 345 aa, unidentified
  source 1..345: note = protein_76fd535
  REGION 6..147: note = RuvC_domain
  SITE 9: note = RuvC_P1
  SITE 52: note = RuvC_P2
  SITE 87: note = RuvC_P3
  SITE 89: note = RuvC_P4
  SITE 92: note = RuvC_P5
  REGION 211..296: note = Tnp_domain
  SITE 219: note = Tnp_P1
  SITE 249: note = Tnp_P2
  SITE 257: note = Tnp_P3
  SITE 258: note = Tnp_P4
  SITE 270: note = Tnp_P5
MEIRTIGIDLGKTVFHLAAVNARGEVVVRKKCSRTQLLRFTSNLRECLVGMEACGGSHFLGRALREQGHDVRLMPAQYVKPYVKTNKNDYIDAEACAEAVTRPTMRFVPIKSDEQLDLQSLHRVRERWVVRRTAVINQIRGLLLERGITMRKGRQHLEASLPRILEDADNKLSGALRVLLTQLQIEMQYLHRQIEESDKLIIRIASELEPCRRLIAIPGIGPITATATIAAIGNGAAFKKGRGFAAWLGVVPGEHSTGGKQQLTGTSRRGNKYLRKLFVQGAHSVLLQRTKQTSGLSMWLASLVARKRKQVATVALANKMARMAWAVLFKAEAYRPPLLPQPATA

SEQ ID NO: 15232 - protein, 404 aa, unidentified
  source 1..404: note = protein_82ff2a9
  REGION 5..161: note = RuvC_domain
  SITE 8: note = RuvC_P1
  SITE 58: note = RuvC_P2
  SITE 98: note = RuvC_P3
  SITE 100: note = RuvC_P4
  SITE 103: note = RuvC_P5
  REGION 275..362: note = Tnp_domain
  SITE 283: note = Tnp_P1
  SITE 313: note = Tnp_P2
  SITE 321: note = Tnp_P3
  SITE 322: note = Tnp_P4
  SITE 335: note = Tnp_P5
MYNAVGIDVSKGKSTVAVLQPGGVVIHKPFDVPHTSKDLNQLSEYLSSLDGDTKIVMECTGRYHEPMANALHKAGFFVSVVNPHLIKNFGSNSLRKVKSDPADARKIARYTLDNWTELRQYVDMDNTRTQLKTLNSQFSFFMKQKVAAKANLIALLDNTYPDVNKLFNSPVRDDGSEKWVDYAYSFWHVDCVRKIGLKTFTERYKAFCKKHHYNFQPSKPQELFHASKELVAVFPKEKNYKLLIQQSIKQLNLASEHVEQLRKEMDALASSLPEYTTVMNIYGVGKTYGPQLIAEIGDVSRFTHREALTAFAGVDPGVDESGQRKPKSNRASKVGSGKLRKTLFQIMTTLLQNAPADDPVYRFLDKKRSEGKPYYVYMTAGANKFLRIYYGKVKECLRNLEQNG

SEQ ID NO: 15233 - protein, 400 aa, unidentified
  source 1..400: note = protein_801d981
  REGION 11..166: note = RuvC_domain
  SITE 14: note = RuvC_P1
  SITE 63: note = RuvC_P2
  SITE 103: note = RuvC_P3
  SITE 105: note = RuvC_P4
  SITE 108: note = RuvC_P5
  REGION 273..358: note = Tnp_domain
  SITE 281: note = Tnp_P1
  SITE 311: note = Tnp_P2
  SITE 319: note = Tnp_P3
  SITE 320: note = Tnp_P4
  SITE 332: note = Tnp_P5
MTDISDVGVFFGLDVGKSAHHGHGLTPAGKKVFDKALPNNEPKLRAAFDKLRDKFGTVLVVVDQPASIGALPLAVARDAGCQVAYLPGLAMRRIADLYPGEAKTDAKDATVIADAARTMPHTLRSLEVGDETTAELTVLVGFDQDLAAEATRTSNRIRGLLTQFHPSLERVLGPRLDHQAVSWLLERYGSPAALRKAGRRRLVEVIRPRAPRMAERLVDDVFAALDEQTVIVPGTSTLDVIVPSLAKSLAAVHEQRRTLEAQIETLLEAHPLSKVLTSMPGVGVRTAATLLVTIGDGSSFPSAAHLASYAGLAPATRSSGTSIHGEHAPRSGNRQLKRAMFLSAFAALHDPNSRGYYDRCRARGKTHTQALLRLARHRTSVLFAMLRDGTYYEPRTPATA

SEQ ID NO: 15234 - protein, 405 aa, unidentified
  source 1..405: note = protein_3a0b712
  REGION 5..161: note = RuvC_domain
  SITE 8: note = RuvC_P1
  SITE 58: note = RuvC_P2
  SITE 98: note = RuvC_P3
  SITE 100: note = RuvC_P4
  SITE 103: note = RuvC_P5
  REGION 275..362: note = Tnp_domain
  SITE 283: note = Tnp_P1
  SITE 313: note = Tnp_P2
  SITE 321: note = Tnp_P3
  SITE 322: note = Tnp_P4
  SITE 335: note = Tnp_P5
MYNAVGIDVSKGKSTVAVLQPGGTVVRKPFDVTHSSCELKSLTDYILTLDGETKAVMECTGRYHEPILRAFSDAGIFVSAVNPHLIKNFGNNTIRKVKSDPADSKKIARYTLDNWADLREYSSMDTTRAQLKTLNAQMAFFTKQKVAAKTNLISLLDMTYPGVNDLFDTPSRDDGSEKWVDYAASFWHVDCVRKIGLKAFTERYQAFCKRHGYNFQKSKPEELFNASKELVAVFPKEQEYKDMIQMSIRQLNVISANVEHTRQEMNRLASALPEYSTVMAMRGVGATFGPQLIAEIGDISRFNHREALTAFAGVDPGVDESGKFKSKSNNASKCGPSRLRKTLFLIMSSLLQTKPIDDPVYRFLDKKRSEGKPYHVYMTAGANKFLRIYYGKVKECLRTQSETAN

SEQ ID NO: 15235 - protein, 407 aa, unidentified
  source 1..407: note = protein_3eed674
  REGION 5..164: note = RuvC_domain
  SITE 8: note = RuvC_P1
  SITE 61: note = RuvC_P2
  SITE 101: note = RuvC_P3
  SITE 103: note = RuvC_P4
  SITE 106: note = RuvC_P5
  REGION 272..358: note = Tnp_domain
  SITE 280: note = Tnp_P1
  SITE 311: note = Tnp_P2
  SITE 319: note = Tnp_P3
  SITE 320: note = Tnp_P4
MRLFVGDDWAEDHHDVELMDAAGRVLARGRLPEGVAGMARLHELIGQQLGEDGEDAEVVIGIETDHGPWASALVAAGYVVYAVNPLQASRYRERHGVSGAKSDRGDAHMLTDMVRTDSHQLRVVAGDSPDASAVKVVARTHKTLIWERTRQVQRLRHQLREYFPAALAAFEDLDAADALELLGKAPDPARAARLTRAQVSAALKRARRRDIPAKATAILAALRSPQLGQPEAVTAAYAVTVRSLIAVITVLNEQVKTLQGQVEADFGRHPDAEIYRSQPGLGTILGARVLGEFGDDPHRYATGKARKNYAATSPLTRASGKKKTVMARFIRNDRLTDALMAQAFTALSTSPGARALYDAERARGTEHNAALRKVANRLVGILHGCLKTRTLYDEKTAWPHHENKLAA

SEQ ID NO: 15236 - protein, 351 aa, unidentified
  source 1..351: note = protein_4b9ef5e
  REGION 6..146: note = RuvC_domain
  SITE 9: note = RuvC_P1
  SITE 52: note = RuvC_P2
  SITE 87: note = RuvC_P3
  SITE 89: note = RuvC_P4
  SITE 92: note = RuvC_P5
  REGION 211..296: note = Tnp_domain
  SITE 219: note = Tnp_P1
  SITE 249: note = Tnp_P2
  SITE 257: note = Tnp_P3
  SITE 258: note = Tnp_P4
  SITE 270: note = Tnp_P5
MKIQTIGIDLGKATFHVVGFDEAGNVVVKKRLSRKQVICYAANVPPCLIGMEACCGAHHLGAALEARGHQVRLIPAQFVRPFVKSNKNDYRDAEAIAEAVQRPTMRFVPIKTKDQLDLQALHRTRDRLVSRRTSLVNQIRAFLLERRITFRQGRAYLRQRMPLILEDAELNLSPLMRQLLDQLWQEWKAVEEQIETMNRTIARIADQDAACQRLQQVPGVGPLAATAIAAAVGNGSAFRKGRDFAAWLGLVPRQHSTGGKAKLLGISKRGNPYLRRLFIHGARSILTVANRENIAFGAWMTQLESHVHRNVAIVAVANKLARIAWAVLAKEETYHWPPAMSVTPSDRSQAA

SEQ ID NO: 15237 - protein, 339 aa, unidentified
  source 1..339: note = protein_1d13dd9
  REGION 7..148: note = RuvC_domain
  SITE 10: note = RuvC_P1
  SITE 53: note = RuvC_P2
  SITE 88: note = RuvC_P3
  SITE 90: note = RuvC_P4
  SITE 93: note = RuvC_P5
  REGION 212..301: note = Tnp_domain
  SITE 220: note = Tnp_P1
  SITE 250: note = Tnp_P2
  SITE 258: note = Tnp_P3
  SITE 259: note = Tnp_P4
  SITE 271: note = Tnp_P5
MKEVTTIGLDLAKKVFQVHAVDRAGAVVVRRALRRSQVLAWFAKLPPCLVGMEACATAHYWGRELRKLGHEVRLIPPAYAKAYVRRNKNDAADAAAICEAVGRPAMRFVTIKTEPQQAMAGIHRVRDLLIKQRTMLRNQLRGMMAEFGVVAAQGRRGLNELLAILSDPEDRCIPSPLHEGLMMIMETWRGIERKLEEIDRQMVAAGRADATCRHLVTAPGYGPILSSAMAALVIDPGAFKRGCDFAASLGLVPRQDGTGGKVRLGPISKRGNGYLRRLLVNGATSLIKCQHIRQDPWVAKLLASKPRKVVAVALANKLARIGWALMTRQEDFRCRLAAA

SEQ ID NO: 15238 - protein, 369 aa, unidentified
  source 1..369: note = protein_346eb79
  REGION 1..140: note = RuvC_domain
  SITE 38: note = RuvC_P2
  SITE 79: note = RuvC_P3
  SITE 81: note = RuvC_P4
  SITE 84: note = RuvC_P5
  REGION 203..287: note = Tnp_domain
  SITE 210: note = Tnp_P1
  SITE 240: note = Tnp_P2
  SITE 248: note = Tnp_P3
  SITE 249: note = Tnp_P4
  SITE 260: note = Tnp_P5
MTGDESVVGGGRFSTDTDGYARLLAYARAWPQRQWAVEGCAGIGKHVADRLVADGEDVVDVPAKMSARVRVFTTGQGRKTDATDAHSIALVGVRMSGLRPVVDDEQLELLRMCVDRRASLGREHTRKVSQLHKLLLELIPGGAKRSLSAAQAKELLRKVRPATAAGKVRKAHAAELAADLATIYARSKAADKELKALVKATGTGLLDRHGIGPSGAARLLAEVADVTRFPDRNHFASWNGSAPIDASSGDHTRHRLSRKGNRQINRVLHIMAVVQLRNATEGRAYYDRKKAAGKTSMEAMRCLKRRLSDLVYKALLDDLAGHATTGPGGHLGDDSDSSATGSQPATGSSDKPLPGPAMSKPTTTLPAAC

SEQ ID NO: 15239 - protein, 360 aa, unidentified
  source 1..360: note = protein_c4860c4
  REGION 8..153: note = RuvC_domain
  SITE 11: note = RuvC_P1
  SITE 57: note = RuvC_P2
  SITE 93: note = RuvC_P3
  SITE 95: note = RuvC_P4
  SITE 98: note = RuvC_P5
  REGION 218..306: note = Tnp_domain
  SITE 226: note = Tnp_P1
  SITE 255: note = Tnp_P2
  SITE 263: note = Tnp_P3
  SITE 264: note = Tnp_P4
  SITE 276: note = Tnp_P5
MFVERTSVGLDVHARSVVATGLDSMTGEVFKTRLVPAHEEVITWLRQLPGPVATTYEAGPTGFGLYRALTAAGIRCEVVAPSKLTRPSGDRVKTDAKDALLLAQLLQVGQITGIRVPTVSQEAARDLVRAREDVRGDLMRARHRVSKLLLRHGHVYYGGKAWSGDHAAWLRRIRFDQSGTRTAYEADLEAVEFAIARRNRLDAAIAAMAADCEFTATVRKLCCLRGISTLTGFALAVEIGDWERFTGSSIGAYLGLVPSEYSSGQSRRQGGITKAGNSHVRRLLVEAAWHHKPTYRVGKVLQARWDQAPAAARTRAHAGNQRLHRRWASYTARKKKHTTATTAIARELAGWCWSLATLPD

SEQ ID NO: 15240 - protein, 342 aa, unidentified
  source 1..342: note = protein_cfdc72b
  REGION 7..149: note = RuvC_domain
  SITE 10: note = RuvC_P1
  SITE 53: note = RuvC_P2
  SITE 88: note = RuvC_P3
  SITE 90: note = RuvC_P4
  SITE 93: note = RuvC_P5
  REGION 210..295: note = Tnp_domain
  SITE 218: note = Tnp_P1
  SITE 248: note = Tnp_P2
  SITE 256: note = Tnp_P3
  SITE 257: note = Tnp_P4
  SITE 269: note = Tnp_P5
MNVVTLIGIDLGKHSFHLHAQDAAGRMVFRKKLTRSQLLAQLANVPACTVVMEACAGAHWVARRLAALGHTARLISPQFVKPFVQGNKNDFNDAQAICEAASRPSMRFVTPRNEAQQTLSALHRVREGLVRQRTAATNQIHAFLLEFGISLPKGPAIIKRLPAVLALHPDLPVRLVAVLERLRAHFTYLDEQITEVERELAQQLKEDESSQRLLEIPGIGPITASALSIELGDARQFGSSRQFAASLGLVPRQYSTGGKPTLLGISKRGDKNLRRLLVQCARVLMLRIDKREDSLGLWVRDLLTRRHSNVVACALANKLARIAWAILAKGTHYQSDPAVSAA

SEQ ID NO: 15241 - protein, 312 aa, unidentified
  source 1..312: note = protein_2bd7d43
  REGION 10..152: note = RuvC_domain
  SITE 13: note = RuvC_P1
  SITE 54: note = RuvC_P2
  SITE 94: note = RuvC_P3
  SITE 96: note = RuvC_P4
  SITE 99: note = RuvC_P5
  REGION 189..273: note = Tnp_domain
  SITE 197: note = Tnp_P1
  SITE 226: note = Tnp_P2
  SITE 234: note = Tnp_P3
  SITE 235: note = Tnp_P4
  SITE 247: note = Tnp_P5
MAMQVEPRTVGVDVAKDELVISIDGENPFTLENAPAAIRGWLKGLHGPLRLALESTGVFHLELACQAHARGHAVYLIDGYRLNRYRESVGGRAKTDATDARLLVRYLRNEGADLRPWIPPSRDYQALQRLLHRRATVVRARTALQQSLRDVPGLRTTLKATLSQLDRTTVAIERRIRETLLRAGWQHHARRCRQIEGIGPVTAAALVMAFSRGRFANSDAFIAFLGLDVRIRDSGKKRGQRRLTKQGDGELRRLLYLAAMQAKAKPAWRAFFQRHLERGLTRIQALNALARKLARVAFALMKNETDYVPKTA

SEQ ID NO: 15242 - protein, 391 aa, unidentified
  source 1..391: note = protein_abec547
  REGION 4..163: note = RuvC_domain
  SITE 7: note = RuvC_P1
  SITE 60: note = RuvC_P2
  SITE 101: note = RuvC_P3
  SITE 103: note = RuvC_P4
  SITE 106: note = RuvC_P5
  REGION 266..353: note = Tnp_domain
  SITE 274: note = Tnp_P1
  SITE 304: note = Tnp_P2
  SITE 312: note = Tnp_P3
  SITE 313: note = Tnp_P4
  SITE 326: note = Tnp_P5
MILVGIDVAKDKHDCFIINSDSEILAKAFSFPNNKEGFNFLYEKIRAVSNASDKIKVGLEATGHYSYNLLGFLLDKGLPTFVINPLHTNLYRKSLSLRKTKTDKVDSRTIAMMLLSEISLKPYSDTSYHNEELKSLSRYRFTKVQERAKLKTSVSRLVQILFPELEKLVPTLHMASVYRLLEEYPSASHIASAHLTKLNNMLQEASKGRYGKEKAIEIRDAARNSIGSVMPAKSLELKHTIKLIHELNLEIMEIDSEIKKMMDEIASPITTIPGIGCNMGAMIISEIGDFSRFSSPDKILAYSGFSPSIYQSGKLDNCYAHMEKRGSRYLRYALFNAAQKACIWDKTLAQYLAKKRAEGKHYFVALSHVVKKLVRVIFHLERTGQPYLMAA

SEQ ID NO: 15243 - protein, 321 aa, unidentified
  source 1..321: note = protein_f49a165
  REGION 7..125: note = RuvC_domain
  SITE 10: note = RuvC_P1
  SITE 53: note = RuvC_P2
  SITE 88: note = RuvC_P3
  SITE 90: note = RuvC_P4
  SITE 93: note = RuvC_P5
  REGION 190..274: note = Tnp_domain
  SITE 198: note = Tnp_P1
  SITE 228: note = Tnp_P2
  SITE 236: note = Tnp_P3
  SITE 237: note = Tnp_P4
  SITE 249: note = Tnp_P5
MKKFIRVGVDLAKNYFQIHALASEDGTPVTRKLTRVKMREFFSQIEPGLVGMEACGSAHYWARELKAMGHEVLLMPPAYTKPYVKRGKNDAVDADAICEAMSRPGMRFVPIKSAEQQAMLRGHLSEFGIVAAKGIGRVDELLDLAENDATLPNAARASVKVLAQALEGLDKAIGDLEKQISSAHAQNEMSRLLDKVPGIGKLIASVIAASVPDPSVFKSGRDFAAWLGLTPRQNSSGGKQTLGAITKQGNRYIRKMLVLGATSLLNVVGKRKGALRDWIVGLLAKKPARLVTVALANKLARILWAMMKTGECFRTETFTKA

SEQ ID NO: 15244 - protein, 343 aa, unidentified
  source 1..343: note = protein_fc5f7e8
  REGION 7..148: note = RuvC_domain
  SITE 10: note = RuvC_P1
  SITE 53: note = RuvC_P2
  SITE 88: note = RuvC_P3
  SITE 90: note = RuvC_P4
  SITE 93: note = RuvC_P5
  REGION 211..292: note = Tnp_domain
  SITE 219: note = Tnp_P1
  SITE 249: note = Tnp_P2
  SITE 257: note = Tnp_P3
  SITE 258: note = Tnp_P4
  SITE 270: note = Tnp_P5
MNGIAVLGIDLGKDSCSVTGLDAGGHVVLRRRMRRDSVIKLAAGLPPCVMAMEACCGAHHLGRLLRTQGHDVRLMSPEYVRPYVKAQKNDDRDSEAIAEAATRGTMRFVDLKSEEQLDMQILHRARDRLVGERTALINQLRAVLLERGIVMAKGRRKLEIHLDRLLTDEVSFSRRIRLLMEDMRDQWRALDARITDLDKEFASQARSDEPARLLTTIPGIGPLNATAFVAAIGAAETFGRGRDLAAWLGLVPRQMTTGGKPRLLGISKRGNGYLRKMLIHGARAALPVLSKGDTPLGQWLRGLMARAHINTAVVALAAKMARIVWAVLRSGRPFDMRTTTVAA

SEQ ID NO: 15245 - protein, 341 aa, unidentified
  source 1..341: note = protein_b2224a2
  REGION 7..148: note = RuvC_domain
  SITE 10: note = RuvC_P1
  SITE 53: note = RuvC_P2
  SITE 88: note = RuvC_P3
  SITE 90: note = RuvC_P4
  SITE 93: note = RuvC_P5
  REGION 211..297: note = Tnp_domain
  SITE 219: note = Tnp_P1
  SITE 249: note = Tnp_P2
  SITE 257: note = Tnp_P3
  SITE 258: note = Tnp_P4
  SITE 270: note = Tnp_P5
MSEVSTVGLDLAKSVFQVHGADPSGAVLVRKKLRRDQVLGFFATLPRCVVAMEACASAHYWAREIAALGHDTRLIPPAYVKPFVKRQKNDMADAESICEAAQRPTMRFVQGKSAEAQASAVVFRTRGILVRQRTQLINALRGHLTEFGYVVRQGVGHVGKLVEIVGDPASDIPAEARPILVVIAASLKALQEQIALLDREIAARAKANPVAQRLMTVPGIGPVSATALVALAPAASTFRRGRDFAAWLGLVPRQHSSGGKERLGRTTKMGERSLRRLLILGASSATKVAARDPDKASAWLAGILARKPRMLVIVALANKMARIVWALMAHGGSNRAPAVAA

SEQ ID NO: 15246 - protein, 355 aa, unidentified
  source 1..355: note = protein_0266862
  REGION 6..146: note = RuvC_domain
  SITE 9: note = RuvC_P1
  SITE 54: note = RuvC_P2
  SITE 89: note = RuvC_P3
  SITE 91: note = RuvC_P4
  SITE 94: note = RuvC_P5
  REGION 210..296: note = Tnp_domain
  SITE 218: note = Tnp_P1
  SITE 248: note = Tnp_P2
  SITE 256: note = Tnp_P3
  SITE 257: note = Tnp_P4
  SITE 269: note = Tnp_P5
MSISRVGVDIAKSVFHVHGVDRHDQVQWRGKYQRDKWLDAIVKRVPAGAEIGMEACASAHHWARVLQARGYHVKLIAAQFVKPYVKSNKNDRVDAEAICEAMNRPHMRFVAVKTVAQQDVQAARSELVQQRTAKANQIRGLIGEYGLVAPTGIGQLRAALPRWLEDAENGLTDDFRVLLPSLAEDLRHLDDRIVTVTERIERHAQTDPVARRLMTLRGVGILTASALTGALGDAQAFKRGRDFAASLGLTPRQHSTGGRDRQLGISKRGDCYLRTLLVHGARTALRWSEGREDNLSHWVRHWPNASTPMSWSSRWPTRRLASPGRSHATTRPMTPTWHRRRRSTGNLRHPTINDC

SEQ ID NO: 15247 - protein, 338 aa, unidentified
  source 1..338: note = protein_229aa51
  REGION 6..152: note = RuvC_domain
  SITE 9: note = RuvC_P1
  SITE 53: note = RuvC_P2
  SITE 91: note = RuvC_P3
  SITE 93: note = RuvC_P4
  SITE 96: note = RuvC_P5
  REGION 211..298: note = Tnp_domain
  SITE 219: note = Tnp_P1
  SITE 249: note = Tnp_P2
  SITE 257: note = Tnp_P3
  SITE 258: note = Tnp_P4
  SITE 270: note = Tnp_P5
MAIVFVGIDLAKNVFAVHGVNPAGKPELVRPSVPRAKLHEMIAALPPCTIGMEACSGAHHWARLFQALGHTVKLMAPKFVTPYRLSGKRGKNDAADAAAICEAVQRPNMRFVPVKSPEQQGQLMVHRARQGYVEARTATINRIRGLLSEVGIVLPLKAETVRREAMAQLEDLPGWVNTVIGDLLSEVHRLDERIAEYDRHVALMARQSSQAQQLLRLRGVGETTATALIAMIGNGRDFHNGRQLSAWIGLVPGQYSSGGKTRLGRITKSGDAYLRSLLVMGARAVLNAAKDKTDSISRWATALAERVGYWKAVVAIAAKNARMAWAVLVKGEAFAMPA

SEQ ID NO: 15248 - protein, 396 aa, unidentified
  source 1..396: note = protein_ec0cce3
  REGION 4..160: note = RuvC_domain
  SITE 7: note = RuvC_P1
  SITE 57: note = RuvC_P2
  SITE 97: note = RuvC_P3
  SITE 99: note = RuvC_P4
  SITE 102: note = RuvC_P5
  REGION 271..358: note = Tnp_domain
  SITE 279: note = Tnp_P1
  SITE 309: note = Tnp_P2
  SITE 317: note = Tnp_P3
  SITE 318: note = Tnp_P4
  SITE 331: note = Tnp_P5
MISVGIDVSKGKSTVCILKPGGEVIKPPFEIKHTAEKLDALVSLINSFDEETRVVLEDTGHYHLPVASYLSSQGVFVCCVNALRMKKYCSQDIRRAKTDKIDAVRIASFGITYWSELMKAYPMSDTYDELRFLARQYYQITSVLVKEKVNLSNLLDQVMPGISDVLQDQKGYHKLTEFVDRYIHFQTILDMGEKKFTANYCKWATKKGYRCNERKAAEIFALAQNGIPSLPNSQSITIAVREAIKRIHSTEESRNTILSQMQELCKTLPEYSVVREMSGVGDILTPCIIAEIGDVRRFRNKHSLIAYAGIDTPPYQSGAFNASERKISKRGNSYLRKTGFEIMQSLIRNKPIDDPVYAFIQKKRSEGKCGKEAMIAGLNKFLRVYYGKVMELYAET

SEQ ID NO: 15249 - protein, 345 aa, unidentified
  source 1..345: note = protein_4d67a07
  REGION 6..148: note = RuvC_domain
  SITE 9: note = RuvC_P1
  SITE 52: note = RuvC_P2
  SITE 87: note = RuvC_P3
  SITE 89: note = RuvC_P4
  SITE 92: note = RuvC_P5
  REGION 214..301: note = Tnp_domain
  SITE 222: note = Tnp_P1
  SITE 252: note = Tnp_P2
  SITE 260: note = Tnp_P3
  SITE 261: note = Tnp_P4
  SITE 273: note = Tnp_P5
MQVTTIGLDLAKNVFQVHGVDANGLVVVRKALRRAQLLLFFKELAPCLVGMEACSSAHYWARELSALGHTVKLMPPSYVKAYVKRGKNDAADAAAICEAVTRPTMRFVEIKSPEQQAVLMLHRTRALLMRQRTMTVNALRAHLAEFGFIAAQGAKGLAALIERVFGSDGCEAPLIPPLARRALAPLVAQVQELRTQIKAIDAELLAWHRTNVASKRLETIPGVGLITATAIAATVTDPSHFRSGRQFAAWLGLVPRQNSSGGKERLGSISKMGDRYLRTLLVVGATSVIRYARGKNAAGAQWINALLARRPARLVSVALANKTARIIWAVLARGESYRAPLLAAA

SEQ ID NO: 15250 - protein, 407 aa, unidentified
  source 1..407: note = protein_b4e5199
  REGION 17..175: note = RuvC_domain
  SITE 20: note = RuvC_P1
  SITE 74: note = RuvC_P2
  SITE 114: note = RuvC_P3
  SITE 116: note = RuvC_P4
  SITE 119: note = RuvC_P5
  REGION 282..371: note = Tnp_domain
  SITE 290: note = Tnp_P1
  SITE 320: note = Tnp_P2
  SITE 328: note = Tnp_P3
  SITE 329: note = Tnp_P4
  SITE 342: note = Tnp_P5
MGVPASIIKEGIMEPVIGMDVSKGSSVIQAFLGRNEPYGKAKQIYHNEQGFEWLSVLCAELKTRTEAEPVVIMEATGHYHRGVVCYLIQKDIRHIILNPLQSKRAKGMGLRKVKTDEADAWSLAEMFYRGDALPHRIWDESYMELQHATRQHEFVTSLYVQAKLNTRALLDQVIPAYEGVFSDLYSATSLQVLQSCLQGQMDKAEIIEKVLIKYAGRSRSQSWIREKSIRIEEILGKWKEERTSPSQTEALKGMITLLLTFQAQLKQLEQQMEEISVQLPEVDLLKSIPGIGEKLAAAIVAEIGDIKQFRHAKQLVAYAGLDPSVHSSGKFTASSNRITKRGSKRLRRSLYLAVQCGLRQGNNRRLASYYERKKKEGKPYKVTVIACANKLLHHIYAILNRGQPYQT

SEQ ID NO: 15251 - protein, 340 aa, unidentified
  source 1..340: note = protein_c5c38da
  REGION 42..183: note = RuvC_domain
  SITE 45: note = RuvC_P1
  SITE 88: note = RuvC_P2
  SITE 123: note = RuvC_P3
  SITE 125: note = RuvC_P4
  SITE 128: note = RuvC_P5
  REGION 207..288: note = Tnp_domain
  SITE 211: note = Tnp_P1
  SITE 241: note = Tnp_P2
  SITE 249: note = Tnp_P3
  SITE 250: note = Tnp_P4
  SITE 262: note = Tnp_P5
MGTKRVEREADPLEPGRHRCARVVLFDDHSRDRRSVMNVTTYGLDLAKRVFQVHWVESDTGEVKRKTLARAQVRGFFAGRAPGVVALEACGSGHHWGRVLVELGHEVKLIAAQFVRPFVKTNKTDAADAEAIWEAAQRPGMRFVALKSEEQQAVLGLHRIRAQCVKMRTMQAHQVRGLLYEFGVVVPQGWRALLAQTEPVLADEAHGAVPGVGRLTATALVATIGDARTFRSGREFAAFLGLVPRQSGSGGRVKLLGISKRGDPYLRTLLIHGARTVLTQQSRADRSLDPWLKGLLSRRPKNVAIVALANKMARTVWALLAHRRDFDRGWRSITPTPAML

SEQ ID NO: 15252 - protein, 352 aa, unidentified
  source 1..352: note = protein_ed7862b
  REGION 19..159: note = RuvC_domain
  SITE 22: note = RuvC_P1
  SITE 64: note = RuvC_P2
  SITE 99: note = RuvC_P3
  SITE 101: note = RuvC_P4
  SITE 104: note = RuvC_P5
  REGION 223..309: note = Tnp_domain
  SITE 231: note = Tnp_P1
  SITE 261: note = Tnp_P2
  SITE 269: note = Tnp_P3
  SITE 270: note = Tnp_P4
  SITE 282: note = Tnp_P5
MHQSINYWVEEFAMNKSIIGLDIAKRVFHIYTIREDGKVFRKMLRRKQVLEFFANYPSSLIGIEACGSSHYWARELSALDHDVKLLNARHVKAFVKGNKNDFNDAEAIFDTVSRPNTRTIAIKTVAQQDIQLIHRLRQDAVKRRTAKVNQIRGLLSERGIVIDLGINKVRKHLPELLEDAENALTTLSRSAFAEQYERLLAMDKEIEGFDKKISELSRANELCQRLSKVPGIGPMTATIVAADLGEGSHYKNARHYSASLGIVPRQCSSGGKSVLLGISKRGNRYIRTLLIHGARSVLRTCQNKEDKLSLWCQELIKRRGFNIAAVALANKNARILWALAHKEESYKKAVIV

SEQ ID NO: 15253 - protein, 366 aa, unidentified
  source 1..366: note = protein_81bb5ea
  REGION 4..162: note = RuvC_domain
  SITE 7: note = RuvC_P1
  SITE 57: note = RuvC_P2
  SITE 99: note = RuvC_P3
  SITE 101: note = RuvC_P4
  SITE 104: note = RuvC_P5
  REGION 277..364: note = Tnp_domain
  SITE 285: note = Tnp_P1
  SITE 315: note = Tnp_P2
  SITE 323: note = Tnp_P3
  SITE 324: note = Tnp_P4
  SITE 337: note = Tnp_P5
MYAVGIDVSKGKSTVAVLRPFGEVVISPFDVYHNPNELQALVTRLKSLDGDTKVVMEYTGNYYLPIAQFLSNNGLFVSVVNPILVKDYSSKSLTVRKVKTDKKDAVKIANFAFDRWAELTPFSPFTEIRLQLKALNRQYDKCNKLKIMLKNNLISLLDQTFPEVNLLFASPVKKSDGREKWVDFVLKYYHAECVCGRSLAAFAKSYRSWCGKNGYHYSEKKARQIYAFASNCVPTLPFSEGTKLIVTCAATQLNDMDATLASLIAQMHSIAKVLPEYDVVMSMYGVGYVLGPQLIAEISDISRFKKKQSLAAYAGVDPEQKQSGKNDPKSRPITKRGSPHLRKTLFQVLSVFLQTAPRRRTCFSIH

SEQ ID NO: 15254 - protein, 345 aa, unidentified
  source 1..345: note = protein_83c8f8c
  REGION 7..148: note = RuvC_domain
  SITE 10: note = RuvC_P1
  SITE 53: note = RuvC_P2
  SITE 88: note = RuvC_P3
  SITE 90: note = RuvC_P4
  SITE 93: note = RuvC_P5
  REGION 210..300: note = Tnp_domain
  SITE 218: note = Tnp_P1
  SITE 248: note = Tnp_P2
  SITE 256: note = Tnp_P3
  SITE 257: note = Tnp_P4
  SITE 269: note = Tnp_P5
MDQISRIGMDTSKHVFQLHGVNAAEAPVLRKKLRRKEMVTFFEKLAPTVIAIEACGASHHWARLLQSFGHTVRLIPPQLVKPYVKRGKNDAADAEALCEAMSRPTMRFVPVKSPEQQAALMLVGVRDRLIRNRTQLANAIRGHAAEFGLAAAKGMAHLVPLLERIQADEGLPALARELFAIQAKEYAQLQAQIDEVDAQLMARHRADDCSRRLTKIPGVGPIGAMLLRMKTPEPELFRSGRQFAAWIGLTPKDHSTAGKVRLGVITRAGDEGLRSVLVVGATAVIQQARRGGRASPWLAALLKRKSPKLVAVALANKMARIAWKMMLTGEAYTATPAPAAVAGAV

SEQ ID NO: 15255 - protein, 384 aa, unidentified
  source 1..384: note = protein_65e48d3
  REGION 6..159: note = RuvC_domain
  SITE 9: note = RuvC_P1
  SITE 57: note = RuvC_P2
  SITE 98: note = RuvC_P3
  SITE 100: note = RuvC_P4
  SITE 103: note = RuvC_P5
  REGION 222..306: note = Tnp_domain
  SITE 229: note = Tnp_P1
  SITE 259: note = Tnp_P2
  SITE 267: note = Tnp_P3
  SITE 268: note = Tnp_P4
  SITE 279: note = Tnp_P5
MAKVVIGVDPHKRMNAVVVVNAKGKVLARQQFSNTARGFRELRTFSRQWRPRTWAVEGCNGVGKHLAQRLVAQHETVVDVSTRRAALVRVYAGGNGRKTDDTDAHSIAMVGLQTPGLPVVRPDDRTVTLRLLANRRHELVGLRTQAVCRLHRDLANLVPGGAPRALTAKKAKELLATIRPRDEVGRLRRQLAADQLAGLVALDRRLAELERQINAAVAATPTRLVRIFGVGPVSTARILGEVGDVARFRSRHHFASYNGTAPAEEGSGGAPIQRVNLKGNRKINHAIHMVAITQVRNDTPGRAYYLRKQAQGKTQKEALRALKRKISDAIYRQLVEDALAERGPGGQTGTTLRSSVAGPTPTAGSSDKPQPGPKPQATPLPASA

SEQ ID NO: 15256 - protein, 276 aa, unidentified
  source 1..276: note = protein_c342351
  REGION 1..33: note = RuvC_domain
  REGION 138..225: note = Tnp_domain
  SITE 146: note = Tnp_P1
  SITE 176: note = Tnp_P2
  SITE 184: note = Tnp_P3
  SITE 185: note = Tnp_P4
  SITE 198: note = Tnp_P5
MALRQLSRYRLALVDACGDCKRRIIALLDQVFPEYDTLFSDTFGVTSKEVLSQYPTPEALLSVSTRKLANLLEKASHGRFGKEKAEQLKAAAGSSFGVSFAKDAFAFQSRQLIEQLEFLEGQVEELEEQISSLLKQTGSYITTIPGIGDTLGAIILSEIGDIHRFDAPNKLVAFAGLDVQVTQFGEFTGTRQKISKRGSPYLRRAIWLAASRAAFCDPILSEYYQSLRARGKHHLTAIGAVSRKLCSIIFAILSENRPYEAVPPKSIRHSSSSFTT

SEQ ID NO: 15257 - protein, 402 aa, unidentified
  source 1..402: note = protein_1454c47
  REGION 11..165: note = RuvC_domain
  SITE 14: note = RuvC_P1
  SITE 62: note = RuvC_P2
  SITE 102: note = RuvC_P3
  SITE 104: note = RuvC_P4
  SITE 107: note = RuvC_P5
  REGION 273..359: note = Tnp_domain
  SITE 281: note = Tnp_P1
  SITE 311: note = Tnp_P2
  SITE 319: note = Tnp_P3
  SITE 320: note = Tnp_P4
  SITE 332: note = Tnp_P5
MTTGTTIDVTIGLDVGKTAHHACAMLASGDIIYDKPLPQEETQLREVFTDLQQHGTVLVVVDQPNTIGALPIAVARDAGCVVGYLPGLAMRKAADLYPGRSKTDRRDAFIIADTARTMPHTLRAVDRDNEVLSALKMLSGFDDDIAKDATRTINRLRSVLTQIYPSFERALAGDVITRPLILEMLIHYGGPTKLKKAGYHRVLNWMSKRSTKDPTVVVDAIFAGLKAQTVTVPGTAAAEVVIPQLAANIKSLLNQRKTIAEQVEELLADFPLSEVLMSMPGVGIKTAANILLAVGDCSDFRSAGHLAAYAGIAPVTRRSGTSIRGEFPARSGNKRLKNALFYSAFASLRSHPASKAYYEKKRAEGKRHNAAVMCLARRRCNVIYAMLTRGEFFREVPARTAA

SEQ ID NO: 15258 - protein, 338 aa, unidentified
  source 1..338: note = protein_57e4153
  REGION 7..149: note = RuvC_domain
  SITE 10: note = RuvC_P1
  SITE 53: note = RuvC_P2
  SITE 88: note = RuvC_P3
  SITE 90: note = RuvC_P4
  SITE 93: note = RuvC_P5
  REGION 211..297: note = Tnp_domain
  SITE 219: note = Tnp_P1
  SITE 249: note = Tnp_P2
  SITE 257: note = Tnp_P3
  SITE 258: note = Tnp_P4
  SITE 270: note = Tnp_P5
MSTIKTIGVDLGKSTFHVVGHDYSGRQLYRHKFSRAKLLQFVSTHAPVVIAMEACCGAHWLARRCQEYGHQVKLIPPQYVKPYVKSHKNDFIDADAIAEAATRPRMRFVSPKTEHAQLGVVIRRIRTGYIRERTATMNRIGSILTEFGFSFPRGHANMKRLFQWLADTRQVVHPLLVFELRNQLDHYNELNDKIKEQDKKLETLNGENELFSLLQTVPGVGPMTAACCLSSVADPKDFPNGRNFAAWLGLVPFQYSTGGKPRMLGISKRGNKELRELFIHAARAVMWRDQTAERYFGKWLIDLKCRKPFNVALVALANKLARIAWSVMATKKPFEIRV

SEQ ID NO: 15259 - protein, 320 aa, unidentified
  source 1..320: note = protein_9a49638
  REGION 10..156: note = RuvC_domain
  SITE 13: note = RuvC_P1
  SITE 58: note = RuvC_P2
  SITE 98: note = RuvC_P3
  SITE 100: note = RuvC_P4
  SITE 103: note = RuvC_P5
  REGION 194..278: note = Tnp_domain
  SITE 202: note = Tnp_P1
  SITE 231: note = Tnp_P2
  SITE 239: note = Tnp_P3
  SITE 240: note = Tnp_P4
  SITE 251: note = Tnp_P5
MSTRTPTLYVGIDVSKATLDVAILPTGRHFVVSNDEAGIDELLGGFDDPNKPILVVLEASGGYERAVAAAIAASGIAVAVVNPRQTRDFARATGKLAKTDRLDAKALAGFAEAVRPKPRALPEEEAQEFRAILARRRQLIQMMSAEKNRLGSAASKAVARRIRAHVRWLEKELSRTDRDLEEAIEGSPVFKENEALLRSVPGVGPVLCRTLLSELPELGSLAPRELSALVGVAPLNRDSGTLRGKRAVWGGRSRVREALYMGALVASRHNPHIKEFYERLVAAGKPKKVALVACMRKLLVILNALLRDRTPWRYPHALNP

SEQ ID NO: 15260 - protein, 321 aa, unidentified
  source 1..321: note = protein_a77913b
  REGION 8..147: note = RuvC_domain
  SITE 11: note = RuvC_P1
  SITE 52: note = RuvC_P2
  SITE 92: note = RuvC_P3
  SITE 94: note = RuvC_P4
  SITE 97: note = RuvC_P5
  REGION 191..278: note = Tnp_domain
  SITE 199: note = Tnp_P1
  SITE 229: note = Tnp_P2
  SITE 237: note = Tnp_P3
  SITE 238: note = Tnp_P4
  SITE 251: note = Tnp_P5
MNKYSKIYGVDISKDVFDVVCSDDAHHQFDNTPKGFSSFLKAIAQGSLVVMEATGYYHYRLAQYLFKHGVVVSVVNPLSVKRFIQMKLAKVKTDKSDARAICEYGRVNDVPCYTALTDVQAECLQLFRLLDSYLKKRTATKNKLHGEETLGIPSKFVHQSLKRDLKHLDKEVKALEERLLLLVKQDQQHQLTLLKGIPGLGTKTALFLIVITDGFDKFETAGQLCSYVGITPTIRQSGSSVRGKSRISKVGNQKLRNLLFLCAFSACKHNKACREIYERIVAKGKSKKLALIAVANKLLKQAFAIAKSGLPYDEKFVSKLN

SEQ ID NO: 15261 - protein, 374 aa, unidentified
  source 1..374: note = protein_92f1a42
  REGION 36..178: note = RuvC_domain
  SITE 39: note = RuvC_P1
  SITE 82: note = RuvC_P2
  SITE 117: note = RuvC_P3
  SITE 119: note = RuvC_P4
  SITE 122: note = RuvC_P5
  REGION 241..331: note = Tnp_domain
  SITE 249: note = Tnp_P1
  SITE 279: note = Tnp_P2
  SITE 287: note = Tnp_P3
  SITE 288: note = Tnp_P4
  SITE 301: note = Tnp_P5
MYGLLPLTGDLRYKEKSIHSNQLLPGVHTMEQCNVIAIDLAKDIFQVCIMTTNGEIIFNKAMSIAKLKEWLPKQKLSLVAMESCAGAHYWARFAQSVGHNVMVIPPKQVKPFRTGQKTDANDAIAIAVASRAANIKPARILSIEQQGLQSIEKMRSMIDKHKLQLSNQIRGLLLEFGIVINKGSKSFKERIPEILEDGDNDLSFPMRKVLLQMRTLYSRLEEDFDVINNELLQLTAQDTDCQRLMKLEGVGPITAVRLKIQLGNGGHFNSGRQVAACIGLTPKQHSSGGKVKLGSVGKSSCDKPLRSCIFLGARAVVSKLKNRPAKTEKERWLKALIERRGVNCASMALANKTARTAYALLKNNTDYNPVLIAA

SEQ ID NO: 15262 - protein, 321 aa, unidentified
  source 1..321: note = protein_6c0fd75
  REGION 8..147: note = RuvC_domain
  SITE 11: note = RuvC_P1
  SITE 52: note = RuvC_P2
  SITE 92: note = RuvC_P3
  SITE 94: note = RuvC_P4
  SITE 97: note = RuvC_P5
  REGION 191..278: note = Tnp_domain
  SITE 199: note = Tnp_P1
  SITE 229: note = Tnp_P2
  SITE 237: note = Tnp_P3
  SITE 238: note = Tnp_P4
  SITE 251: note = Tnp_P5
MNKSKQIYGVDISKNVFDVADSQGNHSQFKNDVKGFKSFLKTLSSESLVVMEATGYYHYRLAQFLYEQGIHVSVVNPLSVKRFIQMKLSRVKTDKSDAKAICEYATINEVPLYTAKDKNQAECLQLLRLIDIYLKQSTALKNKLHGEKTLGTPSKTVYHSLNRSLKAVQKEIKIMEDRLMEIVKEEQQKQLTLIKSIPGLGNKTAIMIIVLTDGFSNFENASQLCSYTGITPKLRQSGTSVRGRSRITKMGNAKLRNLLFMCSFSARKYNKACREIYERIIAKGKSKKLALIAVCNKLLKQAFAIAKSGLPYQENFVSKLA

SEQ ID NO: 15263 - protein, 350 aa, unidentified
  source 1..350: note = protein_9c0d823
  REGION 7..148: note = RuvC_domain
  SITE 10: note = RuvC_P1
  SITE 53: note = RuvC_P2
  SITE 88: note = RuvC_P3
  SITE 90: note = RuvC_P4
  SITE 93: note = RuvC_P5
  REGION 210..297: note = Tnp_domain
  SITE 218: note = Tnp_P1
  SITE 248: note = Tnp_P2
  SITE 256: note = Tnp_P3
  SITE 257: note = Tnp_P4
  SITE 269: note = Tnp_P5
MSQIIRIGMDTSKYIFQLHGVDASEQVVLRKRLSRKAMLEFFAKLPPTVVVIEACGAAHHLARELGKLGHTVKLIAPQLVKPYVPRNKNDGRDAEGLCEASSRPRMRYVPVKTAEQQAALMLLGVREQLVGRRTQLSNTIRGHAAEFGLTAAQGLDKLAAFLAAIERDERVPVLSRELFVMLARQYDQVQTELKAIEAKLLAWHRANATSRRLAQVPGIGPVTAAALVMKAPDPHAFRSGRLFAAWLGLTPKDHSTAGKTRLGKITRAGDERLRQLLVVGATVVVKQATGKHRRGSRWLLDLLQRKTPKQAAVALANKTARIAWKLMTTGEDYDSARFDAKSDAEVAAAA

SEQ ID NO: 15264 - protein, 345 aa, unidentified
  source 1..345: note = protein_b0a5f5b
  REGION 10..151: note = RuvC_domain
  SITE 13: note = RuvC_P1
  SITE 56: note = RuvC_P2
  SITE 91: note = RuvC_P3
  SITE 93: note = RuvC_P4
  SITE 96: note = RuvC_P5
  REGION 215..301: note = Tnp_domain
  SITE 223: note = Tnp_P1
  SITE 253: note = Tnp_P2
  SITE 261: note = Tnp_P3
  SITE 262: note = Tnp_P4
  SITE 274: note = Tnp_P5
MPEKAEVAVVGIDIGKNSFHVVGLGDRGEIVLRQKWSRSQVEVRLANMPPCLIGMEACVGAHHLSRRLKALGHEARLMPAKYVRPYSKGQKNDFRDAEAIAEAVQRPTMKFVATKTVEQLDLQALHRVRERMVSQRTGIINQIRAFLLERGIAVRQGQRFLRTELPDILAAPADVPSPQMARLIEGLAADWRHLDERIEQLSNEIHAMARADVNCERLMSVPGIGPIISSAMVAAIGAGDAFSKGRDFGAWLGLVPRQMSTGDRTVLGPISRRGNRYLRVLFVQAAWVVLIRPGSWERYELKAWIESARKRLHRNVLAIALANKLARIAWSVLAHGRGFEASASA

SEQ ID NO: 15265 - protein, 402 aa, unidentified
  source 1..402: note = protein_4904c28
  REGION 6..162: note = RuvC_domain
  SITE 9: note = RuvC_P1
  SITE 59: note = RuvC_P2
  SITE 99: note = RuvC_P3
  SITE 101: note = RuvC_P4
  SITE 104: note = RuvC_P5
  REGION 276..363: note = Tnp_domain
  SITE 284: note = Tnp_P1
  SITE 314: note = Tnp_P2
  SITE 322: note = Tnp_P3
  SITE 323: note = Tnp_P4
  SITE 336: note = Tnp_P5
MNMNAVGIDVSKGKSMIAIIRPYGEIVSLPFEIRHTSKEIRSLINQIQSIDGESRIVMEHTGRYYEPLARELSQANLFVSAINPKLIKDFGDNSLRKVKSDKADAIKIARYALDSWNDLKQYNLMDEIRNQLKTMNRQFGFYMKHKTAMKNNFIGILDQTYPGVNTYFNSPARDDGSQKWVDFAAAYWHVDCVRKMSLHAFTVHYQKWCKRNKYNFSQLKAEEIYGAAKELVPVLPKDHLTKLIVKQAVDQLNIASKTVESLRTLMNETASKLPEYSIVMGMKGVGSSLGPQLIAEIGDVTRFTHKGALTAFAGVDPGVNQSGTYEQKSVHTSKRGSSSLRKTLFQVMDALIKTKPQDDAVYQFLDKKRAQGKPYYVYMTAGANKFLRIYYGRVKEYLLSLS

SEQ ID NO: 15266 - protein, 328 aa, unidentified
  source 1..328: note = protein_f69b1e4
  REGION 5..159: note = RuvC_domain
  SITE 8: note = RuvC_P1
  SITE 62: note = RuvC_P2
  SITE 102: note = RuvC_P3
  SITE 104: note = RuvC_P4
  SITE 107: note = RuvC_P5
  REGION 204..289: note = Tnp_domain
  SITE 212: note = Tnp_P1
  SITE 241: note = Tnp_P2
  SITE 249: note = Tnp_P3
  SITE 250: note = Tnp_P4
  SITE 262: note = Tnp_P5
MKAFIGIDVGKEKLDISWLRDVVKSKKKTKIFKNNPQGYQELVAWLIKNTNLEAQDIVITTEPIGVYSEPLMYFLYEQGFILLHVNPGKAKQYASSLGLVHKTDKSDATMLARYGHDQQHSLLSWQPEPVEARELKVMARRLEALEQDLRREENRYEAVGFSGASTRVTQSIEDMIAALKTEIGKLKNDIDEHIDRHPQLKKNRQLLQSIKGVGDVISRMMVSLMACKQFKNAKQLACYLGLIPKLNESGKRAGKTTLSKEGPGYIRAKLYMAAVVAVQHNPDIKAQNKRLVEQGKTKMQAIGAAMRKLTHICFGVVKNQTEYQPQAI

SEQ ID NO: 15267 - protein, 339 aa, unidentified
  source 1..339: note = protein_d6e95dd
  REGION 6..147: note = RuvC_domain
  SITE 9: note = RuvC_P1
  SITE 52: note = RuvC_P2
  SITE 87: note = RuvC_P3
  SITE 89: note = RuvC_P4
  SITE 92: note = RuvC_P5
  REGION 211..302: note = Tnp_domain
  SITE 219: note = Tnp_P1
  SITE 249: note = Tnp_P2
  SITE 257: note = Tnp_P3
  SITE 258: note = Tnp_P4
  SITE 270: note = Tnp_P5
MQVTTVGLDLAKNIFQVHGVTETGEVAFNRPLRRAQVLAFFERLSPCVIGIEACASSHHWARELSQLGHSVRLMPPMYVKPYVKRGKSDAVDAEAICEAVTRPTMRFVEIKSEEQQALLSLHRARDFIVRQRTQLINMVRSLAAEFGITIARGVARAIEFARSIIDGKQPGLPDLAQDVLRVLSRQLMDLHNRLDWFETMLRIQARLSRQAQLLQTIPGVGPVTASAVAATIGSGRQFRSGREFAAWLGLTPRNHSSGGKERLGKITKMGDRYLRQLIVVGMTSRVRQVATHPERADPWLTKLLQRKPARLATVAMADKTARIMWAILTRNEPYKPHAV

SEQ ID NO: 15268 - protein, 341 aa, unidentified
  source 1..341: note = protein_a6ab947
  REGION 7..149: note = RuvC_domain
  SITE 10: note = RuvC_P1
  SITE 53: note = RuvC_P2
  SITE 88: note = RuvC_P3
  SITE 90: note = RuvC_P4
  SITE 93: note = RuvC_P5
  REGION 211..295: note = Tnp_domain
  SITE 219: note = Tnp_P1
  SITE 249: note = Tnp_P2
  SITE 257: note = Tnp_P3
  SITE 258: note = Tnp_P4
  SITE 270: note = Tnp_P5
MNEVCTIGLDLAKNVFQVHGADASGRVVIRKRLRRNQVLAFFSSQPHCIVAMEACSGAHFWAREIGRLGHETRLIPPAYVKPFVKRQKNDMADAEAICEAAQRPTMRFVAVKSEQAQGAAVVFRIRELLIRQRTQSINALRGHLAEFGEVVPQGAANAPRLIALIEDLGTTLPEMARDILRVLVKTLSQLNLQISALDAEIKRRAHEDATARRLMTIPGIGPLIATALVALAPPPEMFRRGRDFAAWLGLVPRQHSTGGKQRLGATTKMGERSLRRLLIIGANSVVVWSARKGTAPGSWLAGMLARKPTMLVRVALANKMARIVWALMAKGEVYRAPVVAA

SEQ ID NO: 15269 - protein, 401 aa, unidentified
  source 1..401: note = protein_e1b9b3b
  REGION 11..165: note = RuvC_domain
  SITE 14: note = RuvC_P1
  SITE 63: note = RuvC_P2
  SITE 103: note = RuvC_P3
  SITE 105: note = RuvC_P4
  SITE 108: note = RuvC_P5
  REGION 273..359: note = Tnp_domain
  SITE 281: note = Tnp_P1
  SITE 311: note = Tnp_P2
  SITE 319: note = Tnp_P3
  SITE 320: note = Tnp_P4
  SITE 332: note = Tnp_P5
MNDTPKRRLWVGIDAGKAHHWACAVDEDGKTRFSAKVTNDEAQILDAVEQILALGAPVCWGVDISSAPSALLLALLAASGQDLVYVPGKTAGRMSGAYRGEAKTDARDAYVIAETVRHRGDFAPIEVPAQVTADLALLTAHRGDLIADRVRMVNRLRDVLTGIFPALERAFDYSNSKSALTLLTGYQTPERIRRAGAARLAQWLHKRGVRIDRAELVAGTAVEAARAQLTELPGQATAARIVAELAQSLLDLDERIVRCDRDIRTTFSAHPQAVIIESLPGMGPILGAEFLVAAGDLAAYADAGHLASAAGLVPVPRDSGRRTGNFHRPKRYSRELRRVFYMSAQVSITRPGPNRDYYTKKRAEGCRHTQAVIALARRRTNVLWALLRDGRLFQETAPART

SEQ ID NO: 15270 - protein, 341 aa, unidentified
  source 1..341: note = protein_16aacc0
  REGION 7..149: note = RuvC_domain
  SITE 10: note = RuvC_P1
  SITE 53: note = RuvC_P2
  SITE 88: note = RuvC_P3
  SITE 90: note = RuvC_P4
  SITE 93: note = RuvC_P5
  REGION 212..299: note = Tnp_domain
  SITE 220: note = Tnp_P1
  SITE 250: note = Tnp_P2
  SITE 258: note = Tnp_P3
  SITE 259: note = Tnp_P4
  SITE 271: note = Tnp_P5
MEKVTTIGLDIAKQVFQVHGVNGAGAIVCRRRLRRDDVVGFFKALPPCLIGIEACATGHHWARVLMALGHEARLMPVSYVKPYVKRQKNDATDAEAICEAVTRPTMRFVPVKSEEQQSVLMLHRVRELLIRQRTMLVNALRGHLAEFGIVTRQGIAGVGMLIALVEDGDHDVIPPLARSALLLLVGQLREVHEKVSEMDRQIHAWHRSNELSRRLETIPGIGPITASAIAATVTDASLFKSGRQLAAWIGLVPRQNSSGGKDRLGRISKQGDPYLRRLLVVGAHAVLRFSRNGKTAPTRWAAELLAKKPYNIVAVALANKMARIVWALMATGRRFEAAPAL

SEQ ID NO: 15271 - protein, 345 aa, unidentified
  source 1..345: note = protein_14a67f6
  REGION 7..149: note = RuvC_domain
  SITE 10: note = RuvC_P1
  SITE 53: note = RuvC_P2
  SITE 88: note = RuvC_P3
  SITE 90: note = RuvC_P4
  SITE 93: note = RuvC_P5
  REGION 209..296: note = Tnp_domain
  SITE 217: note = Tnp_P1
  SITE 247: note = Tnp_P2
  SITE 255: note = Tnp_P3
  SITE 256: note = Tnp_P4
  SITE 268: note = Tnp_P5
MENIALIGIDLGKNSFHIHCQDRRGKAVYRKKFTRPKLIEFLATCPATTIAMEACGGSHFMARKLEELGHFPKLISPQFVRPFVKSNKNDFVDAEAICEAASRPSMRFVQPRTESQQAMRALHRVRESLVQDKVKTTNQMHAFLLEFGISVPRGAAVISRLSTLLEDNSLPLYLSQLLLKLQQHYHYLVEQIKDLESQLKRKLDEDEIGQRLLSIPCVGTLTASTISTEIGDGKQYASSRDFAAATGLVPRQYSTGGRTTLLGISKRGNKKIRTLLVQCARVFIQKLEHQSGKLADWVRDLLCRKSNFVVTCALANKLARIAWARTARQQTYVAGRQKYTGLKNH

SEQ ID NO: 15272 - protein, 403 aa, unidentified
  source 1..403: note = protein_dd96de3
  REGION 4..160: note = RuvC_domain
  SITE 7: note = RuvC_P1
  SITE 57: note = RuvC_P2
  SITE 97: note = RuvC_P3
  SITE 99: note = RuvC_P4
  SITE 102: note = RuvC_P5
  REGION 269..355: note = Tnp_domain
  SITE 277: note = Tnp_P1
  SITE 308: note = Tnp_P2
  SITE 316: note = Tnp_P3
  SITE 317: note = Tnp_P4
MVFVGVDWAEAHHDVCVIDAAGMVLGKRRVPDGIEGVRQIHELVGAHAQEPEQIVVGIETDRGLLVGALVAAGYRVYAINPLSASRYRERHVTSRAKSDPGDARMLAELVRTDRHNHRQVAGDSELAEAIKVLARGQQDLVWSRQRFVNRLRNTLREFYPAALEAFKDLDSGETLALLERAPNPWEGRRLSQAKIVSALRAAGRQRNLEARAAEIQTALRSEQLEAPARVGSAYAMVVKSTVAVLRNMNQELAQLESELSRSFEGHPDAETYRSLPGLGVILSARVLAEFGDDPNRFDHPKSRKAYAGTAPITRASGTRQVVLARVARNRRLADACYLWAFASLNRSAGARRYYDTLRGRGQTHHQALRAMANRWVGILHGCLRYHSAYREEVAWPASLEVAA

SEQ ID NO: 15273 - protein, 346 aa, unidentified
  source 1..346: note = protein_3a383e8
  REGION 1..108: note = RuvC_domain
  SITE 6: note = RuvC_P2
  SITE 46: note = RuvC_P3
  SITE 48: note = RuvC_P4
  SITE 51: note = RuvC_P5
  REGION 213..300: note = Tnp_domain
  SITE 221: note = Tnp_P1
  SITE 252: note = Tnp_P2
  SITE 260: note = Tnp_P3
  SITE 261: note = Tnp_P4
  SITE 273: note = Tnp_P5
MLWAIDLNHGAAALLIGLLVAREQPLAYLTGLAIHRASASYRSEGKTDARDAFVIADQARLRRDISLLRPGDEIAVDLRILTTRRVDVVFDRTRQINRLRAQLLEISPALERALTLTNKGPLVLLTAYQTPAAIRRAGVARLDAWLRKQGARNATALAQTAVEAARSQSVVLPGERLAAQMVARLAKGVIALGDEIAELDELIEARFRDHRHAEVIISLPGIGPRLGAEFLAATGGDMTAFTGADQLAGFAGLAPQPRDSGRIHGNLRRPKRYHRGLLRSMYLSAQISITTSPASRTFYQRKRAEGKSHKQAVLALARRRISVLWAMLRDHTTYHDLPPIPITTAA

SEQ ID NO: 15274 - protein, 343 aa, unidentified
  source 1..343: note = protein_c636525
  REGION 6..147: note = RuvC_domain
  SITE 9: note = RuvC_P1
  SITE 52: note = RuvC_P2
  SITE 87: note = RuvC_P3
  SITE 89: note = RuvC_P4
  SITE 92: note = RuvC_P5
  REGION 211..296: note = Tnp_domain
  SITE 219: note = Tnp_P1
  SITE 249: note = Tnp_P2
  SITE 257: note = Tnp_P3
  SITE 258: note = Tnp_P4
  SITE 270: note = Tnp_P5
MQIHSVGIDLGKTTFHLVALGVAGKVIVRKKFNRKQLLVYTANVPASLIGLEACSGAHFLGRALRKQGHDVRLIPAQFVKPFVKSNKNDFIDAEAIAEAVERKNMRFVPIKTDDQLDLQGIHRVRDRLICRRTAVINQLRAFLLERGMVFAHRPANLKAAMADILENAEADLTPQMRSLINMLWDEWKLVEEQIKKLDLELERISAADAGCTRIRQIPGIGPVVATAIVAAIGNGAAFHKGRDFAAWLGIVPRQYSTGGKAKLLGISKRGNIYLRKILIHGAPAAVLRIKRDRAPIGPWLDALDARAPKNVVVVAMANKLARIAWAVLSSGEDYRPMGNTVAA

SEQ ID NO: 15275 - protein, 343 aa, unidentified
  source 1..343: note = protein_518c8dd
  REGION 7..149: note = RuvC_domain
  SITE 10: note = RuvC_P1
  SITE 53: note = RuvC_P2
  SITE 88: note = RuvC_P3
  SITE 90: note = RuvC_P4
  SITE 93: note = RuvC_P5
  REGION 211..297: note = Tnp_domain
  SITE 219: note = Tnp_P1
  SITE 249: note = Tnp_P2
  SITE 257: note = Tnp_P3
  SITE 258: note = Tnp_P4
  SITE 270: note = Tnp_P5
MSEVTVVGVDLAKSVFQVHGAAADGTVLFRKKLTRKQFPRFMAEHPKCVVAMEACGSAYFWAREMESFGHEAKLIAPQYVKPFVRRQKNDAADAEAIAEAAVRATTRFVPVKSQGQQARSALFRTRELIVNQRTQTVNAFRAHLAEFGVVVPKGVQNVKRLVSYIGEEGHGLPAEIVEIGQQLTAQIEQLTQRIKGLEKSIREAADASETTRRLRTIPGVGPITAVAIDSFAPEMASFANGRNFSAWLGLVPLQRSTGGKQILGRTSKMGQKDIRRLLIIGAMGRIGSKHRHPREVEPWLQDKLDRKPRMVAAIALANKMARQIWAMLTKGEDYRNPIAGVAA

SEQ ID NO: 15276 - protein, 421 aa, unidentified
  source 1..421: note = protein_7ab7214
  REGION 24..178: note = RuvC_domain
  SITE 27: note = RuvC_P1
  SITE 75: note = RuvC_P2
  SITE 115: note = RuvC_P3
  SITE 117: note = RuvC_P4
  SITE 120: note = RuvC_P5
  REGION 285..371: note = Tnp_domain
  SITE 293: note = Tnp_P1
  SITE 323: note = Tnp_P2
  SITE 331: note = Tnp_P3
  SITE 332: note = Tnp_P4
  SITE 344: note = Tnp_P5
MATVTFDGRIVIVMDENTGFDIWCGLDVGKQSHHACALDTAGRRVLDKPLPQDQTKLEELFTRLEGHGRVLVIVDQPNTIGALPIAVAGSMDIQVAYLPGLAMRRAADLYPGSAKTDARDAFIIADTARTIPHTLRRIDADEETLAELKVLVGFDEDLAAEATRLSNRIRGLLTQIHPALERVVGPRLTTKQGLAVIEQLGGPQGMAAASKSRLLKVITKAYPHRAQDFADAITAALAEQTVTVADTAAAEQVLPQLAASLRQTLDQRHALAAQIEQVVDAHPLAEVLTSMPGVGVRTAARILLDVGDASQFPTAGHLAAYAGLAPVTRRSGTSIRGEFPARSGNKHLKRALFLSAFAALRADPTSKAYYDRKRAQGKKHNAALICLSRRRCDVLFAMLRNREPYRTPAPNPEPSPTPLAA

SEQ ID NO: 15277 - protein, 345 aa, unidentified
  source 1..345: note = protein_4cca21c
  REGION 6..147: note = RuvC_domain
  SITE 9: note = RuvC_P1
  SITE 52: note = RuvC_P2
  SITE 87: note = RuvC_P3
  SITE 89: note = RuvC_P4
  SITE 92: note = RuvC_P5
  REGION 210..298: note = Tnp_domain
  SITE 218: note = Tnp_P1
  SITE 248: note = Tnp_P2
  SITE 256: note = Tnp_P3
  SITE 257: note = Tnp_P4
  SITE 269: note = Tnp_P5
MKLTPVGIDIAKMVFQVHYVDEETGEIVNKPVKRAVFLEHFANRSSCLVGMEACGGAHHWARKLLKMGHQVKLMPGEFVKAFNIRNKNDAADARAIWLAVQQPSKAVAVKTEMQQAMLALHRMREQLVKFRTMQINGLRGLLTEYGEVTAKGRASLDKAIPEILARVAERLPAVLIDTLREQWNGLTNLDEQIAAIERRMREWKKDDRAVKAISEIPGVGLLTATAAVAMMGDAKAFRSGREFAAWAGLVPKQTGSGGKVNLHGISKRGDTYLRTLLIHGARSVLINAKAPGPWVEQMKQRRHTNVVTVALANRIARTIWAVLAHDRPYQKGYVSVKPALAVTTR

SEQ ID NO: 15278 - protein, 346 aa, unidentified
  source 1..346: note = protein_dbd7bdc
  REGION 5..152: note = RuvC_domain
  SITE 8: note = RuvC_P1
  SITE 55: note = RuvC_P2
  SITE 92: note = RuvC_P3
  SITE 94: note = RuvC_P4
  SITE 97: note = RuvC_P5
  REGION 212..300: note = Tnp_domain
  SITE 220: note = Tnp_P1
  SITE 250: note = Tnp_P2
  SITE 258: note = Tnp_P3
  SITE 259: note = Tnp_P4
  SITE 271: note = Tnp_P5
MEHHVGIDVSLQLSSLCVLNADGKVVREAKVASEPEALVGFLRGLGLPIARVGLEAGPLSQWLYDGLREAGFEAVLLETRHVKAALSAMAVKTDRRDARGIAQLLRMGWYRPVHRKSVPSQEVRALLAARKQLQTKAMDLEQTLRGLLRGFGLKVGDVSRGKLPARVRELAAGHAMLERIVEPMLVACQAIWCEFNKLHREVLAVVKADEVCRRLMSVPGVGAVVSLTYRAAVDDPGRFKKSKSVGAFFGFTPRRYQSGETDVTGGITKVGDAAVRTALHDAANVLLSRVTKFSALKRWAMDVAKRRGMRRAKVALARKLATVLHRIWVDGTEFVWGKDPAAAAAA

SEQ ID NO: 15279 - protein, 268 aa, unidentified
  source 1..268: note = protein_97c1045
  REGION 3..78: note = RuvC_domain
  SITE 17: note = RuvC_P3
  SITE 19: note = RuvC_P4
  SITE 22: note = RuvC_P5
  REGION 141..230: note = Tnp_domain
  SITE 149: note = Tnp_P1
  SITE 179: note = Tnp_P2
  SITE 187: note = Tnp_P3
  SITE 188: note = Tnp_P4
  SITE 200: note = Tnp_P5
MKLIAPQFVIPYRQGNKNDYNDALAIAEAAQRPNMRFVQPKPVEQQDVQMLHRMRERLNKQSTALVNQVRGMLAEYGIVIAKSKAAFRRAFPDILSDENNELTVKGRYIFTQLHEEFIDIEKRLKSCDAQILEERNTNPVCQRVETSPGIGPITSTAFYAAVGEGKDFSNGRHFSAWCGLVPKQHSSGGKDNLLGISKRGNAYLRTLFIHGARAVLQRCGGKQDRLSRWAYALAERKGFNKACVAVANKLARMTWAIAAREDEYRTFA

SEQ ID NO: 15280 - protein, 344 aa, unidentified
  source 1..344: note = protein_05113fc
  REGION 6..147: note = RuvC_domain
  SITE 9: note = RuvC_P1
  SITE 52: note = RuvC_P2
  SITE 87: note = RuvC_P3
  SITE 89: note = RuvC_P4
  SITE 92: note = RuvC_P5
  REGION 211..298: note = Tnp_domain
  SITE 219: note = Tnp_P1
  SITE 249: note = Tnp_P2
  SITE 257: note = Tnp_P3
  SITE 258: note = Tnp_P4
  SITE 270: note = Tnp_P5
MHIASIGIDLGKTTFHLVALGEHSKVLVRKKFSRTQVLAYTANLPCSLIGLEACSGAHFLGAALRQQGHEVRLIPAQFVKPYRKSNKNDFLDAEAIAEAVTKQNMRFVPIKTQEQLDVQAMHRVRDRLVQRRTALINEIRGFLLERGITFPAQPTHLRKNLPSVVEDAEQNLTPRLRWLLDRLWQEWKQTEIDIETVTDEIERISNQDERCQRLRQIPGFGPLVSTAMVAAIGNGAAFRRGRDFAAWIGVVPRQYSTGGKQKLLGMSKRGNIYLRRMLIHGARAVLFRIKYDTAGLGQWVHRLSQRAPRNKVVVAIANKLARIAWAVLSSGKDYRHQPLQRATA

SEQ ID NO: 15281 - protein, 341 aa, unidentified
  source 1..341: note = protein_ac11e32
  REGION 7..149: note = RuvC_domain
  SITE 10: note = RuvC_P1
  SITE 53: note = RuvC_P2
  SITE 88: note = RuvC_P3
  SITE 90: note = RuvC_P4
  SITE 93: note = RuvC_P5
  REGION 211..292: note = Tnp_domain
  SITE 219: note = Tnp_P1
  SITE 249: note = Tnp_P2
  SITE 257: note = Tnp_P3
  SITE 258: note = Tnp_P4
  SITE 270: note = Tnp_P5
MGEVSTIGLDLAKSVFQAHGADASGAVLFRKKLRRHQVLAFFSSQPPCTVAMEACASSHHWAREISRLGHAVRLIPPAYVKPFVKRQKNDAADAEAICEAAQRPTMRFVAPKSDGAQASALVFRARDLLVKQRTQIINALRGHLAEFGIVVAKGPAHVSKLAQAVENSDEPVPELARPILQMLIETLHRLDEQIARLDREVAQRAKEDETARRLMTIPGVGPVTAVALAALAPPAETFKRGRDFAAWVGLTPLQHSTGGKQKLGATSKMGERTLRRLLIIGANSVLLGAARNGVPAGSWLSRMLARKPPMLVRVALANKMARIVWALLARGEVYRAPAVGA

SEQ ID NO: 15282 - protein, 403 aa, unidentified
  source 1..403: note = protein_ed4eeed
  REGION 14..171: note = RuvC_domain
  SITE 17: note = RuvC_P1
  SITE 69: note = RuvC_P2
  SITE 109: note = RuvC_P3
  SITE 111: note = RuvC_P4
  SITE 114: note = RuvC_P5
  REGION 277..364: note = Tnp_domain
  SITE 285: note = Tnp_P1
  SITE 316: note = Tnp_P2
  SITE 324: note = Tnp_P3
  SITE 325: note = Tnp_P4
  SITE 337: note = Tnp_P5
MSKVLDGALLSLFVGIDISKEKFDACCIGSNGDKLFRMSAAMSREGFEALLMQVSSIAKNKESILIGMESTACYHINLFSFLTSKGFTVIIINPLLISNFMKLQLRKTKTDKKDALVIAQFLLTKKDSLFQNVLSPDSADMRDLARQRESLIDQMTAIKSDTKRLLTITFPELEHIAGIFTKSMLRLLCHYPSAKAIHKAKRSKIASILIPGSYGKQTEETVDAIIKAAATSIGTSSPAKEVLIKQKASILTQLEDHLREITDMLIEQCQAQMKDNIDILTSIRGIGEKFATNFLVELGGDPRVFPSHRQIIAMAGLDPSVYQSGQYVGLSKISKRGNRHLRRIIWLMTVKVIQFEGYFSSYFERRIKNGLIYKKAVLATAHKLIRVIFAMLTNKTLFNAKVS

SEQ ID NO: 15283 - protein, 311 aa, unidentified
  source 1..311: note = protein_82d6f00
  REGION 5..151: note = RuvC_domain
  SITE 8: note = RuvC_P1
  SITE 52: note = RuvC_P2
  SITE 92: note = RuvC_P3
  SITE 94: note = RuvC_P4
  SITE 97: note = RuvC_P5
  REGION 188..272: note = Tnp_domain
  SITE 196: note = Tnp_P1
  SITE 225: note = Tnp_P2
  SITE 233: note = Tnp_P3
  SITE 234: note = Tnp_P4
  SITE 245: note = Tnp_P5
MQQTIGIDIAKDTLDAYRQSDGQRLQVRNDRDGHRVLLRWIGRNAELLVVFEATGVYHRDLELALGARGLPFAKVNPRQARRFAQATGHLAKTDRVDAAMLARMGAALALAPQAPRRQSFHDLRELLAARRALIKDRTAAKIRRSTARLALIRRQLDARLKRVDDDLERIDAELTALANMDAGLAERLAILRSIPGVGDVTAIALIIDMPELGELEGKQAASLAGLAPVARQLGKWQGKERIQGGRATLRQALYFPAIAAARFNADLKKKYEELIAAGKEKKVALTAIMRKIIVMANALIRDGRRWAAIRA

SEQ ID NO: 15284 - protein, 297 aa, unidentified
  source 1..297: note = protein_68ae771
  REGION 2..114: note = RuvC_domain
  SITE 13: note = RuvC_P2
  SITE 54: note = RuvC_P3
  SITE 56: note = RuvC_P4
  SITE 59: note = RuvC_P5
  REGION 177..263: note = Tnp_domain
  SITE 185: note = Tnp_P1
  SITE 215: note = Tnp_P2
  SITE 223: note = Tnp_P3
  SITE 224: note = Tnp_P4
  SITE 235: note = Tnp_P5
MGRAVHEAHLGHRVRRGLGYLLAQQLVDAGEQVLDVPATLASRVRVLGTGKSDKNDPNDARSVAVAALRSPGLRSVQAANHADVLRLLARRNEDIGNLRTKLVCRLHAQIASLSAGGIAKELNASDADGLLEVFEPSSPAEATRHQLALELLEDVRRLDAQLKESHKRIRVAVRASGTSLTDVYGIGPVLACALIGYTGDVSRFTSRDQFAAYNGTAPVEVSSGGRVTHRLSRRGNRKLNHAVHMVAICQIRQTNSEGRLYFEKKVAEGKTKRDAIRSLKRQISNTVYRHLVLDAQR

SEQ ID NO: 15285 - protein, 356 aa, unidentified
  source 1..356: note = protein_ae8ec79
  REGION 9..154: note = RuvC_domain
  SITE 12: note = RuvC_P1
  SITE 58: note = RuvC_P2
  SITE 94: note = RuvC_P3
  SITE 96: note = RuvC_P4
  SITE 99: note = RuvC_P5
  REGION 219..305: note = Tnp_domain
  SITE 227: note = Tnp_P1
  SITE 257: note = Tnp_P2
  SITE 265: note = Tnp_P3
  SITE 266: note = Tnp_P4
  SITE 278: note = Tnp_P5
MTAPYDYHIGVDYHKSYSHLIVQDSCGKTLRSGRVKNDRQSLGSFLERYRQNSHAVMEATRNWMVMYDWLDDICDDVVLAHPLKVKAIADAKIKTDKIDATVLAHLLRADLVPEAWAPGDRVRELRLALRERMFYVRLRTMTKNRVVTVFDRYPEQTAQLKKPTDLFGKTGRQQLAAIDVSEIDRVQIDRGLEFIGDINERIKQSEATIRAMTKTNGKVKLLKTIPGIGEFFARLIDAEIDDISRFRNPKKLAAYAGLVPSTYSSGGKTYHGKIIKQGNKWLRWAFVEAVQPAIATDPQLRAQYEHLKFRGVNKARVAIARKLLTITFQILRDQRPYERRGTNSKEGPSSTISRLS

SEQ ID NO: 15286 - protein, 391 aa, unidentified
  source 1..391: note = protein_b27c434
  REGION 4..163: note = RuvC_domain
  SITE 7: note = RuvC_P1
  SITE 60: note = RuvC_P2
  SITE 101: note = RuvC_P3
  SITE 103: note = RuvC_P4
  SITE 106: note = RuvC_P5
  REGION 266..353: note = Tnp_domain
  SITE 274: note = Tnp_P1
  SITE 304: note = Tnp_P2
  SITE 312: note = Tnp_P3
  SITE 313: note = Tnp_P4
  SITE 326: note = Tnp_P5
MIYVGIDVAKDKHDCFITNSDGEVLFKAFSISNNLDGFTELYQKIESVMDDVTKIKVGLEATGHYSYNLLGYLIDKGLPAYVINPLHTNLYRKSLSLRQTKTDKVDARTIASMLMSDVNLKSYSDTSYHNEGLKSLTRYRFDKVKERAKLKTSISRLVCILFPELEKLVPQLHMASVYAMLSEFPGAKQVASAHLTRLTNLLSESSKGHYGKETAITFRDAARASIGSYMPAKSLELKHTIKLIQELDSEIDEIENEIKIIMDKINSPILSIPGISYRMGAMIIAEIGDFSRFDSPDKILAYAGFSPSTYQSGQLNGAYAHMEKRGSRYLRYALYNATKYVCHWDPTFTAYLAKKRAEGKHYNVAISHAAKKLVRVIYHLEKTKQQYITAA

SEQ ID NO: 15287 - protein, 421 aa, unidentified
  source 1..421: note = protein_3a1dcf2
  REGION 15..176: note = RuvC_domain
  SITE 18: note = RuvC_P1
  SITE 73: note = RuvC_P2
  SITE 113: note = RuvC_P3
  SITE 115: note = RuvC_P4
  SITE 118: note = RuvC_P5
  REGION 287..373: note = Tnp_domain
  SITE 295: note = Tnp_P1
  SITE 326: note = Tnp_P2
  SITE 334: note = Tnp_P3
  SITE 335: note = Tnp_P4
MLGELASVNTVRLLVGDDWAEDHHDIEIQAADGRVLAKARVPEGAAGMARLHEMVSAAVDRIEDADAVEVLVGIETDRGLWVQALIAAGYVVYGINPLQAARYRERRSVSGAKSDSADAHVLADMVRTDAHQLRPMSGDSAQVEAIKVVTRAHKTLIWERARTVQRLRYALRDYFPAAIEAFEILGGLDEPDALELLTKAPDPATAARLTTAQITAALKHARRRKVADKAAAIQAILRAPQLTQPAPVVSAYAATTRAMVAILGTLNQQIDVLEGQVQAHFRAHPDAEIVLSQPGLGAILGARVLAEFGDDPHRYASAKARKNYAGTSPITIASGKKRSVITRYVHNDRLVDALGAQAFAALSRSPGARAYYDKLRARDVGHRAALRQLGNRLVGILHGCLKTRTTYDETTAWGHHLTAAA

SEQ ID NO: 15288 - protein, 311 aa, unidentified
  source 1..311: note = protein_0d206cd
  REGION 5..148: note = RuvC_domain
  SITE 8: note = RuvC_P1
  SITE 52: note = RuvC_P2
  SITE 92: note = RuvC_P3
  SITE 94: note = RuvC_P4
  SITE 97: note = RuvC_P5
  REGION 188..272: note = Tnp_domain
  SITE 196: note = Tnp_P1
  SITE 225: note = Tnp_P2
  SITE 233: note = Tnp_P3
  SITE 234: note = Tnp_P4
  SITE 245: note = Tnp_P5
MNDTIGVDISKDALDTYWLSKRKHKQFSNNKTGLRALICWVRQAKVSLVVFEATGVYHRLLETSLAAHDLPFARVNPRQARRFAEGTGTLAKTDRVDAAMLARMGSLLELKADKPKTETLHNLKGMETARQALIKDRTAARARLSTATYPLLRKQATLRLRQIERDITQIDAAIEAIIAADKALSQKADILISIPGIAKITAYAMLTEMPELGTLSGKQAASLAGLAPISRQSGKWQGKERIQGGRACLRRAIYLPAVVATRFNPDMKAKYHELIATGKCKKLAITAVMRKLVVMANALLRDGRKWTETRT

SEQ ID NO: 15289 - protein, 343 aa, unidentified
  source 1..343: note = protein_5dd235d
  REGION 7..149: note = RuvC_domain
  SITE 10: note = RuvC_P1
  SITE 53: note = RuvC_P2
  SITE 88: note = RuvC_P3
  SITE 90: note = RuvC_P4
  SITE 93: note = RuvC_P5
  REGION 212..298: note = Tnp_domain
  SITE 220: note = Tnp_P1
  SITE 250: note = Tnp_P2
  SITE 258: note = Tnp_P3
  SITE 259: note = Tnp_P4
  SITE 271: note = Tnp_P5
MGEVSTIGLDIAKSVFQVHGVDATGAVVMRKRLGRAKVLAFFAGLSPCLVGLEACPSAHYWSRELQALGHTVKLMPPSYVKAYLKRSKNDANDAAAICEAVTRPSMRFVSIKTEEQQTGLMLHRSRQLLVRQRTMFSNAIRGHMAELGIISAKGRNGTAELLQIIGDVADDRIPPVARFCLDLLARQYLTLNAEVSSIDKRIHAWHRSCEESRRLEEIPGIGPIVATALVAEIGDWKAFRSGRSLAAWIGLVPKQHSTGGKERLGSITKQGNRYLRWLLVTGAMAVIRYARQRGTKRAWLIRIMDRRPAKVAAVALANKIARMAWAIMVRTERYREPKLLLAA

SEQ ID NO: 15290 - protein, 342 aa, unidentified
  source 1..342: note = protein_85e3d48
  REGION 5..152: note = RuvC_domain
  SITE 8: note = RuvC_P1
  SITE 55: note = RuvC_P2
  SITE 92: note = RuvC_P3
  SITE 94: note = RuvC_P4
  SITE 97: note = RuvC_P5
  REGION 212..300: note = Tnp_domain
  SITE 220: note = Tnp_P1
  SITE 250: note = Tnp_P2
  SITE 258: note = Tnp_P3
  SITE 259: note = Tnp_P4
  SITE 271: note = Tnp_P5
MEHFAGLDVSVKQTSVCIVDDTGGIVREVKVASEPEALLAVLKNGVYHFKRIGLEAGPLSQWLFSALAEAGLPVICVETRHMRVVLQAQINKTDRNDARGIARMMRVGLYRPVHVKTLRSQKLRMLLTHRKLLQSKAIAIENDLRGTLRNFGLKVGMVGKLKFEARIKELVEKLPDLAVLVEPLLVVRRVLRQQLAILHRRLLAIVREDEVCRRLMTVPGVGPVVALTYRATVDVPARFRNSKAVGAVFGLTPSKYQSGEINRSGAISKCGDEMMRVMLYEAAQILLVRSTKWSWLKAWAMKIARHRGVKKAIVALARRLAVIMHRIWVDGTEFRWTREVAA

SEQ ID NO: 15291 - protein, 345 aa, unidentified
  source 1..345: note = protein_1e0d369
  REGION 6..147: note = RuvC_domain
  SITE 9: note = RuvC_P1
  SITE 53: note = RuvC_P2
  SITE 86: note = RuvC_P3
  SITE 88: note = RuvC_P4
  SITE 91: note = RuvC_P5
  REGION 210..300: note = Tnp_domain
  SITE 218: note = Tnp_P1
  SITE 250: note = Tnp_P2
  SITE 258: note = Tnp_P3
  SITE 259: note = Tnp_P4
  SITE 271: note = Tnp_P5
MNISIAGVDLAKKVIQVCVVKRNTVLSNKEMTPDQFKEWLAKSKPMTVVFEACSTSNYWKQTAQQYGHDAKLISAKLVSAIRQKQKTDANDALAIVQASQLADIQFINGKSVAQQELQSLLRMRELAVKQKIALLNQVRALLAEFNINGSPAKGGLNGVVQRTLEDAENGFSMPFRDALHATWQACLLTINRIKAYDECLAQAVKQHPDCQRLMALEGVSVINAINLYILLGCSDDLHFKNGREASACVGVTPIQHSTGGNAKLGSIGHYVKQGILRSQLISGAMAVVGALSKRLPKTTKEIWLKQLIERRGKRCAAVALANKTIRTAFAMLSKGTEYQAQAITA

SEQ ID NO: 15292 - protein, 425 aa, unidentified
  source 1..425: note = protein_c64510a
  REGION 4..157: note = RuvC_domain
  SITE 7: note = RuvC_P1
  SITE 59: note = RuvC_P2
  SITE 94: note = RuvC_P3
  SITE 96: note = RuvC_P4
  SITE 99: note = RuvC_P5
  REGION 284..371: note = Tnp_domain
  SITE 292: note = Tnp_P1
  SITE 323: note = Tnp_P2
  SITE 331: note = Tnp_P3
  SITE 332: note = Tnp_P4
  SITE 344: note = Tnp_P5
MLGVGIDWSEEFHLVALGRPGDGVIEVVRVEHTPKAVDALVGTIAGLEPDPGEVRVVIETRHGLLVERLVDAGFVVVPVNPDLVARRRGPAKKKDDAEDARIACLIALDRHERLRPLIPHGEIAGELRAIARDDERAARDERRLSNRLRQDLISTFPAALEIGGDDLGALTFLRLLERWPTHNALAGAPRKELVEFARSCRHGWPERLADEVEAALGDEHFRPKDYLVRAKADTIRLAATQLLLIGQQRRSWERRMGELLLGAPRRGRDHQPKGDGLGKGFPGGEIYLSFPGLGDRLAARIAGEIGDHPEQFDEPNSLQCYAGKAPVTRRSGKSELVVACRLAHNRYLGDAVQQWAFCSLRRSGWARQFYDAQRARGKGHQAALRALGNRWLEILWHCVRHGVLYDEAVHVANRNRAFGMAGEAA

SEQ ID NO: 15293 - protein, 399 aa, unidentified
  source 1..399: note = protein_8047c8f
  REGION 10..164: note = RuvC_domain
  SITE 13: note = RuvC_P1
  SITE 61: note = RuvC_P2
  SITE 101: note = RuvC_P3
  SITE 103: note = RuvC_P4
  SITE 106: note = RuvC_P5
  REGION 271..358: note = Tnp_domain
  SITE 279: note = Tnp_P1
  SITE 310: note = Tnp_P2
  SITE 318: note = Tnp_P3
  SITE 319: note = Tnp_P4
  SITE 331: note = Tnp_P5
MSPDDIDVWVGLDVGKSAHHACALDRDGNTLYDRPLKQDENAIRTMLERLCEHGRVLLVVDQPNTIGSLPLTVARSMGVAAAYLPGTAMRRTAQLPPGTAKTDQRDAHVIAWAALRLPESLRDAGPDDETLAALKLLAGHDEDLAHESTRHINRLRSLLLQTHPAFERALKGDRITRDATLALLEHYGGPAGMEKAGIDQVRAWAKDNKLRAGTIIDDMFKAIGQQTVTVSGTLTAETIIPSIAHDIKTIKDRRRDLAAQVERLLEDHPLLRVLTSMPGVGVRTASNILLGIGGDVTRFKSAAHLAAYAGIAPVTSQSGTSIKGERPARGGNKRLKNALWQSAFVASTKHPSSIAYYKRKREQGKHHNAAVICLARRRCDVIYSMLKNGTLYQEPTLAA

SEQ ID NO: 15294 - protein, 431 aa, unidentified
  source 1..431: note = protein_e17b547
  REGION 6..159: note = RuvC_domain
  SITE 9: note = RuvC_P1
  SITE 57: note = RuvC_P2
  SITE 98: note = RuvC_P3
  SITE 100: note = RuvC_P4
  SITE 103: note = RuvC_P5
  REGION 221..306: note = Tnp_domain
  SITE 229: note = Tnp_P1
  SITE 259: note = Tnp_P2
  SITE 267: note = Tnp_P3
  SITE 268: note = Tnp_P4
  SITE 279: note = Tnp_P5
MDRVVIGVDPHKLSVTIEARDHREILRAVGQFATDGRSYRQLLEVARQWPERIWAVEGANGIGRPLTQRLLASGERVLDVPAKLAARARVFDTGQGRKTDATDAHAIVMVALRDKGLREVSTDPELMVLRMLCDRRDELSRARAQALNRMHRLFLGLLPGGAPVKKSVSQYQALLATVRPRDLAGKTCRRMAAEELEDLHRLDAKLKGMKAELKAAVLATGSHLMDIHGIGPAGAARILADVGDISRFPDRNHFASWTGTAPIDASSGQHLRHRLSRAGNRRLNHVLYMAGIVQLRNDTAGRAYYRRKRAAGKTSMEAMRCLRRRLSDAVYRQLAADAPGQEEASPGGHPGASLISSAAGLSPDTGTSDKPLPGPAPQTLPPPRPAPQPMAPAAAATRRRARGVNVERPTGRTTLTPTSAAIRSTALGPCP

SEQ ID NO: 15295 - protein, 320 aa, unidentified
  source 1..320: note = protein_e486d92
  REGION 4..153: note = RuvC_domain
  SITE 7: note = RuvC_P1
  SITE 52: note = RuvC_P2
  SITE 92: note = RuvC_P3
  SITE 94: note = RuvC_P4
  SITE 97: note = RuvC_P5
  REGION 191..278: note = Tnp_domain
  SITE 199: note = Tnp_P1
  SITE 229: note = Tnp_P2
  SITE 237: note = Tnp_P3
  SITE 238: note = Tnp_P4
  SITE 251: note = Tnp_P5
MRYIGIDVAKDTFDVAFPSSNSNYKVVQFVNNEEGVKKFIKKLKQDDRSVLEATGSYSTLLTKRIMESGFEVSVVNPLQTKYFSKMTLRRTKTDASDAEMIAEYGLKMSPEPEKPTPDYIDDMRQRRAVLSQLKETVVRFKNQLHAMKARVRPDKTSIKFIEETIANLQKQIDELEKNMQEVVKEKASKSYESLVSIPGIGKLSAIELIAITSNFENFTNYKQLSAYVGLCPRISESGTSVKGKSSLSKMGMSSTRQLLYMCSMAAIKCNKSCKEMFKRLIENGKHRMVALMAVANKLVKIAFTIVKKGELYDDKKVCFS

SEQ ID NO: 15296 - protein, 348 aa, unidentified
  source 1..348: note = protein_24ad066
  REGION 6..147: note = RuvC_domain
  SITE 9: note = RuvC_P1
  SITE 52: note = RuvC_P2
  SITE 87: note = RuvC_P3
  SITE 89: note = RuvC_P4
  SITE 92: note = RuvC_P5
  REGION 209..295: note = Tnp_domain
  SITE 217: note = Tnp_P1
  SITE 246: note = Tnp_P2
  SITE 254: note = Tnp_P3
  SITE 255: note = Tnp_P4
  SITE 267: note = Tnp_P5
MNLKRIGLDTSKAVFTLHGVDQDEQVVLRRNVRRAELESFFAKLAPTLVALEACGGSHHWGRRLVALGHTVHLIPPQYVKPFVRRGKNDRNDAEAICDAASRPAMPTVPVKAAEQQADAILLSVRELLVRQRTQLVNAVRGHAAEFGIVAAKKISHLPELLAAVADDRAVPDAAKVMLAFIGAQVAQLDDQIAELDRRMKQQHKANPVSQMLAKVPGIGPIGALSLALTIDPGRFQSGRHFAAWLGLTPKEHSTGGRPRLGGISRAGNERLRQLLVVGAMAVIRFAKPGSKSASAWLLALLERKPRKLAAVALANKMARIAWAMMATGEAYRGVRPTAMQADGAAAIA

SEQ ID NO: 15297 - protein, 393 aa, unidentified
  source 1..393: note = protein_0107d72
  REGION 4..163: note = RuvC_domain
  SITE 7: note = RuvC_P1
  SITE 61: note = RuvC_P2
  SITE 102: note = RuvC_P3
  SITE 104: note = RuvC_P4
  SITE 107: note = RuvC_P5
  REGION 267..353: note = Tnp_domain
  SITE 275: note = Tnp_P1
  SITE 305: note = Tnp_P2
  SITE 313: note = Tnp_P3
  SITE 314: note = Tnp_P4
  SITE 326: note = Tnp_P5
MLFVGIDVAKSHHDVAILDHDGTIILRHLRIQNTRLGFELLITKLNELTNQLNQPVRIAMESTGHYSTNIMMFMQSHGYATFLYNPFLIKEFVKSSSLRKTKTDKADSLTIAKKLASDVTPEQFAISHEIQELKTLSRYRSRLTTRRADLKTQYIRLLDISFPELASFLGNHNLHTQYIYDLLIRYSSPHQIAHTRIDVLTKMLHGQGNHLESAKQLKNLARQSIGLKSTANELELKQTLTMIKMFSTQIDTVDQQINQLMDSLEDARIMTSISGISNRIGSVILAEINNIRNFNSPEQLLAFAGLEPSIYQSGQLETTGKMVKRGSTALRWALYQAAEYASRWSPTIRAYRQKKLKEGKHFYVVMSHVAKKLVRIIYYLLKHHEYFDEIKLS

SEQ ID NO: 15298 - protein, 334 aa, unidentified
  source 1..334: note = protein_37d6fc8
  REGION 7..149: note = RuvC_domain
  SITE 10: note = RuvC_P1
  SITE 53: note = RuvC_P2
  SITE 88: note = RuvC_P3
  SITE 90: note = RuvC_P4
  SITE 93: note = RuvC_P5
  REGION 209..293: note = Tnp_domain
  SITE 217: note = Tnp_P1
  SITE 247: note = Tnp_P2
  SITE 255: note = Tnp_P3
  SITE 256: note = Tnp_P4
  SITE 268: note = Tnp_P5
MKEIATIGLDLAKNVFQVHGVDAKGIVLVRRQVRRAQVLLFFSRLPPCLVGMEACAGAHYWSRELAKLGHDVRLIPPSYVKPFVKRGKTDAADAEAICEAVTRPNMRFVPVKTERQQAVLMQHRTRDFLVRQLTQLVNAIRAHLGEFGIVVPKGVHNMGRLIAEAETADLPPEARMPLDLLAGQFRDTKQRIDVMTGQLKADAEKDETACRLQTVPGIGPITASVLAAMLPDVSGFRSARDLPAWLGLTPKPHSSGGKERLGSISKMGNRYIRRLLYLGAMGVISARKRSDPGTDWLGRLIATKPLKVAAIALANRMARAIWAMLKTGEVWRPT

SEQ ID NO: 15299 - protein, 287 aa, unidentified
  source 1..287: note = protein_5a4b032
  REGION 6..97: note = RuvC_domain
  SITE 37: note = RuvC_P3
  SITE 39: note = RuvC_P4
  SITE 42: note = RuvC_P5
  REGION 196..262: note = Tnp_domain
  SITE 204: note = Tnp_P1
  SITE 235: note = Tnp_P2
  SITE 243: note = Tnp_P3
  SITE 244: note = Tnp_P4
  SITE 256: note = Tnp_P5
MYGIHWEILDSYFNYLENDIEVCLTHPKYVKAIKGKKTDKKDSKWIADLYKFDLVRCSFIPPKDFRQLREIARYRFKLVCMKSSEKNRIQNCMTVSNVGIASVLSDPFGKTATEIMSYLLTHTSDSIDEKAVRRLIKKGAKAKSDEIIEAIRGYNIESDQAKKLELARSHLEYLDGMITQSEVELYVRMKPYYKFVELVSTMPGMTELSSTIVLAETGVDMSIFDDAKHLCSWCGLSPTNNESAGKKKSVRISKAGDYLKAYDGTMCACSNQEQKKQTYFCNQIWSS

SEQ ID NO: 15300 - protein, 345 aa, unidentified
  source 1..345: note = protein_e0621ad
  REGION 6..149: note = RuvC_domain
  SITE 9: note = RuvC_P1
  SITE 54: note = RuvC_P2
  SITE 89: note = RuvC_P3
  SITE 91: note = RuvC_P4
  SITE 94: note = RuvC_P5
  REGION 213..300: note = Tnp_domain
  SITE 221: note = Tnp_P1
  SITE 251: note = Tnp_P2
  SITE 259: note = Tnp_P3
  SITE 260: note = Tnp_P4
  SITE 272: note = Tnp_P5
MKLSRVGVDLAKNVYQLHGVDRHGKAVWKRRLRRSRWLQALIDKVEPGCEIGMEACTGAHHWARELQARGYTVRLIAPQFVKPFVKSNKNDANDAEAICEAMSRPHMRFVTVKTVEQQDIQATHRVREELKAHRNAKANQIRGLIAEYGLVAPKGILSLRRVIPEWLEDAENGLTDNFRYLLHGLWNDLLTLEDRLKELDKKIEKLARRNEVTKRLQQLRGVGPLVATALVATVGDGKQYAKGRQMASALGLTPRQNSSDDKYRLFGISKRGDVYLRTQMIHGARAVVSQARHRDDPLSRWVTDIAKRRHPNVAAVALANKTARMAWAMLRNDTNYESSLAVGRA

SEQ ID NO: 15301 - protein, 283 aa, unidentified
  source 1..283: note = protein_d3c4cae
  REGION 13..155: note = RuvC_domain
  SITE 16: note = RuvC_P1
  SITE 59: note = RuvC_P2
  SITE 94: note = RuvC_P3
  SITE 96: note = RuvC_P4
  SITE 99: note = RuvC_P5
  REGION 218..283: note = Tnp_domain
  SITE 226: note = Tnp_P1
  SITE 256: note = Tnp_P2
  SITE 264: note = Tnp_P3
  SITE 265: note = Tnp_P4
  SITE 277: note = Tnp_P5
MNNNTKKGPVTVLGIDLAKQSFQLHGVDNAGQVVIKKKLNRTQLSAFVANLPVCLIGIESCGGAHHWTRLFTEMGHTVRMMAPQFVKPYVKSNKNDSADAEAICEAVQRPNMRFIPAKSIEQQDIQSLHRIRSQLVARRTAQANQIRGLLMEYGIVIPQGISYIRKSLPDILEDGENRLSVLFREQLSGLYEEMVHLDERIEALELSLKTISAQNEDCKRLLTIPGVGLMTATALIAAVGDVNVFKSGRELAAWLGLVPRQHSTGGKPTLLGISKRGDSYLRT

SEQ ID NO: 15302 - protein, 347 aa, unidentified
  source 1..347: note = protein_97024a7
  REGION 5..152: note = RuvC_domain
  SITE 8: note = RuvC_P1
  SITE 55: note = RuvC_P2
  SITE 92: note = RuvC_P3
  SITE 94: note = RuvC_P4
  SITE 97: note = RuvC_P5
  REGION 212..312: note = Tnp_domain
  SITE 220: note = Tnp_P1
  SITE 250: note = Tnp_P2
  SITE 258: note = Tnp_P3
  SITE 259: note = Tnp_P4
  SITE 271: note = Tnp_P5
MKHYSGLDVSVKETSICIIDETGRICREIKVVSHPDDLVAVLRDPAWNLERIGLEAGPLSQWLFEGLARAGLPVICIETRHTKAFLKAQPNKTDRNDARGIAQMMRVNLFRPVHVKTLTSQKRRALLTARKLLQEKAIAIENDLRGLLRNFGLKVGIVGAMKFEERIRELVDDMPDIREIMEPLLAARQKLRDEFTRLHKKVVDIARDDKTCRLLMTIPGVGPIVSVAFTSTIDIPQRFRNSKTVGAVLGLTPRMNESGESKRAGKVSCCGDGMMRMLLHEAAQTLLSVVRKWSWLKAWAMSVARRRGRAKAITALARRLAVIMHRMWSNGTEFCWTRAELAGASHA

SEQ ID NO: 15303 - protein, 326 aa, unidentified
  source 1..326: note = protein_4d3a0be
  REGION 2..117: note = RuvC_domain
  SITE 22: note = RuvC_P2
  SITE 58: note = RuvC_P3
  SITE 60: note = RuvC_P4
  SITE 63: note = RuvC_P5
  REGION 183..261: note = Tnp_domain
  SITE 191: note = Tnp_P1
  SITE 221: note = Tnp_P2
  SITE 229: note = Tnp_P3
  SITE 230: note = Tnp_P4
  SITE 242: note = Tnp_P5
MQIKKFINRLKTEWDEIDCCYEAGVTGCSLYRYLKSLGVNCILVAPGKVPRQNTDKIKTDKRDAIKLARLMRSGELESIHVPSEEDEAVRDYLRSRDSLRLDLGRNRQRLMKFLLRKDIKYSTTKYWTVSHYKWLNNLHFNNEILQETFNDYYSRVRVQEENLKAMDKKIQEVAESEPYREKVGILRCFRGVDYLTAMFLLCEVNDFKRFKTAGSFMSFLGLVPGEYSSGSKRKQTGITKTGNPRLRRILTEAAWQHRFPGTGSKIVTARRSGQPALVVALAEKASLRLHKKFRNLQLRGKTPQVMITAVSRELSGFLWAAMNLVA

SEQ ID NO: 15304 - protein, 395 aa, unidentified
  source 1..395: note = protein_382c2f3
  REGION 10..163: note = RuvC_domain
  SITE 13: note = RuvC_P1
  SITE 61: note = RuvC_P2
  SITE 102: note = RuvC_P3
  SITE 104: note = RuvC_P4
  SITE 107: note = RuvC_P5
  REGION 225..310: note = Tnp_domain
  SITE 233: note = Tnp_P1
  SITE 263: note = Tnp_P2
  SITE 271: note = Tnp_P3
  SITE 272: note = Tnp_P4
  SITE 283: note = Tnp_P5
MNEDVSRVVIGMDPHKRTVTIEVMTADETVVDGGRFDTTVEGYAAMLEHVEAWPDRVWAIEGCEGIGRHIAHRLLAHGQDIVDVPAKLSAKARVFATGQGRKTDATDAHSVALVGTRMAGLRPVVSDAQLEVLQLLVDRRRSIGDEHTRKVSQLHRILLEMLPGGAKKYLSAAQARALLSTARPRDEVGKTRKRVAMELVADLERIYARKKAADKELKELVAATGTSLLGLHGIGPSGAARLLVEVGDLARFPDRNHFASWTGTAPIDASSGDHVRHRLSRGGNRQINRVLHIMATVQLRTPTEGRAYFDRKKAAGKTSMEAMRCLKRRLSDLVFRKSPGDYVAGRLTTVTGPGGHRGNGSDSSVTGSQPHTGSSDQPLPGPATTHPRTALPTAS

SEQ ID NO: 15305 - protein, 388 aa, unidentified
  source 1..388: note = protein_8421bd0
  REGION 4..160: note = RuvC_domain
  SITE 7: note = RuvC_P1
  SITE 58: note = RuvC_P2
  SITE 99: note = RuvC_P3
  SITE 101: note = RuvC_P4
  SITE 104: note = RuvC_P5
  REGION 262..348: note = Tnp_domain
  SITE 270: note = Tnp_P1
  SITE 300: note = Tnp_P2
  SITE 308: note = Tnp_P3
  SITE 309: note = Tnp_P4
  SITE 321: note = Tnp_P5
MYLIGIDISKYKHDCFIATEAGIPIKAFSFDNNRLGFDLFLEKLKSLDLSQEIRIGLESTGHYGSNLKQFIASNSYTYLEFNPYLTHMFSKALSLRKTKTDKVDAKTISSMLGSIDYKTLHTRFYHINELKQLVRFRHVQMMNRSKVLIEMTNILDRIFPEFKPFFNERLAGTAIFILKKFKSRSRISKLQPKDYESIRTYSKGRVSYVRIKKLKNLAQSSVGYETKSDLLLLKHSIKHYEDLSLTLEVLESEILSLMEDIPQTLTTIPGVTMISAAIIIAELGDFKNFTNPAQIISFAGLDTSVNQSGMMETRGHLVKRGSGLLRMTIWQITFSSLRLNPTLYDYYQKKRAEGKHHKVAMVHCARKMIRTIYFLGVNQLTFDHSQFK

SEQ ID NO: 15306 - protein, 342 aa, unidentified
  source 1..342: note = protein_4fe2762
  REGION 7..149: note = RuvC_domain
  SITE 10: note = RuvC_P1
  SITE 53: note = RuvC_P2
  SITE 88: note = RuvC_P3
  SITE 90: note = RuvC_P4
  SITE 93: note = RuvC_P5
  REGION 212..298: note = Tnp_domain
  SITE 220: note = Tnp_P1
  SITE 250: note = Tnp_P2
  SITE 258: note = Tnp_P3
  SITE 259: note = Tnp_P4
  SITE 271: note = Tnp_P5
MSTIQTIGIDLAKNVFSIHGVDTYGKCVLKKTVKRNKLLEVFANLPPCLIGMEACSGAHYWARELIKLGHDPRIMAPKFVIPYRQNEKNDANDAEAICEAVGRPKTRFVSIKSPEQQAVLCLHRIRQGIIKSRTATINQLRGLLSEFGIVIPQGRFTLQNSIGSILEDAENGIPDLARELLFDLVQRIRNANDEVLRYDRKIYAIVKHMETAQKLMTIPGVGEHSATAIVATVADGKQFKSSRQFAAWIGLVPRQFSTGGHSKLGHISKRGDKHIRTLLVHGARAVIARCKDKTDRNSLWLQKLVERRGYTRAIVALAAKNARIIWALLTSGKEYQADYITS

SEQ ID NO: 15307 - protein, 320 aa, unidentified
  source 1..320: note = protein_65b5e5b
  REGION 8..157: note = RuvC_domain
  SITE 11: note = RuvC_P1
  SITE 56: note = RuvC_P2
  SITE 96: note = RuvC_P3
  SITE 98: note = RuvC_P4
  SITE 101: note = RuvC_P5
  REGION 195..279: note = Tnp_domain
  SITE 203: note = Tnp_P1
  SITE 232: note = Tnp_P2
  SITE 240: note = Tnp_P3
  SITE 241: note = Tnp_P4
  SITE 252: note = Tnp_P5
MSEQPVVVGIDVAKSHVDVAVLGTSAPAARFDNDDPGHKCLIEALTPLAPALVVMEATGGYEAPLACSLQAVGLAVAVVNPRQARDFARSFGQLAKTDRIDALGLAEFAAALLGRSDLARYLKPLATAAQQDLVALVNRRRQLLTMLGMEEQRLAMARPAVRRSIQALIKAIRKQLDDVDGAMAEHVSRHFAELAGLLRSTSGIGPVASATLIADLPELGHLTRRQVSALVGVAPFACDSGSMRGRRRIRGGRFELRRTLYMATLAAITFNPVIRAHYRRLVDAGKLKKVALVACMRKLLTILNAMARTHTPFQENYRNT

SEQ ID NO: 15308 - protein, 405 aa, unidentified
  source 1..405: note = protein_efd0c4e
  REGION 6..162: note = RuvC_domain
  SITE 9: note = RuvC_P1
  SITE 58: note = RuvC_P2
  SITE 99: note = RuvC_P3
  SITE 101: note = RuvC_P4
  SITE 104: note = RuvC_P5
  REGION 271..357: note = Tnp_domain
  SITE 279: note = Tnp_P1
  SITE 310: note = Tnp_P2
  SITE 318: note = Tnp_P3
  SITE 319: note = Tnp_P4
MARVFVGHDWAEAHHDVHVEDETGRKLAAARLPEGIEGVRRFHELVAAHAEEPDEVTVATETDRGLFVGSLVAAGYRVLAVNPMSTSRYRERHSTSGAKSDPGDANVLAELARLDGHNHRPIAGDSDLAEAVKMLARAHHSMIWSRQRQQNQLRSTLREFFPAALAAFDDLSSGDALAVLAMAPTPAQSRSLSRSKIAAALRRGGRQRRIDERAAEIQATLRSDQLEAPSIVADAMGASVAALVAVIAELVAQTANLERELEDRFEQHPDAKIIRSLPGLGMVLGARALGEFGDDPNRYADAKSRKNSAGTSPITRASGKQRVVLARYARNRHLADLCRMWAFAAITASPGARAFYDERRAAGDTHNRALRALANRLVGILHGCLRHGTTYDEHTAWAHRAQLAA

SEQ ID NO: 15309 - protein, 415 aa, unidentified
  source 1..415: note = protein_4d0e404
  REGION 9..159: note = RuvC_domain
  SITE 12: note = RuvC_P1
  SITE 64: note = RuvC_P2
  SITE 99: note = RuvC_P3
  SITE 101: note = RuvC_P4
  SITE 104: note = RuvC_P5
  REGION 256..344: note = Tnp_domain
  SITE 264: note = Tnp_P1
  SITE 295: note = Tnp_P2
  SITE 303: note = Tnp_P3
  SITE 304: note = Tnp_P4
  SITE 315: note = Tnp_P5
MKVVFPTCCGVDVHKSFLVATIIKTPKDSLQPSYQKKRFSTFNSDLSRFADWLHLNDCLDICMESTGKYWVPVFNILEKRGICVVIANPKWVKAVKGNKDDTKDSKWIGDLFRIGLVKSSFIPVKDIRILRELTRYRYKLTSMKSSEKNRFQNAFTVCNVALDSVVSDMFGKSATAITDYLTSDENFDAHHCVSLLQRSLKKKADDVLASIEGYEITPEQKYRIGIVRDHLHYIEKLIERVDICINTMVEKYDGTISLLCTIPGIDRSSAITVISEIGVDMNQFGSSKRLCCWAGLTPGNNESAGKKKSVRISRAGVYLKPALVQVAHAAVKDKLNPYYALKYERIAKRRGKKRAIIAIARMILTAIYSMLSTGEIWNPVDLFKVDMPEHLKEQQLQKAVKQAIRLLEAQGLKVS

SEQ ID NO: 15310 - protein, 322 aa, unidentified
  source 1..322: note = protein_d39568d
  REGION 5..153: note = RuvC_domain
  SITE 8: note = RuvC_P1
  SITE 52: note = RuvC_P2
  SITE 92: note = RuvC_P3
  SITE 94: note = RuvC_P4
  SITE 97: note = RuvC_P5
  REGION 186..270: note = Tnp_domain
  SITE 194: note = Tnp_P1
  SITE 223: note = Tnp_P2
  SITE 231: note = Tnp_P3
  SITE 232: note = Tnp_P4
  SITE 243: note = Tnp_P5
MVSFVGIDVSSTSLDVAVRPQGIKCSVSNDPAGFEELESWLRGFSIKRILLEATGGYERDILHFLQDASYKVIRVNPKRARSFADSMGIKAKTDAIDAEALAHFAEVIPDKPTLQVSPDRALLREFLQQRDRFVQQRDDDRRRLKQAQSQVVVDLLKSHIQHLRLQIKLVEKEIKQQTTTLNDERIAQLIQVKGIGMVTAAKLVALLPELGRVESREIASLVGVAPFNHDSGKSVGKRYISGGRSQVRRALYMACWVAVRHNPGMKARYDALRGRGKLAKVAIVACMRVFIVQLNAMIRTGTPWREQPPTKPESTAQAQGAA

SEQ ID NO: 15311 - protein, 397 aa, unidentified
  source 1..397: note = protein_6c8d01e
  REGION 8..162: note = RuvC_domain
  SITE 11: note = RuvC_P1
  SITE 59: note = RuvC_P2
  SITE 99: note = RuvC_P3
  SITE 101: note = RuvC_P4
  SITE 104: note = RuvC_P5
  REGION 269..355: note = Tnp_domain
  SITE 277: note = Tnp_P1
  SITE 307: note = Tnp_P2
  SITE 315: note = Tnp_P3
  SITE 316: note = Tnp_P4
  SITE 328: note = Tnp_P5
MTEYAAYCGLDVGKEAHHACALDPEGKRLFDAELPQDEARLRRLFTDLSGHGRVLMVVDQPNTIGALPIAVARSMGIDVAYLPGLAMRRIADLHPGSAKTDARDAYIIADAARALPHTLRRVDVGEEALAELKVLVGFDDDLAGEATRLSNRIRGLLTQVHPALERVLGPRVSQKATLALLTQYGGPTGLRKAGRARLLQAARKANPRGADTLIEAIVAALAEQTVTVPGTAAADRVLPNLARSLADTLDQRRQIAAEVEQVLDVHPLAEVLTSMPGVGVRTAARILLEVGDGSSFPTAGHLAAYAGLAPVTHRSGISIRGEHPARSGNKHLKRAFFLSAFAALRADPNSRAYYDRKRAEGKKHNAALICLARRRCDVIHAMLRNRQPYQPRTAAAA

SEQ ID NO: 15312 - protein, 343 aa, unidentified
  source 1..343: note = protein_255f5be
  REGION 4..150: note = RuvC_domain
  SITE 7: note = RuvC_P1
  SITE 54: note = RuvC_P2
  SITE 90: note = RuvC_P3
  SITE 92: note = RuvC_P4
  SITE 95: note = RuvC_P5
  REGION 211..300: note = Tnp_domain
  SITE 219: note = Tnp_P1
  SITE 249: note = Tnp_P2
  SITE 257: note = Tnp_P3
  SITE 258: note = Tnp_P4
  SITE 270: note = Tnp_P5
MIYVGLDVHQGFSRVGVFNPATGELADLGKMSNEPSQVAAQLARIAGPKTVVLEAGRSSHHMAALLEPLAEEVWMVDPGAVRKLQRRVAKTDRRDAAALAYWAAKGALQPLWRPDAQTLDLRELTRGKTGLTRLVVRVRVMIRALLARHGYECPYRDLLGLKAQAWLGEVQLPDYAGLMLTTLRELLPLLQARAQQFEALVEQEAPAYDPARRLMTIPGIGPFLGLSLAAEIGEARRFPTANHLRGYSGLTPRVHQSGEKESRGPLTKRGNRWLRYAAVLAAQRMAAMRQADPRLKRTFLSVAFRHGHNPGKVACARRLLDLIHHLLCKGEDYRPPAARGVKV

SEQ ID NO: 15313 - protein, 407 aa, unidentified
  source 1..407: note = protein_9a809d4
  REGION 4..160: note = RuvC_domain
  SITE 7: note = RuvC_P1
  SITE 57: note = RuvC_P2
  SITE 97: note = RuvC_P3
  SITE 99: note = RuvC_P4
  SITE 102: note = RuvC_P5
  REGION 269..355: note = Tnp_domain
  SITE 277: note = Tnp_P1
  SITE 308: note = Tnp_P2
  SITE 316: note = Tnp_P3
  SITE 317: note = Tnp_P4
MIFVGVDWAEAHHDVFVEDERGKRLAGGRLPEGVEGIARFHEMVGAHAAEPAEVVIGMETDRGLFVSALLAAGYLVYAVNPMSTSRYRDRHSTSGAKSDPGDAKVLADMVRTDRHNHRPVAGDSEVAEAIKVLARAHQSMIWSRGRQSNFLRSTLREFYPATLVAFDDLTSGDALEVLRIAPTPELGKGLSRSKIAAALRRGGRQRRIDQRAIEIQDALRSPQLVGSDVVAAAMGASVGATVAVIATMNAQITQLATELDAGFEQHPDAEVVRSLPGLGTILSARVLGEFGDAPNRYADAKSRKNYAGTSPITRASGTKRTVLARYVRNKRLADAIYQWAFASLSASPGARAFYDRRRAAGDTHHAALRALGNRLVGILHGCLVHQCNYDEHTAWAHRLDLPITKAA

SEQ ID NO: 15314 - protein, 384 aa, unidentified
  source 1..384: note = protein_3ef46d8
  REGION 40..181: note = RuvC_domain
  SITE 43: note = RuvC_P1
  SITE 86: note = RuvC_P2
  SITE 121: note = RuvC_P3
  SITE 123: note = RuvC_P4
  SITE 126: note = RuvC_P5
  REGION 246..332: note = Tnp_domain
  SITE 254: note = Tnp_P1
  SITE 284: note = Tnp_P2
  SITE 292: note = Tnp_P3
  SITE 293: note = Tnp_P4
  SITE 305: note = Tnp_P5
MTGGWRSEDPLEPGRHQCARVEMLRNHLRDRGSTMNITMYGLDLAKRVFQVHWVDPETGEVKRKALSRAEVSAFFALRAPGLVAMEACGSAHHWGRLLKGLGHEVRLIATQFVRPFVKSNKTDAADAEAIWEAAQRPGMRFVALKSEEQQAVLSLHRIRQQFVKIRTMQAHQVRSLLYEFGVVAPKGWRALLAQAGPVLADETSCPVPQLVRRELLTQLEALRALTTRTVEIERQIGSWQRRESECKRIAAIPGVGPLSATAVVATVGDAHSFRSGREFAAFLGLVPRQSGTGGRIKLLGISKRGDPYLRTLLIHGARTVLAAQSGADRELDPWLKGLLSRRPKNVAIVALANNMARTIWALMAHGRAFDRSWNRAAMPVPALS

SEQ ID NO: 15315 - protein, 324 aa, unidentified
  source 1..324: note = protein_a8a5a98
  REGION 5..155: note = RuvC_domain
  SITE 8: note = RuvC_P1
  SITE 58: note = RuvC_P2
  SITE 98: note = RuvC_P3
  SITE 100: note = RuvC_P4
  SITE 103: note = RuvC_P5
  REGION 196..282: note = Tnp_domain
  SITE 204: note = Tnp_P1
  SITE 234: note = Tnp_P2
  SITE 242: note = Tnp_P3
  SITE 243: note = Tnp_P4
  SITE 255: note = Tnp_P5
MSTVVGIGIAKHAFDIATLQANGKHRTKAKLSNAPKGFEVLLQWLARHAEPQAWIVMEATGIYHEALAEWLYEHDYKICVLNPAQIALYARSQLQRVKTDKVDAKLIADYGHLHQHKLRAWKPERPEIKRLKALNHRLKDLQELERMEQNRLDVTSDAKVAASIRSVLEHIRQQIAETLKAIKQHFDDNDDLRGQRDLLKSIDGIADRTATLLLAELGDMQRFGYSRDVTAFAGLNPKLQDSGKHKGHVRISRMGSSVLRAGLYLPAVVSLTHNAAIRAMAKRLKARGKAGKQIVCAAMRKLLCIAYGVLKSGKPFDPQLAIAN

SEQ ID NO: 15316 - protein, 343 aa, unidentified
  source 1..343: note = protein_4aede08
  REGION 7..149: note = RuvC_domain
  SITE 10: note = RuvC_P1
  SITE 53: note = RuvC_P2
  SITE 88: note = RuvC_P3
  SITE 90: note = RuvC_P4
  SITE 93: note = RuvC_P5
  REGION 211..296: note = Tnp_domain
  SITE 219: note = Tnp_P1
  SITE 249: note = Tnp_P2
  SITE 257: note = Tnp_P3
  SITE 258: note = Tnp_P4
  SITE 270: note = Tnp_P5
MTKDMMIGVDLAKNVFQLHAASVTGHLQFRKKLSREMFRRFMAEQAPAVVVMEACGSAHYWAREIIRLGHEVKLIAPHYVKPFVKRQKNDAADAEAIVIAAQRPEMRFVEPKSAEQQSKAILFRSRERLVHQRTELINALRAYLYEYGHVVPQGIRQLNRIEDVLNAPNSDLPDLMREECRDLLEQIAEKTTRINAQTGKIKALAAEADRARRLQTIPGVGPLTALAVEAFAPPMESFRCGRDFAAWLGLVPRQFSSGGKERLGGVSKAGQTDIRRLLIIGAMSRLNWMGRKSIAEGSWLAQMMMRKPRMLVAIALANKMARTIWAMLIKQEDYRVPAVATAA

SEQ ID NO: 15317 - protein, 342 aa, unidentified
  source 1..342: note = protein_f47629e
  REGION 6..147: note = RuvC_domain
  SITE 9: note = RuvC_P1
  SITE 52: note = RuvC_P2
  SITE 87: note = RuvC_P3
  SITE 89: note = RuvC_P4
  SITE 92: note = RuvC_P5
  REGION 211..302: note = Tnp_domain
  SITE 219: note = Tnp_P1
  SITE 249: note = Tnp_P2
  SITE 257: note = Tnp_P3
  SITE 258: note = Tnp_P4
  SITE 270: note = Tnp_P5
MEVDVLGIDLAKLVFQLHGATRTGVVVHRSKVSRPSFLESIRRLSPKLVVMEACSSAHHWARVLQRQGIEVRLISPQYVAPFVKTNKNDRNDAEAIVEAASRPSMRFVSIKTVEQQDLQALHRLRQLLVQQRTAIINQVRGVLAERGIVVAQSPTAFHRAMPTVLAGQDDELSQFCRGLLVELLEHLKSVEEKIDSCDARVKVFMASSQACKRIGEIDGVGPLTATAIVAAVGDASEFKNGRHLAAWLGLVPRQYSSGGKSKLYGISKRGDTYLRTLLIHGARAVLRYVAGKTDSQSRWLQQLIERRGYNRAAVAVANKNARIIQALLSSERAYVRPAAVGS

SEQ ID NO: 15318 - protein, 341 aa, unidentified
  source 1..341: note = protein_2b1513c
  REGION 6..148: note = RuvC_domain
  SITE 9: note = RuvC_P1
  SITE 52: note = RuvC_P2
  SITE 87: note = RuvC_P3
  SITE 89: note = RuvC_P4
  SITE 92: note = RuvC_P5
  REGION 211..296: note = Tnp_domain
  SITE 219: note = Tnp_P1
  SITE 249: note = Tnp_P2
  SITE 257: note = Tnp_P3
  SITE 258: note = Tnp_P4
  SITE 270: note = Tnp_P5
MEPTVVGVDIAKRVFQLHWIAADTGEVFDRQLRRSDFLEHFANREPCLIGMEACGGSQHWARRLTELGHQVKLMPGKLVKAFVTGNKNDVADARAIWAAARHPGVKAVPVKTEAQQAVLALHRIRQQLVIFRRSQSNCLRGLLGEYGEVMGVGRAAMNRAMPDLLLRLELRLPRVLIDSLREQWQRLVDIDKQITLIEQRLRAWLHENPACRTIAEIPGVGFLTATAAVAAMGDPKAFRSGREFAAWLGLVPAQFGTGGKVRLLGISKRGDRYLRTLMIHGARSVMKHPKDPGSWAVQLSMRRPLNVVVVALANKIARTIWALLAHGRSYCESYPPPVTAA

SEQ ID NO: 15319 - protein, 431 aa, unidentified
  source 1..431: note = protein_139013d
  REGION 10..163: note = RuvC_domain
  SITE 13: note = RuvC_P1
  SITE 65: note = RuvC_P2
  SITE 100: note = RuvC_P3
  SITE 102: note = RuvC_P4
  SITE 105: note = RuvC_P5
  REGION 290..377: note = Tnp_domain
  SITE 298: note = Tnp_P1
  SITE 329: note = Tnp_P2
  SITE 337: note = Tnp_P3
  SITE 338: note = Tnp_P4
  SITE 350: note = Tnp_P5
MKKGGEVLGIGIDWSEEFHLVALGRPGEGVIEVSRVEHHPKAVDALVAKIAGLEPDPGEVRVVIETRHGLLVERLVDAGYVVVPVNPDLVARRRGPAKKKDDAEDARIACLIALDRHERLRPLIPHGKIAGELRAIARDDERAARDERRLLNRLRQDLIATFPAAIAIGGEDLGAPTFLGLLERWPAANALAEASRRELVAFARSCRHGWPERFADRVEASLVAEYFRPKDYLVRAKADTIRLVATQLLAIGHQRRAWERRMGELLLGAPRHGRDHQPKGDGLGKGFPGGEIYLSFPGLGDRLAARIAGEIGDHPQQFDTPNSLQCYAGKAPVTRRSGKSELVVACRLAHNRYLGAAVQQWAFCSLRRSGWAREFYDAQRTRGKGHHAALRALGNRWLEILWHCVCKGVVYGEAVHVANRNRARGRTDVAA

SEQ ID NO: 15320 - protein, 405 aa, unidentified
  source 1..405: note = protein_d3f05cb
  REGION 4..160: note = RuvC_domain
  SITE 7: note = RuvC_P1
  SITE 57: note = RuvC_P2
  SITE 97: note = RuvC_P3
  SITE 99: note = RuvC_P4
  SITE 102: note = RuvC_P5
  REGION 274..361: note = Tnp_domain
  SITE 282: note = Tnp_P1
  SITE 312: note = Tnp_P2
  SITE 320: note = Tnp_P3
  SITE 321: note = Tnp_P4
  SITE 334: note = Tnp_P5
MNAVGIDVSKGKSMVTILRPFGEVVSIPHEIRHTSDQIDSLISEIRSLDGDTRIVMEYTGRYHEPMARWLSDAGLFVSIVNPKLIKDFDNDSLRKVKTDKADSIKIARYTLDKWHKLSQYGAMDELREQLKTMNRQFGYYMRLKTAMKNNLISLLDQTFPSANAFFDSPARSDGSQKWVDFVDTYWHVDRIRSMSLAAFTEHYQKWCKRKGYNFQPGKPAEIYASVRNIIPLLPKDEATKLIVRQAVNQVNTASAAVEELRTRMNDIASRLPEYPVVLAMKGVGTSLGPQLMAEIGDVTRFTHKGALTAFAGVDPGKNDSGSYSQKSVRTSKRGSAPLRKTLFQIMDCLIKTAPQDDPVYAFMVKKRSQGKPYYVYMTAGANKFLRVYYGRVMEYLTTLSEASEN

SEQ ID NO: 15321 - protein, 344 aa, unidentified
  source 1..344: note = protein_e53b93d
  REGION 4..157: note = RuvC_domain
  SITE 7: note = RuvC_P1
  SITE 55: note = RuvC_P2
  SITE 96: note = RuvC_P3
  SITE 98: note = RuvC_P4
  SITE 101: note = RuvC_P5
  REGION 219..304: note = Tnp_domain
  SITE 227: note = Tnp_P1
  SITE 257: note = Tnp_P2
  SITE 265: note = Tnp_P3
  SITE 266: note = Tnp_P4
  SITE 277: note = Tnp_P5
MIVIGMDPHKASLTAVAVDNSGETVARRRFAVNSGTAAQLRKWSHRWAERRFAVEGAKGLGRGIAQILLADAEHVVDVPSTLAMRVRVLDTGGGRKTDADDARAVALTALRHKGLHEVRYEDQSTILRLLSERRDDLVRERTRVLNRLHQLLRELIAGGVPTGLNAAQAAAALRRVRPVTATDACRRDLAKELLADLRRMDSNIGANEAQMRDAVAATTTTLPQVHGISTVLTAKLLGHVGDISRFPSADHFASYTGTSPLAASSGETVRHRLNTGGNRQLNSVLHTVAVCQSRDPGLGKIYYEKKIAQGKTPAEARRALKRRLANVIYRHIIRDNLHAPVTAT

SEQ ID NO: 15322 - protein, 331 aa, unidentified
  source 1..331: note = protein_3f8eafa
  REGION 5..155: note = RuvC_domain
  SITE 8: note = RuvC_P1
  SITE 55: note = RuvC_P2
  SITE 95: note = RuvC_P3
  SITE 97: note = RuvC_P4
  SITE 100: note = RuvC_P5
  REGION 197..283: note = Tnp_domain
  SITE 204: note = Tnp_P1
  SITE 234: note = Tnp_P2
  SITE 242: note = Tnp_P3
  SITE 243: note = Tnp_P4
  SITE 256: note = Tnp_P5
MSVYVGLDIGSRTSTAGVRKDARPAGLWDIAQTPAGRKAAVKKLQALQPKAIVMEATGIYYLDLAIELHAADLPVSVINPKSFHNFAKLMLVNSKTDAIDAQLLAEYGERMTPRLWTPPSPVQLELRAIGRHINRLVGHRTRAKNELHALRATHTTMSMLIEDEEEAIASLDKRIERFRKAGHDLIAQCPTLSRQFKQLLVAPGMGEVSVLAALAELTTLPEILKSSQVSRHAGLDVRQTQSGTSIDKPGRLGKSGNAYLRAAMYMPALTAVRCDRYAKAFYESLVSRGKKKMQAIAAVIRKYLTGVWACMRGSEPFDTAKLFSAKHLAKA

SEQ ID NO: 15323 - protein, 338 aa, unidentified
  source 1..338: note = protein_8adecac
  REGION 6..147: note = RuvC_domain
  SITE 9: note = RuvC_P1
  SITE 52: note = RuvC_P2
  SITE 87: note = RuvC_P3
  SITE 89: note = RuvC_P4
  SITE 92: note = RuvC_P5
  REGION 209..294: note = Tnp_domain
  SITE 217: note = Tnp_P1
  SITE 246: note = Tnp_P2
  SITE 254: note = Tnp_P3
  SITE 255: note = Tnp_P4
  SITE 267: note = Tnp_P5
MKFKRIAIDISKHAFTLHGVDDADRPVLRRDLRRAEVETFFAKIDSTEVIMEACGGAHHWGRVLAGLGHKVRLIPAQYVRPFVRRAKNDRTDAEAINDAASRPGMPTVAVKTAQHQAELIILKHREMLVAQRTQVINALRGHAAEFGVVAAKGTAQVQPLLDKLAGDPAIPAAARAMFVRIGEHAAELGRQIAAVDADLSAQHKASSVSQMLAEVPGIGPVTAITLAVGVDPAAFASGRHFAAWLGLTPKEHSTGGKHRLGRISKAGNERLRSLLVVGAMAVIRHAKPGKRSVSPWLLALLARKPRKLAAVALANKIARTVWAMMARGEAYRHLPVTA

SEQ ID NO: 15324 - protein, 320 aa, unidentified
  source 1..320: note = protein_7599f0e
  REGION 7..148: note = RuvC_domain
  SITE 10: note = RuvC_P1
  SITE 52: note = RuvC_P2
  SITE 92: note = RuvC_P3
  SITE 94: note = RuvC_P4
  SITE 97: note = RuvC_P5
  REGION 187..272: note = Tnp_domain
  SITE 195: note = Tnp_P1
  SITE 224: note = Tnp_P2
  SITE 232: note = Tnp_P3
  SITE 233: note = Tnp_P4
  SITE 245: note = Tnp_P5
MSDSLDIGLDVDSKELVPAVVDCKAGDRIPNTKAGIAKWLKTLPPRCRIGMEATGKHHELVARMADQAGHVVYVINPRSIKNYAKATGARGKTDAMDAQVIARYVKKESDRLREYVPRSDEQQQMHDLLRKRQILVETRARLEQSFEVTKGAPGELGDIFLAMTSTLSELENQLQQLGREGEHGALYKRLLTIPGIGPTVAPHLVYYMTRWPLANANAWIACTGLDPRPNESGGRTGKRRLSKQGAPVLRQMLYMAAMGLKRCRGGQPLYEHLSARGHPSTAVFNILARKLARIAWGVFKSGRDFDPALLKVGQACFQQA

SEQ ID NO: 15325 - protein, 407 aa, unidentified
  source 1..407: note = protein_27be9d7
  REGION 6..162: note = RuvC_domain
  SITE 9: note = RuvC_P1
  SITE 58: note = RuvC_P2
  SITE 99: note = RuvC_P3
  SITE 101: note = RuvC_P4
  SITE 104: note = RuvC_P5
  REGION 269..356: note = Tnp_domain
  SITE 277: note = Tnp_P1
  SITE 309: note = Tnp_P2
  SITE 317: note = Tnp_P3
  SITE 318: note = Tnp_P4
  SITE 329: note = Tnp_P5
MKRYYLGVDWADEFDQVWVSDADGNKVTEMKVLQNTQGLSDFGRWLHERKAQAIELWAAIEKPHGRIVDFLLNHGVVVYPVNPKALDRARDRFRMSQSKSDSFDAYVLADFLRTDHARLRALEPDSAPAQELKIVTRDHQRLMRQKNRLLNQIEVTLKEYYPRPLEVFNDLETKIALDFLKAYPTPQALSQLNRRGWNRFAKRQHHLSEARADELWEKLNKAQLAVPEHVVRAKARLLAALVVQFEAALQAVKQYEEQVKGFFASMPAADLVKTLPGGKSGTTVPILWAELGDAKSRWESFRHLQAEAGAVPVTQSSGKSRFVQFRFACNKHLRYAIHWFSFNSLNRCEWANKYYRSQRAKGHSHPQALRALGAKWLKIIFVMWRDHKPYDENYHLANIARQQMRAA

SEQ ID NO: 15326 - protein, 330 aa, unidentified
  source 1..330: note = protein_7cffa40
  REGION 5..161: note = RuvC_domain
  SITE 8: note = RuvC_P1
  SITE 64: note = RuvC_P2
  SITE 104: note = RuvC_P3
  SITE 106: note = RuvC_P4
  SITE 109: note = RuvC_P5
  REGION 206..292: note = Tnp_domain
  SITE 214: note = Tnp_P1
  SITE 243: note = Tnp_P2
  SITE 251: note = Tnp_P3
  SITE 252: note = Tnp_P4
  SITE 264: note = Tnp_P5
MMQYVGVDVSKEKVDVCWLRSKDSESGKTKIKTKVFKNRDFEIITKWLKDTIGEDFSNIVVVLEPTGVYHEGLTYFLHEAGLQVCIGNPSDARAYAKSVGFKHKTDKEDAKVLAYYASHEPRNLKVWEPEPPLVRELKAMLRRLDALDKDQQREINRLEASEISGASLRVTDSIRGMIDALEEEIQRLKQDIDDRIKKDPVLAKNRELLQSIKGVGDVLSREMVVLFAAKKFSDAKQVAVYLGLTPVFRDSGTQKGKTVLSKLGPARIRAKLYMAAVVAGQHNMDIKRQKHRLIANGKSKMAALGAAMRKLVQICYGVVKNQQMYQPQTV

SEQ ID NO: 15327 - protein, 346 aa, unidentified
  source 1..346: note = protein_606fd66
  REGION 6..150: note = RuvC_domain
  SITE 9: note = RuvC_P1
  SITE 54: note = RuvC_P2
  SITE 89: note = RuvC_P3
  SITE 91: note = RuvC_P4
  SITE 94: note = RuvC_P5
  REGION 213..300: note = Tnp_domain
  SITE 221: note = Tnp_P1
  SITE 251: note = Tnp_P2
  SITE 259: note = Tnp_P3
  SITE 260: note = Tnp_P4
  SITE 272: note = Tnp_P5
MKISRVGVDLAKNVFQLHGVDSRGKARWKRQLPRDKWLRVLTETVDPGTEVGMEACAGAHHWARLLIAQGFRVKIIPPQFVTPFVKSNKNDANDAVAICEAMLRPNMYPVSVKTVEQQDLQAIHRIREEVKTHRVAKANQIRGLVAEYGLVAPKQLSSLRVAITDWLEDASNGLTDFFRQLLNGLREDLSILDQRMAMLDQQIAEIASNHPTAKRLQQLRGVGPLIATALVATIGDGKQYRKGRDMAAAIGLTPRQHSSGGKDRLLGISKRGDTYLRCLLVHGARSAIRTMKDKDDRLSRWVTSLQARRHKNVVAVAMANKLARTAWAIMSKDIDYNPDMNHAVPH

SEQ ID NO: 15328 - protein, 408 aa, unidentified
  source 1..408: note = protein_b0ff892
  REGION 4..160: note = RuvC_domain
  SITE 7: note = RuvC_P1
  SITE 57: note = RuvC_P2
  SITE 97: note = RuvC_P3
  SITE 99: note = RuvC_P4
  SITE 102: note = RuvC_P5
  REGION 274..361: note = Tnp_domain
  SITE 282: note = Tnp_P1
  SITE 312: note = Tnp_P2
  SITE 320: note = Tnp_P3
  SITE 321: note = Tnp_P4
  SITE 334: note = Tnp_P5
MNAVGIDVSKGKSMVAALRPMGEVALLPQEFLHTEIGLEQMAYAIIALGEDTRVVMEATGRYHEPVAAALYEYGIYVCVLNPLFIKQSGGGSIRKVKTDKADAMKIAKYGLDNWVDLREYTPMDTVRQQLKLCSRQYNLYMKTVVSLQNNLISLADKTFPGVNELFSSPERADGHQKWVDFVMTFWHCDCVCRVSEKAFTERYQKWCKRKGYHFSAEKALDVYAGSCGHFTTLPKNDNTKLLITTAAQQLLAGKMTLAALRAEMTRLAKQLPEYDTVRAMYGVGETTAAQLMAEIGDVRRFPRRSSIVGFAGVDPAVDQSGKHDAKSTPTTKRGSPHLRKTLYQIVCTYLKKSPVDEPVYQFLDKKRSEGKPYFVYMTAAQNKFLRIYYARVKECLEAFVARQNPPQS

SEQ ID NO: 15329 - protein, 339 aa, unidentified
  source 1..339: note = protein_7195ae1
  REGION 6..148: note = RuvC_domain
  SITE 9: note = RuvC_P1
  SITE 52: note = RuvC_P2
  SITE 87: note = RuvC_P3
  SITE 89: note = RuvC_P4
  SITE 92: note = RuvC_P5
  REGION 209..294: note = Tnp_domain
  SITE 217: note = Tnp_P1
  SITE 247: note = Tnp_P2
  SITE 255: note = Tnp_P3
  SITE 256: note = Tnp_P4
  SITE 268: note = Tnp_P5
MHIQTIGLDLAKSVFQAHGVDDAGNTVLAKKLHRKQMIPFFSKLAPCLIGVEACGAAHYWARTLIAMGHEILIMPPSYVKGYVKRGKSDALDAEAICEAVQRPTMRFVPVKTVEQQGILMAHRTRALLVRQRTMAANALRAHLAEFGFVANPGVANLVKLADQAFTDEVLPAYAHRALEILIRRMAELTEEIGELDQELRTWHEGSDVNRRLAAIPGIGVITASAIAATVTDTDQFQSGRQFAAWLGLTPQQQSTGGKNRLGGISKQGDRYLRRLLVVGATAVMRHAKRKPTPLTDWVSRLLEKKPFRLVSVALANKLARIAWTLLKRGQIYRPYGLSA

SEQ ID NO: 15330 - protein, 407 aa, unidentified
  source 1..407: note = protein_482cf73
  REGION 6..159: note = RuvC_domain
  SITE 9: note = RuvC_P1
  SITE 57: note = RuvC_P2
  SITE 98: note = RuvC_P3
  SITE 100: note = RuvC_P4
  SITE 103: note = RuvC_P5
  REGION 221..307: note = Tnp_domain
  SITE 229: note = Tnp_P1
  SITE 259: note = Tnp_P2
  SITE 267: note = Tnp_P3
  SITE 268: note = Tnp_P4
  SITE 279: note = Tnp_P5
MTAVMIGVDPHKGSHTAVVIGPAEEPLGEIRVRASAAQAGKLAEWAAAWPERTWAVEGAAGVGRLLAQQLVAAGERVLDVQPKLASRVRLLQAGDTNKNDPNDALSVAVAALRSRTCRQVAAEDHPAVLKVWSKRHRDLSRLRNQVACRLHAVLCDLVPGGHPKEISAAQAARILGQASPSGAVELARAELAAEFLEDMRRLDTQLRDTRKKLAAAVRASGTTLTEVFGVGPVIAGTIIGDIADVSRFPGRDHFASYNGTAPVEVSSGNRKVHRLSLRGNRRINHAIHMAAITQIRHKHSDGRAYYEKKLAEGKTHKEALRSLKRRISDAIYSRLLADARRTGQQPARAAREGNQGTTLTPARPAHTPNAGSSDKPLPDLGTTIRPGTRAATPSPSKPASKKTRPAT

SEQ ID NO: 15331 - protein, 291 aa, unidentified
  source 1..291: note = protein_b4320af
  REGION 2..98: note = RuvC_domain
  SITE 37: note = RuvC_P3
  SITE 39: note = RuvC_P4
  SITE 42: note = RuvC_P5
  REGION 161..246: note = Tnp_domain
  SITE 169: note = Tnp_P1
  SITE 199: note = Tnp_P2
  SITE 207: note = Tnp_P3
  SITE 208: note = Tnp_P4
  SITE 220: note = Tnp_P5
MEACASAHFWASKLMSMGHNVKLMAPQFVKPYVKTNKHDAADAEAICEAVTRPNVRFVPVKTPEQQAVLALHRSRQSFIKQRTAQANQIRGLLAEFGIVVPRGIQQLQLLLPEILEDADNALPSLFRVQLSLLRHHLAYLFDVVATLDKQIEQCYRQNALCQRISKIPGIGPITASALIATIGNASNFETSRQLAAWLGLVPRQHSSGGKQVLLGISKRGDIYLRTLLIHGARAVLQSVKRKQDVVSGWASRLLERRNNNIASVALANKNARIVWALLAKDQEYCAPVMNA

SEQ ID NO: 15332 - protein, 342 aa, unidentified
  source 1..342: note = protein_fe25858
  REGION 4..157: note = RuvC_domain
  SITE 7: note = RuvC_P1
  SITE 55: note = RuvC_P2
  SITE 96: note = RuvC_P3
  SITE 98: note = RuvC_P4
  SITE 101: note = RuvC_P5
  REGION 219..304: note = Tnp_domain
  SITE 227: note = Tnp_P1
  SITE 257: note = Tnp_P2
  SITE 265: note = Tnp_P3
  SITE 266: note = Tnp_P4
  SITE 277: note = Tnp_P5
MTMIGIDPHKATHTAVAIDGNEHVVDEFKLRASSRQAERLRTWADRFGEREWAVESANGLGYLVAQQLVAAGETVFDVPPVLAARVRVLGSERSQKNDPNDARSVAIAAMRSDRLSLVRPDDHSRVLRLLAKRHRDMARLRNKHCTRLHALLLELKPGGISSEITVAKANTLLNAVMVDDQVTRHRVMIANELVDDIARLDALLKASKKRVEQAVVASGTTLNEIVGIGPICAAIIIGYTGDVTRFPTKGHFAAYNATAPVDASSGPRPKHRLNQRGNRKLNHAIHIAAISQLRFDTEGRAYYERKLAEGKSSKDAIRSLKRRISDRVYRHLNIDAQRLAAG

SEQ ID NO: 15333 - protein, 416 aa, unidentified
  source 1..416: note = protein_04b4c5f
  REGION 11..160: note = RuvC_domain
  SITE 14: note = RuvC_P1
  SITE 66: note = RuvC_P2
  SITE 100: note = RuvC_P3
  SITE 102: note = RuvC_P4
  SITE 105: note = RuvC_P5
  REGION 257..343: note = Tnp_domain
  SITE 264: note = Tnp_P1
  SITE 295: note = Tnp_P2
  SITE 303: note = Tnp_P3
  SITE 304: note = Tnp_P4
  SITE 315: note = Tnp_P5
MTFKVVRFICGGMDVHKNLIVATIGTTDRQTLITEYIQQSFSTFYSDLIRLKEWFISHDCYDVCMESTGKYWIPIYNVLETELKICLTHPKYVKAIKGKKTDKRDSKWICDLYKCDLVKHSFIPKKEIREMREIARYRCKLVYMRSSERNRYQNCLTVSNISLASAVSDPFGKTATNIMKELMQSEVIEDDKILKLIHKNCKDKDKILDSLQGYHIESDQRFKMDTVMNHIEYLDKQIQACEAELIKRAYPLRDYFQHITHIKGISALSAILIVSEIGTDMNQFESDKQLVNWAGLSPANNESANKKKSVRISKAGQYLEPLLVQCALSSIKDKNSYFGIKYCRIKKRRGHKKAIIAIARMMLVCIYHMILTGEEFNPCDYESLTNPKPKKEPIMTVESALQFLKDSNFDFSSIQL

SEQ ID NO: 15334 - protein, 340 aa, unidentified
  source 1..340: note = protein_f387e1f
  REGION 5..145: note = RuvC_domain
  SITE 8: note = RuvC_P1
  SITE 51: note = RuvC_P2
  SITE 86: note = RuvC_P3
  SITE 88: note = RuvC_P4
  SITE 91: note = RuvC_P5
  REGION 211..296: note = Tnp_domain
  SITE 218: note = Tnp_P1
  SITE 248: note = Tnp_P2
  SITE 256: note = Tnp_P3
  SITE 257: note = Tnp_P4
  SITE 269: note = Tnp_P5
MEQIIGIDLAKRVFQVHIVSAQGENKVNKMITREKLMTFIAQQPSSRIVMEACGSANYWARQISNHGHEVKQISPQYVAPFRMGSKNDKNDAVAIVEADSRPGMRYVPEKSLEQQDIQCLHRVRQRLMKNRTALINQIRGLGLEYGIAMPEGAHKIMACLPDYLEDAENDLTTLSRQLFHEMLQELQASQRRIKELDVRLAHISQQNEDTLRLESMPGIGPLGASALAVALGDGSDFQNGRHFASYLGLVPKEHSSGGKIRLLGITKRGDGYLRGLLIHGARSVVYRVINLPDEQCNGLQRWLKGIITRSGVNKAVVALANKNARVAWALVNHKTEYKAM

SEQ ID NO: 15335 - protein, 392 aa, unidentified
  source 1..392: note = protein_e88d15a
  REGION 4..162: note = RuvC_domain
  SITE 7: note = RuvC_P1
  SITE 61: note = RuvC_P2
  SITE 101: note = RuvC_P3
  SITE 103: note = RuvC_P4
  SITE 106: note = RuvC_P5
  REGION 267..354: note = Tnp_domain
  SITE 275: note = Tnp_P1
  SITE 305: note = Tnp_P2
  SITE 313: note = Tnp_P3
  SITE 314: note = Tnp_P4
  SITE 327: note = Tnp_P5
MYYIGIDIAKRAHEVCFTDEAGNVLDGNSFNVPNTVSGIDKLQKKLDKFEITADNAIVGMEATGHYWLVLYSYLVEQGFEVKVINPLVTDAYRNMLIRKVKNDRIDAQVVAAVLRLGEYQETSIADDETLALRQLCRFRLWQVDSCSDLKRKVIALLDQIFPEYEQLFSDVFGMSSRELLKTYTTPEEIAAIHTTKLANSLNKASKGHFGKEKALEVKAVAKRSLGITIGVDAFAFQLRQIIEQIEFVEEQIAKLDREIEGYMDSLQSPVTTLPGVGPIYGAIILSEIGDISRFPSGKQIVSYAGLDATVNESGEFQGQRSSISKRGSPYLRRALWGAAFVASWSDPELKEYYQRLRARGKHHGVAIGAVARKLCYLLFAVLSENRPYEVRG

SEQ ID NO: 15336 - protein, 328 aa, unidentified
  source 1..328: note = protein_48fcad2
  REGION 4..155: note = RuvC_domain
  SITE 7: note = RuvC_P1
  SITE 60: note = RuvC_P2
  SITE 100: note = RuvC_P3
  SITE 102: note = RuvC_P4
  SITE 105: note = RuvC_P5
  REGION 200..286: note = Tnp_domain
  SITE 208: note = Tnp_P1
  SITE 237: note = Tnp_P2
  SITE 245: note = Tnp_P3
  SITE 246: note = Tnp_P4
  SITE 259: note = Tnp_P5
MFYLGMDVAKAKLDCCLLLDEASGRRKTKVASNAKSGIVDLLAWVAKQNVSPGALHVVMEATGVYHEQAAMALADAGITVSIVNPAQVKDFGRGLAVRTKTDGVDSFVLARYGALLKPVAWTPPAPEARMLQALLSRREAITQDLQRERNRQEKADATDTPDRIRQSLADSIEFLVKQLAELQRDIDQHIDRHPTLKDDMALLQSIPAVGPQVGGNLLSVMRSHEFSSAEQLAAYLGLVPVERQSGSSVMGRARLSKAGPARIRAVLYMAAVVATRHNPHVKAVYDRLLARGKSKMSALGAAMRKLVHLCFGVLKTRKPYQHNYAKIV

SEQ ID NO: 15337 - protein, 349 aa, unidentified
  source 1..349: note = protein_ab82e50
  REGION 6..163: note = RuvC_domain
  SITE 9: note = RuvC_P1
  SITE 68: note = RuvC_P2
  SITE 106: note = RuvC_P3
  SITE 108: note = RuvC_P4
  SITE 111: note = RuvC_P5
  REGION 212..299: note = Tnp_domain
  SITE 220: note = Tnp_P1
  SITE 250: note = Tnp_P2
  SITE 258: note = Tnp_P3
  SITE 259: note = Tnp_P4
  SITE 272: note = Tnp_P5
MKKIIIGIDISKEKIDASAIDVRNSHLGVLKLDYQAFENRPMGFRRMLVWARHLIKGIVLEEVMFCCETTGGYDRSLCDYLFAKGLDIWRESSLQIKKSCGLRKGKDDKTDSLIIAEYAMRHMDKAVYYVSPSETVRELKALLLYRRKLEQEKTSKKVRVAELKATAAKSKSISFILRDAQKSIRILEKSIRDCEKQILALYDGDEDLKKSYDHLTSIRGIGIVNASAMIAYTNNFKNITTSRKLSSYYGIAPFREQSGTSVNKKAMVKCYSNSMLRAYLTQAAENTIREHGIYHNYYRRLSERGKCHGVALNNVKNKLLHLSVSLIANDMDYEENHEALRTLRKSQST

SEQ ID NO: 15338 - protein, 341 aa, unidentified
  source 1..341: note = protein_8cfcdf4
  REGION 7..149: note = RuvC_domain
  SITE 10: note = RuvC_P1
  SITE 53: note = RuvC_P2
  SITE 88: note = RuvC_P3
  SITE 90: note = RuvC_P4
  SITE 93: note = RuvC_P5
  REGION 212..299: note = Tnp_domain
  SITE 220: note = Tnp_P1
  SITE 250: note = Tnp_P2
  SITE 258: note = Tnp_P3
  SITE 259: note = Tnp_P4
  SITE 271: note = Tnp_P5
MEKITTIGLDIAKHVFQIHGVDALGAVVVRRKLRRDDVAGFFKALPPCLIGIEACATGHHWARVLMALGHEVRLMPASYVKPYVKRQKNDATDAEAICEAVTRPTMRFVPVKSQEQQSVLMLHRVRELLIRQRTMLENALRGHLAEFGIVTRQGIAGVGTLIALVEDQDAELLLPLAQAALLPIVGQLREVHEKISEMDSQIHAWHRSNELSRRLETIPGIGPITASAIAATVTDATLFKSGRQLAAWIGLVPRQNSSGGKDRLGRISKQGDPYLRRLLVVGAHAVLRFSGKGKAASTRWAAELLAKKPYNVVAVALANKMARIVWALMMTGRCFEDSATR

SEQ ID NO: 15339 - protein, 390 aa, unidentified
  source 1..390: note = protein_57001da
  REGION 4..163: note = RuvC_domain
  SITE 7: note = RuvC_P1
  SITE 60: note = RuvC_P2
  SITE 101: note = RuvC_P3
  SITE 103: note = RuvC_P4
  SITE 106: note = RuvC_P5
  REGION 266..353: note = Tnp_domain
  SITE 274: note = Tnp_P1
  SITE 304: note = Tnp_P2
  SITE 312: note = Tnp_P3
  SITE 313: note = Tnp_P4
  SITE 326: note = Tnp_P5
MIYVGIDVAKDKHDCCILGSDGEILFSPFTFQNNLIGFDELYEKIWSLTSDLTEIKVGLEATGHYHLNLLRSLLDNGLASFVINPLHTNLFRKGQSLRKTKTDKVDAASIAMMLLTDRTLKPYSDTSYHNEELKSLTRYRFNKVQERAQLKTSVSRLVSILFPELEQLVPTLHMASVYALLSEFPGASFLASAHLTHLKHLLHEASKGHYGRDMAVSIRKAATSSIGSVLPAKSLELKHTIHLIEVLSAEIAEIEAAINAIMATLNSPITTIPGLKNRMGAMILAEIGDFSRFDNPDQILAYAGLAPSTYQSGQLISSYARMEKRGSRYLRYALFNATIYVCIWDPTFKAYLAKKRAEGKHYYVAISHACKKLIRVIYRMQLTGEPYRAS

SEQ ID NO: 15340 - protein, 406 aa, unidentified
  source 1..406: note = protein_6a1090d
  REGION 4..160: note = RuvC_domain
  SITE 7: note = RuvC_P1
  SITE 57: note = RuvC_P2
  SITE 97: note = RuvC_P3
  SITE 99: note = RuvC_P4
  SITE 102: note = RuvC_P5
  REGION 272..358: note = Tnp_domain
  SITE 280: note = Tnp_P1
  SITE 311: note = Tnp_P2
  SITE 319: note = Tnp_P3
  SITE 320: note = Tnp_P4
MIFVGIDWSEAHHDACVLDEHGTVLAKGRVSDDVSGVGRLHAMLADHAGDPAEVVVGIETDRGLLVASLVEAGYHVYAINPLAASRYRDRHAVSRAKSDPGDAKVLADLVRTDRRNHREVAGDSELAAAVKVLARAHQNLIWSRQRQVNALRNTLREFYPGALRAFTTAQLATTEACSVLAMAPTPTWAREKLTLARVRRSLAASGRKRNLDRRAEQILNALQAPELSAPRLVEQAYGDVVGSLVVVIDGLTHQIAKLEADLAERFEGHPDAEIITSLPGLSSVLGARVLAEFGDDPTRYDDARARRRYAGTAPITRASGTRRVVLARVARNRRLSDACYLWAFSSISASAGARRYYDAHRARGKTHHQALRVLANRWVGILHGCVAGRELYREEVAWVAPVLEAA

SEQ ID NO: 15341 - protein, 336 aa, unidentified
  source 1..336: note = protein_3a1561b
  REGION 6..147: note = RuvC_domain
  SITE 9: note = RuvC_P1
  SITE 52: note = RuvC_P2
  SITE 87: note = RuvC_P3
  SITE 89: note = RuvC_P4
  SITE 92: note = RuvC_P5
  REGION 209..295: note = Tnp_domain
  SITE 217: note = Tnp_P1
  SITE 247: note = Tnp_P2
  SITE 255: note = Tnp_P3
  SITE 256: note = Tnp_P4
  SITE 268: note = Tnp_P5
MTIIRIGLDTSKHVFQMHGVDENDQPVLRQRIRRSEVEKVFAKLPPTRIGMEACGASHYWARVLRRLGHEVLLIPPQYVKAYVRRGKNDAIDAEAICEAMGRPRTRFVPVKSAGQQAALTMLGVRDLLVKQRTMLINAIRGHAAEFGVTVAKGPKQVAALLQRLATGEDVPALAREIIGVLASQLDGLNIKLKAIEARVMAWHRQDQTSQCLATIPGIGPIGGVSFALKVPDPKAFHSGRHFAAWIGITPREDSTAGRQRLGRISKAGDEDLRRLLVLGATAVIQQAKPGRASPWLMGLLARKAKKVAALALANKMARIIWAMMVSGETYRRTTAV

SEQ ID NO: 15342 - protein, 343 aa, unidentified
  source 1..343: note = protein_c792dc5
  REGION 6..147: note = RuvC_domain
  SITE 9: note = RuvC_P1
  SITE 52: note = RuvC_P2
  SITE 87: note = RuvC_P3
  SITE 89: note = RuvC_P4
  SITE 92: note = RuvC_P5
  REGION 212..298: note = Tnp_domain
  SITE 220: note = Tnp_P1
  SITE 250: note = Tnp_P2
  SITE 258: note = Tnp_P3
  SITE 259: note = Tnp_P4
  SITE 271: note = Tnp_P5
MQTSTIGIDLAKNVFQLHGVDAHGKVVLVRQLRRGQMIAFLAKVPPCLIGMEACATSHHWAREITKLGHEVKLIPPAYVKAYVKRQKNDAADAAAICEAVTRPSMRFVPIKSADQQSTLAVHRTRNLLVSQCTQLINALRAHLAELGVVTEKGRDGLARLIAILKDEATLQSLPAAMLHALRAMVAGLAALQTQIAELDRSIRDQHRTSDVSRRLKTVPSIGLLGATALTATITDPGAFKSGRDLAAWIGLVPKQNSTGGKERLGGISKQGDRYLRRLLVAGATAVVQHARRHPEKYPWITKLLARKPAKVVAIAVANKTARIAWSIMTRGGTYRSPALVAAA

SEQ ID NO: 15343 - protein, 328 aa, unidentified
  source 1..328: note = protein_609f099
  REGION 12..161: note = RuvC_domain
  SITE 15: note = RuvC_P1
  SITE 68: note = RuvC_P2
  SITE 104: note = RuvC_P3
  SITE 106: note = RuvC_P4
  SITE 109: note = RuvC_P5
  REGION 205..290: note = Tnp_domain
  SITE 213: note = Tnp_P1
  SITE 243: note = Tnp_P2
  SITE 251: note = Tnp_P3
  SITE 252: note = Tnp_P4
  SITE 263: note = Tnp_P5
MSIVSPTYGFVVGVDTHAKNHVYAIINAATGEHLDTRDFPTTVAGINRAITWAGKRTGGDAETLWVIEGTASYGAVLAGTVSTARYRVTEAPRMSAKARHGVGKSDPLDARRIATAALPLPADQLRIPRLNEGVRAALRVLLTARDSMTGEKIIAVSKWRERDEALAEATARAEAIRLAKRIIDLDDQLKANVTRITELVSVSEAAALLEETGFGPVTAAVCLTTWSHHGRVRSEAAYASLAGVKPIPASSGNTVRHRLNRGGDRQLNKALHIVAMVRMTHDEETRKYTDKRTQEGRTTKEIRRCINRYLSRKVYRILNAGTTATSPT

SEQ ID NO: 15344 - protein, 344 aa, unidentified
  source 1..344: note = protein_accf91c
  REGION 7..148: note = RuvC_domain
  SITE 10: note = RuvC_P1
  SITE 53: note = RuvC_P2
  SITE 88: note = RuvC_P3
  SITE 90: note = RuvC_P4
  SITE 93: note = RuvC_P5
  REGION 213..298: note = Tnp_domain
  SITE 221: note = Tnp_P1
  SITE 251: note = Tnp_P2
  SITE 259: note = Tnp_P3
  SITE 260: note = Tnp_P4
  SITE 272: note = Tnp_P5
MSDVTTIGLDIAKHVFHAHGADATGRAVFSRRLTRGKLLDFFAAHPRCRVALEACGGAHHWARELQAMGHDVRLIPPAYVKPYVKRHKNDAIDAEAICEAAQRPGMRFVAVKSEQQQGAALVFRTRDLAVKQRTQIANAIRGHLAEFGWVAPKGAAHLGMLADLLEDGEIGDTLPEAARPMFAMMVEMLADLDQRIAVLDKEITRRAREDEVARRLMTIPGIGPITATALAAIAPPAETFAKGRDFAAWLGLVPRQMSTGGKQKLGTISRMGERTLRRLLIIGASAVVLHASKRGAPAGSWLEGMLARKPRMLVTVALANKMARTVWALLVKQEDYRAPVPAAA

SEQ ID NO: 15345 - protein, 272 aa, unidentified
  source 1..272: note = protein_905233f
  REGION 1..77: note = RuvC_domain
  SITE 16: note = RuvC_P3
  SITE 18: note = RuvC_P4
  SITE 21: note = RuvC_P5
  REGION 139..226: note = Tnp_domain
  SITE 147: note = Tnp_P1
  SITE 177: note = Tnp_P2
  SITE 185: note = Tnp_P3
  SITE 186: note = Tnp_P4
  SITE 198: note = Tnp_P5
MDARHANAALRMMPAKTDRNDAVGLAQIVRTGWCKSVHVKSASSHEVRALLATRSQFVQIRCDLENQIRGVLRTFGIVFGKRVGGFAKRAEEIVSGELDASPTIRTVVESLMKARADILAQIRALDTKVRSTARSNATVRHLMTVPGVGVVTALGFVATIDDPARFRRSSSAGAYLGLTPRIYASGETMKAGRISRRGDDFLRRSLYEAANALLTRIDRFSALKSWGLRIAKRGGFKKAKVAVARKLATILHAMWTTGEEFRWSSAEKVQDA

SEQ ID NO: 15346 - protein, 425 aa, unidentified
  source 1..425: note = protein_6c17cf0
  REGION 4..157: note = RuvC_domain
  SITE 7: note = RuvC_P1
  SITE 59: note = RuvC_P2
  SITE 94: note = RuvC_P3
  SITE 96: note = RuvC_P4
  SITE 99: note = RuvC_P5
  REGION 285..371: note = Tnp_domain
  SITE 292: note = Tnp_P1
  SITE 323: note = Tnp_P2
  SITE 331: note = Tnp_P3
  SITE 332: note = Tnp_P4
  SITE 344: note = Tnp_P5
MLAVGIDWSEEFHPVALGRPGEGVFDVRRVEHSPKAVDALVERIAVLEPEAAEVRVVLEMRHGLLVERLLDAGYVVVPVNPDLVARRRGPARKKDDTEDARIACLLALDRFERLRPLIPHGEIAGELRAFARDDERAARDERRLLNRLRQELIATFPAALEIAGADLGAPSFLRLLERWPSAEALLTASRDELVAFARESRHGWPERFADKVVQALAADQFQPRAYLVRAKADTIRLSASQLLAIGKQRRSWERRMGELLLGAPHRGRAKQPREDERGQSFPGGEVYLSFPGLGDRLAARVAGEIGDHPHQFESPNALQCYAGKAPVTRRSGKSEFVVSCRLAYNRHLGDTVQQWAFCSLRTSPWAREFYNQRRATGKGHNAALRALANRWLEVLWHCLQKDVAYDEAVHTANRNRALQQLAQAA

SEQ ID NO: 15347 - protein, 421 aa, unidentified
  source 1..421: note = protein_cffa4a4
  REGION 12..167: note = RuvC_domain
  SITE 15: note = RuvC_P1
  SITE 64: note = RuvC_P2
  SITE 104: note = RuvC_P3
  SITE 106: note = RuvC_P4
  SITE 109: note = RuvC_P5
  REGION 275..321: note = Tnp_domain
  SITE 283: note = Tnp_P1
  SITE 314: note = Tnp_P2
MPLNVSGPLLFVGIDWAAQIHAVCVLDVAGRQIAVFTVEHTDDGLAGLTARLARLGDPEQIPVAIERPDGRLVDVLLAAGHPVVPVKPNAIKAWRDGEVLSGAKSDVGDAQIIAEYLRLRHHRLHLATPYSSQTRALRTVVRTRDDLVDMRIAATNQLSALLDAHWPGAKAIFADVASPIALEFLTRYPTARHAARLGAKRIAAFCAQHGYSGRRCGEQLLARLRAAPAGTLDDTLCQAVRDAVIALVAVVKAIAIALKDIGRSVVTHLGEHPDGEIFTSLPRSGQINAAQMLAEWGDCRPAYDSPDAIAALAGATPGHQGIRQAPGRALPLGLQQTLPQGDHHIRRQQPPRKPLGRKGLRRSTRPRPRPPPRRTRPGPSLDPGNLALLDRSNTIRSRPPRQRRTTAQVRAGRTACRLRLT

SEQ ID NO: 15348 - protein, 335 aa, unidentified
  source 1..335: note = protein_b095d63
  REGION 4..149: note = RuvC_domain
  SITE 7: note = RuvC_P1
  SITE 57: note = RuvC_P2
  SITE 96: note = RuvC_P3
  SITE 98: note = RuvC_P4
  SITE 101: note = RuvC_P5
  REGION 199..285: note = Tnp_domain
  SITE 207: note = Tnp_P1
  SITE 237: note = Tnp_P2
  SITE 245: note = Tnp_P3
  SITE 246: note = Tnp_P4
  SITE 258: note = Tnp_P5
MQIYGIDLAKEKFDVSFLRLSSKSNVVTPVHHVVRNTQNGIKAFLKGLPSDSVLVAEHTGVYGERLLKMCTEMNVKIAYVGGHVIHTYKSGPDRGKTDEQDCNVLREFGERFTDKLVYTTFPEEDIYELRQLSRQRTMLVEERKRIMTADKTEDCRPYRSEAVKRSMQHIVDLLDEEIKDMERDMLTVIRKHDKISNSYDIITSVNGVGLVTAVELIVKTRNFTTITTAKQYSAYAGTAPYEKSSGKMNQGAHVSKWGNRRSKTLLYICAECARMHNKEMKLYYERRTIIDKKAHHYVLNAIANKLLRLIFSLINKNEKYNPCYIQRDPRSININ

SEQ ID NO: 15349 - protein, 404 aa, unidentified
  source 1..404: note = protein_9f8ac1d
  REGION 4..161: note = RuvC_domain
  SITE 7: note = RuvC_P1
  SITE 60: note = RuvC_P2
  SITE 100: note = RuvC_P3
  SITE 102: note = RuvC_P4
  SITE 105: note = RuvC_P5
  REGION 266..353: note = Tnp_domain
  SITE 274: note = Tnp_P1
  SITE 304: note = Tnp_P2
  SITE 312: note = Tnp_P3
  SITE 313: note = Tnp_P4
  SITE 326: note = Tnp_P5
MFYCGIDIAKYKHEATVIDETGTALLDSISFANSKEGCEKLLSLFSRLDISREDLLVGMEATGHYWLSVYGYLLEQDFEVKVINPIQSEAFRKMYIRQTKTDRKDSFMIAQIMRFGQFSATNLSEETIVALRQLSRYRLALVDACGDCKRRVIALLDQVFPEYAALFSDTFGVTSKEVLSQYPTPEDLLSVSTRKLSNLLEKTSRGRLGREKAEQMKAAAANSFGVSFAKDAFSFQIRQLIEQLEFLEGQIAELEEQLASLLKQTGSYITTIPGIGDTLGAIILGEIGDIHRFDAPNKLVAFAGLDVRVSQSGEFTGTRQKISKRGSPYLRRAIWLAASRAAFCDPILSKYYQSLRARGKHHLTAIGAVSRKLCNIIFAILSDNRPYEPVPPKGIRHDSADFTT

SEQ ID NO: 15350 - protein, 395 aa, unidentified
  source 1..395: note = protein_ce9b4c6
  REGION 4..157: note = RuvC_domain
  SITE 7: note = RuvC_P1
  SITE 59: note = RuvC_P2
  SITE 94: note = RuvC_P3
  SITE 96: note = RuvC_P4
  SITE 99: note = RuvC_P5
  REGION 284..371: note = Tnp_domain
  SITE 292: note = Tnp_P1
  SITE 323: note = Tnp_P2
  SITE 331: note = Tnp_P3
  SITE 332: note = Tnp_P4
  SITE 344: note = Tnp_P5
MLGVGVDWAESFHDVALGRPGTGVVEQFRIDHGPAGVGRLVARCLELEPDPAEVRIVLETRHGLLVEALVDAGFTVLPVNPDLVARRRGPARKKDDAEEARICCLLALDQYAELRRLIPHGPVGAELRAIARDDERAARDERRLGNRLRADLLAVFPAAVDIADGDLGAPVFLKLLERWPSAAELAAASRDEVEGLARSARHGWPGRFTDRVTDALAQPRLPVRPELARAKTGSIRLAVAQLLLLRTQRRAWERRMGELLLGAPRTGRDKTVKDPDPGKAFPGGEIYLSFPGLGDRLAARVAGEIGERIDQYPTPNALQCYAGAAPVTRRSGRCEFVVARRLAHNRYLGDAVHQWAFCSLTRSAWARQFYDQKIAAGKSHHTALRALGNRWLEVL

SEQ ID NO: 15351 - protein, 400 aa, unidentified
  source 1..400: note = protein_d2ca942
  REGION 11..165: note = RuvC_domain
  SITE 14: note = RuvC_P1
  SITE 62: note = RuvC_P2
  SITE 102: note = RuvC_P3
  SITE 104: note = RuvC_P4
  SITE 107: note = RuvC_P5
  REGION 272..357: note = Tnp_domain
  SITE 280: note = Tnp_P1
  SITE 309: note = Tnp_P2
  SITE 317: note = Tnp_P3
  SITE 318: note = Tnp_P4
  SITE 330: note = Tnp_P5
MVTHETPEVFLGLDVGKTEHWACAITMNQKVVWNKALPNDEAKLIDMYRSLQEHGSLLVVVDQPATIGALAVAVAQHMGIPVAYLPGLTMRRIADLYPGDAKTDEKDAFIIADAARSLPHTLRELTQADTDEATLGMLTGFDLDLSRQVNQVSNRIRGLFTQIHPALEKVLGSRLEHDAILEVLMTWTTPDKLRKAGRARIDAKLKKHGARRHSAWTEEILVALARQTVTVTGTEAAGIVIPHLARQLISLHAQRADVAREVEGIVVNHPLYLVLTSMPGIGLRTCAVIIAELSGKTFTSAAALASYAGLAPTTRQSGTSIKSERVSHSGNKRLKRALFLSAFAVIRTDPTSRAYYNRKRNQGKRHNQAIIALAHRRLTVLYAMLRDNTLYDTPELAQAA

SEQ ID NO: 15352 - protein, 392 aa, unidentified
  source 1..392: note = protein_3c68266
  REGION 6..159: note = RuvC_domain
  SITE 9: note = RuvC_P1
  SITE 57: note = RuvC_P2
  SITE 98: note = RuvC_P3
  SITE 100: note = RuvC_P4
  SITE 103: note = RuvC_P5
  REGION 221..306: note = Tnp_domain
  SITE 229: note = Tnp_P1
  SITE 259: note = Tnp_P2
  SITE 267: note = Tnp_P3
  SITE 268: note = Tnp_P4
  SITE 279: note = Tnp_P5
MDAVNIGVDPHKLSATIEVVDHHGHRLGGGRYATDTDGYRLMRKYVAQWPDRVWAVEGANGAGRPLAQRLLAAGESVVDVPAKLAARVRLFDTGHNRKTDATDAHSIAAVAVHTKGLRVLAVDEGLEVIRMLADRRDELSHLRVQTVNRIQRLLSELLPGQRKRDLSADQAKALLATVKPRDLAGRMRRRITAEEIADLVVLDRKLKKINTELKVAVLERGSHLMDIHGIGPAGAARILADVGDVVRFADRNRFASWTGTAPLDASSGEQIRHRLSRAGNRRMNHVIHIAAIVQIRRDTEGRAYYRRKLAAGKTPMEALRCLKRRISDVIYRQLVADAREAGPGGHCGASDISSAVDLPPHIDTSDQPLPGPVPTTLRPAGAVEQRHHPAAS

SEQ ID NO: 15353 - protein, 393 aa, unidentified
  source 1..393: note = protein_d824e29
  REGION 4..164: note = RuvC_domain
  SITE 7: note = RuvC_P1
  SITE 63: note = RuvC_P2
  SITE 104: note = RuvC_P3
  SITE 106: note = RuvC_P4
  SITE 109: note = RuvC_P5
  REGION 267..354: note = Tnp_domain
  SITE 275: note = Tnp_P1
  SITE 305: note = Tnp_P2
  SITE 313: note = Tnp_P3
  SITE 314: note = Tnp_P4
  SITE 327: note = Tnp_P5
MIYVGIDVAKDKHDCCILGDSGTCLRESFSFSNDKEGFSKLIAAISAVSGKSADSSQIRTGLEATGHYSANLVAFLRSSGFQPVVFNPLRVKLYRQAISLRRTKTDKADAKCIAGILMSEVSSPVTVSYQIQELKSLTRHRHRLVAICSRSKVSMSRMVDLLFPELPSLGLRTGQASTLALMAELPGADMIAACRIDRLTNILRYASKGRYGREKAEAIKSMAKNSIARTSKALSLELSQVIEQIRFFKRQIAFLDRQIAAMVAEINTPLLTIPGIGFRTAAVILAEIGDIRRFKKPDQLQAFAGLDPSTYQSGKFNAANTPMVKHGSTYLRWSLMQAARLCSIHCRDFRNYMEHKIAQGKHYFVALGHLSKKLIRVIFHMLYTNEVFVSMAA

SEQ ID NO: 15354 - protein, 334 aa, unidentified
  source 1..334: note = protein_9a24006
  REGION 10..157: note = RuvC_domain
  SITE 13: note = RuvC_P1
  SITE 60: note = RuvC_P2
  SITE 100: note = RuvC_P3
  SITE 102: note = RuvC_P4
  SITE 105: note = RuvC_P5
  REGION 201..288: note = Tnp_domain
  SITE 209: note = Tnp_P1
  SITE 239: note = Tnp_P2
  SITE 247: note = Tnp_P3
  SITE 248: note = Tnp_P4
  SITE 261: note = Tnp_P5
MSCPANTLLLAFDIGAKRHAYAWEHHDHRETGEIANDLTLLRAFLERLIARAGSVRVLVEATGIYYLDTAMLAQELGAQVSVINPKAGHNFAKALSQRNKTDRLDAAMLLEFLKRMPFTAWQAPRKDLLELRHYGRYLVQLTDESTTARNRLHALSSTQAAPAYLKADLKRAIASLDKRIERIRSHALALIRADAPLLARFEALTSVTGVADISAVALLSELVVLPPSLSARACVCHAGLDPRVFESGTSVHKPPRISRHGNKYLRRALFYPAMAAGRHDPLAAAFKKRLLDKGKKKMQANVAIMRKMLTVAWALMKNPEPYDATKLYSVEQIA

SEQ ID NO: 15355 - protein, 287 aa, unidentified
  source 1..287: note = protein_cc680aa
  REGION 4..98: note = RuvC_domain
  SITE 37: note = RuvC_P3
  SITE 39: note = RuvC_P4
  SITE 42: note = RuvC_P5
  REGION 160..245: note = Tnp_domain
  SITE 168: note = Tnp_P1
  SITE 198: note = Tnp_P2
  SITE 206: note = Tnp_P3
  SITE 207: note = Tnp_P4
  SITE 219: note = Tnp_P5
MEACASAHYWGREIGKIGHEVRLIAPQYVKPFVKRQKNDAADAEAIAEAASRPTMRFVAVKSAEQQSQAMVFKTRDLLLGQRTQAMNALRGHLAEYGVIAPQGIQYFGNLARVVEDGDAALPQAVVELAKELPAHIGILNERISALDERIRNIAKTDETARQLMTIPGIGPITATAMVAMAPPTSTFSKGRDFAAWLGLTPKQNSTGGKTRLGETSKMGQRDLRRLLILGAMAVVQKAARYGAAEGSWLSRMVARKPKMLVAVALANKIARIVWALMARGGVVVRRR

SEQ ID NO: 15356 - protein, 339 aa, unidentified
  source 1..339: note = protein_f56a68a
  REGION 7..149: note = RuvC_domain
  SITE 10: note = RuvC_P1
  SITE 53: note = RuvC_P2
  SITE 88: note = RuvC_P3
  SITE 90: note = RuvC_P4
  SITE 93: note = RuvC_P5
  REGION 207..293: note = Tnp_domain
  SITE 215: note = Tnp_P1
  SITE 245: note = Tnp_P2
  SITE 253: note = Tnp_P3
  SITE 254: note = Tnp_P4
  SITE 266: note = Tnp_P5
MSESALIGIDLGKHTFHLHGQDKSGREVFRKKCSRAQMMQFFGNVPSCVVVMEACAGSHFVARQLMAMGHTAKLISPQFVKPFVKGNKNDFVDAEAICEAASRPSMRFVTPKTESQQTLSVLHRMRESLVHDRTKTANQMHGFLLEFGISLPKGLAIMKRLASVLAEHELPVRLTMLLQRLHDHFVYGQIKELDKELAGQLANDDLGSRLLSMPCVGPITASLLAVEMGDGKQYRCGRDFAASVGLVPRQYSTGGKANLLGISKRGDKNLRRLLVQCARVYLQHIERQKGALADWVRSLLTRRHSNVVACALANKLARIAWAIAARHTQYEAGPDALNA

SEQ ID NO: 15357 - protein, 411 aa, unidentified
  source 1..411: note = protein_b1ef221
  REGION 25..179: note = RuvC_domain
  SITE 28: note = RuvC_P1
  SITE 77: note = RuvC_P2
  SITE 117: note = RuvC_P3
  SITE 119: note = RuvC_P4
  SITE 122: note = RuvC_P5
  REGION 285..372: note = Tnp_domain
  SITE 293: note = Tnp_P1
  SITE 324: note = Tnp_P2
  SITE 332: note = Tnp_P3
  SITE 333: note = Tnp_P4
  SITE 345: note = Tnp_P5
MEDWPEALPVFFILPWEVSVMNYFVGIDVSKEKFDACCIGEQGEKVFSLTCSMDRGGFEKFILQLPEDKVSLFLGMESTASYHIALFSYLTAKGYRVLVLNPLLINNFAKRSLRKTKTDKKDALTIAQFMMREKDVLSTQTPSHLTTELKDLARRRERLADYVTSLKSNMKRILSVTFPELEHITGVFTQSTLRLLAEYPSAHALREADYSHVADIFITKSRGRKSHASVKELMATAGRSVGVVSRAKELVLKQEASLLLHVQKQVKETTNLLMSLANERMKQDMEILCSMKGIGENTAVNFLIEMGGEVEMYENDKKLIAASGLDPSTYQSGKYEGTSRISKRGNRHLRRVIWLMATKVIINNTLFRTYFYKRRKEGLPYKKAVLATAHKLIRVMFAMLSRKTCFVEGGN

SEQ ID NO: 15358 - protein, 407 aa, unidentified
  source 1..407: note = protein_7cf833a
  REGION 5..161: note = RuvC_domain
  SITE 8: note = RuvC_P1
  SITE 58: note = RuvC_P2
  SITE 98: note = RuvC_P3
  SITE 100: note = RuvC_P4
  SITE 103: note = RuvC_P5
  REGION 275..362: note = Tnp_domain
  SITE 283: note = Tnp_P1
  SITE 313: note = Tnp_P2
  SITE 321: note = Tnp_P3
  SITE 322: note = Tnp_P4
  SITE 335: note = Tnp_P5
MNTAVGIDVSKGKSVVAAMRPFGEVALTPREFLHTSADLSAMKEALSLIEGNTRVILEATGRYHEPVVMALREAGIFVSIINPKLIKDFGNNSLRKVKTDKADAVKIARYGLEYWEEMREYTETDTVRQQLKLFSRQYNLHMKTVVSLQNNLISLLDSVFPGINELFTSPVREDGHQKWADFVCTFYHRDCVSEVSVAAFSERYHKWCKRKGYNFSTSKAAEIHAASQEMVVTLPKNALTKTLITTAAEQLIAATTTLVTLKTEFIRLAAMLPEYGVVSSMYGVGDITGAQLMAEIGDVRRFANRGALIAFAGVDPGVNESGKYCSQSVRTTKRGSPHLRKTLFQIVSTHLRQSPQNESVYQFLDRKRAEGKPYLVYMTAAANKFLRIYHAKIRDYLNSLDMTESDT

SEQ ID NO: 15359 - protein, 404 aa, unidentified
  source 1..404: note = protein_c6b49b4
  REGION 5..161: note = RuvC_domain
  SITE 8: note = RuvC_P1
  SITE 58: note = RuvC_P2
  SITE 98: note = RuvC_P3
  SITE 100: note = RuvC_P4
  SITE 103: note = RuvC_P5
  REGION 275..362: note = Tnp_domain
  SITE 283: note = Tnp_P1
  SITE 313: note = Tnp_P2
  SITE 321: note = Tnp_P3
  SITE 322: note = Tnp_P4
  SITE 335: note = Tnp_P5
MYNAVGIDVSKGKSTIAVLQPAGVIIRKPFDVSHTSQQLNELSSYLNSLEGDTKVVMECTGRYHEPMANALHKAGLFVSIVNPHLIKNFGINSLRKVKSDPADANKIARYTLDNWPELRQYSSMDDTRTQLKTLNSQFSFFMKQKVAAKANLIALLDNTYPGVNKLFDSPVRSDGSEKWVDYAYSFWHVDCVRKIGLKAFTERYKAFCKKHHYNFQPLKPEGLFLASKELIAVFPKEKNYKLLIQQSIQQLNLASEHVEQLRREMDALAATLPEYGTVMGIYGVGNTYGPQLMAEIGDVSRFTHREALTAFAGVDPGVDESGQRKSKSNRASKIGSARLRKTLFQIMTTLLQNAPQDDPVYRFLDKKRSEGKPYYVYMTAGANKFLRIYYGKVKECLRNLEQPE

SEQ ID NO: 15360 - protein, 257 aa, unidentified
  source 1..257: note = protein_25bd72c
  REGION 6..149: note = RuvC_domain
  SITE 9: note = RuvC_P1
  SITE 54: note = RuvC_P2
  SITE 89: note = RuvC_P3
  SITE 91: note = RuvC_P4
  SITE 94: note = RuvC_P5
  REGION 140..213: note = Tnp_domain
  SITE 165: note = Tnp_P2
  SITE 173: note = Tnp_P3
  SITE 174: note = Tnp_P4
  SITE 186: note = Tnp_P5
MKLSRVGIDLAKNVYQLHGVDRSGKTLWKRRLKRHQWLKVLLDKTEPGCVIGMEACASAHHWGRELQPRGYTVKLIPPQFVKPYVKSNKNDARDAEAICEAMSRPNMRFVTVKTVEQQDIQATHRIREELKVRRTAKANQIRGLVATVGDARQYHKSRQMAAGIGITPKQHSSGDKHRLLGISKRGDVYLRMLMIHGARSVVTRAKHKDDPLSHWVTEIATRRHPNVAAVALANKNARIAWAMLRHKTDYDPEYAIR

SEQ ID NO: 15361 - protein, 406 aa, unidentified
  source 1..406: note = protein_72af692
  REGION 5..161: note = RuvC_domain
  SITE 8: note = RuvC_P1
  SITE 58: note = RuvC_P2
  SITE 98: note = RuvC_P3
  SITE 100: note = RuvC_P4
  SITE 103: note = RuvC_P5
  REGION 275..362: note = Tnp_domain
  SITE 283: note = Tnp_P1
  SITE 313: note = Tnp_P2
  SITE 321: note = Tnp_P3
  SITE 322: note = Tnp_P4
  SITE 335: note = Tnp_P5
MMNAVGIDVSKRKSTVTILRPGDEVILSPVDIPHTRSSINKLICLIRGLDGDTKVCLECTGRYYEPVASSLSDAGIFVSAVNPLLISMFGDESLHAVKTDKADSSKIARFALARWSKLPQYGLMDETRNQLKTMNRQFGFYTDRKTAMKNNLIALLDQTYPGANSFFDSPARDDGHQKWVDFVYTYWHVDRVRGMSLNAFTRDYEKWCKRAGYNFSPSKAEEVYEASADLIAVLPKDDMTKMLIRQAIDALNAVSAAVETLRIKMNETAATLPEYPVVMGMRGVGPSLGPQLIAEIGDVTRFEKRGSLIAFAGVDPGKDDSGDRNRKSVSTSKKGSPHLRKTLFQVMDALIKTSPVGDPVYDFIDKKRSQGKPYYVYMTAGMNKFLRIYYGRVNEYLAQLEEAEES

SEQ ID NO: 15362 - protein, 395 aa, unidentified
  source 1..395: note = protein_b7605d6
  REGION 5..156: note = RuvC_domain
  SITE 8: note = RuvC_P1
  SITE 57: note = RuvC_P2
  SITE 96: note = RuvC_P3
  SITE 98: note = RuvC_P4
  SITE 101: note = RuvC_P5
  REGION 266..352: note = Tnp_domain
  SITE 274: note = Tnp_P1
  SITE 304: note = Tnp_P2
  SITE 312: note = Tnp_P3
  SITE 313: note = Tnp_P4
  SITE 325: note = Tnp_P5
MKHILSFDIAKGKSVYCFIDELKNTIIDATLIEHNKNEFDKLYNSIKNYSNLIVIMESTSIYHLPIENYFRSKAIDTIVINPKLVKQFKDTLNKSKTDKLDCFKIARCYLGTIDNFYFKNDEYFMYNPLAHQYWSLVEGQTRLKNRYKQLIEIVFPEFNLIFNDLYSDLALNFIHDFPHPSLFVNRRIDYLMNYLKEKNGTTQAFRFKNKVLKMKELASNSLCFVAFDSLQVQNLVQTIEMIQYHKSEINKIKNQLINEMKNKKLFKIINSIPGFGEFSTALFLAEVGDITRFDDKYQFISFIGIYSVTSQSGVSAYHGPISKTGCKFGRTILFNIVTTIIQISAHTNKSNPIYLFFRKKQSEGKHHYKCIIACETKLCKIIYKLCTSDCLYENK

SEQ ID NO: 15363 - protein, 314 aa, unidentified
  source 1..314: note = protein_16e8fe9
  REGION 1..76: note = RuvC_domain
  SITE 13: note = RuvC_P3
  SITE 15: note = RuvC_P4
  SITE 18: note = RuvC_P5
  REGION 184..270: note = Tnp_domain
  SITE 192: note = Tnp_P1
  SITE 222: note = Tnp_P2
  SITE 230: note = Tnp_P3
  SITE 231: note = Tnp_P4
  SITE 243: note = Tnp_P5
MRQLSRIHAGNSKTDVRDVYIIACAGKYLPESLRQVDRVEEAFIQLKVLNGIDEDLTRSYTRLINQIRSALVGTYPEFEHVLRGQMIHRKWILHLLAKYAGPSKIKRLGKARVNAFARKHRARNPEPVTDAIFVAIAGQSVQIAGAKYAEVGVSMSAKDALLKLEHRKEIEAEVTELIDEIPQTQLLLSMPGLGPRSAAQILMTVGDMSDFPTAGHLASYAGLSSRTNQSGTSIMSNSLNRAGNKKLKNALWQSSFASIRFHERSRQFYERKRNEGKRRNAAVVALARRRLNVLFAMMENHEFYREPQSEVTAA

SEQ ID NO: 15364 - protein, 387 aa, unidentified
  source 1..387: note = protein_7b8768f
  REGION 5..161: note = RuvC_domain
  SITE 8: note = RuvC_P1
  SITE 59: note = RuvC_P2
  SITE 100: note = RuvC_P3
  SITE 102: note = RuvC_P4
  SITE 105: note = RuvC_P5
  REGION 261..347: note = Tnp_domain
  SITE 269: note = Tnp_P1
  SITE 299: note = Tnp_P2
  SITE 307: note = Tnp_P3
  SITE 308: note = Tnp_P4
  SITE 320: note = Tnp_P5
MIYYIGIDISKYKHDFCIISNTDEIIVENSSFENNKKGFQFLLDQLKPYNKSDVQIAFEATGNYSLNLELLLIDQGYSFMKMNPLVIHQFLKARSLRRTKTDKADSLTIANYLMSVPYKPNSNLLYNIFSLKSLCRSREQLIKERCKYQVLLTNELDLTFPELKPFFNNNFSATLLFILGKYINTEHISLMRDYDSIRATSRGKFSYAKFAKLRKLAKNSVGRHDENTDLLISTYISIIRTFNDKIDPIEKQISTIIKVLNPRMLTIPGLGEISAATILSEYGDINNFSSPNKMLAFAGLEPSIIQSGTIENNGKMVKHGSGHLRYSIMNTAMNILRYSPTFYDYYLKKRSEGKCHRVALSHVCKKLLRVIYTLEKNNINFNPSLLK

SEQ ID NO: 15365 - protein, 334 aa, unidentified; identical to SEQ ID NO: 10294
  source 1..334: note = protein_487b02a
  REGION 6..147: note = RuvC_domain
  SITE 9: note = RuvC_P1
  SITE 51: note = RuvC_P2
  SITE 86: note = RuvC_P3
  SITE 88: note = RuvC_P4
  SITE 91: note = RuvC_P5
  REGION 208..301: note = Tnp_domain
  SITE 216: note = Tnp_P1
  SITE 246: note = Tnp_P2
  SITE 254: note = Tnp_P3
  SITE 255: note = Tnp_P4
  SITE 267: note = Tnp_P5

SEQ ID NO: 15366 - protein, 306 aa, unidentified
  source 1..306: note = protein_423b1e6
  REGION 7..149: note = RuvC_domain
  SITE 10: note = RuvC_P1
  SITE 53: note = RuvC_P2
  SITE 88: note = RuvC_P3
  SITE 90: note = RuvC_P4
  SITE 93: note = RuvC_P5
  REGION 209..272: note = Tnp_domain
  SITE 217: note = Tnp_P1
  SITE 247: note = Tnp_P2
  SITE 255: note = Tnp_P3
  SITE 256: note = Tnp_P4
MENIALIGIDLGKNSFHIHCQDRRGKAVYRKKFTRSKLIEFLATCPATTIAMEACGGSHFMARKLEELGHFPKLISPQFVRPFVKSNKNDFVDAEAICEAASRPSMRFVQPRTESQQAMRALHRVRESLVQDKVKTTNQMHAFLLEFGISVPRGSAVISRLSTILEDNNLPLYLSQLLLKLQQHYHYLVEQIKELESQLKRKLDEDEVGQRLLSIPCVGTLTASTISTEIGDGKQYASSRDFAAATGLVPRQYSTGGADNIVGHQQARQQEDTNLAGSVRQSIYTKTGTPVRQVGRLGPGVTVPEK

SEQ ID NO: 15367 - protein, 344 aa, unidentified
  source 1..344: note = protein_5e1bdd3
  REGION 5..152: note = RuvC_domain
  SITE 8: note = RuvC_P1
  SITE 55: note = RuvC_P2
  SITE 92: note = RuvC_P3
  SITE 94: note = RuvC_P4
  SITE 97: note = RuvC_P5
  REGION 212..312: note = Tnp_domain
  SITE 220: note = Tnp_P1
  SITE 250: note = Tnp_P2
  SITE 258: note = Tnp_P3
  SITE 259: note = Tnp_P4
  SITE 271: note = Tnp_P5
MEHYAGIDVSLESSAVCVIDATGRVVCEGKVATEPETLIDWLRQSDVAFARIGLEAGPLSQWLYAGLREAGFPIELLETRHVRAAFRTMPVKTDRKDARGIAQLMRLGWFRPVHCKSMAAQELRAILTARKLVQGKLHDVEMSLRGILRGFGLKVGPTTRRTFADRVRELVAGHPTLQMIAEALLSASDELGRQLGQFEAQVRSLARRNPKARLLMSTPGVGAVVALTYVAAIDDPARFRSSRTVGAHFGLTPRKYQSGETDVTGRISKIGDVGVRTALYEAANVILTRPVKGSTLKSWAMRVAARAGMRKAKVALARKLAVVLHRMLAGGTAFDATMAAAPRA

SEQ ID NO: 15368 - protein, 402 aa, unidentified
  source 1..402: note = protein_347b07b
  REGION 7..158: note = RuvC_domain
  SITE 10: note = RuvC_P1
  SITE 57: note = RuvC_P2
  SITE 96: note = RuvC_P3
  SITE 98: note = RuvC_P4
  SITE 101: note = RuvC_P5
  REGION 269..358: note = Tnp_domain
  SITE 277: note = Tnp_P1
  SITE 307: note = Tnp_P2
  SITE 315: note = Tnp_P3
  SITE 316: note = Tnp_P4
  SITE 328: note = Tnp_P5
MIFINCLGIDIGKSESVVAHYKDEVLVKEMVIQNNQNGYRYLKNYIKHLDSLFILFESTGIYSRGMKRFCEIHKIDYLEMNPLEAKFKTSSLRSWKTDKSDAHKLALLAFRMKDSKVQRQSEEIYFELRERARFHLEMEINQNRLKVELVETLHQTFPGLEKLFTNRYSKIALNIAKAFPHPDFVSTLTHDELVEKVLHSTDKGISVNKAHKYVQKLIEIQINSFPNVDKSSFLLQKVQYLCDKLLIGIEEMKEFDQEMIDLAKNTTEFENIISIPGIGELTAALLIGELGNIREFKTNKQLNAFVGIDIKRYQSGTSKSRDTINKRGNKKARRLLYLIIVNIIRGRNHYQSHIVDYYYKLREQPHGKTHKTAVIASINRLLKTIHYLIVNNKLYDYQKAPH

SEQ ID NO: 15369 - protein, 356 aa, unidentified
  source 1..356: note = protein_72ba9c9
  REGION 7..152: note = RuvC_domain
  SITE 10: note = RuvC_P1
  SITE 56: note = RuvC_P2
  SITE 92: note = RuvC_P3
  SITE 94: note = RuvC_P4
  SITE 97: note = RuvC_P5
  REGION 217..300: note = Tnp_domain
  SITE 224: note = Tnp_P1
  SITE 253: note = Tnp_P2
  SITE 261: note = Tnp_P3
  SITE 262: note = Tnp_P4
  SITE 274: note = Tnp_P5
MVEGSWVGLDVHARSVLASVLDAGSGELQTLRVPPRSEETVGWLLGLPAPVRVAYEAGPTGYVLARACAQAGIACTVAAPSKIPRAPGDRVKTDRRDAERLARLLRLGELVAVRLPEPHEEAARDLVRAREDARGDLMRARHRLSKLLLRHGLVYEGSAWTLAHEGWLRRQRFERRALALAFDESYGAVSQAKGRRDALDRAIAELASEPPFVEVVGRLICLRGVSTLTALALTVELGDWRRFRPHSLGPFLGLVPSEDSSGERRRQGAITNTGNTHARRLLVEAAWHQRRPLRASTALERRRQGQPAAVRSQADQSARRLHARWHALERRGKRRTIVAVAVARELAGHCWALATM

SEQ ID NO: 15370 - protein, 411 aa, unidentified
  source 1..411: note = protein_dad1f56
  REGION 4..170: note = RuvC_domain
  SITE 7: note = RuvC_P1
  SITE 67: note = RuvC_P2
  SITE 107: note = RuvC_P3
  SITE 109: note = RuvC_P4
  SITE 112: note = RuvC_P5
  REGION 278..364: note = Tnp_domain
  SITE 286: note = Tnp_P1
  SITE 317: note = Tnp_P2
  SITE 325: note = Tnp_P3
  SITE 326: note = Tnp_P4
MIWIGDDWAEDHHDIEILDEGGHRLARARLPEGLEGITRLHTLIAEHLPDSWSDLDPVQASGQVGIGIETDRGTWVQALLAAGYQVYAINPMSSARYRERHSTSGAKSDAGDAHVLAEIVRLDHDHHRQVAGDSPAAEAVKLLARAHQSLVWDRTRQVLRLRSVLREFFPAALQAFDDLAASDALELLDRAPDPDQAARLTRLTVVAVLRRAGRRDLDGRAITLQQIFKQQQLRQPRPVQTAYAAIVSSQVQLINILNIEIDELGRVMADHFGRHRDAERYLSLPGLGMVLGARILGEFGDDPHRYTDAKARRNYAGTSPITRASGRRRVVLARYARNRRLADAVHQWAFCAMRGSPGARAYYQALRGRGIGHQAALRQLGNRLVGILHGCLKTKTSYDEATAWAHLQPTT

SEQ ID NO: 15371 - protein, 315 aa, unidentified
  source 1..315: note = protein_fd2fb47
  REGION 9..153: note = RuvC_domain
  SITE 12: note = RuvC_P1
  SITE 56: note = RuvC_P2
  SITE 96: note = RuvC_P3
  SITE 98: note = RuvC_P4
  SITE 101: note = RuvC_P5
  REGION 188..273: note = Tnp_domain
  SITE 196: note = Tnp_P1
  SITE 225: note = Tnp_P2
  SITE 233: note = Tnp_P3
  SITE 234: note = Tnp_P4
  SITE 245: note = Tnp_P5
MAQGDGIVVGIDVAKDKVDGCVRKLSVRQTFPSTAQGHRKLITWLRKHKVTKAVMEASGGYERGWAKTLRAAGIAVRIVDPKRVRSFAQSAGRLAKNDVIDAEMIAWFAETFDAAPAQCYDAAREELQTLVNARQALLDMRSKLHNQSEHAVPPPVQQMQTRLSKSIAAEIAAIAAMIKATPHFAARAEIIESVPGLADVATFSLVAALPELGQVNDKIAAALLGAAPYDDDSGRRRGERHIRGGRRKLRNAFYMATLGAATQHNPMLKAFYQRLIAKGKKPKVALVACMRKLIVILNAMIRRGEKWDPNRYAIR

SEQ ID NO: 15372 - protein, 288 aa, unidentified
  source 1..288: note = protein_b816a80
  REGION 7..92: note = RuvC_domain
  SITE 31: note = RuvC_P3
  SITE 33: note = RuvC_P4
  SITE 36: note = RuvC_P5
  REGION 155..242: note = Tnp_domain
  SITE 163: note = Tnp_P1
  SITE 193: note = Tnp_P2
  SITE 201: note = Tnp_P3
  SITE 202: note = Tnp_P4
  SITE 214: note = Tnp_P5
MTPEGRELVALGHTVKMMPPAYVKAYVKRGKTDAADAEAICEAVTRPTMRFVPIKSREQQAALSMHRARNLLVKQRTQSVNMMRGLLAEFGINIPEGLERALTMARQVLEGEAPDVPAAAVKIIFALSQQSLDTHSHVREIDRALAALQRSDEMARRLATIPGIGPIGATALAASVTDPGQFRSGRQFAAWLGLTPLQNSSGGKERLGRISKMGDKYLRRLLVIGATALVRYAKSKPETAHPHLINLLARKPVRVATVAMANKMARIIWAVMTRGEVYQPDHVPALSA

SEQ ID NO: 15373 - protein, 332 aa, unidentified
  source 1..332: note = protein_0af5e82
  REGION 23..168: note = RuvC_domain
  SITE 26: note = RuvC_P1
  SITE 69: note = RuvC_P2
  SITE 109: note = RuvC_P3
  SITE 111: note = RuvC_P4
  SITE 114: note = RuvC_P5
  REGION 209..293: note = Tnp_domain
  SITE 217: note = Tnp_P1
  SITE 246: note = Tnp_P2
  SITE 254: note = Tnp_P3
  SITE 255: note = Tnp_P4
  SITE 266: note = Tnp_P5
MRPTRTAEQKEESMNTVSSEQVIGIDVSRDWLDIYCLPDRKRLRLPNTSEGHAHVVSLARRRGALVCFEATGGQEWRLWASLDAARIVARQLPPAQVKAFAASRGTRAKTDRIDAELIARFMVFRPEAGRRHPTGKLRAIRASTSKRAQLVEMRKRLLVQIKAHEKLATAGMFTDMDVELKALLDTRISELEERIEQAVAADGTLAETARILRSIPGVGPVASTMLIAEMPELGAISGEQAAALTGLAPIAHDSGALRGKRTIAGGRRALRHVHFQAALVAANHNPTLKAFAQRLRDAGKPHKVIITAVARKLVNIANALCKARKPWGLQGA

SEQ ID NO: 15374 - protein, 309 aa, unidentified
  source 1..309: note = protein_5c11efd
  REGION 1..86: note = RuvC_domain
  SITE 23: note = RuvC_P3
  SITE 25: note = RuvC_P4
  SITE 28: note = RuvC_P5
  REGION 188..273: note = Tnp_domain
  SITE 196: note = Tnp_P1
  SITE 225: note = Tnp_P2
  SITE 233: note = Tnp_P3
  SITE 234: note = Tnp_P4
  SITE 246: note = Tnp_P5
MSAAYLPGLAAHGAARLFAGDAKTDERDAMVIAKTALGIPDALLPVGDPGPTVAAARALAAQRNFLTCENTRNKNRLRSILLESCPAFEALVDLSDGPQLRLMASLGGAWSVADAGPRRAAALTRGAARGKIEALVRSTASSTRPDASAVAAEDRAVKLLARRISENSAEIEAITAEISALLEGDDTYRCLLTVPGIGPKTASELAISIDIEDFPSHDRLASYCGLAPRNRQSGTSISSVTASRQGNKRLKNLLIFSCNCLTRTEGRWGDYYTRCRERGMSHGKALKALARKRLKVIYAVMRDRVPYAA

SEQ ID NO: 15375 - protein, 388 aa, unidentified
  source 1..388: note = protein_f81131e
  REGION 4..160: note = RuvC_domain
  SITE 7: note = RuvC_P1
  SITE 58: note = RuvC_P2
  SITE 99: note = RuvC_P3
  SITE 101: note = RuvC_P4
  SITE 104: note = RuvC_P5
  REGION 262..348: note = Tnp_domain
  SITE 270: note = Tnp_P1
  SITE 300: note = Tnp_P2
  SITE 308: note = Tnp_P3
  SITE 309: note = Tnp_P4
  SITE 321: note = Tnp_P5
MYLVGIDISKYKHNCFIATEAGVILKEFIFENNRSGFKLFHKSLKNLDQTQDIRIGLESTGHYGTNLKQFIAASGYTYIEFNPYLTHQFAKAMSLRRTKTDKVDARTISNMLGSVDYKTLHTRFYHINELKQLVRDRDDILMNRSKTLVKLTNVLDIVFPEFKPFFNKRFGTTARFILKKYKSAKKISTLTMLDFDSLRSLSKGKFTYARFSHLKSLAKDTVGVQSPVYTGRIVSLLKDYDYFDQSLEHIDQNIISLFSNVETKLTTIPGLGIIQAATIYAETGDIRRFPNPQKLIAFAGFDTSINQSGISEHHGKLVKHGSLLLRKTIWVYALTALKSMPIFHDYYRKKRQEGKIHKVALTHVCRKLIRMIYHIEYHQIDFNEQLMK

SEQ ID NO: 15376 - protein, 376 aa, unidentified
  source 1..376: note = protein_c9ed431
  REGION 51..206: note = RuvC_domain
  SITE 54: note = RuvC_P1
  SITE 106: note = RuvC_P2
  SITE 144: note = RuvC_P3
  SITE 146: note = RuvC_P4
  SITE 149: note = RuvC_P5
  REGION 249..337: note = Tnp_domain
  SITE 257: note = Tnp_P1
  SITE 287: note = Tnp_P2
  SITE 295: note = Tnp_P3
  SITE 296: note = Tnp_P4
  SITE 309: note = Tnp_P5
MRTIAIDGLPACLNPDPDSRLTSIVKVVRLSSIPFFPKRLKDKSMESFYFIGVDVSKKKLDFCVMFEGEVVHEEKTANHPSAIMALIHHLEENYGIEGSRMLVCAEHTGQYTFPLACACKALECKLWLENPAEIKYSSGVQRGKNDKVDAKRIAIYACRFQDKVQYYERPTEDIERLKQLESERTLYVNDLAKYKGQLNDQKDYMPKDLYERKIKRLKALMEDLEEAIQSITDEMDEVIASCSVLSRQRELLMSIDGVGRVVATNMIIATEAFTRFDDPRKFNCYAGVAPFSYSSGSSLHSKARVSHRADKVMKRLLHLAAVAITHRIGGELKKYYERKVAEGKNKMSVINALRAKIVARMFAVIKRNEKYKPILS

SEQ ID NO: 15377 - protein, 322 aa, unidentified
  source 1..322: note = protein_4d8991a
  REGION 9..157: note = RuvC_domain
  SITE 12: note = RuvC_P1
  SITE 56: note = RuvC_P2
  SITE 96: note = RuvC_P3
  SITE 98: note = RuvC_P4
  SITE 101: note = RuvC_P5
  REGION 195..279: note = Tnp_domain
  SITE 203: note = Tnp_P1
  SITE 232: note = Tnp_P2
  SITE 240: note = Tnp_P3
  SITE 241: note = Tnp_P4
  SITE 252: note = Tnp_P5
MSQPNPLCVGIDVSKATLDVAVNSSIVQFSVSNDADGFDAIIAELKKYPVALILMEATGGLEAAVACALQAESFEVAVINPRQARDFAKAMGYLAKTDRIDARVLTQMAEVINRHPERERFIKAIPDAQRQILAAMVVRRRQLIAMLVAERNRLYPAHPQSRKSINIIIGALEIELSRIDDDMNNHIRIHFKALAERLSRIKGIGTMTVAALLAEVPELGHLSRRKISALVGVAPVNRDSGMMRGRRTIFGGRAGVRSALYMATLVATRFNPVIRGFYTRLVESGKVKKVALVACMRKLLTILNAMLRKNEDWDESYHQAAT

SEQ ID NO: 15378 - protein, 345 aa, unidentified
  source 1..345: note = protein_58b85cc
  REGION 6..147: note = RuvC_domain
  SITE 9: note = RuvC_P1
  SITE 51: note = RuvC_P2
  SITE 86: note = RuvC_P3
  SITE 88: note = RuvC_P4
  SITE 91: note = RuvC_P5
  REGION 210..298: note = Tnp_domain
  SITE 218: note = Tnp_P1
  SITE 250: note = Tnp_P2
  SITE 258: note = Tnp_P3
  SITE 259: note = Tnp_P4
  SITE 271: note = Tnp_P5
MKNTIAGVDLAKEVIQVCLCTNNKVHSNIEMPHHEFLTWLFTSKPMSIIFEACGTSNYWKQRAIEAGHDAQLISAKLVASIRQNQKTDKNDALAIVQASQLTDIQFVKGKSVEQQQLQSMMRLRELAIKQKTASSNQIKALLLEFNIRVSPKKGGLKGVIESLLEDAENGFSFEFRHALNTAWGLHLGLLDSIRVYDRCLETSIDEHDDCKRLLKLEGVGTLNAINLYIALGCADLGVFNKGKDASACIGLTPLQHSSGGVTKLGHIRKNARSSTLRSQLITGAMAVVNQIMKRTAVTKKEAWIQGLVARRGKKCAAVALANKTVRTAYVMLTQGTEYKAELVAA

SEQ ID NO: 15379 - protein, 427 aa, unidentified
  source 1..427: note = protein_1724235
  REGION 11..176: note = RuvC_domain
  SITE 14: note = RuvC_P1
  SITE 67: note = RuvC_P2
  SITE 107: note = RuvC_P3
  SITE 109: note = RuvC_P4
  SITE 112: note = RuvC_P5
  REGION 276..361: note = Tnp_domain
  SITE 284: note = Tnp_P1
  SITE 314: note = Tnp_P2
  SITE 322: note = Tnp_P3
  SITE 323: note = Tnp_P4
  SITE 334: note = Tnp_P5
MSEEKSIELRVSVDVGYRRHSVAIGLPSGEVLEEFEIEHRLEGFQDFFSRIEKHNPKQGYSVAVAMEGYNGYARPLDSMVRQRGYRLYNINNLKLARFKEIFPGAAKSDRIDARKGLELFQLRDHLPLAKEVLQEVSGTPQHNEVLKRLTRRRRRLVNERVRVVNNLQADLQAVCPGLLEITSEASNQWFLNFLLSADTLPQLARLRKASLLKIPAVGKKYASLIEAWQKRAHFGAEVEWVSEMIQEDAQRCLDLEEKIKTLETKIQQVATDSKIAKTLLSIPGFGPVCTSELAGEIGTIERFSKEGSLALYLGMSTLDNSSGKYQGTKAPKHVNTRAKAAMMIALDRHRKYVPESQRYYEKKRSEGKRHNQAIRALGRHLCRIIYKMLKEQREYQLRSEKGDTQARVRSRSCVKTRIRRPKASAKS

SEQ ID NO: 15380 - protein, 391 aa, unidentified
  source 1..391: note = protein_e5ee6bf
  REGION 4..163: note = RuvC_domain
  SITE 7: note = RuvC_P1
  SITE 60: note = RuvC_P2
  SITE 101: note = RuvC_P3
  SITE 103: note = RuvC_P4
  SITE 106: note = RuvC_P5
  REGION 266..353: note = Tnp_domain
  SITE 274: note = Tnp_P1
  SITE 304: note = Tnp_P2
  SITE 312: note = Tnp_P3
  SITE 313: note = Tnp_P4
  SITE 326: note = Tnp_P5
MISVGIDVAKDKHDCFIVSSEGKVLADVFTIPNSIDGFYCLLQRIRDCTPPGDKIKVGLEATGHYSYNILGFLLDNGLATYVLNPLHTNLYRKSLSLRKTKTDRVDARTIAAMLLSDVGLKPYTDTAYLNEELKSLTRYRFDKVKERGRLKQSIARLVCILFPELEKLVPTLHMVSVYALLEEFPGAEQIAEAHLTRLKTLLHDASRGRYGRDMALNIREAARKSIGSVMPAKSLELRHTIHLVRELDAEIDEIETAIQNIMNELHSPITTIPGIGTRMGAMILAEVGDFSRFESPNKLLAYAGLSPSTYQSGQLKNCYAHMEKRGSRYLRYAIYNATKYVCLWDPTFAAYLSKKRAEGKHYNVAISHAAKKLIRLIYALEKSRESYRMAA

SEQ ID NO: 15381 - protein, 344 aa, unidentified
  source 1..344: note = protein_8b56b55
  REGION 6..147: note = RuvC_domain
  SITE 9: note = RuvC_P1
  SITE 53: note = RuvC_P2
  SITE 86: note = RuvC_P3
  SITE 88: note = RuvC_P4
  SITE 91: note = RuvC_P5
  REGION 209..299: note = Tnp_domain
  SITE 217: note = Tnp_P1
  SITE 249: note = Tnp_P2
  SITE 257: note = Tnp_P3
  SITE 258: note = Tnp_P4
  SITE 271: note = Tnp_P5
MKNTIVGVDLAKDVIQVCITKRNKVLSNKEMIPSEFSAWLATSNSATIVFEACSTANHWQQLAHSYGHDARQISAKLVANIRQNQKTDKNDALAVAQACSLPEVKFVSGKTFKQQELQSIVRIKELSVKHKVAVENQIRALLLEFGIRTPTKGSIVNVVELTLEDADNGFCDELRDSLAIAFNGYLDLVGAIKKYESALERVANSNADCRKLMALEGVGPMNAVNLYMLLSCGEMGTFRTGKDASACVGLTPIQHSTGGKAKLGSIGKHIRNHSMRSVLVSGAMAVCSQVKRRVPRTTKETWLKGLIERRGMRCAAVALANKTVRTAFSLLANDTEYKAIPVAS

SEQ ID NO: 15382 - protein, 263 aa, unidentified
  source 1..263: note = protein_64fb1f9
  REGION 7..149: note = RuvC_domain
  SITE 10: note = RuvC_P1
  SITE 53: note = RuvC_P2
  SITE 88: note = RuvC_P3
  SITE 90: note = RuvC_P4
  SITE 93: note = RuvC_P5
  REGION 212..258: note = Tnp_domain
  SITE 220: note = Tnp_P1
  SITE 250: note = Tnp_P2
MSTQFFCGIDLAKHHFSLHAVDDHGKLILHKSVSRAKLLGTLANMPTMCIGIEACSGAHYWAREFNKLGHDTRIMAAKYVGPYRTKGKNDLNDAVAICDAVQRPNSRFIPVKSPERQAILATHRVREHWVNERTALINRIRALLAEFGIIILTGRAAIHREVPLILEAAENGLPDIARAVVADCFDHLQTLNQRIADTEQCFDMVTKASPNAQRILNVRGIGPQTATAIIATIGKGEQFDSGRDFAAWLGLCPNSTQPEESLD

SEQ ID NO: 15383 - protein, 323 aa, unidentified
  source 1..323: note = protein_928d7ae
  REGION 8..172: note = RuvC_domain
  SITE 11: note = RuvC_P1
  SITE 65: note = RuvC_P2
  SITE 111: note = RuvC_P3
  SITE 113: note = RuvC_P4
  SITE 116: note = RuvC_P5
  REGION 283..323: note = Tnp_domain
  SITE 291: note = Tnp_P1
  SITE 321: note = Tnp_P2
MNQDKLYVGIDVSSKNNVCYLMYSDGSKHSSFSVPNNRNGAKIIVDRVTSVLLLQDIPQVVIGMEATSVYGDNLMRFLRESGSLGRFERSLHMLNPKQVKKFRDAYSDLPKNDHVDSYVIADHLRFGRINKEVYMDDYKYQALKMYTRARHQLVQELTREKQRFLNTVFISFSGLTQEKIFSNKFGATSMALIEEFSSLDELAYMSTDELVDYIRKKGKNHFENPEEIAEAVQRAAKNSYRPPQVIADAAKQMLAISMNTIRLLQKQIKEYDKAIEKMLEAFPQTLTSVKGIGNIYAAGIIAEIGDINRFPSQASLAKYAGLV

SEQ ID NO: 15384 - protein, 404 aa, unidentified
  source 1..404: note = protein_3b125db
  REGION 4..160: note = RuvC_domain
  SITE 7: note = RuvC_P1
  SITE 57: note = RuvC_P2
  SITE 97: note = RuvC_P3
  SITE 99: note = RuvC_P4
  SITE 102: note = RuvC_P5
  REGION 275..362: note = Tnp_domain
  SITE 283: note = Tnp_P1
  SITE 313: note = Tnp_P2
  SITE 321: note = Tnp_P3
  SITE 322: note = Tnp_P4
  SITE 335: note = Tnp_P5
MNAVGIDVSKGKSTVSVLRPFREVVATPFDVAHTGSDLKVLADFIKKLQGETRVVMEATGNYYEPIARYLHEQNIFVSVVNPVLISDFGENTLRKPKTDKKDSLKIASYALNYWTDLKEYVPQEDLRKSLKLLNRQYQQASKIKTMIHNNLVSLLDLTFPGINKQFSSTSRESDGHEKWVDFVLAFPHCNMISKLTIKAFSRKYKKWCNNNSYYFSETACENIYDFSKECVSSISSEESNGFAVIQAARMLNSAIENCHAIQLEMNRLAARLPEYNTVMSMYGVGKVVGPQLIAEIGDPRRFHNRKAITAYFGYDSENYDSGQKVSVSNSMTKKGASALRRTLFIIMQILLKKKPTDNPVYDFMIKKQSEGKHYYSYMNAAANKFLRIYYARVKEALTAAEATT

SEQ ID NO: 15385 - protein, 341 aa, unidentified
  source 1..341: note = protein_cefc545
  REGION 6..147: note = RuvC_domain
  SITE 9: note = RuvC_P1
  SITE 52: note = RuvC_P2
  SITE 87: note = RuvC_P3
  SITE 89: note = RuvC_P4
  SITE 92: note = RuvC_P5
  REGION 209..300: note = Tnp_domain
  SITE 217: note = Tnp_P1
  SITE 247: note = Tnp_P2
  SITE 255: note = Tnp_P3
  SITE 256: note = Tnp_P4
  SITE 268: note = Tnp_P5
MQAITVGLDIAKSVFQVHGVDADGQVVIRRQLKRRYVLAFFEKLAPCVIGIEACASSHHWSRQLRALGHTVRLMPPAYVKPYVKRQKNDATDAEAICEAVGRANMRFVPTKTPEQQSGLVLHRTRHLFIRQQTSVINAIRAHCAEFGIVAPVGRRGVEELLNVIANEKRVPELARACLLALGAQLRRIKEQILEFDRMITAWHRGCETSRRLDEIPGVGPALATAVVASIADPRAFRSGRDFSAWIGLVPKQSSSGGKPKLGSISKQGDRYLRGLFTAGALAVIRYAKIRGTGHRPWLTALLARRPIKVAAIALANKIARMVWAMMARGERYREPVALVAY

SEQ ID NO: 15386 - protein, 346 aa, unidentified
  source 1..346: note = protein_5511f13
  REGION 7..147: note = RuvC_domain
  SITE 10: note = RuvC_P1
  SITE 53: note = RuvC_P2
  SITE 88: note = RuvC_P3
  SITE 90: note = RuvC_P4
  SITE 93: note = RuvC_P5
  REGION 210..294: note = Tnp_domain
  SITE 218: note = Tnp_P1
  SITE 248: note = Tnp_P2
  SITE 256: note = Tnp_P3
  SITE 257: note = Tnp_P4
  SITE 269: note = Tnp_P5
MNQIIRIGMDTSKHIFQLHGVDAAEQVGLRKRLGRQQMVAFFAKLPPTVIGMEACGASHHWARVLGKFGHEVKLIAPQHVKPYVMRNKNDGRDADAVCEATGRPRMRFVPVKTAEQQAALMLTGLREQMVARRTQLSNTIRGYAAEFGVTVAKGLDKIEPLLAQIARDESVPALARELFAMQGGEYAQLQVELKAIEVKLRAWHRGNADSRRLAKIPGVGPIGATALVMKTPDPRAFPSGRHFAAWLGLTPKDHSTAGKTRLGKITRAGDERLRNVLVAGATAVIQQAKHGRGHPSPWVVALLKRKPPKLAAVALANKIARIAWKLLATGESYDGARMPGASASAA

SEQ ID NO: 15387 - protein, 345 aa, unidentified
  source 1..345: note = protein_ab77126
  REGION 6..150: note = RuvC_domain
  SITE 9: note = RuvC_P1
  SITE 54: note = RuvC_P2
  SITE 89: note = RuvC_P3
  SITE 91: note = RuvC_P4
  SITE 94: note = RuvC_P5
  REGION 213..299: note = Tnp_domain
  SITE 221: note = Tnp_P1
  SITE 251: note = Tnp_P2
  SITE 259: note = Tnp_P3
  SITE 260: note = Tnp_P4
  SITE 272: note = Tnp_P5
MKSIRVGVDLAKLVFQVHGVNREEKPVLRRRLARDTWIDELIEQVEPGCVIGMESCAGAHHWARLLQSRGFTVKLMAPQFVKPYVKSNKNDANDAEAICEAMSRNSMRFVAVKRIEQQDIQAVHRVRSELIEQRTAKANQIRGLVAEYGLVAPKEMTQLRRAVPIWLEDADNGLTYRFRRLLRGLWGDVLVLDSRVKELDQEIELIAQSHPLAKLLMQLRGVGPIVATALIAAVGDGAQFKNGRQMSAAIGITPRQHSSGGKERLLGISKRGDSYLRAMLIHGARSVIRMAKAKDKTDRLSQWVMSLAQRRHPNVAAVALANKTVRIAWAMLRTGKDYQPALAMG

SEQ ID NO: 15388 - protein, 387 aa, unidentified
  source 1..387: note = protein_5ac7e76
  REGION 4..159: note = RuvC_domain
  SITE 7: note = RuvC_P1
  SITE 58: note = RuvC_P2
  SITE 98: note = RuvC_P3
  SITE 100: note = RuvC_P4
  SITE 103: note = RuvC_P5
  REGION 263..350: note = Tnp_domain
  SITE 271: note = Tnp_P1
  SITE 301: note = Tnp_P2
  SITE 309: note = Tnp_P3
  SITE 310: note = Tnp_P4
  SITE 323: note = Tnp_P5
MNYVGIDIAKQTHYASIMNSDGEILVDPFPFSNDLSGFQKLLKNLSAFSKDNVLIGMESTAHYAENLTSFLFTRGFHICIINPIQTSTLRKSNIRKTKTDSVDTYLIIKALSLNHYRLFTERDYDSLQLKNLCRFRQKLMKARTKVKIQLVTYVDLLFPELQYFFKSGIHGKACYALLKEQPNPDRIAKMHLTRLTNLLSKTSKGHYKQSHAVQLKELASQSVGIKNSTLSLQILQSINQIELYNSQLEEVENEIKTIMERIDSVIKTIPGIGSLNGAMIIGEIGDITRFQKTCQLLAYAGLDPSVYQSGNFNAARTRMSKRGSKLLRYALINAAWQTTLVNNTFKNYYDLKVSQGRRHYNALGHVAHKLVRVIHKMMTDNIEFDLA

SEQ ID NO: 15389 - protein, 334 aa, unidentified
  source 1..334: note = protein_f28c32d
  REGION 11..157: note = RuvC_domain
  SITE 14: note = RuvC_P1
  SITE 62: note = RuvC_P2
  SITE 100: note = RuvC_P3
  SITE 102: note = RuvC_P4
  SITE 105: note = RuvC_P5
  REGION 207..292: note = Tnp_domain
  SITE 213: note = Tnp_P1
  SITE 243: note = Tnp_P2
  SITE 251: note = Tnp_P3
  SITE 252: note = Tnp_P4
  SITE 265: note = Tnp_P5
MKKVKEITESIGIDVSKATLDVFIHTKRLHKQFLNNKKGFAELLKWVKNEVSKIEETIWCFEHTGWYCVLLSHFMYSNKLYYCCVNPMEIKRSMGLKRSKTDKQDAEEIARYAWLRRNELDSSIPMPLNLVELQRLMSLREQLVKQTTALKNLSKGFKVTVEKESSDFGMKTIKQTLKQLESQIKKVEKEMARLIKQDGNMYHNFKMSKSVKGVGDIMAIQMLLHTHNYTRFGTWREFSSYCGLVPYPYQSGTSINRKPTTHSVSDQKMKSLLTMSAISAIQADKELKQYFKKRVEEGKPKMVVLNIIRNKIVSRIFATVKRGTPYVEMYKFAA

SEQ ID NO: 15390 - protein, 401 aa, unidentified
  source 1..401: note = protein_6e89c66
  REGION 5..164: note = RuvC_domain
  SITE 8: note = RuvC_P1
  SITE 62: note = RuvC_P2
  SITE 103: note = RuvC_P3
  SITE 105: note = RuvC_P4
  SITE 108: note = RuvC_P5
  REGION 274..363: note = Tnp_domain
  SITE 282: note = Tnp_P1
  SITE 312: note = Tnp_P2
  SITE 320: note = Tnp_P3
  SITE 321: note = Tnp_P4
  SITE 334: note = Tnp_P5
MNPVVGLDIAKGESQGQAFLDKGKPYGKSFTVHHTREGLGAFLHLLKDIQSMTGQLPMVILEATGHYHTPVTQFLDEYNYLYIIVNPLLSYEAKKSSSLRKVKTDAFDAYALCEFFYKEDFEPHKKRGVQLLNLRNLTRQHESVTGQFVQIKLQFQAALDQVFPEFKGVFGDLYAVVSLQTLLEFPTSEAVLSAGEPQLTERISILCTSRSEKWAKEKAQELMAAATRNPFRKAPYQSHLFSMSMYINMLLHYKEHLTALVKEIDAFANEVEEYEIIQSIPGIGEKIAATIISEIGEIHRFNHPKKLVAFAGVDPSVHISGKFTATINRITKRGSSRLRRALYMAVLCGLRRTGSKKLKAFYDKKMSEGKPHKLVMTACVNKLLHWIFAMLKRKEIFLELT

SEQ ID NO: 15391 - protein, 343 aa, unidentified
  source 1..343: note = protein_72607c1
  REGION 7..148: note = RuvC_domain
  SITE 10: note = RuvC_P1
  SITE 52: note = RuvC_P2
  SITE 87: note = RuvC_P3
  SITE 89: note = RuvC_P4
  SITE 92: note = RuvC_P5
  REGION 211..301: note = Tnp_domain
  SITE 219: note = Tnp_P1
  SITE 249: note = Tnp_P2
  SITE 257: note = Tnp_P3
  SITE 258: note = Tnp_P4
  SITE 270: note = Tnp_P5
MAYCNLVAIDLAKNTFQAAQFKGNKLMSNKSVNRQTLLELLVKAKPSVVAMEACASAQHFARTAQSFGHDVILLDPLFVKAFRQGQKTDANDAIAIAVASRVPNVRSCKILTIEEQALQSLSKVRALADKQKIQLSNQIRGLLLEFGIVINQSEAAFKAAIPDILEDAENTLPLELKHALALSYSLYKQQCDNKVELQKQIERIAKQNDGCQRLMALEGVGPITAIELLSFLGNTTQFNDGRSAAACAGVTPLQHSTGGKAKIGRIPKRRGGALRRNLFLGARSVVSKLKNREATTEKERWIKNLLIRKGVKCAAIALANKTMRTAYALLKNGTSYEARLLTA

SEQ ID NO: 15392 - protein, 320 aa, unidentified
  source 1..320: note = protein_916a18a
  REGION 4..150: note = RuvC_domain
  SITE 7: note = RuvC_P1
  SITE 51: note = RuvC_P2
  SITE 91: note = RuvC_P3
  SITE 93: note = RuvC_P4
  SITE 96: note = RuvC_P5
  REGION 190..277: note = Tnp_domain
  SITE 198: note = Tnp_P1
  SITE 228: note = Tnp_P2
  SITE 236: note = Tnp_P3
  SITE 237: note = Tnp_P4
  SITE 250: note = Tnp_P5
MTYIGIDVSKDSFVVAYPTKSGYTTKTFPNTTGDVRKFINSLPEDCHCVMEATGNYSMLLLYLLQESNKPVSMENPQKIKHFARAMLSTTKTDEIDAKLIAMYGEKMNPAPYKIPSESIILLKQKRTVLRQLKKQLTAMINLQHSLSVLPKQDPTAKVATEQTIKFLRKQISKIEEEITNLSNKEFKRQMELLTSIKGIGENIASALIMATGGFTYFSNAKQISRFLGLCPTYQQSGTSINIKGHINRNGDTHLRSQLYIAAMASLRCNAACKETFDRLIAKGKSGKVAIIAVANKLIRQMFAIVTYNRPFINGYVSSFA

SEQ ID NO: 15393 - protein, 392 aa, unidentified
  source 1..392: note = protein_42545c6
  REGION 6..163: note = RuvC_domain
  SITE 9: note = RuvC_P1
  SITE 61: note = RuvC_P2
  SITE 102: note = RuvC_P3
  SITE 104: note = RuvC_P4
  SITE 107: note = RuvC_P5
  REGION 267..352: note = Tnp_domain
  SITE 273: note = Tnp_P1
  SITE 304: note = Tnp_P2
  SITE 312: note = Tnp_P3
  SITE 313: note = Tnp_P4
  SITE 325: note = Tnp_P5
MSMYFIGIDISKYKHDCCIISAADQKVVSKVTIKNNKAGFNELLTIIHSLANPADIRIGFESTAHYALNLELFLENSLLTFMEVNPVLISEYKKSKTLRRTKTDSVDCESIARWLMTVEYKPHSKGFYHAYSLKSLTRLRDKLIRQRSFYLVKITNVLDHTFPEFKPFFNERLSKTALYLLENYGSAEKMARMNSASYEKLRSVSRGKFSPQQFLRLKELAANTVGVNNSIFDVELNSLLSLYKSLVKEIDTIEKEINKLIEEVHPHYMSVPGIGPLSAAVIYSEYGDISNFTNNPGQMLAFAGIEPGINESGTESHGGKMVKRGSSQLRYTLINCCLPLIRFDMTFATYYAKKRGEGKPHRVAITHVAKKLIRVIYALESQDIDFNAQKLR

SEQ ID NO: 15394 - protein, 404 aa, unidentified
  source 1..404: note = protein_32d74ec
  REGION 5..161: note = RuvC_domain
  SITE 8: note = RuvC_P1
  SITE 58: note = RuvC_P2
  SITE 98: note = RuvC_P3
  SITE 100: note = RuvC_P4
  SITE 103: note = RuvC_P5
  REGION 275..362: note = Tnp_domain
  SITE 283: note = Tnp_P1
  SITE 313: note = Tnp_P2
  SITE 321: note = Tnp_P3
  SITE 322: note = Tnp_P4
  SITE 335: note = Tnp_P5
MYNAVGVDVSKGKSTVAVLQPGGVMIRKPFDVLHTSGELKALSKYLGNLEGDTKIVLECTGRYHEPLAIVLYEAGLFVSLVNPHLIKNFANNSLRKVKSDPADAKKIARYTLDNWAELRQYSSMNNTRTQLKTLNSQFSFFMKQKVAAKANLIALLDNTYPGVNKLFDSPVRDDGSEKWVDYAFSFWHVDCVRKISLKAFTERYSAFCKKHRYNFQPAKPEVLFHASKELVAVFPKEKTYKLLIKQSIQQLNLASEHVEQLRKEMDILASALSEYTTVMSIYGVGKTYGPQLIAEIGDISRFTHREALTAFAGVDPGVDQSGQHNSKSNRASKVGSARLRKTLFQIMTTLLQNAPEDDPVYSFLDKKRSEGKPYYVYMTAGANKFLRIYYGKVKECLRNLEQNN

SEQ ID NO: 15395 - protein, 367 aa, unidentified
  source 1..367: note = protein_0b41c9a
  REGION 30..171: note = RuvC_domain
  SITE 33: note = RuvC_P1
  SITE 76: note = RuvC_P2
  SITE 111: note = RuvC_P3
  SITE 113: note = RuvC_P4
  SITE 116: note = RuvC_P5
  REGION 235..318: note = Tnp_domain
  SITE 243: note = Tnp_P1
  SITE 273: note = Tnp_P2
  SITE 281: note = Tnp_P3
  SITE 282: note = Tnp_P4
  SITE 294: note = Tnp_P5
MEWPAPFPSVYYDAVVCEKERNGPMTIVILGIDLGKNSCSVVGVDATGRVVTRRAMRRQTLIDYVAKLPVCVVAMEACCGAHHLGRLFAAQGHEVRLMSPEYVRPYIKAQKNDDRDAEGIAEAASRPTMRFVDLKSQEQLDLQTLHRVRSRLVAERTNLINQLRAILLERGVIFPVGRRKLELGVDGMLAEGIERLSPRVHQLVGELRAEWKLLDAKIGALNTEFIQLARNNAAMRRLTSIPGIGVLNATALVAAVGDASSFAKARDLGAWLGLVPRQYSTGGKARLLGISKRGNTYLRTLLIHGARAALPSLSTTDTPLGRWLNAMIERGVHRNAVVVALANKLARIAWATLRKEAGFDRGYPVAG

SEQ ID NO: 15396 - protein, 354 aa, unidentified
  source 1..354: note = protein_ef31afd
  REGION 12..152: note = RuvC_domain
  SITE 15: note = RuvC_P1
  SITE 58: note = RuvC_P2
  SITE 93: note = RuvC_P3
  SITE 95: note = RuvC_P4
  SITE 98: note = RuvC_P5
  REGION 217..303: note = Tnp_domain
  SITE 225: note = Tnp_P1
  SITE 255: note = Tnp_P2
  SITE 263: note = Tnp_P3
  SITE 264: note = Tnp_P4
  SITE 276: note = Tnp_P5
MFETVKTAVTVIGIDIGKNSFHVVGLDQRGAIVLRQKWSRGQIESRFANMPPCLIGMEACVGAHHLSRRLKALGHDARLMPAKYVRPYSKGQKNDFRDAEAIAEAVQRPTMKFVATKTVEQLDLQALHRVRERLVGQRTGIVNQIRAFLLDRGIAVRQGPRFLRTELPRILAAPSDVVSPRMVRIIEDLASDWRRLDERIEGLSGEIEAIARQDVGCGRLMSVPGIGPIISSATVAAIGTGDTFSKGRDFAAWLGLVPRQISTGDRTILGKISKRGNRYLRVLFVQAAWVVLIRSKSWERHGLKAWLETARKRLHRNVLAIALANKLARIAWSVLARDRAFEARRIDQATVQPA

SEQ ID NO: 15397 - protein, 321 aa, unidentified
  source 1..321: note = protein_9f57b39
  REGION 4..147: note = RuvC_domain
  SITE 7: note = RuvC_P1
  SITE 52: note = RuvC_P2
  SITE 92: note = RuvC_P3
  SITE 94: note = RuvC_P4
  SITE 97: note = RuvC_P5
  REGION 191..278: note = Tnp_domain
  SITE 199: note = Tnp_P1
  SITE 229: note = Tnp_P2
  SITE 237: note = Tnp_P3
  SITE 238: note = Tnp_P4
  SITE 251: note = Tnp_P5
MTYVGIDVSKLTFVVAYSSAKTSKTKTFKNTAKGIREFIKTISVDEHHCVMEATGNYSTLLVYMLSEFGFTVSLENPLKIKNFSRVMLSVIKSDEIDARLIALYGEKMQPSPYRMRSDSILILKQKRTVLRQLKKQLVATSNLKGSMEVLPIYDSKCKKTIEKTIAFLEKQIKYMEEELASLANDEFKRQMDLLTSIKGIGVTLAAALIVATAGFTYFDNAKQLTRYLGLSPTYQQSGTSVNFKGHINRNGDPILRSQLYVAAFSSLRCNTECKACFDRLRSKGKPGKVAVVAVANKLVRQAFAVVTQDKPYVDGFISVKP

SEQ ID NO: 15398 - protein, 339 aa, unidentified
  source 1..339: note = protein_8807aa1
  REGION 6..147: note = RuvC_domain
  SITE 9: note = RuvC_P1
  SITE 52: note = RuvC_P2
  SITE 87: note = RuvC_P3
  SITE 89: note = RuvC_P4
  SITE 92: note = RuvC_P5
  REGION 209..294: note = Tnp_domain
  SITE 217: note = Tnp_P1
  SITE 246: note = Tnp_P2
  SITE 254: note = Tnp_P3
  SITE 255: note = Tnp_P4
  SITE 267: note = Tnp_P5
MEFKRIAIDTSKHVFTLHGVDEQEKPQLRRELKRSQMVPFFSKLSATEIVLEACGGSHHWARVLGALGHRVRLIPAQYVKPFVKRSKNDHNDAEAINEAASRPSMRSVAVKTVDQQAQCIILKHREMLVGQRTQAINALRGHAAEFGMVTAKGTSKVAALLALLIAENGIPAAAIAMFEQMGAHIETLNNRILDLDAQLAALHKENALSQSLSEIPGIGVVGAITATLTVDPANFASGRHFSAWIGLTPKEKSTGGKQRMGGISKAGNERLRQLLVVGAMSVIRFAKPGSKSASPWLLKLLERKPRKLAAVALANKMARIIWAMMAHGEAYRRQPMATA

SEQ ID NO: 15399 - protein, 342 aa, unidentified
  source 1..342: note = protein_5e39252
  REGION 6..147: note = RuvC_domain
  SITE 9: note = RuvC_P1
  SITE 52: note = RuvC_P2
  SITE 87: note = RuvC_P3
  SITE 89: note = RuvC_P4
  SITE 92: note = RuvC_P5
  REGION 211..294: note = Tnp_domain
  SITE 219: note = Tnp_P1
  SITE 249: note = Tnp_P2
  SITE 257: note = Tnp_P3
  SITE 258: note = Tnp_P4
  SITE 270: note = Tnp_P5
MQIAVLGIDLGKNSCSVVGLDTTGRVVLKRRLHRDGVLKLAASMPSCVMAMEACCGAHHLGRILRDQGHEVRLMSPEYVRPYVKAQKNDDRDAEAIAEAATRPTMRFVTLKSETQLDMQSLHRARDRLVGERTALINQLRAILLERGIIVPQGRRKMELHLEALLAGEGVGLSARTRLLVDDLRLEWGELDRRIEGFDAEFAAKARTDETARLLTTIPGIGPLNATALAAAIGNAQTFGRGRDLAAWLGLVPKQMTTGGKPKLLGITKRGNGYLRKMLIHGARAALPSLSKGETAMGGWLRGLLARAHVNTVVVALAAKLARIICAVLRSGRKFELTTATVS

SEQ ID NO: 15400 - protein, 327 aa, unidentified
  source 1..327: note = protein_71865a0
  REGION 10..162: note = RuvC_domain
  SITE 13: note = RuvC_P1
  SITE 66: note = RuvC_P2
  SITE 106: note = RuvC_P3
  SITE 108: note = RuvC_P4
  SITE 111: note = RuvC_P5
  REGION 201..285: note = Tnp_domain
  SITE 209: note = Tnp_P1
  SITE 238: note = Tnp_P2
  SITE 246: note = Tnp_P3
  SITE 247: note = Tnp_P4
  SITE 258: note = Tnp_P5
MSPSQQEIHVGIDVSKRTLDVCILPGEEKGEPRGESFVVANDQEGVSEILSRLAEPGLSPKLVVLEATGRYERLAATSIASRGIAVAVVNPRQARDFAKAMGHLAKTDKIDAFVLARFAGAVEPRASSIPDEQAQHLQHILARRRQLIEMLVSESNRLGTAPKALQKRIRAHIEWLRKEITRTDRDLDEAIEENAAFKANETLLRSVPGVGRVLSRTLLAELPELGKLTHKRLCALVGVAPFNRDSGQRSGKREAWGGRASVRATLYMAALVATRHNPVIKEFYQRLLEAGKPKKVALVACMRKLLSILNALMRDQAIWRCPHALTP

SEQ ID NO: 15401 - protein, 341 aa, unidentified
  source 1..341: note = protein_8f0ee33
  REGION 7..148: note = RuvC_domain
  SITE 10: note = RuvC_P1
  SITE 53: note = RuvC_P2
  SITE 88: note = RuvC_P3
  SITE 90: note = RuvC_P4
  SITE 93: note = RuvC_P5
  REGION 209..295: note = Tnp_domain
  SITE 217: note = Tnp_P1
  SITE 247: note = Tnp_P2
  SITE 255: note = Tnp_P3
  SITE 256: note = Tnp_P4
  SITE 268: note = Tnp_P5
MDKVTLIGIDLGKTSFHLHGQDKAGRMMFRKKVTRKQLLTFFSNFHSITVVMEACAGAHHMARKLKEFGHQVKLISPQFVRPFVKSNKNDFADAEAICEAASRPSMRFVTPKTESQLALSALHRVREALIKDRTSTINQIHGFLLEFGVSLPVGHAVIKRLPALLAEHPLPPRLVAMLERLHAHYKYLAEQVSDIEKELHTQLADDEIAQRLMTIPGIGPITASVLAADMGDGKQYGCSRDFAASIGLVPRQYSTGGRANLLGISKRGDKNIRRLLVQCARSIMKNADKRVDQLSLWIQIMLTRRHSNVVACALANKLARIAWAVVARHKVFEEKAFVMPA

SEQ ID NO: 15402 - protein, 392 aa, unidentified
  source 1..392: note = protein_153e511
  REGION 5..164: note = RuvC_domain
  SITE 8: note = RuvC_P1
  SITE 61: note = RuvC_P2
  SITE 102: note = RuvC_P3
  SITE 104: note = RuvC_P4
  SITE 107: note = RuvC_P5
  REGION 267..354: note = Tnp_domain
  SITE 275: note = Tnp_P1
  SITE 305: note = Tnp_P2
  SITE 313: note = Tnp_P3
  SITE 314: note = Tnp_P4
  SITE 327: note = Tnp_P5
MVISVGIDVSKDKHDCFIVSSEGEVLADVFTIPNNMDGFHRLLQRIQDCTNSQDKIKVGLEATGHYSYNLLGFLFDNGLTTYVLNPLRTNLYRKSLSLRKTKTDRVDARTIASMLLSDAGLKPYTSTAYHNEELKSLTRYRFDKVKERAKLKSSISRLVCILFPELEKLVPTLHMTSVYSLLEEFPGAKQVAAAHLTRLKTLLETASKGHYKRDMALEIRDAARNSIGSRMPAKSLELQHTIRLTRELDREIDEIEEQIQSIMGELHSPITTIPGLGFRMAAMILAEVGDFTRFDSPDKLLAYAGMSPSTYQSGQLKNCYPHMEKRGSRYLRYALYNATKYVCYWDPAFADYLAKKRAEGKHYNIAISHAAKKLVRLIFAMEKSMQPYCSAS

SEQ ID NO: 15403 - protein, 389 aa, unidentified
  source 1..389: note = protein_d71f61c
  REGION 1..144: note = RuvC_domain
  SITE 43: note = RuvC_P2
  SITE 81: note = RuvC_P3
  SITE 83: note = RuvC_P4
  SITE 86: note = RuvC_P5
  REGION 251..337: note = Tnp_domain
  SITE 259: note = Tnp_P1
  SITE 290: note = Tnp_P2
  SITE 298: note = Tnp_P3
  SITE 299: note = Tnp_P4
  SITE 310: note = Tnp_P5
MAVNVVDDEGTMIDEFEVPDSSDGLGDMCRRLKKAAVRRVAIERPDGPVVDALLEAGLEVVVVVSRSVKALRVRYGASGNKSDRADAYVLADCLRTDGHRWQSLQPDTPATVTLRSHVRARKDLVEHRVAIANQLRAHLKVVFPGPVGLFSDLDSPISLAFLRRFPWEGKAAWLSEKRLGAWLRTQSYGGRRSAADLYGHLTQAPVGLLGDEGEARSSVTLAFVTLLETLDSEIKTLNRRIRELLDAHPDGHIFRSLPRANTIRAATLLAEIGDCRARFPEPEALSSLAGVTPSTRASGKHRAVTFRWAANKKLRDAICDFAGDTPNGNEWARHRYQQLRTDGKSHPHAERILARTWTHIIWRCWQDRVPYDPTRHGALQRLQNGTSLT

SEQ ID NO: 15404 - protein, 344 aa, unidentified
  source 1..344: note = protein_dfe9a91
  REGION 6..147: note = RuvC_domain
  SITE 9: note = RuvC_P1
  SITE 52: note = RuvC_P2
  SITE 87: note = RuvC_P3
  SITE 89: note = RuvC_P4
  SITE 92: note = RuvC_P5
  REGION 211..296: note = Tnp_domain
  SITE 219: note = Tnp_P1
  SITE 249: note = Tnp_P2
  SITE 257: note = Tnp_P3
  SITE 258: note = Tnp_P4
  SITE 270: note = Tnp_P5
MQIAVLGIDLGKNYCSLAALDGSGQIVLRRRVRRENVLKTVSKLKPYTVAMEACGGAHHLGRLLRDSGYEVRLMSPEYVRPYVKAQKNDDRDAEAIAEAATRPTMRFVELKSAEQLDMQVLHRARDRLVAERTALINQLRAVLMERGITVPQGRRKLEQALTSMLEGCETALSPRVRALINDMREEWCALDHRICAFDNEFATRAREDDRARRLATIPGIGVLSATALVAAIGDGQSFARGRDLAAWLGLVPRQATTGGKPRLKGISKRGNVYLRKLLIHGSRAALVSLSRSETALGSWLRGLLARAHVNTVVVALANKLARIAWAILRTGHSFEAKAKGVAVG

SEQ ID NO: 15405 - protein, 315 aa, unidentified
  source 1..315: note = protein_c6cbe85
  REGION 6..147: note = RuvC_domain
  SITE 9: note = RuvC_P1
  SITE 52: note = RuvC_P2
  SITE 87: note = RuvC_P3
  SITE 89: note = RuvC_P4
  SITE 92: note = RuvC_P5
  REGION 211..282: note = Tnp_domain
  SITE 219: note = Tnp_P1
  SITE 249: note = Tnp_P2
  SITE 257: note = Tnp_P3
  SITE 258: note = Tnp_P4
MHIASIGIDLGKTTFHLVAVGEQSKVVVRKKFSRKQLLAYTANLQSSLIGIEACSGAHFIGAALRSQGHDVRLIPAQFVKPYLKSNKNDFLDAEAIAEAVARQNMRFVPIKTEDQLDLQALHRVRDRLVHRRTAIINQIRGFLLERGITFAKGPANLRNQMPAMIEDAELKISPRMRTLLTRVWQEWKQLEIDIAHASDEIERIASEDAGCKRLRQIPGVGPLVSTATVAAIGNGAAFRKGRDFAAWLGLVPRQHSTGGKAKLYGIRQHLPATHVRSRRTRRAAPGEVRHRRLRPVGSSARSASAAQQGDRRYRQ

SEQ ID NO: 15406 - protein, 321 aa, unidentified
  source 1..321: note = protein_66803d8
  REGION 4..147: note = RuvC_domain
  SITE 7: note = RuvC_P1
  SITE 52: note = RuvC_P2
  SITE 92: note = RuvC_P3
  SITE 94: note = RuvC_P4
  SITE 97: note = RuvC_P5
  REGION 191..278: note = Tnp_domain
  SITE 199: note = Tnp_P1
  SITE 229: note = Tnp_P2
  SITE 237: note = Tnp_P3
  SITE 238: note = Tnp_P4
  SITE 251: note = Tnp_P5
MTYVGIDVSKATFVVAYSSVKTNKTRTFKNTVKGVHEFIQTISPTTHHCVLEATGNYSALLVYLLSEAGIIVSLENPLKVKNFARVMLTVIKTDEIDARLIALYGEKMQPAPYKLRSDAILTLKQKRTVIRQLKKQLIATSNLKGSMEALPFFDPKCKKAIEKTIDFLEKQVKNLEEELAVLAQSKYKKQMDLLTSIKGIGITLAAALIMATGGFTYFDNAKQLTRYLGLSPTYQQSGTSVNLKGHINRNGDSSLRSQLYIAAMASLRCNAECKECFNRLRSNGKPGKVAVVAVANKLVRQAFAVVTQGKPYVDGFKSEKP

SEQ ID NO: 15407 - protein, 340 aa, unidentified
  source 1..340: note = protein_0539635
  REGION 7..148: note = RuvC_domain
  SITE 10: note = RuvC_P1
  SITE 53: note = RuvC_P2
  SITE 88: note = RuvC_P3
  SITE 90: note = RuvC_P4
  SITE 93: note = RuvC_P5
  REGION 211..296: note = Tnp_domain
  SITE 219: note = Tnp_P1
  SITE 249: note = Tnp_P2
  SITE 257: note = Tnp_P3
  SITE 258: note = Tnp_P4
  SITE 270: note = Tnp_P5
MKKVSTIGLDLAKNVFQAHGADASGAVIFRKKLRRAQVLEFFATQPACTVAMEACGGSHFWGREIGNYGHRVRLIPPAYVKPFVKRQKNDAADAEAICEAAQRPTMRFVAVKSEAAQGAAVVFRTRDMLVRQRTQIINALRGHLAEFGLIVAQGPAHVAKLIMAVQDPKQPLPEAARPILCVLVDMLDLLDQRIKLLDIAIARRAKEDEVARRLMSIPGVGPVIATAVAALAPPAETFKRGRDFAAWLGLTPLQHSTGGKQRLGATSKMGERTLRRLLIIGASSVVRWAARKGAPAGSWLASMIARKPAMLVRVALANKMARVIWALMAKGGTYRAPVVA

SEQ ID NO: 15408 - protein, 345 aa, unidentified
  source 1..345: note = protein_4fca984
  REGION 6..148: note = RuvC_domain
  SITE 9: note = RuvC_P1
  SITE 52: note = RuvC_P2
  SITE 87: note = RuvC_P3
  SITE 89: note = RuvC_P4
  SITE 92: note = RuvC_P5
  REGION 211..298: note = Tnp_domain
  SITE 219: note = Tnp_P1
  SITE 249: note = Tnp_P2
  SITE 257: note = Tnp_P3
  SITE 258: note = Tnp_P4
  SITE 270: note = Tnp_P5
MNITRIGLDLAKSVFQVHAVDHKGHRLFSRALKREKMMAFFQNLSPCLIGMEACASSHFWARTLMAMGHEVKLIAPQFVKPYVKGNKNDANDAEAICEAVSRPTMRFVPVKTVEQQDIQALHRIRQEQVRQRTALVNQIRGLLSEYGIVISRRVESLRNALPDILEDAENRLTADFRILLKGLQEDLLHLDDRIGSQDQAIKKLSQEHEGAKRLQQLRGIGPITATALIAAIGNGRQFARGRDAAAWCGLVPGQHSSGGKCKLLGISKRGDTYLRTLMIHGARAVLKTAQSKDDRLSQWLQKLCNRRNKNIAAVALANKTMRMAWALLVRGQDYDPNFGYEIEAA

SEQ ID NO: 15409 - protein, 341 aa, unidentified
  source 1..341: note = protein_9677063
  REGION 7..149: note = RuvC_domain
  SITE 10: note = RuvC_P1
  SITE 53: note = RuvC_P2
  SITE 88: note = RuvC_P3
  SITE 90: note = RuvC_P4
  SITE 93: note = RuvC_P5
  REGION 211..296: note = Tnp_domain
  SITE 219: note = Tnp_P1
  SITE 249: note = Tnp_P2
  SITE 257: note = Tnp_P3
  SITE 258: note = Tnp_P4
  SITE 270: note = Tnp_P5
MVEVSIIGLDLAKNSFQVHGASTDGTVVIRKKLSRGRVLKFLAVQPRCTVAMEACASAHHWGREIGRLGHDVRLIAPIYVKPFVKRQKNDAADAEAICEAAQRPTMRFVAVKSEDKQSSAMIFKTRDLLVRQKTRTINALRAHLAEFGVIAPKGPAHLGRLVSQVEDPETSLPEPVRTLCLMLIDLVGKLIEQIRVLDGEIKTRSRNDDVAKRLMTIPGVGPVIATALEALAPPAETFKRGRDFAAWTGLTPRQRSTGGKPRLGKISKMGQRDLRRLLIIGASAVVRWAAKRGAPEGSWLARMLVRKPRMLIVVALANKIARIAWALMAHGGIYRAPVRVA

SEQ ID NO: 15410 - protein, 405 aa, unidentified
  source 1..405: note = protein_01e9d2e
  REGION 5..161: note = RuvC_domain
  SITE 8: note = RuvC_P1
  SITE 58: note = RuvC_P2
  SITE 98: note = RuvC_P3
  SITE 100: note = RuvC_P4
  SITE 103: note = RuvC_P5
  REGION 275..362: note = Tnp_domain
  SITE 283: note = Tnp_P1
  SITE 313: note = Tnp_P2
  SITE 321: note = Tnp_P3
  SITE 322: note = Tnp_P4
  SITE 335: note = Tnp_P5
MYNAVGIDASKGKSTVTVLQPGGKVIRKPFDVSHSLSELKRLADYIFSLDGDTKVVMESTARYHEPVLRTLSERGIFVSAVNPHLIKNSGNNTLRKAKSDPIDSRKCARYTLDNWADLRQYSSMDTTRELLKTLNSQMSFFTKQKVAAKNNLISLLDMTYPGVNNLFDSQTRSDGSEKWVDYAASFWHVDCVRKIGLNSFTERYRAFCKRHGYCFQEGKPEKLFNASLDLVAVFPKEKAYKDMIRMSIKQLNVISANVEHIRQEMDRLASSLPEYNTVMGLKGVGPTFGPQLIAEIGDITRFSHREALTAYAGVDSGVNESGSFKSKSNSASKCGSSRLRKTLYLIMVSLLQTKPLDDPVYRFLDKKRMEGKPYHVYMTAGANKFLRIYYGTVKAYLRSLENPES

SEQ ID NO: 15411 - protein, 342 aa, unidentified
  source 1..342: note = protein_4842688
  REGION 6..147: note = RuvC_domain
  SITE 9: note = RuvC_P1
  SITE 52: note = RuvC_P2
  SITE 87: note = RuvC_P3
  SITE 89: note = RuvC_P4
  SITE 92: note = RuvC_P5
  REGION 211..298: note = Tnp_domain
  SITE 219: note = Tnp_P1
  SITE 249: note = Tnp_P2
  SITE 257: note = Tnp_P3
  SITE 258: note = Tnp_P4
  SITE 270: note = Tnp_P5
MKITTVGIDLAKNVFQFHGINEHGKAILKKQYRRDQIAPFFINLPPCLIGMEACASAHHWARKLQAMGHTVRLMAPQFVKPYVKSNKNDAADAEAICEAVTRPNMRFVPIKTIEQQSVLAVHRARQGFVKARTAQANQIRGLLGEFGLIIPQGIASIAKRVPALLEEAAGELTGPFRQLIQRLLAHLKELDKQVDELEKQIRLWHRTSEASSKLEQIPGIGPITASALVATLGDAKSFDNGRQVAAWLGLVPRQHSSGGKNVLLGISKRGDSYLRTMLIHGARAVIFRAKQTVDKNSWLYKLLQRRNPNVAAIALANKNARIVWALLTHDRTFQSDYMPALI

SEQ ID NO: 15412 - protein, 409 aa, unidentified
  source 1..409: note = protein_cfa8cf9
  REGION 4..163: note = RuvC_domain
  SITE 7: note = RuvC_P1
  SITE 60: note = RuvC_P2
  SITE 100: note = RuvC_P3
  SITE 102: note = RuvC_P4
  SITE 105: note = RuvC_P5
  REGION 271..357: note = Tnp_domain
  SITE 279: note = Tnp_P1
  SITE 310: note = Tnp_P2
  SITE 318: note = Tnp_P3
  SITE 319: note = Tnp_P4
MLFVGDDWAEDHHDIELVDETGRRLATARLGEGVEGIRRFHALTAAHTPEDAEPDQVVIGIETDRGPWVQALLAAGYQVYAINPMQAARYRERHSTSGAKSDQGDAHVLAELVRLDRSAHRPVAGDSDLAEAVKLVARAHQTLIWDRQRHVLRLRVALREFFPAALDAFEDLTAPDTLELLGAAPDPVRAARLSRARIRGALTRARRRNPDERAGIVQSTLRAEHLGQPPVVAGAYAVIVGSLTAVISTLNTQIIELDAEVVAHFGRHPDAERYRSQPGLGEVLGARVLAEFGDDPHRYDDARSRKNYAGTSPITRASGKKRVVLARYARNRRLADALHQQAFSALRASPGARGYYDSLRARGIGHHAALRQLANRLVGILHGCLRTGALYNEDTAWPQAVNHDQQAAA

SEQ ID NO: 15413 - protein, 404 aa, unidentified
  source 1..404: note = protein_233db5c
  REGION 9..163: note = RuvC_domain
  SITE 12: note = RuvC_P1
  SITE 61: note = RuvC_P2
  SITE 101: note = RuvC_P3
  SITE 103: note = RuvC_P4
  SITE 106: note = RuvC_P5
  REGION 270..358: note = Tnp_domain
  SITE 278: note = Tnp_P1
  SITE 309: note = Tnp_P2
  SITE 317: note = Tnp_P3
  SITE 318: note = Tnp_P4
  SITE 330: note = Tnp_P5
MTTRPQIWVGIDVGKQSHHACAVDETGKTVFSQKLGNDQAAIEALIARAGRAADRVRWAIDLTSPLALLLITALLAADQTVTYVPGRVVNTMTHGFRGEAKTHAKDAKVIAETARMRRDLGQVTMPDELVVGLTQLTRYRTDLMADWVAGINRLRDLLGSIFPALEAAFDYSNRTPLILVAGMRTPGEIRVAGIDGVTTHLTENGAWKPGIGKTAAAAVDAAGRQTLALPGEADTAMLVKRIAAKLLDLDREIKDTDKLITTRFRQHPWARIIESLPGMGPGLGAEFLVSTGGDLSTFASAGRLASYAGLVPVPRDSGRVSGNLHRPKRYNRRLRRAFYMAALSSLRNPDGLSRRFYDRKRSERQIHTQALLALARRLVDVLWALLRDGRQFTLEPPNPVAAAA

SEQ ID NO: 15414 - protein, 361 aa, unidentified
  source 1..361: note = protein_e6c6c0f
  REGION 23..163: note = RuvC_domain
  SITE 26: note = RuvC_P1
  SITE 69: note = RuvC_P2
  SITE 104: note = RuvC_P3
  SITE 106: note = RuvC_P4
  SITE 109: note = RuvC_P5
  REGION 226..317: note = Tnp_domain
  SITE 234: note = Tnp_P1
  SITE 264: note = Tnp_P2
  SITE 272: note = Tnp_P3
  SITE 273: note = Tnp_P4
  SITE 285: note = Tnp_P5
MCQNEVVADLRQRKPSVEKITRIGMDTSKLIFQLHGVDADEKVVLRKKLRRKDMVAFFEKLPPTVVAIEACGASHHWARLLQSMGHMVKLIAPQLSKPYVKRGKNDAADAEALCEAASRPTMRFVPVKTVDQQAALMLVGLRDRLIRNRTQLVNSIRGYAAEFGLTAAKGIAHLHPLLQSIQADESLPSLARELFASQGEEYSALQAQISEVDAKIIARHRTDECSQRLDKIPGVGPIGATLLIMKTPEPERFRSGRQFAAWIGLTPRDHSTAGKVRLGGITRAGDEGLRCVLVVGATAVVQHALRSGKASPWLAELLKRKPPKLVAIALANKIARIAWKMMRTGESYINRSAPGSLAVAI

SEQ ID NO: 15415 - protein, 413 aa, unidentified
  source 1..413: note = protein_6a542d1
  REGION 9..154: note = RuvC_domain
  SITE 12: note = RuvC_P1
  SITE 58: note = RuvC_P2
  SITE 93: note = RuvC_P3
  SITE 95: note = RuvC_P4
  SITE 98: note = RuvC_P5
  REGION 255..342: note = Tnp_domain
  SITE 263: note = Tnp_P1
  SITE 294: note = Tnp_P2
  SITE 302: note = Tnp_P3
  SITE 303: note = Tnp_P4
  SITE 314: note = Tnp_P5
MDKIYDICCGIDVHKKLIVACLNHKRKKELREFGATTRELMELAEWLQKNECEIVAMESTGSYWKPLYNIMESYDLHAIVVNPAHMKAVPGRKTDVKDAEWIAELLQHGLLQPSYIPSKDQRELRELVQYRKSLVGERTRELNRLQKMLEGANIKLSGTVTNINGKSARKILEYILSGNEIDEKKYDEMYEEKLIAHNLKASKEQILDDLKGFMSPLQRRMLKELLQHLDELNVHIENLNDEIDNFMKPEEKQASQVIQDVTGIGNTSAQTIIAVIGTDMERFPSDRHISSWAGLCPGDNVSAKKRKSGKIRKGNALLKSTLVLCAHAAVRHKSSYFHAQFKRISTHRGKKRAYVAVAHSILIAIYHILKDGVKYQDLGAEYYNQFNAERKIHAYLKKLKALGWEPPKEAVPA

SEQ ID NO: 15416 - protein, 277 aa, unidentified
  source 1..277: note = protein_2df1ccf
  REGION 5..160: note = RuvC_domain
  SITE 8: note = RuvC_P1
  SITE 61: note = RuvC_P2
  SITE 99: note = RuvC_P3
  SITE 101: note = RuvC_P4
  SITE 104: note = RuvC_P5
  REGION 204..240: note = Tnp_domain
  SITE 212: note = Tnp_P1
MEHWIGIDVSSATLDFALLDGKGTHLESVQIENDRKAVMKLMGQWSKRHGVEVGKSLICLEATGHYTLMMLNLIVGQQWHAWLAHPNDIQQSMGIKRVKNDKVDALRIAQYARTFHEKARLFTAQNLKLDRLKHLITRRNHLVRSRARHRTHITDLNRYMDRQLRTEFDRIDKRQIKLEDQLVAHVDALILAEIRTDPQTERQYDLLRTIPGVGPQLAAYLVACTDGFARFNTPRQPRAMPVSHPSSAAQAAACVAAPKCRIKLISRSRPCCTCPRW

SEQ ID NO: 15417 - protein, 340 aa, unidentified
  source 1..340: note = protein_220d30c
  REGION 7..148: note = RuvC_domain
  SITE 10: note = RuvC_P1
  SITE 53: note = RuvC_P2
  SITE 88: note = RuvC_P3
  SITE 90: note = RuvC_P4
  SITE 93: note = RuvC_P5
  REGION 210..295: note = Tnp_domain
  SITE 218: note = Tnp_P1
  SITE 247: note = Tnp_P2
  SITE 255: note = Tnp_P3
  SITE 256: note = Tnp_P4
  SITE 268: note = Tnp_P5
MTEITRVAIDTSKSVFTLHAVDARDRPVLRRNLRRQDLVSFFAKLPAVDVAMEACGGSHYWGRTLQAMGHRVRLIPAQYVKPFVKRSKNDRNDAQAISEAAARPGMQEVAVKSADAQARAMLLTVRELLVRQRTQLVNALRGHATEMGLVAPVGGKGLAALRSEIEADATLPEAAAEALRLLGGEADRLEARLAEIDKNLLAQHKADPNSRRLSAIPGVGPMSALSFSLMVDATQFKSGRHFAAWLGLVPREISTGGKQRLGGISRAGNERLRQLLVLGATAVIRFAKPGRPSASAWLLALLERKPRKLAAVALANKMARIIWAMLTRGDDYRPAKPVVA

SEQ ID NO: 15418 - protein, 341 aa, unidentified
  source 1..341: note = protein_23d6b5f
  REGION 6..147: note = RuvC_domain
  SITE 9: note = RuvC_P1
  SITE 52: note = RuvC_P2
  SITE 87: note = RuvC_P3
  SITE 89: note = RuvC_P4
  SITE 92: note = RuvC_P5
  REGION 211..297: note = Tnp_domain
  SITE 219: note = Tnp_P1
  SITE 249: note = Tnp_P2
  SITE 257: note = Tnp_P3
  SITE 258: note = Tnp_P4
  SITE 270: note = Tnp_P5
MKITTVGIDLAKSVFQVHGVDEHGKTVMRKQLKRAQFALFFSNLPPCLIGMEACGSAHHWARKLQSFGHTVKLIAPQFVKPYVKSNKHDVADAEAICEAVGRPNMRFVAVKNVEQQAVLSLHRARQGFVKARTAQANQIRSLLAEFGWVIPKGITHIPKQVPLILTEADNELPGLFRQLIDGLLNHFRELHCQIVELEAKIKAWHRDSPASRKLAEMPGIGPLGATALVASIGDAKAFKIGRQLAAWLGLVPRQHSTGGKQNLLGISKRGDVYLRTLLIHGARSAILAAQRRGDNTSWLAKLLERRHANVAAAALANKNARVVWALLAHDREYQPGYAEAA

SEQ ID NO: 15419 - protein, 339 aa, unidentified
  source 1..339: note = protein_2f48f9e
  REGION 6..148: note = RuvC_domain
  SITE 9: note = RuvC_P1
  SITE 52: note = RuvC_P2
  SITE 87: note = RuvC_P3
  SITE 89: note = RuvC_P4
  SITE 92: note = RuvC_P5
  REGION 211..302: note = Tnp_domain
  SITE 219: note = Tnp_P1
  SITE 249: note = Tnp_P2
  SITE 257: note = Tnp_P3
  SITE 258: note = Tnp_P4
  SITE 270: note = Tnp_P5
MQVTTIGLDLAKNVFQVHGVTEVGEIVFNRSLRRAQMHRFFESLPPCLVGIEACGTSHYWAREIATLGHEVRLIPPAYVKPYVKRGKSDAIDAAAICEAVTRPSMRFVAIKTPDQQAVLALHRVRDLIVRQRTQIVNMLRGVLAEFGIVVRQGAGHAIAFAKHCFEGVEQDLPDPARDIVTNLSHQLVALHRRVLWYGRQLNRAAPLDARVARLRTIPGVGPITASAIVASIGDGRQFSNGRSLAAWLGLTPLNRSSGGKERLGRISKMGDRYIRRLLVLGMTSRIKQIRHRPDQFDPWFSEILERKPAKLAAVAMANKTARIIRAVLTREQDYKVRTA

SEQ ID NO: 15420 - protein, 404 aa, unidentified
  source 1..404: note = protein_74c277b
  REGION 11..166: note = RuvC_domain
  SITE 14: note = RuvC_P1
  SITE 63: note = RuvC_P2
  SITE 103: note = RuvC_P3
  SITE 105: note = RuvC_P4
  SITE 108: note = RuvC_P5
  REGION 273..359: note = Tnp_domain
  SITE 281: note = Tnp_P1
  SITE 311: note = Tnp_P2
  SITE 319: note = Tnp_P3
  SITE 320: note = Tnp_P4
  SITE 332: note = Tnp_P5
MSDTGDVAAFLSMDVGKSAHHGHGLTPAGKKVFDKPMPNSEPELRAVFDKLTAKFGTVLVIVDQPASIGALPLTIARDAGCEVAYLLGLAMRRIADLYPGEAKTDAKDAAVIADAARTMPHVLRSLELTDEITPELTVLTGFDQDVAAEATRTSNQIRGLLTQFHPSLERVLGPRLDHPAVTWLLERYGSPAALRKAGRRRLLDLIRPKAPRMAARLIDEVFDVLDEQTVVVPGTGSLDIVIPSLAASLTAAHDQRRALEAQISTLLEAHPLHQVLTSMPGVGVRTAAVLLVTVGDGTSFSSAAHLASYAGLAPTTRSSGTSIHGEHSPRGGNRQLKRAMFLSAFACMNADPASRTYYDRQHACGKTHTQALLRLARQRISVLFAMLRDGTFYESRAPAVTLPA

SEQ ID NO: 15421 - protein, 392 aa, unidentified
  source 1..392: note = protein_8d8012d
  REGION 4..162: note = RuvC_domain
  SITE 7: note = RuvC_P1
  SITE 60: note = RuvC_P2
  SITE 101: note = RuvC_P3
  SITE 103: note = RuvC_P4
  SITE 106: note = RuvC_P5
  REGION 267..354: note = Tnp_domain
  SITE 275: note = Tnp_P1
  SITE 305: note = Tnp_P2
  SITE 313: note = Tnp_P3
  SITE 314: note = Tnp_P4
  SITE 327: note = Tnp_P5
MFFVGIDIGKNNHVASMMNESGKVVFKAFSFPNTSDGGNSLFSKLSSYSSSTSDFEIGMEATGHYWLSVYSFLFEKGFLLHVINPIQTDGWRRGTEIRKRKNDIIDSLLIADLIRYGQFVETRLADEDLFSLRTLTRFRTYLVESISDLKRKVVCVLDQVFPEYQSIFSNIFGKTSKEILLQFSSPIDFEAVSSETLAELLAQLSRQKVGIAKAQQIKAAASSSFGVTFAKNSFTFQLKTLIEQISFIEKQVKETEAEISGIMGKLESPITTITGIGSVTGAAIISEIGDISKFDSPRKLVAFTGLDATVTQSGEFEAVHNVMSKRGSPYLRKAIFQAALIASFKDPVLSAYYQKKRAEGKHHLTCVGAVARKMCNIIYAVLKNNQPYVPKA

SEQ ID NO: 15422 - protein, 300 aa, unidentified
  source 1..300: note = protein_0f7f827
  REGION 1..72: note = RuvC_domain
  SITE 10: note = RuvC_P3
  SITE 12: note = RuvC_P4
  SITE 15: note = RuvC_P5
  REGION 176..263: note = Tnp_domain
  SITE 184: note = Tnp_P1
  SITE 214: note = Tnp_P2
  SITE 222: note = Tnp_P3
  SITE 223: note = Tnp_P4
  SITE 236: note = Tnp_P5
MRKNNVRKTKTDKVDTFVIAKTLMMQDSLRFLTLKDLDYIELKELGRFRQKTVKQRTRLKIQLTSYMDQVFPELQYFFKSGVHQNSVYALLKEAPTPNAIASMHMTHLAHILECASHGHFKKDTARDLRVLAQKSVGINDSALSIQITQTIEQIELLDSQLFHTELEMANLVTCLHSVIMTIPGIGTTNGGMILGEIGDIHLFSTPGKLLAFAGLDPSVYQSGNFQAKKTRMSKRGSRVLRYALVNAAHNVVMNNATFKAYYDAKRAEGRTHYNALGHCAGKLVRVIWKMLTDEVEFNLE

SEQ ID NO: 15423 - protein, 346 aa, unidentified
  source 1..346: note = protein_f2a2ace
  REGION 9..149: note = RuvC_domain
  SITE 12: note = RuvC_P1
  SITE 55: note = RuvC_P2
  SITE 90: note = RuvC_P3
  SITE 92: note = RuvC_P4
  SITE 95: note = RuvC_P5
  REGION 214..298: note = Tnp_domain
  SITE 222: note = Tnp_P1
  SITE 252: note = Tnp_P2
  SITE 260: note = Tnp_P3
  SITE 261: note = Tnp_P4
  SITE 273: note = Tnp_P5
MNNTNIAVLGVDLGKNICSLAGFDISGQLIFRKRMRPDTIPKFTERLSTCIVAMEACCGAHHLGRLIARQGHEIRLMSPEYVRPYVKAQKNDERDAEAIAEAASRPTMRFVELKSAEQLDMQTLHRSRSRLVGTRTMLINQMRAILLERGLRFPQGRRKLELAIDAMLGEPATGISQRIFELIADMRDEWRELDGRIAILDREFAQCVRSDPDTQRLTSVPGIGPLTATALVAAIGNASSFTRARDLSAWLGLVPKQRTTGGKPKLLGISRRGNIYLRTLFIHGARAALPWLAKSETQLGFWLRGLLARSHRNTAVVALANKLVRIAWATLRHQEAYRNAPAKSVA

SEQ ID NO: 15424 - protein, 407 aa, unidentified
  source 1..407: note = protein_b2f5051
  REGION 9..163: note = RuvC_domain
  SITE 12: note = RuvC_P1
  SITE 60: note = RuvC_P2
  SITE 100: note = RuvC_P3
  SITE 102: note = RuvC_P4
  SITE 105: note = RuvC_P5
  REGION 271..357: note = Tnp_domain
  SITE 279: note = Tnp_P1
  SITE 309: note = Tnp_P2
  SITE 317: note = Tnp_P3
  SITE 318: note = Tnp_P4
  SITE 330: note = Tnp_P5
METRFAVVIGLDVGKTGHHACALDPGGSRLFDKPLPQDEAQLRELFTELQKHGNVLMVVDQPNTIGALPIAVARDAGCAVAYLPGLAMRKAADLYPGRSKTDARDAFIIADTARTMPHTLRAVDRDNEVLSALKVLAGFDEDLAHETTRALNRIRSLLTQIHPALERVFAGGSLANSLTLELLIKYGGPTGLKTAGRGKVLRFARAHSRRDPEALIDQIFAALGEQTVVVPATAAVELVIPRVAGQVKELKEQLATVAREVEGMLEDFPLASVLRSMPGIGLKTAAQILLNIGDGSAFETPGHLAAYAGIAPVTRRSGTSIRGEFPARSGNKRLKNALFYSAWVASNHDPISKTYYDRKRAEGKRHNAAVICLARRRCNVIFAMLRDGTYYQSPTPVPTPEPPTLAA

SEQ ID NO: 15425 - protein, 341 aa, unidentified
  source 1..341: note = protein_802074c
  REGION 7..149: note = RuvC_domain
  SITE 10: note = RuvC_P1
  SITE 53: note = RuvC_P2
  SITE 88: note = RuvC_P3
  SITE 90: note = RuvC_P4
  SITE 93: note = RuvC_P5
  REGION 209..295: note = Tnp_domain
  SITE 217: note = Tnp_P1
  SITE 247: note = Tnp_P2
  SITE 255: note = Tnp_P3
  SITE 256: note = Tnp_P4
  SITE 268: note = Tnp_P5
MKPAALIGIDLGKHSFHLHAQDGGGREVFRKRTTRQQLIRLLANQPVCAVAMEACAGSHCLAREITALGHEVKLISPQFVRPFVQGNKNDFIDAQAICEAACRPSMRFVTPKNEAQQTLSVLHRLRESLIRDRTKTINQLHGFLLEFGISLPVGKAVIRRLPSVLAEHELPPRLCALLRRLHEHFTYLDEQIKVLDKDVASQLNEDDLGSRLLTIPCVGPITASVLAAEMGDGKQYACSRDFAASVGLVPRQYSTGGRANLLGISKRGDKNLRRLLVQCARVYLQRLEHQRGALADWVRSLLCRRHSNVVACALANKLARIAWGLATQHSRYEAGADGCAA

SEQ ID NO: 15426 - protein, 318 aa, unidentified
  source 1..318: note = protein_4ccef76
  REGION 7..155: note = RuvC_domain
  SITE 10: note = RuvC_P1
  SITE 54: note = RuvC_P2
  SITE 94: note = RuvC_P3
  SITE 96: note = RuvC_P4
  SITE 99: note = RuvC_P5
  REGION 193..277: note = Tnp_domain
  SITE 201: note = Tnp_P1
  SITE 230: note = Tnp_P2
  SITE 238: note = Tnp_P3
  SITE 239: note = Tnp_P4
  SITE 250: note = Tnp_P5
MSDSVFVGIDVSSQTLEVASSSQAKTWQVSNEAAGLDSLVSRLLDLKPALTVLEATGGYEFEAACALQAAGLAVAVVNPRTARDFARAMGALAKTDALDARMLAAFARVLHQHPERERFVKPLADAELQRLQALVLRRRQLVQMITAERQRMRISHAAARPSIERVIEFLKAELADSDAEVAAHIQRHHAELATALSSVPGIGAASVAVLLAELPELGKLDRRRVAALVGVAPLNRDSGQMRGQRSIWGGRADVRRTLYMATLTAVRHNAVLKAHYEHLLAAGKRKKVALVACMRKLLTMLNAMAKHGSTWDPSLHTA

SEQ ID NO: 15427 - protein, 387 aa, unidentified
  source 1..387: note = protein_113ffbd
  REGION 4..159: note = RuvC_domain
  SITE 7: note = RuvC_P1
  SITE 57: note = RuvC_P2
  SITE 98: note = RuvC_P3
  SITE 100: note = RuvC_P4
  SITE 103: note = RuvC_P5
  REGION 263..347: note = Tnp_domain
  SITE 269: note = Tnp_P1
  SITE 299: note = Tnp_P2
  SITE 307: note = Tnp_P3
  SITE 308: note = Tnp_P4
  SITE 320: note = Tnp_P5
MYFVGIDISKFKHDCAIIDELGDVITPSWSFQNDREGFSLLRELLDALEGEKKIGLESTGHYGQNLKLFLENNGFSFMEFNPLLVNRFVRSKSLRKTKTDSIDALMIAQYLMTVEYKPYPPSFYTLEKLKSLTRFRDSLIRQRSKQLVELTNVLDKVFPEFKPFFKGKFSVTALYILSHYTSPEKISNMNSKSYESLRRLSRGKFSMVDFVELKTLARNTVGSTRDYLLQEMEIIIDIYNQLQSKVEEVEQLINDCVLVLDPPMLTIPGIGVSSAAVILSEFGDLSKFDSPSKLLSFAGLEPGYFQSGISESVGKMVKHGSSHLRYAIMNCAQTVINNEPTFAAYYAKKRAEGKEHRIALTHVAKKLLRVIYILQTKELPYNPDLIR

SEQ ID NO: 15428 - protein, 398 aa, unidentified
  source 1..398: note = protein_73aa53d
  REGION 6..162: note = RuvC_domain
  SITE 9: note = RuvC_P1
  SITE 60: note = RuvC_P2
  SITE 100: note = RuvC_P3
  SITE 102: note = RuvC_P4
  SITE 105: note = RuvC_P5
  REGION 268..355: note = Tnp_domain
  SITE 276: note = Tnp_P1
  SITE 307: note = Tnp_P2
  SITE 315: note = Tnp_P3
  SITE 316: note = Tnp_P4
  SITE 328: note = Tnp_P5
MQQLWAGVDAGKSAHHCVVIDADGKRLLSRRVINDEQQLGELLAAVTTLAGNSDLTWAIDLNHGGAALLIAMLADRDQRLLYIPGRTVHWASGTYRGDGKTDAKDAAIIADQARMRRDLQPLRIGDETATELRILTSRRTDLGCDRTRAINRLRAQLLEYFPALERAFDLRASKAALILLTGYQTPDGIRRIGEDRLAAWLREHGARVSARVAATAVAAASAQHTTVVGERLAAAMVARLAKEVMDLDIEISEIDAMIEARFRRHRHAATILSMPGFGVLLGAEFLAATGGDMTAFASVDRLAGVAGLAPVPRDSGRVSGNLRRPRRYDRRLLRACYLAAQVAIIHDPVSRTYYQRKRTEGKNHTQAVIALARRRLNVLWAMMRTDTPYRPEIRAVAA

SEQ ID NO: 15429 - protein, 374 aa, unidentified
  source 1..374: note = protein_079caac
  REGION 32..173: note = RuvC_domain
  SITE 35: note = RuvC_P1
  SITE 78: note = RuvC_P2
  SITE 113: note = RuvC_P3
  SITE 115: note = RuvC_P4
  SITE 118: note = RuvC_P5
  REGION 237..322: note = Tnp_domain
  SITE 245: note = Tnp_P1
  SITE 275: note = Tnp_P2
  SITE 283: note = Tnp_P3
  SITE 284: note = Tnp_P4
  SITE 296: note = Tnp_P5
MLLPRQRFKLARGTKDKEHAMSEKLNTAIAVIGIDIGKNSFHVVGHDQRGAIVLHQKWSRGQVAARFANMPPCLIGMEACVGAHHLSRKLKAFGHDARLMPAKYVRPYSKGQKNDFRDAEAIAEAVQRPTMKFVATKTADQLDLQALHRVRERFVSQRTGIINQIRAFLLERGIAVRQGQRFLRAELPRILARPQDVLSPRMVHLIENLAGDWRRLDERIESLSSEIEAIARQDAGCERLMSVPGIGPIISSAMVAAIGSGEVFTKGRDFAAWLGLVPRQMSTGGRTILGRISKRGNRYLRVLFVQAAWVVLIKPKSWERHGLKSWIEAAKKRLHPNVLAIALANKLARIAWGVLAHGRDFEARTNTNATAQAA

SEQ ID NO: 15430 - protein, 329 aa, unidentified
  source 1..329: note = protein_9a2377f
  REGION 7..158: note = RuvC_domain
  SITE 10: note = RuvC_P1
  SITE 59: note = RuvC_P2
  SITE 97: note = RuvC_P3
  SITE 99: note = RuvC_P4
  SITE 102: note = RuvC_P5
  REGION 200..287: note = Tnp_domain
  SITE 208: note = Tnp_P1
  SITE 238: note = Tnp_P2
  SITE 246: note = Tnp_P3
  SITE 247: note = Tnp_P4
  SITE 260: note = Tnp_P5
MEVNEIIGIDASKLTLDCCIHSNGKQEVFDNNSEGIGRLLDWVSTKVPVKKEQILFVFENTGLYTIELIDGLQERRFLMYVASGLEIRRSLGIARGKDDKADAKRIALYGYRIREDIEPYSPPSPALVKLKRLMSIRRKLVVQHAGYMANLKEQKRVLSDEEILFNVQEKVREVLQVQIEVVEKEMHRIIKEEPELAKLQKLITSVKGIGPVTARFLIIYTGGFTAFQSWRKFASYVGIAPFPNRSGTSIKGRNKESNLANKEGKALLHMCAASAIQCSPEIKVYYERRLAKGKHKMSTLNIIRNKLLSRAFAVVARGTPYVNTMKYAS

SEQ ID NO: 15431 - protein, 321 aa, unidentified
  source 1..321: note = protein_fa971d7
  REGION 8..152: note = RuvC_domain
  SITE 11: note = RuvC_P1
  SITE 52: note = RuvC_P2
  SITE 92: note = RuvC_P3
  SITE 94: note = RuvC_P4
  SITE 97: note = RuvC_P5
  REGION 191..278: note = Tnp_domain
  SITE 199: note = Tnp_P1
  SITE 229: note = Tnp_P2
  SITE 237: note = Tnp_P3
  SITE 238: note = Tnp_P4
  SITE 251: note = Tnp_P5
MNKYKEIYGIDISKDVFDVYGSKSGHNQFKNDSKGFLNFLKQLAKDALVVMEATGYYHYRLAQFLHKNGVQVSVVNPLSVKRFIQMKLAKVKTDKSDAKAICEYGSINEVPLYNALTEVQAECLQLFRLLDSYVKKSTATKNKLHGEDVLDIPSKTVYRSLKRNLTHLKKEIELLEDRLLELVKQEQQNQLTLLQSIPGIGMKTALFLIVVTDGFKKFETASQLCSYVGITPTIRESGSSVRGRSRISKVGNKKLRNLVFLAAFSAYKYNKACKALFDRIVAKGKSKKLALIAVANKLLKQAFAIAKSGLPYDENFISKLA

SEQ ID NO: 15432 - protein, 344 aa, unidentified
  source 1..344: note = protein_eeb93d2
  REGION 6..147: note = RuvC_domain
  SITE 9: note = RuvC_P1
  SITE 52: note = RuvC_P2
  SITE 87: note = RuvC_P3
  SITE 89: note = RuvC_P4
  SITE 92: note = RuvC_P5
  REGION 211..296: note = Tnp_domain
  SITE 219: note = Tnp_P1
  SITE 249: note = Tnp_P2
  SITE 257: note = Tnp_P3
  SITE 258: note = Tnp_P4
  SITE 270: note = Tnp_P5
MEIRSVGIDLGKTSFHLVALGEKGKVLLKKKFTQKQLIAFTANLQTCLIGMESCSGAHFLGRALREQGHDARLMAAQFVKPYVKSHKNDFVDAEAIAEAVERENMRFVPIKTDDQLDLQSLHRVRERLVTRRTALINQIRGFLLERGIVFAKKPSRLRAAIPEVLENSDENLTPRMRNLIAMLWSEWKDLEVQIDEMNSEMERIASSDAACRRLQQIPGIGPLVATAIVASIGNGAAFSKGREFAAWLGLLPNQHSTGGKARLGAISKRGNSYLRKILIHGARAVVFRSKRDRIAWGAWMTSLESRAPKNVLIVATAHKLARIAWAVLSTGQDYRAALPDALAA

SEQ ID NO: 15433 - protein, 342 aa, unidentified
  source 1..342: note = protein_4c64904
  REGION 5..152: note = RuvC_domain
  SITE 8: note = RuvC_P1
  SITE 55: note = RuvC_P2
  SITE 92: note = RuvC_P3
  SITE 94: note = RuvC_P4
  SITE 97: note = RuvC_P5
  REGION 212..297: note = Tnp_domain
  SITE 220: note = Tnp_P1
  SITE 250: note = Tnp_P2
  SITE 258: note = Tnp_P3
  SITE 259: note = Tnp_P4
  SITE 271: note = Tnp_P5
MEHYAGIDVSLECSSVCVVDANGKIVREAKVASEPQALIAWVGSLGFGLERIGLEAGPLSQWLFAGMKGASLAVELLETRHVRKAFEAMPVKSDRNDARGIAQLMRLGWFRPVHCKSMSAQETRSLLTARKLVQSKLHDVENSLRGILRGFGLKVGKTTGQKFAGRIEELVAGHPHLQTIAKALLAVRAVLRAEFAAFEKQTRRMVRSDMQARLLTSVPAVGPIVALTYASAIDDPARFKSSKQAGAHFGLTPKKHQSGETNYTGRISKIGDASVRTALYEAANVMLTKPVKGCSQLKSWAMRIKRRAGTNKAKVALARRLAVIMHRMLADGAPFNAAAAAT

SEQ ID NO: 15434 - protein, 353 aa, unidentified
  source 1..353: note = protein_4906e9b
  REGION 6..163: note = RuvC_domain
  SITE 9: note = RuvC_P1
  SITE 68: note = RuvC_P2
  SITE 106: note = RuvC_P3
  SITE 108: note = RuvC_P4
  SITE 111: note = RuvC_P5
  REGION 212..299: note = Tnp_domain
  SITE 220: note = Tnp_P1
  SITE 250: note = Tnp_P2
  SITE 258: note = Tnp_P3
  SITE 259: note = Tnp_P4
  SITE 272: note = Tnp_P5
MKKIVIGIDISKEKIDATAIDVRDSQLGVVKLDYQVYENRPMGYRRMLVWARHLIKGIGLEDVLFCCETTGGYDRCLCDYIYAKSLDIWRESALQIKRSMGVRKGKDDKADSLMIAEYAMRHIDKAVIYETPDEKVRELKALFLYRHSLVQERTKKKVRASELKATAAKSSSMRFIVRDAMKGVRSLDKSIRDCEKQILAIIDGDESLKRNYGHIESIPGISIVNATAFIAYSDNFRSITTANKAASYWGCASFRERSGTSIDKKAYVKCYSGSLLKATLTQAAECTIKEHGIYREYYLRLKAEGKPYGIIVNNVRNKLIHLVFSLVTNGMDYEKNHQFLRTPQKEGKDMTIN

SEQ ID NO: 15435 - protein, 285 aa, unidentified
  source 1..285: note = protein_31c9d47
  REGION 5..89: note = RuvC_domain
  SITE 28: note = RuvC_P3
  SITE 30: note = RuvC_P4
  SITE 33: note = RuvC_P5
  REGION 152..237: note = Tnp_domain
  SITE 160: note = Tnp_P1
  SITE 190: note = Tnp_P2
  SITE 198: note = Tnp_P3
  SITE 199: note = Tnp_P4
  SITE 211: note = Tnp_P5
MGRRFHEAGHELRIIPAQFVKPYLKSNKNDFNDAQAIAEAASRGSMRCVPLKTTDQLELQALHRVRQRFIVERTAVVNQMRALLLEHGIAIPVGRALFARRMPAVLIDADNGLSPRLRQLLARLRQRWQLLDEEIEVASTEITQIARESELCRRVSTVPGVGPIVSTALIAAVGNGVAFKSARDMSAWLGLVPRQYSTGGKSNLGGISKRGNAYLRMMMIQGARALMIHMKRDQSRMGLWLRELEQRSHPHVALIALANKIVRICWKVLTSQVPYRQFPDAPVVA

SEQ ID NO: 15436 - protein, 399 aa, unidentified
  source 1..399: note = protein_594021b
  REGION 12..166: note = RuvC_domain
  SITE 15: note = RuvC_P1
  SITE 63: note = RuvC_P2
  SITE 103: note = RuvC_P3
  SITE 105: note = RuvC_P4
  SITE 108: note = RuvC_P5
  REGION 273..357: note = Tnp_domain
  SITE 281: note = Tnp_P1
  SITE 310: note = Tnp_P2
  SITE 318: note = Tnp_P3
  SITE 319: note = Tnp_P4
  SITE 331: note = Tnp_P5
MIKNHAEVDVFLGVDVGKGEHHAVALDRAGRKLYDKALPNDEAKMQAVIEKLAKHGAILFIVDQPATIGALPVAVAQAAGVPVGYLPGLAMRRIADLHPGEAKTDARDAYIIAEAARTMPHTLRSIQVADEQVAELSMLCGFDDDLAKQITATSNRLRGLLTQIHPALERVLGPRLDHPAVLDLLRTWPTPEALKTAGRKRVAARLKRLAPRMYARLTEEIFDALDQQTVTVIGTNAAAVVVPQLASMLGDLRASRETLHAQVEALVEAHPLHSVLSSIPAVGIRTEARILTEIVGKEFATAGHLASYAGLSPVTWRSGSSIRGDHSSRRGNKILKRALFLSAFAALKDPLSRAYYDRKRAQGKKHNQALIALARRRCDVIFAMLRDGTLYEAQKPAAA

SEQ ID NO: 15437 - protein, 315 aa, unidentified
  source 1..315: note = protein_84e969f
  REGION 9..159: note = RuvC_domain
  SITE 12: note = RuvC_P1
  SITE 56: note = RuvC_P2
  SITE 96: note = RuvC_P3
  SITE 98: note = RuvC_P4
  SITE 101: note = RuvC_P5
  REGION 192..276: note = Tnp_domain
  SITE 200: note = Tnp_P1
  SITE 229: note = Tnp_P2
  SITE 237: note = Tnp_P3
  SITE 238: note = Tnp_P4
  SITE 249: note = Tnp_P5
MTQSSADTVGVDISKDFLDANIHPSGEARRFANDAKGHRALIAWLRGRNVQRVVFEATGAYHRAFERTLSAAGLPMAKINPRQARRFAEAIGQLAKTDPIDAAMLARFGALLTPQTRAPVSEILDEMKELHNARQALVKDRTAALNRQAQMRIAILKRLASQRLRQIDNQLKAIDAALAALRDSDTALKARFDILLSIPGIGATTAFAMLIEMPELGTIENPQAASLAGLAPVARDSGKWRGTRSIRGGRANLRQAIYMPALVATRFNPDFKAKYQALIAAGKPPKIAIVAIMRKLVILANALLKAGRNWHPKAA

SEQ ID NO: 15438 - protein, 345 aa, unidentified
  source 1..345: note = protein_fc28cd0
  REGION 7..148: note = RuvC_domain
  SITE 10: note = RuvC_P1
  SITE 53: note = RuvC_P2
  SITE 88: note = RuvC_P3
  SITE 90: note = RuvC_P4
  SITE 93: note = RuvC_P5
  REGION 210..295: note = Tnp_domain
  SITE 218: note = Tnp_P1
  SITE 247: note = Tnp_P2
  SITE 255: note = Tnp_P3
  SITE 256: note = Tnp_P4
  SITE 268: note = Tnp_P5
MTQYKRIAIDTSKAVFTLHGIDQQDRPVLRINLRRAQMLPFFRKLPSTEIAMEACGGAHYWARQLITLGHEVRLIPPQYVKPYVKRSKNDRNDAEAICEAAGRPGMHFVPVKSVTQQAQGMVLKVRETLVGQRTLMVNTLRGHAAEFGVIAAKGLHQVGPLLAAIEQETAIPPEAKDMAVLLGQQIAELDTRIKEIDVKLNAAHKANEVSQRLATIPGVGPVTALTLAIEIDPAAFESGRHLAAWAGLTPKEHSTGGKQRMGGISRAGNERLRVLLVAGATSVINAAMRPGSQLMTDWLRDLLARKPRKVVAVALANKMARVAWALMTRGEVYRRPVAAAVAAAA

SEQ ID NO: 15439 - protein, 347 aa, unidentified
  source 1..347: note = protein_9e99275
  REGION 9..151: note = RuvC_domain
  SITE 12: note = RuvC_P1
  SITE 55: note = RuvC_P2
  SITE 90: note = RuvC_P3
  SITE 92: note = RuvC_P4
  SITE 95: note = RuvC_P5
  REGION 214..299: note = Tnp_domain
  SITE 222: note = Tnp_P1
  SITE 252: note = Tnp_P2
  SITE 260: note = Tnp_P3
  SITE 261: note = Tnp_P4
  SITE 273: note = Tnp_P5
MNDHRVYVIGIDLGKNWFHLVANDERGTELFRKKLNRGQLAEFAVTAPRCLIAMEACPGSQFWGRRFQQAGHELRIIPAQFVKPYLKSNKNDFNDAQAIAEAASRGSMRCVPLKTTDQIELQALHRVRQRFIVERTAVVNQMRALLLEHGIVIPVGRALFARRLPAVLADPQSGLSPRLSQIISRLRQRWLTLDEEIDTASAEITQIARESELCRRVCTVPGVGPVVSTALIAAVGNGAAFKRARDMSAWLGLVPKQYSTGGKSNLGGISKRGNAYLRMMVIQGARALMIHMKRDQSRMGLWLREVEQRSHPHVALIALANKIVRICWKVLTSQQSYRPFVEVPAAA

SEQ ID NO: 15440 - protein, 334 aa, unidentified
  source 1..334: note = protein_8f549a8
  REGION 6..147: note = RuvC_domain
  SITE 9: note = RuvC_P1
  SITE 51: note = RuvC_P2
  SITE 86: note = RuvC_P3
  SITE 88: note = RuvC_P4
  SITE 91: note = RuvC_P5
  REGION 208..295: note = Tnp_domain
  SITE 216: note = Tnp_P1
  SITE 246: note = Tnp_P2
  SITE 254: note = Tnp_P3
  SITE 255: note = Tnp_P4
  SITE 267: note = Tnp_P5
MSLELLAIDLGKRSFHIHAVDSDGVVISRKTSRAKLIETIEELRPMTIAMEACASAHYWGRRFLIDGRRVLLINPRFVKPFVKGSKNDAADAEGIYEAALRPTMRFVPVKSTEQQDLQSLHRTRDRVVCARTALINHIRGLLGEYGVILPQGAWRFLAQAHDAVAGAELSDLTRELFADMLDELGSLDLRLDKLDRQLLAICRTNEACRRLSKLPGVGPVIATALVAAVDDGRHFRSGRELAAWIGLVPRQYTTGGKPRLGGIGRRANHYLRRQMIHGARAVMFRLTKHDDRRSQWLKGLAARRGFNRTIVALANKTARVAWALLTRKEDYVAA

SEQ ID NO: 15441 - protein, 307 aa, unidentified
  source 1..307: note = protein_a022b17
  REGION 4..153: note = RuvC_domain
  SITE 7: note = RuvC_P1
  SITE 50: note = RuvC_P2
  SITE 89: note = RuvC_P3
  SITE 91: note = RuvC_P4
  SITE 94: note = RuvC_P5
  REGION 185..269: note = Tnp_domain
  SITE 193: note = Tnp_P1
  SITE 222: note = Tnp_P2
  SITE 230: note = Tnp_P3
  SITE 231: note = Tnp_P4
  SITE 242: note = Tnp_P5
MSGIGIDVCKHFLDVAVFRGQTRQFTNTAGGHRKLVDWLKTLSVRQVVLEATGGYELAALDALHHAALPVARVNAQRARNLANGLGLAKTDRLDAAMLACMAEKMELHRYVPLEPWQRDLGEHVRARRQLVELLKAARQQLLQVAEKALRRILQGNVNQLVRSVARLDKLIAGQLKTLLIEQPHLAALKTLKGVGPVLLAVLVYRLPELRTLSGKQISRLVGVAPLSRDSGATRGKRGIGGGRADIRQALYMAAMSSARHEPGLRDFYRSLRTRGKEGKVALVAVMRKMLVILNARVRDQRAAMHPA

SEQ ID NO: 15442 - protein, 343 aa, unidentified
  source 1..343: note = protein_5d66437
  REGION 7..149: note = RuvC_domain
  SITE 10: note = RuvC_P1
  SITE 53: note = RuvC_P2
  SITE 88: note = RuvC_P3
  SITE 90: note = RuvC_P4
  SITE 93: note = RuvC_P5
  REGION 212..297: note = Tnp_domain
  SITE 220: note = Tnp_P1
  SITE 250: note = Tnp_P2
  SITE 258: note = Tnp_P3
  SITE 259: note = Tnp_P4
  SITE 271: note = Tnp_P5
MEKITTIGFDLAKSIFQVHAVTAEGKVALRRSLRRSQVLDFFRSIEPCLIGIEACGTAHYWANAIGQFGHTVRLMPPAYVKAYVKRNKTDAADAEAICEAVTRPTMRFVSVKTAEEQAAGMVLKTRELLVRQRSQMSNAMRSHMAELGIIAATGLPSIAKLVVILRDEEDHRLPASARAALLEMAKQIETLTERIEKLDSRIVAAVKADDAARRLTTIPGVGPIIAATVRASIPDPAGFRTGRDLAAWIGVTPRANSSGGKERLGKISKRGNKQLRTLLVVGATSILKQARRGAKLPAWIAALIERRPYKVAAVALANKIARTIWALLVEGGTYRAPAIMMKA

SEQ ID NO: 15443 - protein, 399 aa, unidentified
  source 1..399: note = protein_3116af3
  REGION 6..162: note = RuvC_domain
  SITE 9: note = RuvC_P1
  SITE 60: note = RuvC_P2
  SITE 100: note = RuvC_P3
  SITE 102: note = RuvC_P4
  SITE 105: note = RuvC_P5
  REGION 269..355: note = Tnp_domain
  SITE 276: note = Tnp_P1
  SITE 307: note = Tnp_P2
  SITE 315: note = Tnp_P3
  SITE 316: note = Tnp_P4
  SITE 328: note = Tnp_P5
MSRIWAGIDVGKGHHHGVALDVDGKTLLSRRVANDEPELLKLVGDVLDLADGREVTWAIDMTGGEPALLLALLVSHGQEVLYMPGRLVNRASDGYRGEGKTDARDAYVIADQARMRRDLRPIRPGDEAAIELKLLTGRRSDLVEDRTRAVNRLRGTLLSMFPALERALDVTNTGPLKLLTGYQTPAAIRRAGVARLTKWLANRKVRSARDLAEAAVEAAARQHTAVPGEKTIAKLVHTLAEEVMALNAHISEMDKLIEGRFREHELADIIVLSVPGIGATLGAEFLAAVGGDLDEFDSPDALAAFVGVAPAPRDSGKVSGDLHRPATYHRRLQRVFYTSALVSVRYDPNSRQFYDRKRAEGKRHVQAVLALARRRVNVIWALIRDRRCYEVTPPMDTAA

SEQ ID NO: 15444 - protein, 340 aa, unidentified
  source 1..340: note = protein_038c354
  REGION 6..148: note = RuvC_domain
  SITE 9: note = RuvC_P1
  SITE 52: note = RuvC_P2
  SITE 87: note = RuvC_P3
  SITE 89: note = RuvC_P4
  SITE 92: note = RuvC_P5
  REGION 211..298: note = Tnp_domain
  SITE 219: note = Tnp_P1
  SITE 249: note = Tnp_P2
  SITE 257: note = Tnp_P3
  SITE 258: note = Tnp_P4
  SITE 270: note = Tnp_P5
MTAYVCGIDLGKTVFHLVGLSKEGHITVKKCCSRKQLLTYAANMPTCLIGMEACPGAHFLARALVAQGHTVKLMPAEYVRPFVKSNKNDYVDAEAIAEAVQRPTMRFVPIKNEAQLDLQALHRVRDRWIGRRTAVINQLRGFLLEHGITVATGPAHLSKQIPSILEDADNLLSPRMRTLMMELRSEWKKLEEQIDAINRELAESAKNQDSCRRLLTIPGIGPLTATALTAAIGNATAFRKSRDLAAWLGLVPRQHSTGGKARLLGISKRGDPYLRRLFIHGARSVLARVKRDKHSFGEWLNKLETRAPQNVAVVAMANKLARIAWAVLTSGKVYSSAVVS

SEQ ID NO: 15445 - protein, 411 aa, unidentified
  source 1..411: note = protein_7ed970e
  REGION 5..163: note = RuvC_domain
  SITE 8: note = RuvC_P1
  SITE 62: note = RuvC_P2
  SITE 102: note = RuvC_P3
  SITE 104: note = RuvC_P4
  SITE 107: note = RuvC_P5
  REGION 273..373: note = Tnp_domain
  SITE 281: note = Tnp_P1
  SITE 311: note = Tnp_P2
  SITE 319: note = Tnp_P3
  SITE 320: note = Tnp_P4
  SITE 333: note = Tnp_P5
MNPVIGLDVSKGESQVQAFLDKGKPFRKSFKISHTLEGLASLKEFLEEVKEQSGVKPPIILESTGHYQTPVVHYLEERGYLLIIINPLISYKAKSSSLRKVKTDAVDAYHLCELFYKEELEPYKKRGVQLLNLRNLTRQHENITGTLNQTKLQFQAILDQVFPEYRGVFGDLYSVVSLLTLLEFPSSEDILNVNEETLTEKINELCKSRSIRWANEKANELIAAAKRNPFEKTVYQSHILSLGMFINIILQYKEHLSKLESEIDALAKEVEEYNIIKSIPGIGEKIAATIISEIGEIDRFDNPKKLVAFAGVDPSVFESGKFTATKNRITKRGSSRLRHALYMAVRCAIRDCRKKKTSDEIIPRNKKLREFYDKKREEGKPFKVAVIACVNKILHWIYALLKSKSAFQDLA

SEQ ID NO: 15446 - protein, 302 aa, unidentified
  source 1..302: note = protein_dff0621
  REGION 27..174: note = RuvC_domain
  SITE 30: note = RuvC_P1
  SITE 78: note = RuvC_P2
  SITE 118: note = RuvC_P3
  SITE 120: note = RuvC_P4
  SITE 123: note = RuvC_P5
  REGION 182..253: note = Tnp_domain
  SITE 204: note = Tnp_P2
  SITE 212: note = Tnp_P3
  SITE 213: note = Tnp_P4
  SITE 226: note = Tnp_P5
MVDVKCQGWETSCHHNKNTGIQNMNTIGIDVSCKELVVAVHVEGKCHKAKAFENAPAGHQAIIELLAKLKGEAKVCLEATGIYHFDLAVALSRASVQVMVINPKSAHNFAKVLMKRSKTDVVDAATLAIYCGRMPFVAWQRPADESIGLRAIARRIAALTKLKTQTKNQLHALKATGDTPIFVVEHTMVLPGDMTARQWVAHAGLDPRHFESGSSVAKKPRISKAGNKYIRQALYMPALVATNHEPNVKGYYRHLIEDNGLKKIQAICAVMRKLLHAIHGMLNNNSEFDCACFYTLPDQKTA

SEQ ID NO: 15447 - protein, 401 aa, unidentified
  source 1..401: note = protein_a8355c5
  REGION 5..160: note = RuvC_domain
  SITE 8: note = RuvC_P1
  SITE 59: note = RuvC_P2
  SITE 97: note = RuvC_P3
  SITE 99: note = RuvC_P4
  SITE 102: note = RuvC_P5
  REGION 268..354: note = Tnp_domain
  SITE 276: note = Tnp_P1
  SITE 307: note = Tnp_P2
  SITE 315: note = Tnp_P3
  SITE 316: note = Tnp_P4
MQFSVGIDWASQAHAVCVIDDTARGHWHGSVAHTAEGLAELLGHLRRFRRRGPVRVALERPSGLLVDTLVDAGFEVVPIHPNVLKASRPRYSAAGGKSDPGDAFILADLLRTDGHRFRPLRPPSDDTRALRALVRGRDDLVARRVALANQLRALLERFWPGAVGIFADIDSPIALAFLSRYPTPQSAARLGEKRLAQFLRQHAYCGRRPVGDLLTRLQSAPASQVGEAEADAGGEVVRALVAVLTPLVTHIQHLAAGIDAALSQHPDGPLVQSLPRSGAVNAAQILAELGDDRARFPSDAQLAAEGGLAPVTHASGKHHAVVFRWACNKRLRRALTTFADNSRHASRWAALVYQRARRRGCRHQHAVRILARAWVRILWRCWQDRTPYDLTRHRAAQAVAA

SEQ ID NO: 15448 - protein, 341 aa, unidentified
  source 1..341: note = protein_782beb4
  REGION 7..149: note = RuvC_domain
  SITE 10: note = RuvC_P1
  SITE 53: note = RuvC_P2
  SITE 88: note = RuvC_P3
  SITE 90: note = RuvC_P4
  SITE 93: note = RuvC_P5
  REGION 211..297: note = Tnp_domain
  SITE 219: note = Tnp_P1
  SITE 249: note = Tnp_P2
  SITE 257: note = Tnp_P3
  SITE 258: note = Tnp_P4
  SITE 270: note = Tnp_P5
MSEVFIVGVDLAKRVFQVHGATATGDVLFRKKLSRAQFAKFLGDLPACIVAMEACASAHYWGREAQLAGHEVRLVPAAYVKPFVKRHKSDVVDAEAITEAALRPSMRFVQVKTPEQQSQAMLFRTREMFVRQRTQTINAIRAHLAEFGIVLRLRIRNPDTFAHEIEERAAGLPELARSLAQRLLEQIATISEQVSALDVEIKVHARSSHDARLMQTMPGVGPMSAMAVGAFCPPAKNFRSGRDFAAWLGLVPRQHSTGGKERLGRVTKMGQKDVRRLLIIAAMSVINSIERRKRCVEPWLTRMLETRPRMVVAVALANRMARRLWAMLATGQQYRIPGAAA

SEQ ID NO: 15449 - protein, 356 aa, unidentified
  source 1..356: note = protein_f988f91
  REGION 12..153: note = RuvC_domain
  SITE 15: note = RuvC_P1
  SITE 58: note = RuvC_P2
  SITE 93: note = RuvC_P3
  SITE 95: note = RuvC_P4
  SITE 98: note = RuvC_P5
  REGION 217..304: note = Tnp_domain
  SITE 225: note = Tnp_P1
  SITE 255: note = Tnp_P2
  SITE 263: note = Tnp_P3
  SITE 264: note = Tnp_P4
  SITE 276: note = Tnp_P5
MSQKLDTSPAVIGIDIGKNSFHIVGQNQRGAIVLRQKWSRGQVEARLANLPPCRIGMETCVGAHHLSRTLKALGHDARLMPAKYVRPYSKGQKNDYRDAEAIAEAVQRPTMKFVATKTADQLDLQALHRVRERFVGQRTGIINQIRAFLLERGIAVRQGLRFLRAELPGILATRTDVLSPRMLRIIEDLAGDWRRLDERIGGLSSEIETLARQDQACERLMTVPGIGPIISSAMVAAIGTGDVFSKGRDFGAWLGLVPKQISTGDRTILGNISRRGNRYLRSLFVQAAWVVLVKIGPKHWDRYGLKSWIEAARKRLHHNVLAIALANKLARIAWAVLNKGRAFECVKTEETASRPA

SEQ ID NO: 15450 - protein, 341 aa, unidentified
  source 1..341: note = protein_5d45535
  REGION 7..149: note = RuvC_domain
  SITE 10: note = RuvC_P1
  SITE 53: note = RuvC_P2
  SITE 88: note = RuvC_P3
  SITE 90: note = RuvC_P4
  SITE 93: note = RuvC_P5
  REGION 211..297: note = Tnp_domain
  SITE 219: note = Tnp_P1
  SITE 249: note = Tnp_P2
  SITE 257: note = Tnp_P3
  SITE 258: note = Tnp_P4
  SITE 270: note = Tnp_P5
MSEVNTIGLDLAKHVFQAHGADASGNVVFRKRLRREKVLEFFAGKPACVVAMEACSSAHHWAREIARLGHIVRLIPPAYVKPFVKRQKNDAADAEAICEAVQRPTMRFVVVKSATAQANAVVFRARDLLVRQRTQAINALRGHLGEYGLVVAKGPGHVIKLIAHVEDPDSDVPDAARLVLRTLVEALQFLSARIDLLDREIARRAREDVEVRRLTSIPGVGPITATALAALAPPADAFRRGRDFAAWVGLTPSQHSTGGKQRLGTTSKMGERTLRRLLIIGASSVVQKAVRQGVAAESWLGRMLARKPRMLVIVALANKMARIAWAVQAKREVYRGPVVVA

SEQ ID NO: 15451 - protein, 266 aa, unidentified
  source 1..266: note = protein_877e626
  REGION 1..77: note = RuvC_domain
  SITE 16: note = RuvC_P3
  SITE 18: note = RuvC_P4
  SITE 21: note = RuvC_P5
  REGION 139..224: note = Tnp_domain
  SITE 147: note = Tnp_P1
  SITE 177: note = Tnp_P2
  SITE 185: note = Tnp_P3
  SITE 186: note = Tnp_P4
  SITE 198: note = Tnp_P5
MLILAQYVKPYVKTHKNDFIDAEAIAEAATRLKMRFVSPKSEQAQISVVIRKLRSGYIKERTACMNRIGSMLLEFGISFPRGHHQMKNLFQWLADHNEVVPPLLILELRNQLDDYNLLNKWIKEQEEKLDRVNKDNELMAILQSVPSIGPITASCCLSAVADPQDFKNGRNFADWLGLVPYQYSTGGKPRMLGISKRGNKELRELFIHAARAVMWRDVSAEKCFGSWLIELKRRKPFNAALVALTNKLARIAWSVMMTRKTFEIRT

SEQ ID NO: 15452 - protein, 339 aa, unidentified
  source 1..339: note = protein_d677e14
  REGION 6..148: note = RuvC_domain
  SITE 9: note = RuvC_P1
  SITE 52: note = RuvC_P2
  SITE 87: note = RuvC_P3
  SITE 89: note = RuvC_P4
  SITE 92: note = RuvC_P5
  REGION 211..302: note = Tnp_domain
  SITE 219: note = Tnp_P1
  SITE 249: note = Tnp_P2
  SITE 257: note = Tnp_P3
  SITE 258: note = Tnp_P4
  SITE 270: note = Tnp_P5
MHVTTIGLDLAKNVFQIHGICEDGEVAFNRALRRAQVLTFFESLEPCLVGIEACGTSHHWAREISKLGHKVKLIPPVYVKPYVKRGKSDAVDAAAICEAVTRPTMRFVEVKPPEQQAILAVHRTRDLIIRQRTQTINMLRAQLAEFGIVLAKGIYHALQFAKQCLNGEQPDLPEVAGDVIFELCDQLRFLHSKILRCTRQMNKIARCEKRVALLRTIPGVGPITASAIVATVGSGKQFNNGREFAAWLGLTPLNRSSGGKERLGHISKMGDQYIRRLLVLGMTSRIRSIRTEPEKFDPWFADILERKPSRVAAVAMANKTARIMWAVLTRNEPYKVRSI

SEQ ID NO: 15453 - protein, 416 aa, unidentified
  source 1..416: note = protein_d1e6eb1
  REGION 9..154: note = RuvC_domain
  SITE 12: note = RuvC_P1
  SITE 59: note = RuvC_P2
  SITE 93: note = RuvC_P3
  SITE 95: note = RuvC_P4
  SITE 98: note = RuvC_P5
  REGION 248..335: note = Tnp_domain
  SITE 256: note = Tnp_P1
  SITE 286: note = Tnp_P2
  SITE 294: note = Tnp_P3
  SITE 295: note = Tnp_P4
  SITE 307: note = Tnp_P5
MELQRNKVCGIDVHKRFLIATILCRDGKKDTQRFSVTLEDLLKFRDWVIENGCEQVAIESTGIYWHPVHSVLEGKIDLIVANSYKIKHTPGRKTDVSDSEWIAELCLNGMIEPSRIFPKDDRELRRLTRAREGYVKQMTQEKNKIHQSLDSACIKLASVISDIFGKSGMYLLNCVLEGREIDDIIDGIPSGRLKKKADQIKESIKSRLDVSQVILIRGSLSLMKSIQERIDELDGEISARIQYRKNDLAIAMSIPGTGFVSATAILAEIGNYTDFEKPEQLAAWCGLVPSLYQSAEKTILGGITKQGSKHIRRMLIQVAYAISRTKDSKLKKFFLRIQAKKGSKVAAVALARKVLCILHHLLINQEMYIEDRDKKNMRQKPLIPPSPIEMSIQEMIDCIVRAGYVVTKSDSIGGFG

SEQ ID NO: 15454 - protein, 414 aa, unidentified
  source 1..414: note = protein_e6eba25
  REGION 18..170: note = RuvC_domain
  SITE 21: note = RuvC_P1
  SITE 69: note = RuvC_P2
  SITE 107: note = RuvC_P3
  SITE 109: note = RuvC_P4
  SITE 112: note = RuvC_P5
  REGION 274..360: note = Tnp_domain
  SITE 282: note = Tnp_P1
  SITE 313: note = Tnp_P2
  SITE 321: note = Tnp_P3
  SITE 322: note = Tnp_P4
  SITE 333: note = Tnp_P5
MKSARNTLPTEPANGVTGGIDWARDDHAVSIVDDRGREIVRSTVEHNAAGLRELLVVLERAGVAEVAIERPDGPVVDTLLDAGITVVVISPNQVKNLRGRYGSAGNKDDRFDAFVLADTLRTDRARLAPLLPDTPATITLRQTSRARKDLVAHRVAVANQLRAHLQIVFPGAVGLFAALDSPISLAFLTRFDCQDRADWLSINRLAAWLASVGYSGRTDPAVLHRRLTSAPRGTAGTDHTATTAAFVAVLSALTAQIKALDDDIAQQLARHADSQIFTSLPRSGTVRAARLLSEIGDCRARFPTPESLACLAGVAPSTRQSGKVKHVGFRWAADKQLRDAVTDFAGDSRRANPWAADIYNRAIARGHDHPHAVRILARAWLYVIWHCWQDEVAYDPAKHRALQTLLNQDQPRAA

SEQ ID NO: 15455 - protein, 340 aa, unidentified
  source 1..340: note = protein_d4ab020
  REGION 7..149: note = RuvC_domain
  SITE 10: note = RuvC_P1
  SITE 53: note = RuvC_P2
  SITE 88: note = RuvC_P3
  SITE 90: note = RuvC_P4
  SITE 93: note = RuvC_P5
  REGION 210..295: note = Tnp_domain
  SITE 218: note = Tnp_P1
  SITE 248: note = Tnp_P2
  SITE 256: note = Tnp_P3
  SITE 257: note = Tnp_P4
  SITE 269: note = Tnp_P5
MSQVSIIGLDIAKSVFQVHGADASGRALLRKKVSRAKLLPFFAALPSCRVVLEACGGAHHWARELAKLGHNVQLIAPAYVKPFVKRQKNDAADAEAICEAAQRPSMRFVPVKTEEQQAAAVVFRGRDLLVRQRTQISNSIRGHMTEYGWIAPKGLAHLSKLSALLDDPHAIPQGARPILMILLDQIKVLDRQIAILDKEIARRAREDETARRLMTIPGIGPITATAITALAPPPGTFAKGRDFAAWVGLTPRQHSTGGKQKLGAISKMGERTLRRLLIIGSSAVVLQACKRGAPQGSWLEQMLVRKPRMLVTVALANKTARIVWALLTGEEVYKAPVAAA

SEQ ID NO: 15456 - protein, 311 aa, unidentified
  source 1..311: note = protein_53fa060
  REGION 6..154: note = RuvC_domain
  SITE 9: note = RuvC_P1
  SITE 53: note = RuvC_P2
  SITE 92: note = RuvC_P3
  SITE 94: note = RuvC_P4
  SITE 97: note = RuvC_P5
  REGION 188..272: note = Tnp_domain
  SITE 196: note = Tnp_P1
  SITE 225: note = Tnp_P2
  SITE 233: note = Tnp_P3
  SITE 234: note = Tnp_P4
  SITE 245: note = Tnp_P5
MTKDTIGIDISKDTLDVHRLSTDETAQFPNAPAGLRALRRWIGVKTPDLVVYEATGAYHALLERTCAGALPLVKVNPLQARRFAQARGTRAKTDAVDARALAMMGSALDLVADAPADKNQPALKELQIARLALIKERTRLLNRSKTQSLTLLKRQAKARLEHIKRQLCELEDALLDLARQCLKRARAFDILCSIPGLGQVSAVAILVECPEIGTLTRKQIASLAGLAPMTRQSGQWRGKAFIQGGRKFLRDALYMPALVAARYNPDLRQKYQAMKSDGKPAKVALTALMRKLIELANALVRQDRTWTPKPA

SEQ ID NO: 15457 - protein, 272 aa, unidentified
  source 1..272: note = protein_e2fa167
  REGION 8..149: note = RuvC_domain
  SITE 11: note = RuvC_P1
  SITE 54: note = RuvC_P2
  SITE 94: note = RuvC_P3
  SITE 96: note = RuvC_P4
  SITE 99: note = RuvC_P5
  REGION 190..272: note = Tnp_domain
  SITE 198: note = Tnp_P1
  SITE 227: note = Tnp_P2
  SITE 235: note = Tnp_P3
  SITE 236: note = Tnp_P4
  SITE 247: note = Tnp_P5
MKEEVVYCGVDVAKAYLDAAMGSEKRRLANDGTGHRQLINWIKQMEAQVQVICEPSGGYERMLIQALVGARVKVSLVQANRVRQFARAAGILAKTDSIDAEVLRAFGQAMRPQTLTASKPQQEQLRELESQRRHLSRLLVMEQNRGARLGDSSVRILNRSLNKQIQKQIERIDLLINEHIAGSQELSAKAHKLTAISGVGPRTAALLLAQMPELGQLNRREVAALVGVAPFNRDSGKLRGKRTIFGGRRHVRHGLYMAALVAARHNPILRAF

SEQ ID NO: 15458 - protein, 344 aa, unidentified
  source 1..344: note = protein_ac87252
  REGION 7..148: note = RuvC_domain
  SITE 10: note = RuvC_P1
  SITE 53: note = RuvC_P2
  SITE 88: note = RuvC_P3
  SITE 90: note = RuvC_P4
  SITE 93: note = RuvC_P5
  REGION 211..301: note = Tnp_domain
  SITE 219: note = Tnp_P1
  SITE 249: note = Tnp_P2
  SITE 257: note = Tnp_P3
  SITE 258: note = Tnp_P4
  SITE 270: note = Tnp_P5
MSTIKVLGIDLGKSSFHLIGRDHRDQNILRKKFSRAKVIEFIAQLPPCLIAFEACGGAHWLARQCLKHGHRVRLLPPQFVRPYVKGNKNDFIDADAIAEACGRPGMHFVPVKSEEAQMLAVCHRLREGFVSERTRLMCRIGAILLEFGLALPRGHATMKHLFQWLATKKDELPPALIQELQVAHDHYKQLNERITEQDRKIQESVKQDERCQLLKSIPGVGDMIASQLVMTVGSGQQFRQGREMAAWLGLVPRQYSTGGKPKLLGISKRGNKKLRCLMIHGARSVLSRLSDGNRPFDAWLRKLRANKPFNVAVVALANKLARIAWAVLSSAKPFDAKELQPGLQ

SEQ ID NO: 15459 - protein, 341 aa, unidentified
  source 1..341: note = protein_144030e
  REGION 7..149: note = RuvC_domain
  SITE 10: note = RuvC_P1
  SITE 53: note = RuvC_P2
  SITE 88: note = RuvC_P3
  SITE 90: note = RuvC_P4
  SITE 93: note = RuvC_P5
  REGION 212..296: note = Tnp_domain
  SITE 220: note = Tnp_P1
  SITE 250: note = Tnp_P2
  SITE 258: note = Tnp_P3
  SITE 259: note = Tnp_P4
  SITE 271: note = Tnp_P5
MKEISIIGVDLAKRVFQVHGIDAEHKTVVQKKLPRSEVLKWFAEQGPCLVGMEACATAHYWAREISKLGHEVRIIPPSYVKPYVRRQKNNRADAAAICEAVSRPEMRFTTIKTIEQQAVQTLHRSRELLVRQYTQTGNAVRAHLSEFGWIFPQGNEGLSQAIAIVQTTTDADLPELVRTVLGSLVAQLTYLKQAIGRLDKQMVAWHKSQVENLRLATIPGIGPVTASAILSAIGDGKQFKSGREFAAWVGLVPRQNSSGGKESLGHITKRGNMYIRRLLVSGATTQLRGKRQQNAPGGQWFEDLLRRKPARVATVALANKLARITWAVLTKGERYRAPGAL

SEQ ID NO: 15460 - protein, 323 aa, unidentified
  source 1..323: note = protein_9c00d2f
  REGION 5..160: note = RuvC_domain
  SITE 8: note = RuvC_P1
  SITE 58: note = RuvC_P2
  SITE 98: note = RuvC_P3
  SITE 100: note = RuvC_P4
  SITE 103: note = RuvC_P5
  REGION 195..281: note = Tnp_domain
  SITE 203: note = Tnp_P1
  SITE 233: note = Tnp_P2
  SITE 241: note = Tnp_P3
  SITE 242: note = Tnp_P4
  SITE 254: note = Tnp_P5
MSIFVGVDVAKRSFDIATTLPNGKKRTKAKLPNDSGGFAQFSDWLERHAEPGTWIVMEATGTYHEALAEHCHAQGYRVCILNPAVISKFADVELRRVKTDKADAKVIAAYSQQNAASLRQWEPEPPAQRRLRALVRRLDDLKEMRQMEQNRLDVARDAVQQSIRDIIGHITEELEKTKKAIEQTIDDDPDLRNRRDLITSIDGLGETTAALLLAELGDPLKYQSPSAIVAFSGLNPVVQQSGEFTGQSTISRTGSSRLRAGLWMSGAVSIKHNPVVKALAERLSSRHKAYKQIVCAAMRKLLHLVYGVVKSGKPFDPQIALAR

SEQ ID NO: 15461 - protein, 349 aa, unidentified
  source 1..349: note = protein_2885fc7
  REGION 12..153: note = RuvC_domain
  SITE 15: note = RuvC_P1
  SITE 58: note = RuvC_P2
  SITE 93: note = RuvC_P3
  SITE 95: note = RuvC_P4
  SITE 98: note = RuvC_P5
  REGION 217..302: note = Tnp_domain
  SITE 225: note = Tnp_P1
  SITE 255: note = Tnp_P2
  SITE 263: note = Tnp_P3
  SITE 264: note = Tnp_P4
  SITE 276: note = Tnp_P5
MIRNAPKPAAVFGVDLGKNLFHVVGLDERGFVIQRAKFRRDTVLAFFQRASPTLVGMEACPGSQWFARKLQAFGHQVRIVPAQFVKPFVKSQKNDTIDAEAIAEAVTRPTMRFAQVRTVEQIDIQALHRMRDQLVSSRTRLINQARAFCLEYGVAMRQGVGVFRLDLPRVLADDSNDLTPMMRQMLAEILEDIAHVDRRIVSVTRQVEALADREDRARRLMTIPGIGPLAATALLAAIGDGRQFRRARELAAWLGLTPREYSTGGKTTLLGISKRGNRYVRKLLVHGARSCITHMNRSKDRIGEWLDALESRMHLNKVAVAMAAKMARMAWAIIVRPGAMYDRRDPAVA

SEQ ID NO: 15462 - protein, 334 aa, unidentified
  source 1..334: note = protein_5e39219
  REGION 7..149: note = RuvC_domain
  SITE 10: note = RuvC_P1
  SITE 53: note = RuvC_P2
  SITE 88: note = RuvC_P3
  SITE 90: note = RuvC_P4
  SITE 93: note = RuvC_P5
  REGION 209..298: note = Tnp_domain
  SITE 217: note = Tnp_P1
  SITE 247: note = Tnp_P2
  SITE 255: note = Tnp_P3
  SITE 256: note = Tnp_P4
  SITE 268: note = Tnp_P5
MENITLIGIDLGKNSFHIHCQDHRGKAVYRKKFTRQKLFEFLATYPATTVVMEACGGAHFMARRLTAMGHTAKLISPQFVRPFVKTNKNDFIDAEAICEAASRPSMRFVQPRTGSQQEMHALHRVRESLVRDKVKTTNQMHAFLLEFGISVPKGAAVIKRFHDILAGNELPPYLTRLLLKLREHYDYLLEQIGDLESQLKKALEDDVTGQRLLTIPCIGPLTASLLSTQLGDGKQYGSSRNFAASTGLVPREYSTGGRTTLLGISKRGNKKLRALLVQCARVFLRTLEHQSGKLSDWVRELLLRKNNFVVTCALANKLARISWALATGHSTFEC

SEQ ID NO: 15463 - protein, 399 aa, unidentified
  source 1..399: note = protein_a66086d
  REGION 8..159: note = RuvC_domain
  SITE 11: note = RuvC_P1
  SITE 61: note = RuvC_P2
  SITE 99: note = RuvC_P3
  SITE 101: note = RuvC_P4
  SITE 104: note = RuvC_P5
  REGION 263..349: note = Tnp_domain
  SITE 271: note = Tnp_P1
  SITE 301: note = Tnp_P2
  SITE 309: note = Tnp_P3
  SITE 310: note = Tnp_P4
  SITE 322: note = Tnp_P5
MDNFPVFVGIDVSKDKFNVCAISNPSSIIFESSFDMSKQGFSSFANKLSAFPKQSIIIAMESTGCYHLNLLAFLSSNDFACAVFNPLTVKNFASLRKTKTDKIDARIIATALFYLQHQIPSSAFVNSELRDIVRARENIIHRIAKVKDNIEKLLNVLFPELERVTNIYSDTILNLLSHFPSAKAIQKARNLDVFFSKDRGRSTKLNAQKLKELANNSIAQYWPMKEKILVQNIKELQFLQQQLEEYDKMMKEYCECSAINLDIEILTSIPGIGENSAMHFLAEVGDISRFSTYKKLIAYCGLDPSIAQSGKSKVEGHISKRGNAHLRRILWLMAVSVVIHNEYFRTYYERKRQQGIPYKKAIMSVVHKLLRTLYAMLRKKEKFNIDYAISHSKQKFNFA

SEQ ID NO: 15464 - protein, 310 aa, unidentified
  source 1..310: note = protein_10ce261
  REGION 1..80: note = RuvC_domain
  SITE 19: note = RuvC_P3
  SITE 21: note = RuvC_P4
  SITE 24: note = RuvC_P5
  REGION 142..228: note = Tnp_domain
  SITE 150: note = Tnp_P1
  SITE 180: note = Tnp_P2
  SITE 188: note = Tnp_P3
  SITE 189: note = Tnp_P4
  SITE 200: note = Tnp_P5
MPAKLSARARVFATGQGRKTDATDAHSVALVGTRMAGLRPVVSDAQLEVLQLLVDRRRSIGDEHTRKISQLHRILLELLPGGAKKHLSAAQAKVLLAGVRPRDAVGKTRKRVAAELVADLERIYTRKKAADKELKELVAATGTSLLGLHGIGPSGAARLLVEVGDLSRFPDRNHFASWTGTVPIDASSSDHVRHRLSRGGNRQINRVLHIMATVQLRTPTTEGRAYFDRRKAAGKTSMEAMRCLKRRLSDLVYRTILGDYTAGKVTGPGGQRGNDSDSSATGSQAHTGTSDKPLPGPANTKPTTTLPQAS

SEQ ID NO: 15465 - protein, 344 aa, unidentified
  source 1..344: note = protein_bc4003c
  REGION 4..149: note = RuvC_domain
  SITE 7: note = RuvC_P1
  SITE 51: note = RuvC_P2
  SITE 89: note = RuvC_P3
  SITE 91: note = RuvC_P4
  SITE 94: note = RuvC_P5
  REGION 208..295: note = Tnp_domain
  SITE 216: note = Tnp_P1
  SITE 246: note = Tnp_P2
  SITE 254: note = Tnp_P3
  SITE 255: note = Tnp_P4
  SITE 267: note = Tnp_P5
MEHLGIDVHKVESQICILTESGKVVERRIRTQRERFAAVLGERPRARILIEASTESEWVARCLEELGHEVVVADPNFAAMYATRSRKVKTDLRDARTLAEACNLGAYRAAHRTSDRQRHVRTQLSVREALVQTRARYISLIGALLRREGLRVASGSAASFVRRVAKLALPGQLKSEIAPLLAVFVSVDRQLAWIDTRLEHLARTDETVERLCTAPSVGPVTAAAFSSTVDDPRRFKSAHQVEAYLGLTPSEWSSGEKQSKGHITKAGNNRMRKLLVQVAVSILRLRSPRTEALRKWATGIAVRRGKKIAIVALARRMAGVLFAMMRDRTCYLQPALLAPAAQVA

SEQ ID NO: 15466 - protein, 324 aa, unidentified
  source 1..324: note = protein_fe5e080
  REGION 8..150: note = RuvC_domain
  SITE 11: note = RuvC_P1
  SITE 52: note = RuvC_P2
  SITE 92: note = RuvC_P3
  SITE 94: note = RuvC_P4
  SITE 97: note = RuvC_P5
  REGION 191..278: note = Tnp_domain
  SITE 199: note = Tnp_P1
  SITE 229: note = Tnp_P2
  SITE 237: note = Tnp_P3
  SITE 238: note = Tnp_P4
  SITE 251: note = Tnp_P5
MNKDIKYFGLDISKDVFDVCDDKQNYHQFKNTVSGFKKLLELLDFNTVCVMEATGCYHLRLSYFLIDLGYGVSIVTPLKIKHFIQMDLSRVKTDKSDSKQIQRYGLEQCPELWLGQSKIQQESLQLSRLLDVYTKQSTQLKNKLHGETVLGAPSKAVVRSLKRQLKALVKEMKHLEEKLEANVKSEYPESITLLKSISGIGTKTAIILLVFTDGFHRFKSAKELCSYAGLTPVIKQSGSSVKGRSRISKMGNPKLRNLLFMCSFNTCKYNKACKALFDRLVSKGKSKKLALIAVCNKLLKQAFAVVKNRLPYDADYRSSLVINK

SEQ ID NO: 15467 - protein, 383 aa, unidentified
  source 1..383: note = protein_dad3a18
  REGION 5..150: note = RuvC_domain
  SITE 8: note = RuvC_P1
  SITE 55: note = RuvC_P2
  SITE 89: note = RuvC_P3
  SITE 91: note = RuvC_P4
  SITE 94: note = RuvC_P5
  REGION 247..331: note = Tnp_domain
  SITE 255: note = Tnp_P1
  SITE 286: note = Tnp_P2
  SITE 294: note = Tnp_P3
  SITE 295: note = Tnp_P4
  SITE 306: note = Tnp_P5
MKAVCGLDVHKDSIFLCILHSDGELFEQVFGVLTFQLEEMRKLLQKHHVSEVCMESTSIYWIPIWRVLSPHFTLRLVNPYFIKQLPGHKSDVKDAQWIAECTMKELVRGSFVPPEIIQQLRQYDRRIFDLNAEIVRKVSKVDGVLQRCNIRLSNYVSNIECKSYRDVVRRLSEGVTDPNELVKLVHGRIVNRHGADTILASLTGVVSQAEIDVLRQLHEEIDIAESHRDECQQRMLEICEKHFPEELERLQKIPGIKERAATSLIAEIGTDMSKFETANHLASWSGLRPRNDESNKKIKSRKITHGNVYLRNTIIQCAWAASRQKACFFCRFSYHQTIVRRKNKMKVIVAVARKLLVAVWHVLHDRTDYVDFKPDREESANNG

SEQ ID NO: 15468 - protein, 329 aa, unidentified
  source 1..329: note = protein_5893f8e
  REGION 7..148: note = RuvC_domain
  SITE 10: note = RuvC_P1
  SITE 53: note = RuvC_P2
  SITE 88: note = RuvC_P3
  SITE 90: note = RuvC_P4
  SITE 93: note = RuvC_P5
  REGION 209..292: note = Tnp_domain
  SITE 217: note = Tnp_P1
  SITE 247: note = Tnp_P2
  SITE 255: note = Tnp_P3
  SITE 256: note = Tnp_P4
  SITE 268: note = Tnp_P5
MEEVSIVGVDLAKQVFQVHGAASDGRVLFRKKLSRLQFPKFMATLPPCVVAMEACGTAHYWGRELAGLGHDVRLIPPVYVKAFVKRQKNDAADAEAVAEAAMRPTMRTVAVKTSNQQARAMLFRTRDLLVGQRTQMVNALRGHLAEHGVIVGKGLGNVERLSTLVTSDNLPELVQSMSRLYLSQIAQLNEEIDQIDRRIAAEARQSDVVRRLQKVPGIGPICAMAITAFAPSMEEFRRGRDFAAWLGLVPRQHSSGGKQKLGRTSKMGQRDIRRLLIIGAMSVVHWKGRGGGRPGSWLSNMLARKPRMLVAIAMANKIGAGGLGYARTQ

SEQ ID NO: 15469 - protein, 384 aa, unidentified
  source 1..384: note = protein_0c27a6a
  REGION 3..156: note = RuvC_domain
  SITE 6: note = RuvC_P1
  SITE 54: note = RuvC_P2
  SITE 95: note = RuvC_P3
  SITE 97: note = RuvC_P4
  SITE 100: note = RuvC_P5
  REGION 218..303: note = Tnp_domain
  SITE 226: note = Tnp_P1
  SITE 256: note = Tnp_P2
  SITE 264: note = Tnp_P3
  SITE 265: note = Tnp_P4
  SITE 276: note = Tnp_P5
MIIGMDPHKRSVTIEVMAPDESVLDGGRYATDESGFAAMVRDARRWPERIWAIEGCSGIGRHVATRLLADGEQVVDVPPKLSARVRVFSTGQGRKTDATDAHSIALVGTRMAGLRPVVDDQQLAVLRVLADRRRALGEDHTRMVAQLHHLLLELIPGGAKKDLSAAQAKALLAKVRPRDAAGKARRRVAAELIADLERIYARKKAADKELRELIEVTGTSLLTLNGIGPSGAARLLIDVGDITRFPTKGHFASWNGTAPLDASSGDQIHHRLSRAGNRQINRTLHIMATVQLRNPTEGRAYYDRKKASGKTSMEAMRCLKRRLSDIVYRHMVDDAVRTMTGPGGQPGTATKSSVTGSHPHTGSSDKSLPGPATTEPTTALPVAS

SEQ ID NO: 15470 - protein, 394 aa, unidentified
  source 1..394: note = protein_0b887d9
  REGION 5..159: note = RuvC_domain
  SITE 8: note = RuvC_P1
  SITE 57: note = RuvC_P2
  SITE 97: note = RuvC_P3
  SITE 99: note = RuvC_P4
  SITE 102: note = RuvC_P5
  REGION 265..352: note = Tnp_domain
  SITE 273: note = Tnp_P1
  SITE 304: note = Tnp_P2
  SITE 312: note = Tnp_P3
  SITE 313: note = Tnp_P4
  SITE 325: note = Tnp_P5
MNCFVGIDVSKEKFDACCIGEQGEKVFSLACTMSRQGFENFSLRLPADKTSLLLGMESTASYHIALFSYLTANGCKVVVVNPLLINGFSKRSLRKTKTDRKDALVIAQFLMQEQAALSARIPDCLTTELRDLARRREKLADHATSLKADMKRILSVTFPELEHMTGIFTKATLRLLIEHPSAHAVREAGHSAVEDIFVTRSRGNKPQASAKALMEAAVSSVGVVSPAKELVLKQEASLLIHVQNQMEEVAKLLKTLLNERMKQDMEILCSIKGVGESTAMNFLIEMGTEVGMYENDKKLIAASGLDPSTYQSGKYEGKSRISKRGNRHLRRVIWLMATKVIINNGLFRTYFYKRRNEGLPYKKAVLATAHKLIRVMFVMLSRKSFFVEGGIKYS

SEQ ID NO: 15471 - protein, 309 aa, unidentified
  source 1..309: note = protein_c972168
  REGION 7..148: note = RuvC_domain
  SITE 10: note = RuvC_P1
  SITE 53: note = RuvC_P2
  SITE 93: note = RuvC_P3
  SITE 95: note = RuvC_P4
  SITE 98: note = RuvC_P5
  REGION 188..272: note = Tnp_domain
  SITE 196: note = Tnp_P1
  SITE 225: note = Tnp_P2
  SITE 233: note = Tnp_P3
  SITE 234: note = Tnp_P4
  SITE 245: note = Tnp_P5
MIHPVSIGCDISKAFLDIADPQTKHPIRLPNTTSDIGEWLDTLAGREVVIIFEATGRYDQLLRQALDKRHIPYCRVNPARARDFAKATGRMAKTDRIDAKMLARMGDTLSPPLSKPVDPARQELKILHTRRDQLVAMRKQERLRIHTAEPFELDSIERHLGWLDAEITAIEKQYQAHLNAHEELQEQGALLCSIPGIGHITSCTLRAHMPELGEGNPKHMAALAGLAPFNAESGKHQGERRIMGGRKRVRDALYIAALVVYRLKTPFADFIQTMQAKGKPFKVIIIAIAHKLLSIANAIIRDRTAFKKA

SEQ ID NO: 15472 - protein, 395 aa, unidentified
  source 1..395: note = protein_8b53ebb
  REGION 4..164: note = RuvC_domain
  SITE 7: note = RuvC_P1
  SITE 59: note = RuvC_P2
  SITE 99: note = RuvC_P3
  SITE 101: note = RuvC_P4
  SITE 104: note = RuvC_P5
  REGION 267..354: note = Tnp_domain
  SITE 275: note = Tnp_P1
  SITE 305: note = Tnp_P2
  SITE 313: note = Tnp_P3
  SITE 314: note = Tnp_P4
  SITE 327: note = Tnp_P5
MISIGIDIGKNSHTFCIFNQTTGQEILAPTNIKNNKTGFDFLLSKIKDYKKEDLLFGMEDTGHYHFALLKALLSKNYTVALINPVATDLTRKMQGGISKNDNLDSYTICDVISSNSRKKPYRITKINKFDLFEQRELTRHHHNLKEELNVYTNRLQKCIDIVFPEFNSLFTSKYGIVYMDILKNFGSAANIARTDIRTLENYFNYKGRGKRISLTADELKASAKTSIGIDSISEVIQIKHLISQIELINVQLEEIDKKIEEFSRQTNSPILTIPGISHFSCTSILSEFGDISNYSSAKKLIKFAGVAPYEHQSSLYKAEHTSITKKGSKYLRKTLYQIIMPVIWNNEVFKQYYQFKISQGKSHLCALGHCVRKLLRVIYHLCTTENGKFDASLLK

SEQ ID NO: 15473 - protein, 416 aa, unidentified
  source 1..416: note = protein_93552fd
  REGION 18..170: note = RuvC_domain
  SITE 21: note = RuvC_P1
  SITE 69: note = RuvC_P2
  SITE 107: note = RuvC_P3
  SITE 109: note = RuvC_P4
  SITE 112: note = RuvC_P5
  REGION 277..363: note = Tnp_domain
  SITE 285: note = Tnp_P1
  SITE 316: note = Tnp_P2
  SITE 324: note = Tnp_P3
  SITE 325: note = Tnp_P4
  SITE 336: note = Tnp_P5
MKSARNTLPDEPPNALTCGIDWARDDHAVSVVDARGREVHRCTVEHSAAGLRELLTVLAHTGVCEVAIERPDGPVIDTLLGAGITVVVISPNQVKNLRGRYGSAGNKDDRFDAFVLADTLRTDRTRLAPLTPDHPATVALRRLCRARKDLVAHRVALANQLRAHLRNVFPGAVDLFADLDSPISLMFLTRFDCQDRADWLTPKRLATWLSGVSYSGRTDPAVLHARLTAAPRGAVGDDGSAHAHITRAFLAALRTLGEQIKLPTEQIGEQLAGHADAHIFTSLPRSGTVRAARLLAEIGDCRARFPTPESLACLAGVAPSTRQSGKARSVGLRWAADKQLRDAVTDFAGDSRHSNPWAADLYNRAVARGHDHPHAVRILARAWLFVIWHCWQDNLAYEPDKHGALQRLLVHQQPAA

SEQ ID NO: 15474 - protein, 315 aa, unidentified
  source 1..315: note = protein_a5c1b7e
  REGION 8..149: note = RuvC_domain
  SITE 11: note = RuvC_P1
  SITE 54: note = RuvC_P2
  SITE 94: note = RuvC_P3
  SITE 96: note = RuvC_P4
  SITE 99: note = RuvC_P5
  REGION 189..273: note = Tnp_domain
  SITE 197: note = Tnp_P1
  SITE 226: note = Tnp_P2
  SITE 234: note = Tnp_P3
  SITE 235: note = Tnp_P4
  SITE 246: note = Tnp_P5
MTSTQVFVGIDVSKKQLDLAFRPEGRFAAPNDEAGFAQVLERLSTVSPALVVLEATGGIEIPLAGALAAAGVPVVVVNPRQVRDFAKAAGKLAKTDVLDAHTLAHFAEVMRPELRPLPDEQTQTLAAILTRRRQLVEMLTAEKNRLGQARKPVRKSLRAHIAWLKRELAQTDSDLAHTIHESPVWREKDDLLRSTPGVGPVLTTTLLANLPELGTLTGKQIAALVGVAPLNRDSGTWRGKRTVWGGRAQIRATLYMAAVVAARFNPVIRAFYQRLCAAGKAKKVALTACMRKLLMILNAMLKHRTPWRTELVQCA

SEQ ID NO: 15475 - protein, 387 aa, unidentified
  source 1..387: note = protein_1674312
  REGION 4..159: note = RuvC_domain
  SITE 7: note = RuvC_P1
  SITE 57: note = RuvC_P2
  SITE 98: note = RuvC_P3
  SITE 100: note = RuvC_P4
  SITE 103: note = RuvC_P5
  REGION 263..347: note = Tnp_domain
  SITE 269: note = Tnp_P1
  SITE 299: note = Tnp_P2
  SITE 307: note = Tnp_P3
  SITE 308: note = Tnp_P4
  SITE 320: note = Tnp_P5
MYYIGIDISKFKHDCAVIDDAGDVVTPSWSFANDLEGFLQFKALLDSLGTETKIGLESTGHYGMNLKLFLEADGFSFMEFNPLLINRFVKSKSLRKTKTDAIDCEMIARYLMTVEYKPYPPSFYHIEKLKSLTRFRDNLVRQRSRQLVELTNILDKVFPEFKPFFGGKFTVTALHILSEYSSPEKIANMNSRSYEPLRKLSRGRFSTTHFAKLKLLAKNTVGHPTDFLLQEMDIVLELYSQLDSKVDETELLIRECVSEIDPPMLTVPGIGVDSAAVILAEFGDFSKFQNPSQMLSFAGMEPGYFQSGTSESTGKMVKHGSSFLRYALINCTQTVINYEPTFAQYYAKKRAEGKPYRVALTHTAKKLIRVIFTLQTRNITYNSDSVR

SEQ ID NO: 15476 - protein, 346 aa, unidentified
  source 1..346: note = protein_db9f47a
  REGION 6..148: note = RuvC_domain
  SITE 9: note = RuvC_P1
  SITE 52: note = RuvC_P2
  SITE 87: note = RuvC_P3
  SITE 89: note = RuvC_P4
  SITE 92: note = RuvC_P5
  REGION 211..301: note = Tnp_domain
  SITE 219: note = Tnp_P1
  SITE 249: note = Tnp_P2
  SITE 257: note = Tnp_P3
  SITE 258: note = Tnp_P4
  SITE 270: note = Tnp_P5
MKITTIGIDLAKEVFQIHGVDDHGKAVLRKQLKRHEMAKFFTHIEPCLIGMEACGSAHHWARRLTGFGHAVKLMAPQFVKPYVKTNKNDVADAEAICEAVGRPNMRYVTVKNVEQQAILSVHRARQGFVKARTAQGNQIRGLLSEFGIVIPQGIQSIIKRIPEILEDGDSGLPGTMRRLIARLTDNLKEMDRHVAELEAQIMLWHRQSEASRKLAEIPGLGPITASAIVSTVGDAKEFRNGRQLAAWLGLVPKQNSSGGKQMLLGISKRGDSYLRTLLIHGARAVIQYAEKNKPAESWLRKLMARRNKNVAAVALANKNARIIWALLAKDRMFQPDYTTTALAVSA

SEQ ID NO: 15477 - protein, 344 aa, unidentified
  source 1..344: note = protein_95a9cab
  REGION 7..148: note = RuvC_domain
  SITE 10: note = RuvC_P1
  SITE 53: note = RuvC_P2
  SITE 88: note = RuvC_P3
  SITE 90: note = RuvC_P4
  SITE 93: note = RuvC_P5
  REGION 210..301: note = Tnp_domain
  SITE 218: note = Tnp_P1
  SITE 247: note = Tnp_P2
  SITE 255: note = Tnp_P3
  SITE 256: note = Tnp_P4
  SITE 268: note = Tnp_P5
MSDITRIGVDTSKAVFTLHGVDATNRPVLRMNLRRGQVIPFFRKLPPTIVALEACGSSHYWAREIAALGHTVRLVPPQYVKPYVKRSKNDRIDAEAICEAAGRPGMHFVPAKTAQQQADGMVLKVRDTLVCQRTALINTVRGHAAEFGVIAAKGAAKAEVLFSAIEQQADIPQAATEMFAVFRQQIIDINARIAELDAKLHAAHKANPVSQRLATIPGVGPITALTFAIEIDAAQYESGRHLAAWSGLTPKERSTGGKQRMGGISRAGNERLRRLLVAGATSVIQAASKPGSRHMTQWLRALLARKPRKLAAVALANKMARIAWALMNSGETYRRNATIAVAKA

SEQ ID NO: 15478 - protein, 323 aa, unidentified
  source 1..323: note = protein_f338bb7
  REGION 8..150: note = RuvC_domain
  SITE 11: note = RuvC_P1
  SITE 52: note = RuvC_P2
  SITE 92: note = RuvC_P3
  SITE 94: note = RuvC_P4
  SITE 97: note = RuvC_P5
  REGION 191..278: note = Tnp_domain
  SITE 199: note = Tnp_P1
  SITE 229: note = Tnp_P2
  SITE 237: note = Tnp_P3
  SITE 238: note = Tnp_P4
  SITE 251: note = Tnp_P5
MNKDIKYFGLDISHLVFDVTDSQGNYYQFKNSITGFKKFVKLLDFNSHCVMEATGYYHYQLAYYLQEEGIKISVENPLSVKRFIQMKLSKIKTDKSDSKLICEYAEQVELKLWKGNSKHQLECLQMTRLLSVYTKQSTMLKNKLHGEAVLGNPSKAVLSSLKRNLKQVQKEMKTIEDKLLVLVKAAHQEVLTRLKIIPGIGPKTALMLVVLTDGFDRFTSGSELCSYAGLTPVIRQSGSSVKGRPRISKIGNQKLRNLLFMCSFNACKYNHACKAIYERLVAKGKSKKLALIAVCNKLLKQAFAIAKSGLTYDNNYRSTLEIN

SEQ ID NO: 15479 - protein, 261 aa, unidentified
  source 1..261: note = protein_2056796
  REGION 1..80: note = RuvC_domain
  SITE 19: note = RuvC_P3
  SITE 21: note = RuvC_P4
  SITE 24: note = RuvC_P5
  REGION 142..228: note = Tnp_domain
  SITE 150: note = Tnp_P1
  SITE 180: note = Tnp_P2
  SITE 188: note = Tnp_P3
  SITE 189: note = Tnp_P4
  SITE 200: note = Tnp_P5
MPATLASRIRVLATDRSNKNDPNDAHSIAIAALRAPRLRAVEAANHVEVLRLLAKRNMDIGSQRQRVICRLHSLFAELAPGGIAKELYVSDADTLMATLKPETPAQQMRFDLVQELLDDVRRLDAQTKASHRRIRVAIKASDTSLTEIYGVGPIHAATLIGYSGDVTRFANRDAYASYNGTAPIEWSSGGRVVHRVSRRGNRKLNHALHMAAITQLRNPGTQGRIYFERKLAEGRTKKEAIRSLTRQISNSVYRQLLLDAQ

SEQ ID NO: 15480 - protein, 391 aa, unidentified
  source 1..391: note = protein_d6c2a3c
  REGION 9..128: note = RuvC_domain
  SITE 25: note = RuvC_P2
  SITE 66: note = RuvC_P3
  SITE 68: note = RuvC_P4
  SITE 71: note = RuvC_P5
  REGION 231..318: note = Tnp_domain
  SITE 239: note = Tnp_P1
  SITE 269: note = Tnp_P2
  SITE 277: note = Tnp_P3
  SITE 278: note = Tnp_P4
  SITE 291: note = Tnp_P5
MDSTYCWRKFRDVPHLRTKIKVGLEATGHYSYNLLGFLLDNGLATYVLNPLHTNLYRKSLSLRKTKTDRVDARTIASMLLSDVGLKPYTDTAYHNEELKSLTRYRFDKVKERAKLKTSVSRLVCILFPELEKLVPSLHIASVYALLAEFPGAKQIAAAHLTRLKALLETASKGHYKRDMALEIRDAARNSIGSWMPAKSLELQHTIRLIRELDDEIVEIEEQIQAIMDELNSPITTIPGLGFRMAAMIFAEVGDFNRFDSPDKLLAYAGMSPSTYQSGQLKNCYPHMEKRGSRYLRYALYNATKYVCHWDPTFAAYLAKKRAEGKHYNVALSHAAKKVGSSDICHGEIQAAILLSGLSATTRIASRGLTRLQLCYTLSETSFLFTTIHFVG

SEQ ID NO: 15481 - protein, 412 aa, unidentified
  source 1..412: note = protein_39a9525
  REGION 4..160: note = RuvC_domain
  SITE 7: note = RuvC_P1
  SITE 57: note = RuvC_P2
  SITE 97: note = RuvC_P3
  SITE 99: note = RuvC_P4
  SITE 102: note = RuvC_P5
  REGION 274..361: note = Tnp_domain
  SITE 282: note = Tnp_P1
  SITE 312: note = Tnp_P2
  SITE 320: note = Tnp_P3
  SITE 321: note = Tnp_P4
  SITE 334: note = Tnp_P5
MNAVGIDVSKGKSTVTICRPGGVVLMPPCDIPHTQSAVNAFISQLRGLDGETKVCMEHTGRYYEPVATWLSDAGIFVSAVNPILIKGFGDDSLRSPKTDKADSKKIARYTLDRWEKLKQYGSMDKTRNLLKTMNRQFGFYMDQKTAMKNNLIALLDQTCPGANDFFDSPARSDGSQKWVDFVHTYWHVDCIRSKSLDAFTEHYRSWCKRKGYHFSARKAENIYHFSSDLIAVFPKSDNTKMLIRQAVAVLNSASRTVESLRLEMDKTASTLPEYPVVMAMGGVGPTLGPQLMAEIGDVRRFTHREALTAFAGVDPQKDDSGQRVRKSMPTTKKGSPCLRKTLFQIMDGLIKRSPADDPVYAFMDKKRAQGKEYYVYMTAGANKFLRIYYGRVREYLALLPQASDREEGDNGI

SEQ ID NO: 15482 - protein, 353 aa, unidentified
  source 1..353: note = protein_2b98d37
  REGION 11..152: note = RuvC_domain
  SITE 14: note = RuvC_P1
  SITE 57: note = RuvC_P2
  SITE 92: note = RuvC_P3
  SITE 94: note = RuvC_P4
  SITE 97: note = RuvC_P5
  REGION 215..301: note = Tnp_domain
  SITE 223: note = Tnp_P1
  SITE 253: note = Tnp_P2
  SITE 261: note = Tnp_P3
  SITE 262: note = Tnp_P4
  SITE 274: note = Tnp_P5
MSGLDSRIAAIGIDIGKNAFHVVGQDGRGALVLRQKWSRGQVEARLANLPPCLIGMEACVGAHHLSRKLQVLGHDARLMPAKYVRPYSKGQKNDFRDAEAIAEAVQRPTMKFVATKTAEQLDLQALHRVRERLVGQRTGIINQIRAFLLERGIAVRQGLRFLRAELPTVATRSDALSPRMLRLIEDLADDWRRLDARIEAISGEIEELARKDQACERLMTVPGIGPIISSAMVAAIGTGDAFSKGRDFGAWLGLVPKQISTGDRTILGPISKRGNRYLRALFVQAAWVVLVKLGKKWERYGLRSWIEAAKKRLHRNVLAIALANKLARIAWAVLHRGRAFECAKTDVMAPRSA

SEQ ID NO: 15483 - protein, 398 aa, unidentified
  source 1..398: note = protein_8cc9369
  REGION 6..162: note = RuvC_domain
  SITE 9: note = RuvC_P1
  SITE 60: note = RuvC_P2
  SITE 100: note = RuvC_P3
  SITE 102: note = RuvC_P4
  SITE 105: note = RuvC_P5
  REGION 267..354: note = Tnp_domain
  SITE 275: note = Tnp_P1
  SITE 306: note = Tnp_P2
  SITE 314: note = Tnp_P3
  SITE 315: note = Tnp_P4
  SITE 327: note = Tnp_P5
MFTIWAGVDIGKEHHHCVALDAQGERRLSRRVGNDEPALLELIRDVLALADPGEVLWAVDTNHGGAALLIGLLLDQGQSMVYLTGLTVHRAAAGYRGQSKTDAKDAHVIADQARMRQDLGLPRPGDEVAVDLRILTSRRLDLVNDRTRQINRLREQLLGIFPALERALPRKGRGLVVLLTGYQTPGAIRRLGVRRLESWLKMRGVKSTASLARTAVEAAESQATTLPGEKIAADMAARIAKSVLALDAEIAELDALIVARFHDHPHAKVIETLPGMGPRLGAEFIAATGGDLTAFGTPDRLAGFAGLAPVPRDSGRVRGNLHRPRRYHRGLLRACYLAAMASLRCCPVSQRYYQRKRNEGKSHIQAVLALARRRLNVLWAMIRDNTSYELRPPIPTAA

SEQ ID NO: 15484 - protein, 339 aa, unidentified
  source 1..339: note = protein_0f34037
  REGION 6..147: note = RuvC_domain
  SITE 9: note = RuvC_P1
  SITE 52: note = RuvC_P2
  SITE 87: note = RuvC_P3
  SITE 89: note = RuvC_P4
  SITE 92: note = RuvC_P5
  REGION 211..299: note = Tnp_domain
  SITE 219: note = Tnp_P1
  SITE 249: note = Tnp_P2
  SITE 257: note = Tnp_P3
  SITE 258: note = Tnp_P4
  SITE 270: note = Tnp_P5
MKVTTFGLDLAKRVLQLHWVEMETGEICRRQLKRGQVLEFFANRERSVIAMEACGSAHYWARKLAGLGHEVRLIAAQFVRPFVKTNKTDAADAQAIWEAAQRPGMKFVAVKSEGQQGVLMLHRMRAQLVKMRTMQTNQLRGLLYEFGADLPQGRQQGVERIPSELDKLEAVLPAMVIETIRSQLKRIEALDQDIAQIERHLAAWKKDDKAAKRLMDIPGVGLLTATAAVATIGDARAFKSGREFAAFAGLVPRQSGTGGRVRLLGISKRGDVYLRTLLIHGARSVITHGKQREPWLEQLLSRRPFNAAVVALANKMARTIWALLAHDRTYEKGYVAAAA

SEQ ID NO: 15485 - protein, 348 aa, unidentified
  source 1..348: note = protein_c5be64a
  REGION 15..173: note = RuvC_domain
  SITE 18: note = RuvC_P1
  SITE 74: note = RuvC_P2
  SITE 112: note = RuvC_P3
  SITE 114: note = RuvC_P4
  SITE 117: note = RuvC_P5
  REGION 218..306: note = Tnp_domain
  SITE 226: note = Tnp_P1
  SITE 257: note = Tnp_P2
  SITE 265: note = Tnp_P3
  SITE 266: note = Tnp_P4
  SITE 279: note = Tnp_P5
MTSLKHRKVMEKYFIGIDFAKEKFDVVVLQQGRLCDKGEHGQFPNNTNGVGMLEKWLRKTCGKDVAMHSVVCGENTGVYSVTAAKRLVMDGYTVCLESALRIKRSMGLTRGKNDKKDARSIAEYAARHRDRLTPYQIPSEASEALKTLFTQRRLFVRQKGDLQRRNRELAGLYKGNPLLDKMLTSDKKVIMAIDAEIEKIERQMKAIIHDNADMLRVYNILTSMKGVALVNAVALIVYTDNFRRFDFDARRICSFWGVAPFANQSGTSLNSTPHVSRYADSYLKSLLSQAALCAMRFCPAINQYAQRLKQKGKHIAIIQNNCKNKMLHILVAMVKNETCYGENKKITA

SEQ ID NO: 15486 - protein, 408 aa, unidentified
  source 1..408: note = protein_022fe03
  REGION 4..163: note = RuvC_domain
  SITE 7: note = RuvC_P1
  SITE 60: note = RuvC_P2
  SITE 100: note = RuvC_P3
  SITE 102: note = RuvC_P4
  SITE 105: note = RuvC_P5
  REGION 271..357: note = Tnp_domain
  SITE 279: note = Tnp_P1
  SITE 310: note = Tnp_P2
  SITE 318: note = Tnp_P3
  SITE 319: note = Tnp_P4
MLFVGDDWAEDHHDVELQDATGRRVARARLPEGIAGVARLHELIGEHLAEDGEPEQVALGIETDRGPWVAALIAAGYTVYAVNPRQVARYRERHGTSGAKSDAGDAHTLADMARTDRHQLRPVAGDSARAQAVKVVARAHQTLIWDRHRHMLRLRSALREFFPAALDAFDDLTAPDALELLAKAPNPERAARLSRAQIAGALTRARRRDVEGKAATMQAALRAEQLTQPSTVAAAYAVTVRSLASVIATFNTEIAQMEEQVKQCFGRTRAAEIYLSQPGLGQILAARALGEFGDDPTRYATARNRKNYAGTSPITRASGKRKTVLARFIHNDRLTDALHQQAFCALNASPGARAYYDRLRGRGANHHAALRQLSNRLVGILHGCLKTGTTYDERTAWAHHNQDQQNAT

SEQ ID NO: 15487 - protein, 342 aa, unidentified
  source 1..342: note = protein_f6a9bf1
  REGION 7..148: note = RuvC_domain
  SITE 10: note = RuvC_P1
  SITE 53: note = RuvC_P2
  SITE 88: note = RuvC_P3
  SITE 90: note = RuvC_P4
  SITE 93: note = RuvC_P5
  REGION 212..301: note = Tnp_domain
  SITE 220: note = Tnp_P1
  SITE 250: note = Tnp_P2
  SITE 258: note = Tnp_P3
  SITE 259: note = Tnp_P4
  SITE 271: note = Tnp_P5
MGEVVTVGLDIAKSVFQVHGVDAEGQVIVQRRLTRAKLVPFFEKLPPCRVGIEACATAHHWGRRLTELGHEVKLMPPAYVKPYLKRQKNDAADAEAIYEAVTRPSMRFVEVKAPEQQSVLVIHRTRMTLMRHRIELSNTIRAHMAEFGLVAPIGRRGLQGLIEIVRDETDARVPASARICLKLLAEQLDVVNRHALETDRMILASARATEVGRRLMAVPGVGPVLASAMVASVPDPHAFKSGRNLAAWIGLVPRQNSTGGKARLGGITKQGNRYLRQLLVVGALAVIRYAERHGTRRPWLGQLMARRTTKIAAVALANKTARMIWAIMTSGEAYREPVLQAA

SEQ ID NO: 15488 - protein, 405 aa, unidentified
  source 1..405: note = protein_8aa9896
  REGION 4..160: note = RuvC_domain
  SITE 7: note = RuvC_P1
  SITE 57: note = RuvC_P2
  SITE 97: note = RuvC_P3
  SITE 99: note = RuvC_P4
  SITE 102: note = RuvC_P5
  REGION 274..361: note = Tnp_domain
  SITE 282: note = Tnp_P1
  SITE 312: note = Tnp_P2
  SITE 320: note = Tnp_P3
  SITE 321: note = Tnp_P4
  SITE 334: note = Tnp_P5
MNAVGIDASKGKSMVTILRPFGEIVSTPHEVRHTSDQIDDLIREIRSLEGDTRIVMEYTGRYHEPMARWLSDAGLFVSLVNPKLIKDFDNDSLRKVKTDKADSVKIARYTLDKWDKLKQYGAMDELRNQLKTMNRQFGYYMKLKTAMKNNLISLLDQTFPGANAFFDSPARSDGSQKWVDFVDTYWHVDRIRSMSLSAFTEHYQKWCKRKGYNFQPDKPAEIYESIRNIIPVLPKDEMTKFIIRQAVNQVNTASAAVEELRIRMNDIASQLPEYPAVLAMKGVGTSLGPQLMAEIGDVTRFTHKGALSAFAGVDPGKNDSGSYSQKSVHTSKRGSAPLRKTLFQVMDGLIKTMPQGDPVYEFMNKKRSQGKPYYVYMTAGANKFLRVYYGRVKEYLTEHSEATES

SEQ ID NO: 15489 - protein, 397 aa, unidentified
  source 1..397: note = protein_1034807
  REGION 4..160: note = RuvC_domain
  SITE 7: note = RuvC_P1
  SITE 57: note = RuvC_P2
  SITE 97: note = RuvC_P3
  SITE 99: note = RuvC_P4
  SITE 102: note = RuvC_P5
  REGION 274..361: note = Tnp_domain
  SITE 282: note = Tnp_P1
  SITE 312: note = Tnp_P2
  SITE 320: note = Tnp_P3
  SITE 321: note = Tnp_P4
  SITE 334: note = Tnp_P5
MIAVGIDVSKAKSTVAILNGDGSIRAKPFDVHHVADELQALVDYIKRTSEPPTILMEPTSHYHYPLLKAFREAELPVCLINPYQMKKYGDTELRKAKTDKRDSLRIAQYALEKSYSLIPYTPQDQKYEDLRFLSRQYSQRISTLTAAKVQLLSLLDETMPGITTILPLKSRDPDNCVLLRFIKRFKSFDVIRKMGKTRFLDSYQVLVKKTKDRFAGSKGLAIYELVLNSITTRGENPLSAMTQDQCVDLVSTAQNAADEINLQMRIIAETIPEYKVLRSMAGVGDRLGPIILGEIGDIRRFHSGKALNAYAGNDAPPYQSGQFESRNRHISKRGNPALRKACFEVMQALKLTKPQDDPVYLFLLKKEQEGKPYNVAKMAAVNKFLRIYYARAMELYK

SEQ ID NO: 15490 - protein, 315 aa, unidentified
  source 1..315: note = protein_6636f87
  REGION 9..151: note = RuvC_domain
  SITE 12: note = RuvC_P1
  SITE 56: note = RuvC_P2
  SITE 96: note = RuvC_P3
  SITE 98: note = RuvC_P4
  SITE 101: note = RuvC_P5
  REGION 192..276: note = Tnp_domain
  SITE 200: note = Tnp_P1
  SITE 229: note = Tnp_P2
  SITE 237: note = Tnp_P3
  SITE 238: note = Tnp_P4
  SITE 249: note = Tnp_P5
MTQTIAFFAGIDISKETLDLAFSNDVAVVQFDNTKAGCRRLVALLAKHQPECIVFEATGPYHRELEMALAAAGLAYAKANPRKVRRFADVIGIHAKTDRVDARLLARFAAMVDMRPTAQKSASLQSLGELINARQGLIADRTALKNRSHVQRSKLIIRQNQARLALIESQIKAIDQEAITLVKQDEALAARFDILISIPGISTLTAIVILTEMPELGTLDQRQVASLAGLAPHPRESGAWKGKRFICGGRANLRQALYMPALVAARFNADLKTKYDALIAARKPPKVAITAIMRKLIILANALIRDQRKWCQKPA

SEQ ID NO: 15491 - protein, 406 aa, unidentified
  source 1..406: note = protein_1fa8855
  REGION 16..170: note = RuvC_domain
  SITE 19: note = RuvC_P1
  SITE 67: note = RuvC_P2
  SITE 107: note = RuvC_P3
  SITE 109: note = RuvC_P4
  SITE 112: note = RuvC_P5
  REGION 277..361: note = Tnp_domain
  SITE 285: note = Tnp_P1
  SITE 314: note = Tnp_P2
  SITE 322: note = Tnp_P3
  SITE 323: note = Tnp_P4
  SITE 335: note = Tnp_P5
MMVSSIDRYDEVDVFIGLDVGKGEHHAVALDRAGKRLFDHALPNDEARLRGVLEQLSTHGLILLVVDQPATIGALPVAVAQASGALVGYLPGLAMRRIADLHPGEAKTDARDAAIIAETARTMPHTLRSIQAADEQVAELSMLCGFDDDLAGQITAVSNRIRGLLTQIHPALERVIGPRLAHPAILDLLQRYPSPALMRAAGERRLGTRLLKNAPRKGRVWATLIIQALDEQTVVVTGTDAAALALPRLAEQLTALRRQRDEIAAEVERIVDAHPLSPVLTSMPGVGVRTAARLLTEVTTKTFPTAGHLAAYAGIAPVTRRSGSSIRGEHPSRSGNKILKRTLFLSAFAALRDPESRAYYDRKIAEGKRHNQALIALARRRADVLFAMLRDGTLYQRHDSAASLAA

SEQ ID NO: 15492 - protein, 346 aa, unidentified
  source 1..346: note = protein_a637503
  REGION 10..170: note = RuvC_domain
  SITE 13: note = RuvC_P1
  SITE 69: note = RuvC_P2
  SITE 109: note = RuvC_P3
  SITE 111: note = RuvC_P4
  SITE 114: note = RuvC_P5
  REGION 210..296: note = Tnp_domain
  SITE 218: note = Tnp_P1
  SITE 248: note = Tnp_P2
  SITE 256: note = Tnp_P3
  SITE 257: note = Tnp_P4
  SITE 270: note = Tnp_P5
MANRLLKQVVGIDVAQKELVVSLGKMNEMAVTTVYANKVFSNNEKGFVSMEAWVNKQTIAEYPLRYVMEATGVYHERFAYYLAGKGYAVSIIMPNKISNFFRTLEIKTITDKSMSAAIAMFGLEKQLDNWVQPKRVYRSLRQVTREREQLIAERTMIKNQLHAEQAEAFPGDDTIRRMQDRIKMINTQLKEILAEIRTAITKDTELRQTLATITTIPGIGLLTAAVILAETNGFELIRSKKQLTSYAGLDVREKESGTSVKGKPRISKRGNKHLRKAMHLPALAAIRYSERYKAIFVRIVSRNSVKMKGAVAVQRKLLEMVYTIYKTNKPFEKDYLQQQNTITENS

SEQ ID NO: 15493 - protein, 346 aa, unidentified
  source 1..346: note = protein_223d1ca
  REGION 7..149: note = RuvC_domain
  SITE 10: note = RuvC_P1
  SITE 53: note = RuvC_P2
  SITE 88: note = RuvC_P3
  SITE 90: note = RuvC_P4
  SITE 93: note = RuvC_P5
  REGION 212..299: note = Tnp_domain
  SITE 220: note = Tnp_P1
  SITE 250: note = Tnp_P2
  SITE 258: note = Tnp_P3
  SITE 259: note = Tnp_P4
  SITE 271: note = Tnp_P5
MNKVTTVGIDLAKNVFQVHGVDERGKPVLRKQLKRKDVVTFFANLPLCLIGMEACGSAHYWARKLSELGHTVRLMPPQFVKPYVKTNKNDRNDAEAICEAVARPNMRFVPVKSAEQQAVLALHRARAGLVKARTAQANEIRGLLAEYGIVMPKGIGQIAKCMPEILEDGENGLPGTMRHLFARLNDRLKALDEQVAELEREIVLWHRGNESSRKLDDIAGIGPITASAFVASVGDAKNFKNARQVPAWLGMVPRHEGTGGKARLGRMSKRGDVYLRTLLIHGARAVIRQFERKPDRPDGWLKRLLARRNKNVAAVALAAKNARIAWALLAHERSFERDYVATRPVA

SEQ ID NO: 15494 - protein, 346 aa, unidentified
  source 1..346: note = protein_f4d9b3d
  REGION 19..174: note = RuvC_domain
  SITE 22: note = RuvC_P1
  SITE 72: note = RuvC_P2
  SITE 113: note = RuvC_P3
  SITE 115: note = RuvC_P4
  SITE 118: note = RuvC_P5
  REGION 270..346: note = Tnp_domain
  SITE 278: note = Tnp_P1
  SITE 308: note = Tnp_P2
  SITE 316: note = Tnp_P3
  SITE 317: note = Tnp_P4
  SITE 329: note = Tnp_P5
MDNQVCLTILYGGTSMLYVGIEVAKYKHDVAVLNDQGKWVLKPLTFSNSRAGFETLLNTLSQLNQDYLVALEDTGHYAFNLLHFLHEQEITTYTYNPLLIKEFAKSLSLRKTKTDKKDARVIALKLLADPKREQFRHDNKHEELKILTRHINRLKKKQSDWKVQYTRCLDIIFPELDKLIGKQSDYAYELLSRYPNPQKISVADFEQLLTIKRLTVPKIQDILKVAPHSIGTTSPAREFELIEIIENIKHYNKLITKAENRVDELMAEINSVITTVTGIGNRLGSIILAEIRNIHTFDSPAQLQAFAGLEPSIYQSGQVDLSGKMVKRGSPHLRWALIQAAKSVAR

SEQ ID NO: 15495 - protein, 317 aa, unidentified
  source 1..317: note = protein_fa47690
  REGION 8..151: note = RuvC_domain
  SITE 11: note = RuvC_P1
  SITE 56: note = RuvC_P2
  SITE 96: note = RuvC_P3
  SITE 98: note = RuvC_P4
  SITE 101: note = RuvC_P5
  REGION 191..275: note = Tnp_domain
  SITE 199: note = Tnp_P1
  SITE 228: note = Tnp_P2
  SITE 236: note = Tnp_P3
  SITE 237: note = Tnp_P4
  SITE 248: note = Tnp_P5
MESIEQWIGIDVCKRWLDVHIRPQGSRFRVSNDADGIQALLTHLKEPTQVGRIILESTGGYERQVSLHLWTLSYPVVVVNARQARNFAKAVNQLAKTDQVDAAILAWFGEALKPEIRPFASEAQAQLQDLVTRRRQLVEMLTAEQNRLSGLRGTAQADVEVHLDWLRERIKQLDEQVATQISQCQTWQAKHMRLKTVPGVGKVVAATLVALLPELGQLSTQKISTLVGVAPLNRDSGQMKGKRIIFGGRAAVRQMLYMATLVAVRHNPIIKAFYDQLLKRGKPTKVALVACMHKLLTILNAMLKHGTDWRLSPPAAA

SEQ ID NO: 15496 - protein, 341 aa, unidentified
  source 1..341: note = protein_2a1020d
  REGION 5..147: note = RuvC_domain
  SITE 8: note = RuvC_P1
  SITE 51: note = RuvC_P2
  SITE 86: note = RuvC_P3
  SITE 88: note = RuvC_P4
  SITE 91: note = RuvC_P5
  REGION 209..290: note = Tnp_domain
  SITE 217: note = Tnp_P1
  SITE 247: note = Tnp_P2
  SITE 255: note = Tnp_P3
  SITE 256: note = Tnp_P4
  SITE 268: note = Tnp_P5
MNTMIGVDLAKSVFQLHGATMTGEVLFRKKLTLAQFLRFMSEHSPATVVLECCGSAHFWAREMRKLGHQVKLIPPQYVRPFVKRQKNDAADAEAIVGAAQRPEMRFVEPKSATQQARAVLFRARDRLVHHRTELMNVLRGVLYEQGFVFPQGTHHFTRVHVMLDDPESDLDPLVLEECRDLTELIAETTDRINAKTRKIAALSTKSDMTRRLQSMPGLGPMTALAIEAFAPQMDNFRKGRDFAAWLGLVPRQNSTGGKTRLGRMSKAGQKDIRRLLIIGAMARLTPRGRLGIKPGSWLARMLDRKPKMLVAVALANKMARMIWAMLTKKEDYREPAQGVLV

SEQ ID NO: 15497 - protein, 404 aa, unidentified
  source 1..404: note = protein_065a83e
  REGION 4..157: note = RuvC_domain
  SITE 7: note = RuvC_P1
  SITE 56: note = RuvC_P2
  SITE 94: note = RuvC_P3
  SITE 96: note = RuvC_P4
  SITE 99: note = RuvC_P5
  REGION 265..351: note = Tnp_domain
  SITE 273: note = Tnp_P1
  SITE 304: note = Tnp_P2
  SITE 312: note = Tnp_P3
  SITE 313: note = Tnp_P4
MWYVGLDWADTHHDVEVQDETGKRVGARRFAHSHDGLNELKAFLLGIAASPEELACIVETNHGLLITFLLEAGIPVYPVNPKSANQLRKAAGAKTDRIDAHLLAKLGRFDLAELRRLEPDSLSVAELKTLTRDQDALIQTQTRLVNQLTACLKEYYPAALQLFAKVQQRSTLLFLQAYPTPQAALAASVEEITATLRTGKHTNPTKAAPKIVAELHRPQLLASEVIVRAKSRLMLALVKQLLVVIEEIASYDKAIRPLFLSHPDQELWSSLPRAGKRLAPRLLAEWGDDRSRYADGTSVQTLAGTAPVPYESGNYAKAHKRFACSKPLRNALQQFAWQSTLSEPWALAYYQRKRAQGKTHSMALRALANVWVRIIYRMWVNKTSYQTATFEAAQRTHAPRQRIA

SEQ ID NO: 15498 - protein, 407 aa, unidentified
  source 1..407: note = protein_f4fef07
  REGION 11..165: note = RuvC_domain
  SITE 14: note = RuvC_P1
  SITE 62: note = RuvC_P2
  SITE 102: note = RuvC_P3
  SITE 104: note = RuvC_P4
  SITE 107: note = RuvC_P5
  REGION 272..357: note = Tnp_domain
  SITE 280: note = Tnp_P1
  SITE 310: note = Tnp_P2
  SITE 318: note = Tnp_P3
  SITE 319: note = Tnp_P4
  SITE 331: note = Tnp_P5
MACEHGYGVFLGFDVGKGEHHAVALAPDGTRLHDAALPNSEPKLREVFDKLADHGRVLVVVDQPASIGALPVAVARACGHDVAYLPGLAMRRIADLYPGNAKTDARDALVIADAARTLPHTLRQVDLGDDTLAEMEVLVGYDDDLAGEATRLSNRIRGLLTGIHPALERAIGPDITHRAVLEILAHCGGPAGIRAAGREQVAAIAAEHAPRKHAKLVDRVWAALDEQTVTVPGTTAADTVLPQLAESLKTVLAQRKTLAAQVEELLDAHPLAGVLTSMPGIGVRTASRILLEIGDASSFASSAHLAAYAGIAPVTHKSGSSIKGEHPTRAGNRKLKRAFFLAAFAALSDPVSRAYYDKKRAEGKKHNAALICLARRRCDVLFAMLRNGTYYQPPQPSKENEKLATAA

SEQ ID NO: 15499 - protein, 404 aa, unidentified
  source 1..404: note = protein_16f7998
  REGION 4..160: note = RuvC_domain
  SITE 7: note = RuvC_P1
  SITE 57: note = RuvC_P2
  SITE 97: note = RuvC_P3
  SITE 99: note = RuvC_P4
  SITE 102: note = RuvC_P5
  REGION 268..353: note = Tnp_domain
  SITE 275: note = Tnp_P1
  SITE 306: note = Tnp_P2
  SITE 314: note = Tnp_P3
  SITE 315: note = Tnp_P4
  SITE 326: note = Tnp_P5
MFKFGIDWSEQHHNLCIRNDKGAIVSQVEFKHTLAGFQRFDDERRKLGVPPSECLVAIETAYNLLVDFLLDRGYLVYLIPPQATKGYRNRQRSTDAHTDDTDAALLSSILHTDLDSHRRLQPNSALTQQILAQVRFIDLLRRSIQRQTNQLRAVLFRVYPQALGLFGKLTAQINLHFLMAYPTAQEAQCLTRAAFEAFCREHRYGRANLISRRYAHLMEPAPQANPIAVAAYRDQIRILAELLLPQVLRRTEALSCLAQLFSQHPDDFIFESLPGAGELLAPALLAKFGDHRDRFPTAAGVQALAGTCPVTKKSGKRKVVLFRRGCDREFRRIAQQFAKASVRQSGWALAYWRDVRPRCRSDSDAYRRLANRWLAIIWRMWQDGKAYDESYHIQQRAQRRRPRS

SEQ ID NO: 15500 - protein, 333 aa, unidentified
  source 1..333: note = protein_f96e85b
  REGION 7..155: note = RuvC_domain
  SITE 10: note = RuvC_P1
  SITE 60: note = RuvC_P2
  SITE 98: note = RuvC_P3
  SITE 100: note = RuvC_P4
  SITE 103: note = RuvC_P5
  REGION 203..290: note = Tnp_domain
  SITE 211: note = Tnp_P1
  SITE 241: note = Tnp_P2
  SITE 249: note = Tnp_P3
  SITE 250: note = Tnp_P4
  SITE 263: note = Tnp_P5
MKFKTFIGIDVSKLTLDICLVTLYGEIENFKIENKDLSIGRFFRRLEKSRAWGEVLVCAEHTGHYSNPLKVFCMGNGIALWLESGAEIRLRSGVQRRKDDKIDSERIADYAMQYVDKARLQTLDDKVIETVKLLGSERDMYIRDRAKYKSQINDFEGYIDSDVYKAKAKRLKRQVESLTKLIDLLDQQIEEQLMGSEKLARQKEILVSVGGVGDKVATETIIATQGFTKFGSGRQFSCHVGVAPFSFESGTSQRSRRKVSNRANKDLKTLFHMAALSAIRMKGELRDYFERKVAEGKNKMTVLNAVRAKIINRIFALIREDRKYEKSYIKPVV

SEQ ID NO: 15501 - protein, 408 aa, unidentified
  source 1..408: note = protein_df3c9a9
  REGION 4..159: note = RuvC_domain
  SITE 7: note = RuvC_P1
  SITE 56: note = RuvC_P2
  SITE 96: note = RuvC_P3
  SITE 98: note = RuvC_P4
  SITE 101: note = RuvC_P5
  REGION 267..353: note = Tnp_domain
  SITE 275: note = Tnp_P1
  SITE 306: note = Tnp_P2
  SITE 314: note = Tnp_P3
  SITE 315: note = Tnp_P4
  SITE 326: note = Tnp_P5
MFYAGIDWAAEAHAVCVTDAAGAVVARFDVAHSAEGLGRLTRRLASLGDPGDIPVAIERPSGRLVDVLLEAGHPVVPVSPNAIKAWRDGEVLSGAKSDAADARLIAEYLRLRQHRLRVAAPYSEQTRALRVVVRTRDDLVDARVAAVNQLAAMLEAHWPGGKAIFARLDSPVALEFLTRYPDAASAARLDQAGIAGFCAGLGYSGKRPAAELLDRLRSAPAGTTSPELAAATADAVQALVTVLKAITSAIRDLDRSVATRLGEHPDGKIFTSLPRSGQINAAQVLAEWGDCRPAYEHPDAVAALAGVTPVTRQSGKHRAVEFRWACNKRLRRAITIYADNSRRASPWAAAIYDHARAAGKDHPHAVRILARAWIRVIWRCWTDGTPYDPGLHRAAATLARHAAAESAA

SEQ ID NO: 15502 - protein, 411 aa, unidentified
  source 1..411: note = protein_3abbb61
  REGION 4..170: note = RuvC_domain
  SITE 7: note = RuvC_P1
  SITE 69: note = RuvC_P2
  SITE 107: note = RuvC_P3
  SITE 109: note = RuvC_P4
  SITE 112: note = RuvC_P5
  REGION 278..364: note = Tnp_domain
  SITE 286: note = Tnp_P1
  SITE 317: note = Tnp_P2
  SITE 325: note = Tnp_P3
  SITE 326: note = Tnp_P4
MIWVGDDWAEDHHDIELLDDHGRRLARARLPEGLDGIGRLHALIAEHMPASWADLEPAEAARRVQIGIETDRGTWVQALLAAGYQVYAINPMSVARYRERHSTSGAKSDAGDAHVLAEIVRLDHAHHRQVAGDSVLAEAVKLAARAHQSLIWDRTRQVLRLRSALREFFPAALQAFDDLTAGEALELLDRAPDPDRAARLPRITIIAALRRAGRRDLDAKATTIQQTLKAEQLRQPRPVQNAYAAIVSSQVQLINILNIEIAELGQVVASHFGRHRDAERYLSLPGLGTVLGARILGEFGDDPHRYTDAKARRNYAGTSPITRASGSRRVVLARYARNRRIADAVHQWAFCAMRGSPGARAYYQSLRERGTGHQAALRQLGNRLVGILHGCLKTGTPYDEVTAWAHLQPTS

SEQ ID NO: 15503 - protein, 320 aa, unidentified
  source 1..320: note = protein_76d1cac
  REGION 5..154: note = RuvC_domain
  SITE 8: note = RuvC_P1
  SITE 57: note = RuvC_P2
  SITE 97: note = RuvC_P3
  SITE 99: note = RuvC_P4
  SITE 102: note = RuvC_P5
  REGION 194..279: note = Tnp_domain
  SITE 202: note = Tnp_P1
  SITE 231: note = Tnp_P2
  SITE 239: note = Tnp_P3
  SITE 240: note = Tnp_P4
  SITE 252: note = Tnp_P5
MEASLGIDIAKATFAVALLTADGRVRHKSCANTPAGFRDLATWLQRQHVTTVHACLEATGTYGDALATWLHDAGHVVSVVNPAIMHAYARTQLTRSKTDRIDAELIARFTATQPPPAWTPPAPEIRQLQALVRRLDALQGMRTQELNRLEAGVAVAEVRASIEAVLAQLDAQIAHVKQLIRDHLDRHPRLRAQRALLVTIPGIGETTAAVLIAELFDKPYTRARQAAAFAGLVPRIVESGTLRGRSRLSKIGPGRLRKALYLPAVAALRCNPTIRAVRARLQAAGKPPMVIIGAAMRKLIHLAFGVLKSGKAYQSTYAHS

SEQ ID NO: 15504 - protein, 326 aa, unidentified
  source 1..326: note = protein_757dcfe
  REGION 19..167: note = RuvC_domain
  SITE 22: note = RuvC_P1
  SITE 67: note = RuvC_P2
  SITE 107: note = RuvC_P3
  SITE 109: note = RuvC_P4
  SITE 112: note = RuvC_P5
  REGION 203..287: note = Tnp_domain
  SITE 211: note = Tnp_P1
  SITE 240: note = Tnp_P2
  SITE 248: note = Tnp_P3
  SITE 249: note = Tnp_P4
  SITE 260: note = Tnp_P5
MTHPVAASKLESSPASITIGIDVSKDHLDASRHPGGETIRVANTRKGQTALLRWIGDLTLVARVVFEPTGPYHRTLEERLAGLGVVIIKVNPRQARCFAEATGRLAKTDRVDARMLARYGALLEPVPRPIRSDLHNDLAELVAARRSLMRDRTATLNRIKTLTIDILIRHARHRLRQIEAQVTSLDAALEALVAENEDLLRRREILISIPGLGPVAAHTILADMPELGTMEEGQAASLAGLAPVTRQSGTWRGKSLIRGGRATLRQALYMPALVAMRFNQDLKRVYDRLIAKGKHAKVAITAIMRKLVVLANALLRKDRLWTPKAA

SEQ ID NO: 15505 - protein, 309 aa, unidentified
  source 1..309: note = protein_5aceb13
  REGION 1..98: note = RuvC_domain
  SITE 37: note = RuvC_P3
  SITE 39: note = RuvC_P4
  SITE 42: note = RuvC_P5
  REGION 156..240: note = Tnp_domain
  SITE 164: note = Tnp_P1
  SITE 194: note = Tnp_P2
  SITE 202: note = Tnp_P3
  SITE 203: note = Tnp_P4
  SITE 215: note = Tnp_P5
MEACAGAHFWARELQALGHEVRIMPPSYVKPYVKRGKTDAADAEAICEAVTRPTMRFVPVKSAERQAALLDHKTRDFLVRQRTQLVNTIRAHLSEFGIVVAKGIHNVERLLEAATELPAAARPAVDLLADQLRETQEKIERVTDLIEAAQRTDQLARRLATIPGVGAITASAIAATTPAVDNFRSARDYAAWLGLIPQPHSSGGKERLGRISKAGNRYLRRLLYLGAMAQISARRCRRPGDDWLWRMLEKKPVKVVAPPMLLEPLARSLAAAGEPHGTRRLGADPKRRELPGQPGMTGHAGRFRPAPRR

SEQ ID NO: 15506 - protein, 314 aa, unidentified
  source 1..314: note = protein_4c4d20d
  REGION 7..148: note = RuvC_domain
  SITE 53: note = RuvC_P2
  SITE 93: note = RuvC_P3
  SITE 95: note = RuvC_P4
  SITE 98: note = RuvC_P5
  REGION 188..272: note = Tnp_domain
  SITE 196: note = Tnp_P1
  SITE 225: note = Tnp_P2
  SITE 233: note = Tnp_P3
  SITE 234: note = Tnp_P4
  SITE 245: note = Tnp_P5
MSPLVFVGIDVSLTRLDIALRPGTSSSHTHDESAVATVVEQLRALSPTLIVLEATGGMEIPLTSALATAGLPVVVVNPRQVRDFAKASGQLAKTDALDAQVLAQFAEVMRPQPRPLPDADTRALAAVLTRRRQLVEMLTAEKNRLLSASSPIRKRVRVHIAWLERELEHTNTELSEAIRQSPVWREKDDLLQSVPGVGPVLTSTLLASLPELGTLTNKQIAALVGVAPLNRDSGTLRGRRTVGGGRAQVRAVLYMGAIVAARFNPVIRVFYQRLQQAGKAKKVVLTACMRKLLTILNAMLKHRTPWREVEAHHA

SEQ ID NO: 15507 - protein, 346 aa, unidentified
  source 1..346: note = protein_3697fa2
  REGION 7..148: note = RuvC_domain
  SITE 10: note = RuvC_P1
  SITE 55: note = RuvC_P2
  SITE 88: note = RuvC_P3
  SITE 90: note = RuvC_P4
  SITE 93: note = RuvC_P5
  REGION 212..301: note = Tnp_domain
  SITE 220: note = Tnp_P1
  SITE 250: note = Tnp_P2
  SITE 258: note = Tnp_P3
  SITE 259: note = Tnp_P4
  SITE 272: note = Tnp_P5
MTHSTTVGVDLAKNVIQISVVSGRGKELSNRSLTRHKFAEFLGKQKPALVAFEACATSHYWARAAQRHGHEARIIPAKFVAPFRQGHKTDSNDALAVAEAARRPSIKEAPMKTVEQQGLQAIHRSRQLLIQESTALSNHLRGLLMEFGVVIPQGFASLLRAVPEVLEDGENELPDLYRPTLHRMHTRLLELREHIEAMTREVEVLVKQHPICSRLTALEGIGPIGALLLYATLGSGNVFSSSREFAAYLGLAPRQYSSGGKTNIVGLSKKIGNSRLRSILILGARAYTYRLKEPKSSKDRWLKDVIDRNGHSRAAIALANKNVRTAWAMVTQGTAYQRRGQLKVAA

SEQ ID NO: 15508 - protein, 344 aa, unidentified
  source 1..344: note = protein_4b4cfc8
  REGION 6..147: note = RuvC_domain
  SITE 9: note = RuvC_P1
  SITE 52: note = RuvC_P2
  SITE 87: note = RuvC_P3
  SITE 89: note = RuvC_P4
  SITE 92: note = RuvC_P5
  REGION 209..296: note = Tnp_domain
  SITE 217: note = Tnp_P1
  SITE 247: note = Tnp_P2
  SITE 255: note = Tnp_P3
  SITE 256: note = Tnp_P4
  SITE 268: note = Tnp_P5
MTIIRVGLDTSKSVFQVHGADEQERPVLRRQLRRGQIEKVFAKLPPTRVGLEACGASHHWGRVLRDLGHEVMLIPPQYIKPYVKRGKNDVIDAEAICEAMSRPGMRFVPIKSREEQAALMLLKVRDLLTKQSTMLSNAIRGHAAEFGVIGAKGPQKIKELLERIAGEANMPEPARELLNDLASQLAAVEVRLAALEAKLMAHHKADPRSQLLATIPGVGPVTAVNITLKVPDATVFRSGRHFAAWLGITPREHSTAGRQRLGKISRQGDEGLRRLLVLGATAVIQQVERRRKAKKTSGNDSPWLLQLLARKPRKLAAIALANKMARTIRAMLVSGELYRRPQAA

SEQ ID NO: 15509 - protein, 341 aa, unidentified
  source 1..341: note = protein_092badd
  REGION 7..149: note = RuvC_domain
  SITE 10: note = RuvC_P1
  SITE 53: note = RuvC_P2
  SITE 88: note = RuvC_P3
  SITE 90: note = RuvC_P4
  SITE 93: note = RuvC_P5
  REGION 212..300: note = Tnp_domain
  SITE 220: note = Tnp_P1
  SITE 250: note = Tnp_P2
  SITE 258: note = Tnp_P3
  SITE 259: note = Tnp_P4
  SITE 271: note = Tnp_P5
MSQITIVGVDLAKNSFALVALDVHGKEVQRKTLRRKQWLTYLAQLPPCTVAMEACASAHHWARRLQALGHTPVLLPPQHVKAYQRGQKNDGNDARAVAEAQRHGAIRPVPIQTVAQQDARMFLNFRRQVLATRTRLVNQTRGVLAEYGIVVPRGIAALRRALPEILEDAENELSPAMRALLERQRQRLVELDAEVAWYDAQVKQRVQEEPACKRLLALPGVGPLVGLALKTWMGDGRQFDRGRAASAALGMVPRQHSTGGRSVLLGISKRGDPWVRALVIHGARAVVSRVAGKDDPLSRWIQRLVATRGFNKAVVALANKIVRMAWVVIARGEEYQPRTAA

SEQ ID NO: 15510 - protein, 334 aa, unidentified
  source 1..334: note = protein_fcb00c5
  REGION 4..155: note = RuvC_domain
  SITE 7: note = RuvC_P1
  SITE 55: note = RuvC_P2
  SITE 96: note = RuvC_P3
  SITE 98: note = RuvC_P4
  SITE 101: note = RuvC_P5
  REGION 198..284: note = Tnp_domain
  SITE 205: note = Tnp_P1
  SITE 235: note = Tnp_P2
  SITE 243: note = Tnp_P3
  SITE 244: note = Tnp_P4
  SITE 257: note = Tnp_P5
MNCVGIDVSHKELVVVVSVKGKARKAKSYKNTAAGFITIIQLLAKLKGHVKVCLEATGIYHFDLAVSLSRAENIEVMVINPKVSSNFAKVLLKRSKTDALDAEILAIYCERMPFEAWVRPANENIALRAHSRRMAALSKLKAQNKNQLHALISTEETPELIIEQINELIAVLDQQIDVQRDAALELIKEHAELKASFVLVTSIKGIADTSGIQILAELMILPPDMSAKQWVAHAGLDPRVFESGSSVSKKPRISKAGNKYIRQAIYMPALVATRFEPHIKGYYLHMINDNGLKKMQAICAVMRKLLHAIHGMLKANKSFEGERFYKFPSEATYS

SEQ ID NO: 15511 - protein, 391 aa, unidentified
  source 1..391: note = protein_2e9d52c
  REGION 4..163: note = RuvC_domain
  SITE 7: note = RuvC_P1
  SITE 60: note = RuvC_P2
  SITE 101: note = RuvC_P3
  SITE 103: note = RuvC_P4
  SITE 106: note = RuvC_P5
  REGION 266..353: note = Tnp_domain
  SITE 274: note = Tnp_P1
  SITE 304: note = Tnp_P2
  SITE 312: note = Tnp_P3
  SITE 313: note = Tnp_P4
  SITE 326: note = Tnp_P5
MICVGIDVAKDKHDCFIMSSEGEVLTDVFAVANNMDGLRCLLEHIQACATSQGKIKVGLEATGHYSYNILGFLLDKGLPTYVLNPLHTNLYRKSLTLRKTKTDRVDARTIAAMLMSDVGLKPYTDTAYHNEELKSLTRYRFDKVRERAKLKQSVSRLVCILFPELEKLVPTLHMASVYALLDDFPGAQQVAGSHLTRLKSVLHQASRGHYGRDMAVTIREAARASIGSVMPAKSLELRHTIRLIRELDAEIEEIEGAIKAIMDTLHSPITTIPGIGFRMGAMILAEVGDFSRFDSPDKVLAYAGLSPSTYQSGQLTSGYARMEKRGSRYLRYAIYNATKYVCHWDSTFAAYLAKKRAEGKHYNVALSHAAKKLVRLIYAMEKSGEAYRTAA

SEQ ID NO: 15512 - protein, 405 aa, unidentified
  source 1..405: note = protein_f81cf2c
  REGION 4..160: note = RuvC_domain
  SITE 7: note = RuvC_P1
  SITE 59: note = RuvC_P2
  SITE 97: note = RuvC_P3
  SITE 99: note = RuvC_P4
  SITE 102: note = RuvC_P5
  REGION 268..354: note = Tnp_domain
  SITE 276: note = Tnp_P1
  SITE 307: note = Tnp_P2
  SITE 315: note = Tnp_P3
  SITE 316: note = Tnp_P4
MWYAGIDWADQHHDAVVIDEAGKRVGTTRVAHSAAGLDTLVTFLKGIGDVADHPDHLACIVETNRGVLISALLDAGLPVYPVNPKTVDRHRKPAGAKTDAIDAYLLARTGRSDLADLRRLIPDSPLIAELRVLTRDQDTLIQSQTRLVNQLTACLKAYYPVAVDLFGKLQQPTTLAFLQAFPALEQARAASVEQISTVLKGAGHPTAEVKARQIHARLRQPQLAADPIVTRTKARLMLTLVGQLVVLIPEIAAYDEEITRLFKLHSDSRAFASLPRAGTRLAPRLLAEWGDDRGRYTDAGSVQALAGTAPVPFQSGNFAKAHRRYACNKPLRNALQQFAWQSTQKEAWALTYYQRKRTAGKSHAMAVRALANQWVRLIYALWSKRETYDPATFLAAQQAHAPRAA

SEQ ID NO: 15513 - protein, 404 aa, unidentified
  source 1..404: note = protein_1ab5560
  REGION 11..165: note = RuvC_domain
  SITE 14: note = RuvC_P1
  SITE 62: note = RuvC_P2
  SITE 102: note = RuvC_P3
  SITE 104: note = RuvC_P4
  SITE 107: note = RuvC_P5
  REGION 272..358: note = Tnp_domain
  SITE 280: note = Tnp_P1
  SITE 310: note = Tnp_P2
  SITE 318: note = Tnp_P3
  SITE 319: note = Tnp_P4
  SITE 331: note = Tnp_P5
MHNDLGFDIWCGLDVGKQAHHACALDAAGKKVFDKPLPQDQSKLEDLFTRLSEHGRVLVIVDQPNTIGALPIAVARSMGIQVAYLPGLAMRRAADLYPGNAKTDARDAFVIADAARTMPHTLRRVDLGEETLAELKVLVGFDEDLAAEATRLSNRIRGLLTQIHPALERVVGPRLATRQGLAVIEQLGGPQGMTAASKSKLLRVITKANPRHAQNFADAITQTLSEQTVVVAGTAAAEQVLPKLAASLPQTWDQRSELAAQVEKVVDAHPLAEVLTSMPGVGVRTAARILLDVGDASLFPTAGHLAAYAGLAPVTHRSGTSIRGEFPARSGNKHLKRALFLSSFAALRSDPVSRAYYDRKRAQGKKHNAALICLSRRRVDVLFAMLRNREPYRAPNPTPQPLAA

SEQ ID NO: 15514 - protein, 355 aa, unidentified
  source 1..355: note = protein_558b18f
  REGION 17..159: note = RuvC_domain
  SITE 20: note = RuvC_P1
  SITE 63: note = RuvC_P2
  SITE 98: note = RuvC_P3
  SITE 100: note = RuvC_P4
  SITE 103: note = RuvC_P5
  REGION 222..313: note = Tnp_domain
  SITE 230: note = Tnp_P1
  SITE 260: note = Tnp_P2
  SITE 268: note = Tnp_P3
  SITE 269: note = Tnp_P4
  SITE 281: note = Tnp_P5
MLNHYQEGEGHINKVTIGLDIAKSVFHLVVMNQSGRVLKKKKLKRYQVLSYFSQLEPSIVVMEACGSCHYWCRELTKAGHEVKAIAPQYVVAYRKSNKHDYNDAEAIAEASQREGMRFVPFKSQEQQDIQLMHRIRERMIAQQTALSNQIRGSLAEYDIVYARGVATVVKELPFTLEEADNGLSMLARQLFQGLFNDLLVLRERIKEMDKELKAFAQNHPVCERLMSMTGIGPLIATALYAGIGQGQAFNSGRHLAAWLGIVPKQHTTGDNPRLLGISKRGNTYLRTQMINGARAALRHIGDKTDKVSQWCRACLARMSFNKACVALANKMARMAWAMLHHQQDYLPGQINKAAV

SEQ ID NO: 15515 - protein, 320 aa, unidentified
  source 1..320: note = protein_2aef7cc
  REGION 7..148: note = RuvC_domain
  SITE 10: note = RuvC_P1
  SITE 52: note = RuvC_P2
  SITE 92: note = RuvC_P3
  SITE 94: note = RuvC_P4
  SITE 97: note = RuvC_P5
  REGION 187..270: note = Tnp_domain
  SITE 195: note = Tnp_P1
  SITE 224: note = Tnp_P2
  SITE 232: note = Tnp_P3
  SITE 233: note = Tnp_P4
  SITE 245: note = Tnp_P5
MSDRFAVGIDADSQTLVVAYYGTKGSARIANSASAITKWLSALPARSRIGVEATNRYHELVVQAAQKAGHAVFVLNPRDIKHYAKGVACRGKTDAGDAQVIARYIAKEADNLHEHVARSPAQERLHVLLQQRDSLVRNKATLHLSLGTDAADSAIFGRIFSGLKEAIAMLDREIQRLCRSGEQSDLYRRIMTIPGIGPTVAAFVTHHITRWPLASSDAWVACTGLDPRPNESGARIGRRRLSKRGNAGLRQILYMAAMGLTRSKGGKPLYLAIRERGHSSTASFNILARKLARIAWGVFKSGRDFDPAMLKVGQACFQQA

SEQ ID NO: 15516 - protein, 412 aa, unidentified
  source 1..412: note = protein_bdac358
  REGION 6..164: note = RuvC_domain
  SITE 9: note = RuvC_P1
  SITE 63: note = RuvC_P2
  SITE 103: note = RuvC_P3
  SITE 105: note = RuvC_P4
  SITE 108: note = RuvC_P5
  REGION 274..374: note = Tnp_domain
  SITE 282: note = Tnp_P1
  SITE 312: note = Tnp_P2
  SITE 320: note = Tnp_P3
  SITE 321: note = Tnp_P4
  SITE 334: note = Tnp_P5
MMNPVIGLDVAKDESQVQAYLDRKQPYKKSFKVSHTLEGLVNLHDFIKEVEDVSGKRPPIVLESTGHYHTPIVQYFQDRGYLLIIVNPLISYRAKSSSLRKVKTDIIDAHHLCELFYREDLEPYKQRGIQLLNVRNLTRQHENITGMFIQTKLQFQAVLDQVFPVYIGVFGDLYSDVSLLTLQTFPSSEDVLKAGKETIAKKIKEFCKSRSLEWANNRAEKLMAAAAQNPFQKAIFHSLFLSLDMYINMIREYKKHLSKLENEIDALAKNIEEYHIIQSIPGIGEKIAATIISEIGEIDRFNHPKKLVAFAGIDPSVFESGTFKGTLNRITKRGSSRLRHALFMAVRSAIRDCRKMKTTDEIIPRNKKLREFYDKKREEGKPFKVAVIACANKLLHWIYALLKNKSTFQDIA

SEQ ID NO: 15517 - protein, 342 aa, unidentified
  source 1..342: note = protein_ad843fb
  REGION 5..152: note = RuvC_domain
  SITE 8: note = RuvC_P1
  SITE 55: note = RuvC_P2
  SITE 92: note = RuvC_P3
  SITE 94: note = RuvC_P4
  SITE 97: note = RuvC_P5
  REGION 212..300: note = Tnp_domain
  SITE 220: note = Tnp_P1
  SITE 250: note = Tnp_P2
  SITE 258: note = Tnp_P3
  SITE 259: note = Tnp_P4
  SITE 271: note = Tnp_P5
MDHFAGLDVSVKDTSVCIVDGTGKIVREVKVASEPDALLGVLRNPDYCFKRIGLEAGPLSQWLFSALGEANLPVICVETRHMRAVLKAQINKTDRNDARGIAQMMRVGLYRPVHVKTLRSQKLRMLLTHRKLLQSKAIAIENDLRGTLRNFGLKVGIVGRTRFEERIEELVGHVPDLAVLVEPLLVVRRVLGEQIAVLHRRLLTIVRDDEVCRRLMTIPGVGPVVALTYRATVDVPARFRKSKSVGAVFGLTCSRDQSGERDRPGAISRCGDEMMRAMLYEAAQSMLVRSTRWSWLKAWAMQVAKRRGMKRAIVALARRLAVIMHRVWVDGTEFRWTREVTA

SEQ ID NO: 15518 - protein, 310 aa, unidentified
  source 1..310: note = protein_13e7327
  REGION 1..82: note = RuvC_domain
  SITE 21: note = RuvC_P3
  SITE 23: note = RuvC_P4
  SITE 26: note = RuvC_P5
  REGION 186..270: note = Tnp_domain
  SITE 192: note = Tnp_P1
  SITE 222: note = Tnp_P2
  SITE 230: note = Tnp_P3
  SITE 231: note = Tnp_P4
  SITE 243: note = Tnp_P5
MEVNPVLISEYKKSKTLRRTKTDSVDCESIARWLMTVEYKPHSKGFYHAYSLKSLTRLRDKLIRQRSFYLVKITNVLDHTFPEFKPFFNERLSKTALYLLENYGSAEKMARMNSASYEKLRSVSRGKFSPQQFLRLKELAVNTVGVNNSIFDVELNSLLSLYKSLVKEIDTIKKEINQLIEEVHPHYMSVPGIGPLSAAVIYSEYGDISNFTNPGQMLAFAGIEPGINESGTESHGGKMVKRGSSQLRYTLINCCLPLIRFDMTFATYYAKERGEGKPHRVAITHVAKKLIRVIYALESQDIDFNAQELR

SEQ ID NO: 15519 - protein, 408 aa, unidentified
  source 1..408: note = protein_2ed53b8
  REGION 4..166: note = RuvC_domain
  SITE 7: note = RuvC_P1
  SITE 63: note = RuvC_P2
  SITE 103: note = RuvC_P3
  SITE 105: note = RuvC_P4
  SITE 108: note = RuvC_P5
  REGION 274..360: note = Tnp_domain
  SITE 282: note = Tnp_P1
  SITE 313: note = Tnp_P2
  SITE 321: note = Tnp_P3
  SITE 322: note = Tnp_P4
MLFVGDDWAEDHHDVEIVDESGRTLARRRFPEGLVGITRLHGLIAEFVPEPSGGEVLTEVVVGIETERGPWAAALVAAGYRVFAINPLSSARYRERHSTSGAKSDAGDAHILAEIVRLDRAHHRQVAGDSALVEAVKLTARTHQSLIWDRTRQVLRLRSALRESFPAALKAYGELDAADTLQLLRLAPDPDQAARLTKRQVLAALARAKRRNPEVVADQIMAVLRADELRQATPVQAAFAAIVTAQVEVIATLNDQIDTLGEVVADHFGRHPDAELITSLPGLGVILAARVLGEFGDDPSRYVDAKARKAYAGTAPITRASGIKKVVMARYARNKRLGDALQQWAFCSMRGSAGAKAYYKELRGRKIGHQAALRQLANRWVGILHGCLKTGQPYNETLAWNHHTTAAA

SEQ ID NO: 15520 - protein, 421 aa, unidentified
  source 1..421: note = protein_51165c5
  REGION 22..174: note = RuvC_domain
  SITE 25: note = RuvC_P1
  SITE 73: note = RuvC_P2
  SITE 111: note = RuvC_P3
  SITE 113: note = RuvC_P4
  SITE 116: note = RuvC_P5
  REGION 281..367: note = Tnp_domain
  SITE 289: note = Tnp_P1
  SITE 320: note = Tnp_P2
  SITE 328: note = Tnp_P3
  SITE 329: note = Tnp_P4
  SITE 340: note = Tnp_P5
MKSASTTPNTQLPETPPNDVTGGLDWARDDHAVSVVDARGRELVRHSVEHSAAGLRELIAVLRDAGCGEVAIERPDGPVVAALLSADLTVVVISPNQVKNLRGRYGSAGNKDDRFDAFVLADTLRTDRARLRALIPDTAQTATLRRTCRARQDLIRHRVAAANQLRAHLHIAFPGAVGLFADIDSPISLTFLTRFTTQDQADWLTPTRLGKWLASAAYSGRVDPAVLHTRMTDAPRGLSGADGAANAAITKALIIVLVSLNDQLKTLSTQIETQLAAHTDAHIVTSLPRAGRVRAARLLAEIGDCRARFPTPASLTCLAGVAPSTRQSGKTRAVGFRWACDKQLRDAVCDFAGDTRRASPWADHLYRQARDRGHDHPHAVRILARAWLNVIWHCWQNGVAYDPAKHNALQHIINPPQPEAA

SEQ ID NO: 15521 - protein, 342 aa, unidentified
  source 1..342: note = protein_ba24367
  REGION 6..147: note = RuvC_domain
  SITE 9: note = RuvC_P1
  SITE 52: note = RuvC_P2
  SITE 87: note = RuvC_P3
  SITE 89: note = RuvC_P4
  SITE 92: note = RuvC_P5
  REGION 211..296: note = Tnp_domain
  SITE 219: note = Tnp_P1
  SITE 249: note = Tnp_P2
  SITE 257: note = Tnp_P3
  SITE 258: note = Tnp_P4
  SITE 270: note = Tnp_P5
MEISTIGIDLSKTTFHLIGHSPRGEIVLRRKLSRKQLLIYTANKQPMLIGMEACGGAHYLARALRDQGHDARLMPAQYVKPYVKTNKNDYLDAEAIAEAVQRPTMRFVPIKTDEQLDLQALHRVRDRWVARRTAVMNQIRGFLLERGITMRKGPSHLTTALQIIFRDGDSSFSGRLLHLIIELKHEWDELERKVAEATAELARIAKQDDGCHRLMEVPGFGPIVSTALVAAIGNGISFRKGRDLAAWLGLVPRQHSTGGKTRLLGISKRGNEYLRRMMLHGARSVVMQMERNPSALGEWLTGLSARSHRNVTVVALANKMARIAWAILSKGTHYSAPALVAA

SEQ ID NO: 15522 - protein, 372 aa, unidentified
  source 1..372: note = protein_7143580
  REGION 5..161: note = RuvC_domain
  SITE 8: note = RuvC_P1
  SITE 58: note = RuvC_P2
  SITE 98: note = RuvC_P3
  SITE 100: note = RuvC_P4
  SITE 103: note = RuvC_P5
  REGION 238..324: note = Tnp_domain
  SITE 246: note = Tnp_P1
  SITE 277: note = Tnp_P2
  SITE 285: note = Tnp_P3
  SITE 286: note = Tnp_P4
MEIFVGIDWAEAHHDISVLDEAGAVLAKRRIAEGLEGLGQLHSLLAEHAAEPNEVVIGIETDRGLLVGTLLAAGYQVYAINPLAASRYRERHVTSGAKSDSGDAKVLADLVRTDRHNHRPVAGDSELAASLQVLARAHQNLIWSRQRLVNQLRNNLRELSESKLAAILRRAGRERGVEEKAAAIQAQLRAPQLAAPALVSEAYGKSVAATVRILRDINTELASLEAELAPSFEKHPDAEIYRSLPGLGIVLGARVLSEFGDDRTRFAHPKARKNYAGSSPITKTSGKSRVVLARLARNRRLADACHQWAFCALTGSAGARDYYHRLRQRGNTHHQALRALANRLVGILHGCLDHRQPYREDIAWPSRLPVAA

SEQ ID NO: 15523 - protein, 348 aa, unidentified
  source 1..348: note = protein_ee6f13e
  REGION 9..151: note = RuvC_domain
  SITE 12: note = RuvC_P1
  SITE 55: note = RuvC_P2
  SITE 90: note = RuvC_P3
  SITE 92: note = RuvC_P4
  SITE 95: note = RuvC_P5
  REGION 214..299: note = Tnp_domain
  SITE 222: note = Tnp_P1
  SITE 252: note = Tnp_P2
  SITE 260: note = Tnp_P3
  SITE 261: note = Tnp_P4
  SITE 273: note = Tnp_P5
MNATTKPVVGVDTAKSVFQLYTVDMETGEVFCKQLKRAQFLQWFTNRAPCLVGMEACGGSQHWARQLQALGHEIKLMSGKMVKAFVSGNKNDAADARAIWLATQQAGVKAVAVKTEAQQAVLAMHRVRQQLVKVRTAQRNEMRGLLAEYGEVFGLGKAAFNAGMQGALARLAERLPRALIDTLREQWNELARLDERVGAIEARLLAWFRQDRATQAIAAIPGVGLLTATAAVATLGQANAFRSGREFAAWIGLVPAQSGTGGHVRLLGISKRGDTYLRTLLIHGARAVQLHAKTPTRWLEGIGRRRPPNVVTVALANKMARTIWAVLAHERAYDKEHVSIRPQAAMPT

SEQ ID NO: 15524 - protein, 414 aa, unidentified
  source 1..414: note = protein_5830d23
  REGION 16..167: note = RuvC_domain
  SITE 19: note = RuvC_P1
  SITE 67: note = RuvC_P2
  SITE 104: note = RuvC_P3
  SITE 106: note = RuvC_P4
  SITE 109: note = RuvC_P5
  REGION 274..360: note = Tnp_domain
  SITE 282: note = Tnp_P1
  SITE 313: note = Tnp_P2
  SITE 321: note = Tnp_P3
  SITE 322: note = Tnp_P4
  SITE 333: note = Tnp_P5
MHDSTVMAVPTGAVFAGVDWASAEHAVCVIDATGAVLWRHTVAHSRAGLARLTTRLGELVVDRVGIERPDGPVVEALLDAGLRVAVVPPRQVKNLRSRYRGAGKDDRFDAYLLADTMRTDGHRYADLTRDTGATTGLRALVRARQDLVEIRVGLVNQLRHTLELAFPGAVGLFFELHSPIARAFLRRFPTAVEAAVLDEGAMAAWLAAEGYSGRTPAAVFLDRLRTAPAGLTGTEADARRHITLALLAAIDAIEDQAAELTRRIKEALAVHPDAPIFTSLPRAGQVRAAALLAEIGDARGRYPTADALAAAAGVCPVTFESGKHRGVGFRYAADSKLRRALTDFADDSRHANPWAADIYTRARGRGMRHPHAVRVLARAWTSVVWRCWQEHTTYDPARHGALNRHLHQDTAAAA

SEQ ID NO: 15525 - protein, 394 aa, unidentified
  source 1..394: note = protein_73ecbc1
  REGION 17..153: note = RuvC_domain
  SITE 50: note = RuvC_P2
  SITE 90: note = RuvC_P3
  SITE 92: note = RuvC_P4
  SITE 95: note = RuvC_P5
  REGION 267..354: note = Tnp_domain
  SITE 275: note = Tnp_P1
  SITE 305: note = Tnp_P2
  SITE 313: note = Tnp_P3
  SITE 314: note = Tnp_P4
  SITE 327: note = Tnp_P5
MVLKVKVWLPSFVLMVKLFLHHLKSSIVSGIRSLIEHIQAIDGESRIVMEHTGRYYEPIVRELSQADLFVSAVNPKLIKDFGDNSLRKVKSDKADALKIARYTLDSWTELRQYSFMDEIRNQLKIMNRQFDFYMKHKTAMKNNLIGILDQTYPGANTYFDSPAREDGSQKWVDFATTYWHVDCVRKLSLNAFVDHYQKWCKRRKYNFSQSKAVEIYEASKEIVSVLPKDDLTKLIVKQAVEQLNMASQTVEQLRAMMNEAASKLPEYPIVMAMKGVGRSLGPQLMAEIGDVSRFTHKEAITAFAGVDPGVNESGSYEQKSVPASKRGSGTLRKTLFQVMDALIKTKPQDDPVYLFMDKKRSQGKPYYVYMTAGANKFLRIYYGRVKEYLSSLSK

SEQ ID NO: 15526 - protein, 309 aa, unidentified
  source 1..309: note = protein_168784a
  REGION 8..149: note = RuvC_domain
  SITE 11: note = RuvC_P1
  SITE 54: note = RuvC_P2
  SITE 94: note = RuvC_P3
  SITE 96: note = RuvC_P4
  SITE 99: note = RuvC_P5
  REGION 190..274: note = Tnp_domain
  SITE 198: note = Tnp_P1
  SITE 227: note = Tnp_P2
  SITE 235: note = Tnp_P3
  SITE 236: note = Tnp_P4
  SITE 247: note = Tnp_P5
MKQSVVYIGIDVAKAYLDVAWAGVSRRFPNETNGHAALKRWLKQSAAPVQLICEASGGYEQALLESLARSEVKVTLVQAVRVRQYARAAGILAKTDQIDAKVLAAFGTAMQPKPTPPLSAEQKRLREYEAQRRHLSKVLLAEQNRLAGLSCAELRSLSRSLISKIKKQIETIDAEIADLIAQDQVLCAKAQKLTAISGVGARTAALLLAQMPELGQLNRGEAAALAGLAPFNHDSGSIRGKRAIFGGRRALRSGLYMAALSAARFNPILSSFYQRLRAKGKPHKLALTAVMRKLLLALNSTLKPIACSA

SEQ ID NO: 15527 - protein, 408 aa, unidentified
  source 1..408: note = protein_f50bd3d
  REGION 4..163: note = RuvC_domain
  SITE 7: note = RuvC_P1
  SITE 60: note = RuvC_P2
  SITE 100: note = RuvC_P3
  SITE 102: note = RuvC_P4
  SITE 105: note = RuvC_P5
  REGION 272..358: note = Tnp_domain
  SITE 280: note = Tnp_P1
  SITE 311: note = Tnp_P2
  SITE 319: note = Tnp_P3
  SITE 320: note = Tnp_P4
MLFVGDDRAEDHHDVEVQDGTGRRLTKGRLPEGLAGITRLHELVGAHLAEDADPAEVVVGIETDRGPWVSALVAAGYQVIAVNPVQAARYRERYSTSGAKSDAGDAHALADMVRTDRHQLRPVAGDSDLAEAVKVTARAHQTLVWDRTRQVQRLRAALVESFPAAVAVFDDLDAADTLELLEKAPAPDLARRLTVAQISAALKRARRRGDLAGRARAIRAGFQAGQLPVRPATAAAYGAVVRAQVGLIGTLTTEIGRLGAQVDAHFGQHPDAEVLLSQPGLGPVLAARVLAEFGDDPDRYADAKARKNYAGTSPVTRASGKKTVVMARYARNDRLADALHQQAFSALNASPGARAYYDAIRARGTGHHAALRQLGNRLVGILHGCLKTHTHYQEATAWPQNVASDAAA

SEQ ID NO: 15528 - protein, 391 aa, unidentified
  source 1..391: note = protein_ca5c4df
  REGION 4..163: note = RuvC_domain
  SITE 7: note = RuvC_P1
  SITE 60: note = RuvC_P2
  SITE 101: note = RuvC_P3
  SITE 103: note = RuvC_P4
  SITE 106: note = RuvC_P5
  REGION 266..353: note = Tnp_domain
  SITE 274: note = Tnp_P1
  SITE 304: note = Tnp_P2
  SITE 312: note = Tnp_P3
  SITE 313: note = Tnp_P4
  SITE 326: note = Tnp_P5
MIYAGIDVAKDKHDCFITNSDGEVLFKAFTIPNNRDGFDAFYQKITAVTDDLAKVKVGLEATGHYSYNILGFLLDKGLTTFVINPLHTSLFRKSLSLRKTKTDKVDSHTIATMLMSDVNLKSYSDTSYHNEELKSLTRYRFDKVKERAKLKSSVSRLITILFPELEKLVPTLHMASVYALLTELPSAADIASVHLTRLTNLLATASKGRYDKDTAIRFKEAARTSIGSHMPAKSLELKHTIKLIQELTSEIDEIEAEIKAIMDEINSPILGIPGINYRMGAMIIAEIGDFGRFDSPDKILAYAGLSPSTYQSGQLDGCYSHMEKRGSRYLRYALFNATKFVCHWDSTFASYLAKKRAEGKHYNVAISHAAKKLVRVIYQLEKSGQLYIKAV

SEQ ID NO: 15529 - protein, 394 aa, unidentified
  source 1..394: note = protein_cb70d1d
  REGION 11..164: note = RuvC_domain
  SITE 14: note = RuvC_P1
  SITE 62: note = RuvC_P2
  SITE 103: note = RuvC_P3
  SITE 105: note = RuvC_P4
  SITE 108: note = RuvC_P5
  REGION 226..312: note = Tnp_domain
  SITE 234: note = Tnp_P1
  SITE 264: note = Tnp_P2
  SITE 272: note = Tnp_P3
  SITE 273: note = Tnp_P4
  SITE 284: note = Tnp_P5
MDEQESPRVVIGMDPHKRSVTIEVMTADESIVGGGRFPTDADGYGRLLGYARQWPERVWAVEGCAGIGKHVADRLVADGEDVVDVPAKMSARVRIFTTGQGRKTDVTDAHSIALVGVRMSGLRPVINDEQLEVLRMCVDRRRSLGEEHTRKVCQLHKLLLELIPGGAKTFLSAAQAKELLKKVRPTTAAGKVRKAHALELTADLATIYARTKAADKELKTLVEATGSSLLGLHGIGPSGAARLLVEVGDITRFPDRNHFASWTGTAPIDASSGEHVRHRLSRGGNRQINRVLHIMAIVQLRTRTTEGRAYYDRKKAAGKTSMEALRCLKRRLSDLVYKQMLNDLAGHTATGPGGHLGDDSDSSATGSQPDTGSSDKPLPGPATTEPRTTLPTAS

SEQ ID NO: 15530 - protein, 269 aa, unidentified
  source 1..269: note = protein_a2bd322
  REGION 1..79: note = RuvC_domain
  SITE 19: note = RuvC_P3
  SITE 21: note = RuvC_P4
  SITE 24: note = RuvC_P5
  REGION 139..227: note = Tnp_domain
  SITE 147: note = Tnp_P1
  SITE 177: note = Tnp_P2
  SITE 185: note = Tnp_P3
  SITE 186: note = Tnp_P4
  SITE 198: note = Tnp_P5
MVCVETRHMQAVLKAQINKTDRNDARGIAQMIRAGLYRPVHVKTLRSQKLRMLLTHRKLLQSKAIAIENDLRGTLRNFGLKVGMVGTARFEARIQELVENFPDLGVLVEPLLVVRRALREQIVLLHRRLLAIVREAEVCRRLMTTPGVGPVVALTYRATVDVPARFRKSKSVGAVFGLTCSKYQSGEIDWSGRISRCGDEMMRVMLYEAAQSMLHSKRWSWLKAWAMQIARRRGMKRAIVALARRLAVIMHRIWVDGTEFRWTREVAAA

SEQ ID NO: 15531 - protein, 375 aa, unidentified
  source 1..375: note = protein_4ba20f1
  REGION 8..155: note = RuvC_domain
  SITE 11: note = RuvC_P1
  SITE 59: note = RuvC_P2
  SITE 96: note = RuvC_P3
  SITE 98: note = RuvC_P4
  SITE 101: note = RuvC_P5
  REGION 222..307: note = Tnp_domain
  SITE 229: note = Tnp_P1
  SITE 259: note = Tnp_P2
  SITE 267: note = Tnp_P3
  SITE 268: note = Tnp_P4
  SITE 280: note = Tnp_P5
MRNFSTFIGMDVHMETIAIATAGKHGAPRYYGEIANTSEALTKLVKKVIPSGSRAVFCYEAGPCGYGVYRQITDMGHRCDVIAPSLIPKKAGNRVKTDRRDAVTLVRLLRANELTAVWVPDQQQEAMRDLTRIREDMKSMERRARQRLNGFLLRNKRIYTGQNKWTQAHFRWLEKISFENPIQQIVFQEYVDAVKHLQGRVVSLEEEMSRALSGWSLGIVVVALMALRGVNLVTAMTIVSEIGDISRFKSPRQLMAYLGLVPSEDSSGKRKRRGEITKTGNGHVRRVLVEASWSYRLPARKTAHLQRKAEKASEAVQAIAWKAQKRLCGRYWHLTQKGKLKVQACTAVARELAGFIWAIGCEVMGKNNTPVVKVA

SEQ ID NO: 15532 - protein, 292 aa, unidentified
  source 1..292: note = protein_d8d2fde
  REGION 8..155: note = RuvC_domain
  SITE 11: note = RuvC_P1
  SITE 59: note = RuvC_P2
  SITE 96: note = RuvC_P3
  SITE 98: note = RuvC_P4
  SITE 101: note = RuvC_P5
  REGION 222..292: note = Tnp_domain
  SITE 229: note = Tnp_P1
  SITE 259: note = Tnp_P2
  SITE 267: note = Tnp_P3
  SITE 268: note = Tnp_P4
  SITE 280: note = Tnp_P5
MRNFSTFIGMDVHMETIAIATAGKHGAPRYYGEIANTSEALTKLVKKVIPSGSRAVFCYEAGPCGYGVYRQITDMGHRCDVIAPSLIPKKAGNRVKTDRRDAVTLVRLLRANELTAVWVPDQQQEAMRDLTRIREDMKSMERRARQRLNGFLLRNKRIYTGQNKWTQAHFRWLEKISFENPIQQIVFQEYVDAVKHLQGRVVSLEEEMSRALSGWSLGIVVVALMALRGVNLVTAMTIVSEIGDISRFKSPRQLMAYLGLVPSEDSSGKRKRRGEITKTGNGHVRRVLVEAS

SEQ ID NO: 15533 - protein, 403 aa, unidentified
  source 1..403: note = protein_f49ec82
  REGION 4..160: note = RuvC_domain
  SITE 7: note = RuvC_P1
  SITE 57: note = RuvC_P2
  SITE 97: note = RuvC_P3
  SITE 99: note = RuvC_P4
  SITE 102: note = RuvC_P5
  REGION 274..361: note = Tnp_domain
  SITE 282: note = Tnp_P1
  SITE 312: note = Tnp_P2
  SITE 320: note = Tnp_P3
  SITE 321: note = Tnp_P4
  SITE 334: note = Tnp_P5
MNAVGIDVSKGKSMVAVMRPFGELVVKPFEVHHTANELKELADLLRNLDGEVRIIMEFTGRYYQPIARYLVEAGFFVCVVHAKLIHDFGNNSIRKVKTDRADAIKIANYGLSNWISLKRYTPEDETRLLLKTCNRQYNQYLKMKVALKNNLVAILDQTFSGLNEMFTSPVRADGHEKWVDFAEKFWHCEIVSSMSKTKFISQYSKWCQKHGYNRSESKATALYELALNQVATLPPTEQTKDLIVQAISQLNFVSVSLAELRRQMQQLAASLPEYPVVLAMSGVGETLGPQLIAEIGDVRRFSHKGALVAFAGVDAPPFQSGVFESASRSISKRGSPALRKTLFQIVKSILKNSPSDDAVYQFLDRKRAEEKHYYVYMVAGCNKFLRIYYARVKEYLVSLEVAS

SEQ ID NO: 15534 - protein, 343 aa, unidentified
  source 1..343: note = protein_f268f40
  REGION 5..152: note = RuvC_domain
  SITE 8: note = RuvC_P1
  SITE 55: note = RuvC_P2
  SITE 92: note = RuvC_P3
  SITE 94: note = RuvC_P4
  SITE 97: note = RuvC_P5
  REGION 212..300: note = Tnp_domain
  SITE 220: note = Tnp_P1
  SITE 250: note = Tnp_P2
  SITE 258: note = Tnp_P3
  SITE 259: note = Tnp_P4
  SITE 271: note = Tnp_P5
MDHFAGLDVSVKETSICIVDDTGRIVREVKVASEPEALLAVLANPTYHFKRIGLEAGPLSQWLFSALAEAGLPVICVETRHMRAVLQAQINKTDRNDARGMAQMMRAGLYRPVHVKTLRSQKLRMLLTHRKLLQSKAVAIENDLRGTLRNFGLKVGVVGKVRFEARIRELVENLPDLAVLVEPMLIVRRVLREQIGILHRRLLAIVRDDDVCRRLMTIPGVGPVVALTYRATVDVPARFKNSKAVGAVLGLTPSKYQSGEINRSGAISKCGDEMMRVMLYEAAQVMLTRTNKWSWLKAWAMKIARHRGMKKAIVALARRLAVIMHRIWVDGTEFQWTREAAVA

SEQ ID NO: 15535 - protein, 344 aa, unidentified
  source 1..344: note = protein_9a37e99
  REGION 13..165: note = RuvC_domain
  SITE 16: note = RuvC_P1
  SITE 65: note = RuvC_P2
  SITE 106: note = RuvC_P3
  SITE 108: note = RuvC_P4
  SITE 111: note = RuvC_P5
  REGION 207..294: note = Tnp_domain
  SITE 215: note = Tnp_P1
  SITE 245: note = Tnp_P2
  SITE 253: note = Tnp_P3
  SITE 254: note = Tnp_P4
  SITE 267: note = Tnp_P5
MANSSKPEVQVFAGIDVSARELSVAVRCGTEDREAVTTFRNNAAGHKALLAYLLRGNGRARVCLEASGNYSLDLALTLQAHRQVEVSVVNPRRARRFAESLGERSKTDPVDAGVLCEYAARMPWVAWQPPSSLALRLRAITRAIEALGVMHTQEKNREHALATSRALPVMVIQEMRRHQRYLEHRMERLRREALRLIARDRELDRRFRLMLTVPGIGETSALQILGELVVLSNTLDARQWVAFSGIDPSQFTSGTSVQKRPRISRGGSRHLRRALYMPALVALRREPHLRAFYQRLLSRGKARLQAVVAVMRKLLHALFAMFRSNQSYDGSKLCPIELTTKLAA

SEQ ID NO: 15536 - protein, 341 aa, unidentified
  source 1..341: note = protein_2993537
  REGION 7..149: note = RuvC_domain
  SITE 10: note = RuvC_P1
  SITE 53: note = RuvC_P2
  SITE 88: note = RuvC_P3
  SITE 90: note = RuvC_P4
  SITE 93: note = RuvC_P5
  REGION 209..295: note = Tnp_domain
  SITE 217: note = Tnp_P1
  SITE 247: note = Tnp_P2
  SITE 255: note = Tnp_P3
  SITE 256: note = Tnp_P4
  SITE 268: note = Tnp_P5
MSEVALVGIDIGKHTFHLHAQDRSGREVLRKKCSRQQLMRFFSNHPVCTVVMEACAGAHYLARELKAAGHDAKLISPQFVRPFVKSNKNDFVDARAICEAASRPTMRFVAAKTVEQQTLSVSHRIRESLIRDRTKTVNQMHGFLLEFGISLPTGLAVVKRLASILEEHDLPVRLIALLQRQHDHFVYLEEQIKVLDKELESQLADDDLGSRLLSIPCVGPITASLLAVQMGDGQQYSCSRDFAASVGLVPKQFSTGGKPNLLGISKRGDKNLRRLLVQCARVYMLRLEHQKGPLAEWVRSLSMRRHSNVVACALANKLARIAWAITTRHTQYEAEPDVTNA

SEQ ID NO: 15537 - protein, 321 aa, unidentified
  source 1..321: note = protein_87b2f4c
  REGION 12..155: note = RuvC_domain
  SITE 15: note = RuvC_P1
  SITE 58: note = RuvC_P2
  SITE 98: note = RuvC_P3
  SITE 100: note = RuvC_P4
  SITE 103: note = RuvC_P5
  REGION 196..280: note = Tnp_domain
  SITE 204: note = Tnp_P1
  SITE 233: note = Tnp_P2
  SITE 241: note = Tnp_P3
  SITE 242: note = Tnp_P4
  SITE 253: note = Tnp_P5
MMTEPAKIQSILGLDVSCDTVALFDSRTHRSITIANDPDALRAALQPYQASATLAVCEATGGHEDTVLGVLLELSIPAHRADPAKVKAYIQSFGKRAKTDPIDARWLARYGQDRAEALPQWQPKDPIRQRLTLLVARRLDLVAMRVQEQNRLKAPRGSFLADDINAHLDELNRHIAALNAEIDSLITQDHDLTLRAKALRSVPGIGPVLMPMLLALMPELGSLNRRQVASLAGVAPHPKDSGKVSWHRATFGGRRTIRPALFTAALTACRGDGPLATAYKTMVKAGKPKRLALTALMRKIITIANARVRDALKPKTEKMPA

SEQ ID NO: 15538 - protein, 343 aa, unidentified
  source 1..343: note = protein_9c0a8b0
  REGION 5..151: note = RuvC_domain
  SITE 8: note = RuvC_P1
  SITE 53: note = RuvC_P2
  SITE 91: note = RuvC_P3
  SITE 93: note = RuvC_P4
  SITE 96: note = RuvC_P5
  REGION 211..298: note = Tnp_domain
  SITE 219: note = Tnp_P1
  SITE 249: note = Tnp_P2
  SITE 257: note = Tnp_P3
  SITE 258: note = Tnp_P4
  SITE 270: note = Tnp_P5
MNQYIGLDVSLKDTAISIRENGKRIWRGKCPSDPKLLTEMIRKHAPRARRVVFETGPLSTWFYHALTSEGVPAICIEARHAQKVLNETLNKTDTNDADGLAQLAEAGFYKAVRVKSFDAMMARTLVAARAQLLNISTQLGNQIRGLMKTFGLIIPKAKGRVFDGDVRKLLDGNNELAKVILPLLEAWHDIRKRAADLSRQLLMVARESQATKLLMTIPGIGAVTAVSYVTAIEDPGNFRTSRSVGAWLGLTTRRYQSGEVDYDGHISRRGDNRLRGLLYEAATTLLTRTSARTESSLKRWGLKLRERLGFKRAAVAVARKLAVIMHSMLKTGEVFNASAGATV

SEQ ID NO: 15539 - protein, 341 aa, unidentified
  source 1..341: note = protein_f43f9ef
  REGION 6..147: note = RuvC_domain
  SITE 9: note = RuvC_P1
  SITE 52: note = RuvC_P2
  SITE 87: note = RuvC_P3
  SITE 89: note = RuvC_P4
  SITE 92: note = RuvC_P5
  REGION 211..298: note = Tnp_domain
  SITE 219: note = Tnp_P1
  SITE 249: note = Tnp_P2
  SITE 257: note = Tnp_P3
  SITE 258: note = Tnp_P4
  SITE 270: note = Tnp_P5
MKTTTIGLDLAKSVFQVHGVDDAGTVTVRKKLRRAEVLAFFGELPCCLIGMEACATSHYWARELTALGHEVRLMPPNYVKPYVRRQKNDAADAEAICEAVTRPTMRFVPIKSADRQSVLTLHRTRELLVRQRTMLINAIRSHCAEFGLIAPQGAGRVDELIGRVGSTGDDAMPDLARSTLLMLADQLQALAVHIHQLERRLLAWHRQDQISQRLATIPGVGIISATALSASVTDPSLFRSGREFAAFLGLVPRQNSSGGKDRLGRISKMGDGYLRKLLVIGATSVMRRIRTGVALASADWVRTLLERRPPRVVTVAMANKTARIAWAVMMRGEVYRAPAMT

SEQ ID NO: 15540 - protein, 320 aa, unidentified
  source 1..320: note = protein_afc9256
  REGION 10..152: note = RuvC_domain
  SITE 13: note = RuvC_P1
  SITE 57: note = RuvC_P2
  SITE 97: note = RuvC_P3
  SITE 99: note = RuvC_P4
  SITE 102: note = RuvC_P5
  REGION 193..278: note = Tnp_domain
  SITE 201: note = Tnp_P1
  SITE 230: note = Tnp_P2
  SITE 238: note = Tnp_P3
  SITE 239: note = Tnp_P4
  SITE 250: note = Tnp_P5
MMAQNGLVVVGIDVAKDKVDACIRELALRQTYPSTAQGHRKLVAWLRKHKVNRAVMEASGGYERDWGKVLRLAGIAVRIVDPKRVRSFAQSAGRLAKNDTIDAEMIAWFAETFSEAPGQVHDAAREELQALVKARLNLVDLKIRLEAQNEHAAPGQARKARTRILKSLLGEIAKLEVAISAQVRATPHLAERAEIVESVPGFAETSSANLIAGMPELGQVSDEIAAALLGVAPYDDDSGKRRGERHIKGGRRWVRNALYMPCLGAATQNNPVFKAYYQRLLAKGKEPKVALVACMRKLIIILNTMIARRQKWDPSRYALN

SEQ ID NO: 15541 - protein, 340 aa, unidentified
  source 1..340: note = protein_7989f64
  REGION 6..147: note = RuvC_domain
  SITE 9: note = RuvC_P1
  SITE 52: note = RuvC_P2
  SITE 87: note = RuvC_P3
  SITE 89: note = RuvC_P4
  SITE 92: note = RuvC_P5
  REGION 210..296: note = Tnp_domain
  SITE 218: note = Tnp_P1
  SITE 248: note = Tnp_P2
  SITE 256: note = Tnp_P3
  SITE 257: note = Tnp_P4
  SITE 269: note = Tnp_P5
MKITIMGLDLAKNVFQAHGIDETGNTVLVKRLHRKQMLPFFSKLPSCLIGMEACGTAHHWARTLAAMGHEVRLIPPSYVKAYVKRGKSDALDAEAICEAVQRPTMRFVPVKTVEQQGILMTHRARALLVRQRTMVANALRAHLAEFGLVANPGIANLAKLAQQALSDEDGLPSYARTSLDILIRQIMVFTDEIAVLDQQLHAWHVDSEASRRLAAIPGLGVVTATAVAATVTDPDQFRSGRQFAAWLGLTPQQHSTGGKTQLGGISKQGDRYLRRLLVVGATAVIRHTKDKATPMANWIRKLLEKKPFRLVSVALANKLARIAWVVLTRKEAYRAHELTA

SEQ ID NO: 15542 - protein, 317 aa, unidentified
  source 1..317: note = protein_aa151be
  REGION 11..155: note = RuvC_domain
  SITE 14: note = RuvC_P1
  SITE 58: note = RuvC_P2
  SITE 98: note = RuvC_P3
  SITE 100: note = RuvC_P4
  SITE 103: note = RuvC_P5
  REGION 193..277: note = Tnp_domain
  SITE 201: note = Tnp_P1
  SITE 230: note = Tnp_P2
  SITE 238: note = Tnp_P3
  SITE 239: note = Tnp_P4
  SITE 250: note = Tnp_P5
MEHRQPNTKIAGIDVGKARLDVAIHGLEDEVAVSNDVAGVGELIAWLKAREVGRVGLEATGGYERGVRQALEAGGLAVVVHQPLEIRLLARLKRLRAKNDRIDARLIAAATAQVDTLRAAQDPRLADLAEQLTAYEQVTDQAAELKTFREHLTLPDIVRAIDTQIASLVSLKARLLAKVLAGLKAHADLAQRLRLLSSLPGFGLVVAASFVIRMPELGAMKKGQPAALVGVAPFDRDSGQWKGQRFISGGRDRPRRMLYLAALAAKTHDTGFKAFAQALIDRGKPKKVAIVAVMRKLVEAANLILARATPWQTQPAT

SEQ ID NO: 15543 - protein, 413 aa, unidentified
  source 1..413: note = protein_7529ed8
  REGION 14..166: note = RuvC_domain
  SITE 17: note = RuvC_P1
  SITE 65: note = RuvC_P2
  SITE 103: note = RuvC_P3
  SITE 105: note = RuvC_P4
  SITE 108: note = RuvC_P5
  REGION 273..359: note = Tnp_domain
  SITE 281: note = Tnp_P1
  SITE 312: note = Tnp_P2
  SITE 320: note = Tnp_P3
  SITE 321: note = Tnp_P4
  SITE 332: note = Tnp_P5
MSVTLHSRASRVCAGVDWAKDDHAIAIIDSEGKVMDRFAVNHDAAGLKSLVRRLLTAGVSEVGIERGDGPIVEALLQAELTVLVIPPGQLKNLRSRYGSAGNKDDRYDAYILADVVRTDRHRLRPLVRDTTATTALRGTVRARRDLVEHRVAAANQLRAHLQIVFPAAANLFAAIDSAISLTFLERFTTQSKADWLSPKRLSTWLSSVSYTGRTTPDVLHTHLLAAPRGTTSTDAANHTKTTLAFVAILRALNTQIQALATSIGEQLAIHPDAHIITSLPRSGTVRAARLLAEIGDARGRFPTADSLACLAGVAPSTRQSGKVKAVTFRWGANRELRDALCDFAGDSRHANPWAADLYTNARARGHDHPHAVRILGRAWIHIIWRAWQDNTATDPTKHRALQTLLNTTTEKAA

SEQ ID NO: 15544 - protein, 399 aa, unidentified
  source 1..399: note = protein_a475fe9
  REGION 6..159: note = RuvC_domain
  SITE 9: note = RuvC_P1
  SITE 57: note = RuvC_P2
  SITE 98: note = RuvC_P3
  SITE 100: note = RuvC_P4
  SITE 103: note = RuvC_P5
  REGION 221..306: note = Tnp_domain
  SITE 229: note = Tnp_P1
  SITE 259: note = Tnp_P2
  SITE 267: note = Tnp_P3
  SITE 268: note = Tnp_P4
  SITE 279: note = Tnp_P5
MEQVIIGVDPHKLSATIEVIDGEEQLLGAGRFTTDQAGYAAMRRYVKNWPERVWAVEGANGVGRPLAQRLLEAGEHVVDVPAKLAARVRLFDSGHNRKTDARDAHAVAVVAARTPTLRVLQVDGELEALRMLTDRREALTRRRVQTVDRLQALLAELLPGQAKRDITTGQARAMLASVRPRDIAGKTRRRIAAEELAELVAVEAKIKKATAELKTMVLARQSRLMNIPGVGPVVAARILADVGDVARFADRNRFASWTGTAPLDASSGEQNRHRLSRAGNRRVNHMIHIAAVTQLRHDPVGRGYYQRKRVDGKKPLEAMRCLKRRISDAVYRQLVADAQHAADHDTGTGPGGHCGATQESSAVDSHPHIDTSDRPLPGPAPTTLRPTPPTRKRPLTPAG

SEQ ID NO: 15545 - protein, 335 aa, unidentified
  source 1..335: note = protein_c4b26ee
  REGION 15..162: note = RuvC_domain
  SITE 18: note = RuvC_P1
  SITE 63: note = RuvC_P2
  SITE 103: note = RuvC_P3
  SITE 105: note = RuvC_P4
  SITE 108: note = RuvC_P5
  REGION 202..289: note = Tnp_domain
  SITE 210: note = Tnp_P1
  SITE 240: note = Tnp_P2
  SITE 248: note = Tnp_P3
  SITE 249: note = Tnp_P4
  SITE 262: note = Tnp_P5
MFVVDVLNVYIMTYIGIDVSKDTLEVAFPSKDGYRNQTFGNTPKGIHSLIQKLSREEHHCVMEATGNYSALLIYMLSRAGIMTSMENPLKVKNFSRVMLSMTKTDKADARLLALYGEKMNPALYRLKSDSLLILRQKRMVIRQLQKQLTASRNLLHSLEVLPIVDSASKSAILKVIKSLEKQVGKLEGELTHLTKSEYDRQMKALTSIKGIGASLAAALIISTGGFTYFDNAKQISRFLGLCPTYQQSGTSVNVKGHINRNGDSCLRAQLYVASWSASQHNAACRECYLRLRERGKPGKVAMIAVANKLIRQAFAVVTQNQLYIDGFESTLIHKS

SEQ ID NO: 15546 - protein, 341 aa, unidentified
  source 1..341: note = protein_455c1d5
  REGION 6..152: note = RuvC_domain
  SITE 9: note = RuvC_P1
  SITE 53: note = RuvC_P2
  SITE 91: note = RuvC_P3
  SITE 93: note = RuvC_P4
  SITE 96: note = RuvC_P5
  REGION 211..298: note = Tnp_domain
  SITE 219: note = Tnp_P1
  SITE 249: note = Tnp_P2
  SITE 257: note = Tnp_P3
  SITE 258: note = Tnp_P4
  SITE 270: note = Tnp_P5
MPVVTVGIDLAKSVFAVHGVDEAGKAVLIKPRVSRDQLPTLIAQLPPSLIGMEACSGAHHWARIFQQYGHTAKLMAPKLVAPYRMSGKRGKNDAADAAAICEAVTRPSMRFVPLKDEHQQATLCLHRTRQGFVEERTAIYNRTRGLLSEFGVVLPLSPERLRKEIPTHLDTLPGWARRCISDLLEHASNIEARLAEYDRAISEIARDDERSRRLMHLRGIGPTTASALLASLGAGHDFRNGRQVAAWIGLTPSQYSSGGKERLGAITKTGDAYLRNLLILGARSVMASLGDRQDRFSRWVRSLVERRGYWRAAVAIAAKNARMAWATLKYGDAFKYISATA

SEQ ID NO: 15547 - protein, 364 aa, unidentified
  source 1..364: note = protein_fea1929
  REGION 1..96: note = RuvC_domain
  SITE 2: note = RuvC_P2
  SITE 36: note = RuvC_P3
  SITE 38: note = RuvC_P4
  SITE 41: note = RuvC_P5
  REGION 198..286: note = Tnp_domain
  SITE 206: note = Tnp_P1
  SITE 237: note = Tnp_P2
  SITE 245: note = Tnp_P3
  SITE 246: note = Tnp_P4
  SITE 257: note = Tnp_P5
MESTGKYWIPVFNLLEDEINVTIANPKWVKAVKGNKDDTKDSKWIGDLFRLGLVRGSYVPCKTIRILREYTRYRYKLISCRSSEKNRYQNALTVCNVALDSVVSDIFGKSSTSIIDYLLEQSGHSINHEEIASKLLRRLKSKTDAVIESIEGYQMTDAQKYRMRLVRAHMDYITAEITDIDSMIENLISSDSDYENTVQLLCTIPGVKHDSAITIISEIGIDMSQFCTSKRLCCWAGLTPGSNESGGKKKSVRVTRAGVYLKPALVQCAHAAVKSEKSPYYKKKYESLMKRRGKKRAIVAIARMILTAIYQMLSTGESWNPSDLYKIDIPEALLEKQKAKAIKQAMKLLQREGLYPLPQESKAS

SEQ ID NO: 15548 - protein, 383 aa, unidentified
  source 1..383: note = protein_32f5e42
  REGION 5..161: note = RuvC_domain
  SITE 8: note = RuvC_P1
  SITE 58: note = RuvC_P2
  SITE 98: note = RuvC_P3
  SITE 100: note = RuvC_P4
  SITE 103: note = RuvC_P5
  REGION 275..362: note = Tnp_domain
  SITE 283: note = Tnp_P1
  SITE 313: note = Tnp_P2
  SITE 321: note = Tnp_P3
  SITE 322: note = Tnp_P4
  SITE 335: note = Tnp_P5
MYNAVGIDVSKGKSTIAVLQPGGTVIRKPFDVSHTSQSLIELAHYLGSLEGSTKIVMECTGRYHEPMLKALYEAGLFVSVVNPHLIKNFGNNSLRRVKSDPADARRIARYTLDNWAELRQYSGMDNTRTQLKTLNSQFSFFMKQKVAAKANLIALLDNTYPGVNKLFDSPPREDGSEKWVDYAYSFWHVDCVRRIGLKTFTERYRAFCRKHHYIFQPDKPEKLFHASKELVAVFPKEKTYKLLIQQSIQQSNLASGHVERLRQEMNALASTLPEYSTVMGIYGVGKTYGPQLIAEIGDVSRFTHREALTAFAGVDPGVDESGQHKSKSNRASKVGSARLRKTLFQVMATLLQNAPENDPVYRFLDKKRAQGKPYYVYMTAGAN

SEQ ID NO: 15549 - protein, 402 aa, unidentified
  source 1..402: note = protein_c3dff76
  REGION 4..160: note = RuvC_domain
  SITE 7: note = RuvC_P1
  SITE 57: note = RuvC_P2
  SITE 97: note = RuvC_P3
  SITE 99: note = RuvC_P4
  SITE 102: note = RuvC_P5
  REGION 274..361: note = Tnp_domain
  SITE 282: note = Tnp_P1
  SITE 312: note = Tnp_P2
  SITE 320: note = Tnp_P3
  SITE 321: note = Tnp_P4
  SITE 334: note = Tnp_P5
MNSVGIDISKGRSTVSVMRPFGEVVISPFEVRHTDSELSELAKQLKSLNGETRVVMEATGNYHAPVAKLLHDAGLYVSVVNAKLVHGYGNNDLRRVKTDKKDAVKLANYGLDRWLTLPKYIPEEDTRLLLKSCYRQYRQYSKVQTVLKNNLISLLDTVFPNTNHLFSSPARADGSEKWVDFVAEFWHCEYVCERSERAFVNQYQRWCRKHGYNFSEEKAHTIYAEASGHIGVMPKTETTKLLVGQSVSQLRATSAALAALKQEMQSLASQLPEYPVVMDMFGVGPALGPQLIAEIGDVRRFYSKKALVAYAGIDAPPNDSGDVTGRHKSMSKVGAASLRRTLFLVMTVYLQKLPQDEPVYQFMDRKRAEGKPYRVYMMASANKFLRIYYATVKAYLESLEQV

SEQ ID NO: 15550 - protein, 332 aa, unidentified
  source 1..332: note = protein_fd38aa3
  REGION 6..160: note = RuvC_domain
  SITE 9: note = RuvC_P1
  SITE 65: note = RuvC_P2
  SITE 103: note = RuvC_P3
  SITE 105: note = RuvC_P4
  SITE 108: note = RuvC_P5
  REGION 209..297: note = Tnp_domain
  SITE 217: note = Tnp_P1
  SITE 248: note = Tnp_P2
  SITE 256: note = Tnp_P3
  SITE 257: note = Tnp_P4
  SITE 270: note = Tnp_P5
MINFFIGIDFAKTKFDVVILHKDDLVGKGEHNQFSNTKDGVKQLEKWLRQVCGKGVSMESVICGENTGVYSVLAAKTLSHDGYTVCLDSALRIKRSMGISRGKNDKKDARDIAEYSARHYDKLVVYQEPSQTSEALKTLFTQRRLLVKQRCDLQRRNKELNGLYKDNPLLKRMLASDTRIINTINTEIDKIEAHMMQIIEGDPEALRVYGILTSMKGIALVNAVALIVYTDNFKRFDYDARRICSYWGIAPFANQSGTSINGKPHVSHFADHYLKSLLSQAVICAIRFCPAISNYAQRLIAKKKHISIVHNNCKNKMAMVKNGTYYGEIQKK

SEQ ID NO: 15551 - protein, 351 aa, unidentified
  source 1..351: note = protein_adbd5e9
  REGION 11..152: note = RuvC_domain
  SITE 14: note = RuvC_P1
  SITE 57: note = RuvC_P2
  SITE 92: note = RuvC_P3
  SITE 94: note = RuvC_P4
  SITE 97: note = RuvC_P5
  REGION 216..304: note = Tnp_domain
  SITE 224: note = Tnp_P1
  SITE 254: note = Tnp_P2
  SITE 262: note = Tnp_P3
  SITE 263: note = Tnp_P4
  SITE 275: note = Tnp_P5
MGASAVNITTVGIDSAKNVFHVHAIDERGKVLVRKQLKRDQVGRFFANVPPCLIGMEACASSHHWGRMLQGFGHTVRLMAPQFVKPYVKSNKNDMADAEAICEAVTRPNMRFVPIKSVEQQSVLSLHRVRQGFVKARTAQANQIRGLLGEMGLVIPQGIRFIAQRVPALLEDASNELPLAFRQLIERLTNHLKLLDEQVDAIHSQIVAWDRSCELSQKLQKIPGIGPLTSTALIATVADVHSFKSGRQMSAWLGLVPRQKSSGGKPTLLGISKRGDVYLRTLLIHGARAAIVAAKHRTSGRESSWLAKLLDRRHLNVAAVALANKNARTVWALLAHGRDFDPAYKPVRAVA

SEQ ID NO: 15552 - protein, 317 aa, unidentified
  source 1..317: note = protein_9b550c9
  REGION 9..150: note = RuvC_domain
  SITE 12: note = RuvC_P1
  SITE 56: note = RuvC_P2
  SITE 96: note = RuvC_P3
  SITE 98: note = RuvC_P4
  SITE 101: note = RuvC_P5
  REGION 191..276: note = Tnp_domain
  SITE 199: note = Tnp_P1
  SITE 228: note = Tnp_P2
  SITE 236: note = Tnp_P3
  SITE 237: note = Tnp_P4
  SITE 248: note = Tnp_P5
MTQPSITTAGIDTSKAKLDIAVHGRTERWQLANTLSGWRRLAASLAEIGVARVGIEPTGGYERGVVEVLRAAGFTVLVLQPIQVKAFARVHLRRAKNDALDAVLIAACAAAMDPPRIAPDPRMSDLAGYLTFLEQIEEDIARFKTRLEHIDEPGLRRIVNSDIARLKARRVAQIRDIANRLRGHHDLAVRLDLVLSIPGIGERTALALIIRMPELGQISREEASALAGLAPFDDDSGKHKGQRHIAGGRGRLRRSLYAAALPAAFRWNKALISLYARLIACGKAHKAALIACARKLLIYANTVVQRGTPWIEKAAAL

SEQ ID NO: 15553 - protein, 400 aa, unidentified
  source 1..400: note = protein_bb0bdb6
  REGION 5..163: note = RuvC_domain
  SITE 8: note = RuvC_P1
  SITE 62: note = RuvC_P2
  SITE 102: note = RuvC_P3
  SITE 104: note = RuvC_P4
  SITE 107: note = RuvC_P5
  REGION 273..362: note = Tnp_domain
  SITE 281: note = Tnp_P1
  SITE 311: note = Tnp_P2
  SITE 319: note = Tnp_P3
  SITE 320: note = Tnp_P4
  SITE 333: note = Tnp_P5
MNPVIGLDVAKGESEVQAFLDKDKPFGKSFSVKHTKEDLDSLISFLREIEGHNGVRPAVILESTGHYHTPIIQCLEGCQYLNILVNPIISYQAKKTSLRKVKTDAVDAYHLCVLYYKEEFEPYKKRGLRLLNLRTLSRQYETVTNLYIQAKLQFHTLLDQIFPEYRGVFGDLFSKVSLKILKEFPTSEDVLMAGKAKILARIKEMRIKRSPSWMREKAHKLMASAKRNPFQQGVYESQLFSLDMYINMLLQYQEHLSSLERQIDVLAEEIEECKIIQSIPGIGEKIAATIISEIGEIDRFNHPKKLVAYAGIDPSVHSSGKFTATINHITKRGSSRLRHALYMAVLCGIRSSRNKKLKEYYDRKRNEGKPSKVAMIACVNKLLHCIYAILKRNEQFLDMA

SEQ ID NO: 15554 - protein, 378 aa, unidentified
  source 1..378: note = protein_b153c7e
  REGION 1..142: note = RuvC_domain
  SITE 40: note = RuvC_P2
  SITE 80: note = RuvC_P3
  SITE 82: note = RuvC_P4
  SITE 85: note = RuvC_P5
  REGION 248..334: note = Tnp_domain
  SITE 256: note = Tnp_P1
  SITE 286: note = Tnp_P2
  SITE 294: note = Tnp_P3
  SITE 295: note = Tnp_P4
  SITE 307: note = Tnp_P5
MVDETGATLWSKQIDNDESAILTALGEILELADEVHWAVDIAGTSSALLLALLAAHGQQAVHVPGRTVNRMAGAYRGEAKTNARDAYVIAETARHRNDFSAIDVPAQLAADLALLTAHHTDLVADRVRMLNRLRDVLTGVFPAPERAFDYSAHKGALVLLTGYQTPAAIRRRGRARLTAWLAGRGVRGADPVASTALEAASALHTALPGEDVAAQIVADLAEQILALDDRLKHVDRQILETFRTHPQAEIIESLPVMGPILGAEFVVAAGDLSAYLDAGHLASAAGLVPVPRDSGRRTGDLHRPKRYSRRLRRVFYRSAQTSIVREGSNRDFSLKKRGEGREHVQAVIALARRRASVLWALLRDIRVFTSTPPVAHAI

SEQ ID NO: 15555 - protein, 338 aa, unidentified
  source 1..338: note = protein_7ec6a50
  REGION 6..148: note = RuvC_domain
  SITE 9: note = RuvC_P1
  SITE 52: note = RuvC_P2
  SITE 87: note = RuvC_P3
  SITE 89: note = RuvC_P4
  SITE 92: note = RuvC_P5
  REGION 210..299: note = Tnp_domain
  SITE 218: note = Tnp_P1
  SITE 248: note = Tnp_P2
  SITE 256: note = Tnp_P3
  SITE 257: note = Tnp_P4
  SITE 269: note = Tnp_P5
MKVSTLGIDLAKNVFQLHGVGCNGQTVLKKKLTRDKFLPFLMQLEPCLIGMEACASSHHFARVLRQYGHEVKLIPPQYVKPYVKTNKTDAADAEAICEAVARPNMRFVQIKTAEQHAILVLHTERNILIRERTACANSMRAILAEFGIIMPRTLSQLYKKIPEILEEYDNELSPLSVVVSRVNCTPFRMCKIRSRASNRTSRWAKTQPACQRVMKVPGVGLMTATYLVASVGNGQQFHSAKQFAAWLGLVPREFSSGGKQRLGQISKRGDRYFRYLLVHGARAVAAVIERHKDNMPWLYRLLNKKAYNVAVVAQANKTARILWSMLVHHTEYRTLSVV

SEQ ID NO: 15556 - protein, 405 aa, unidentified
  source 1..405: note = protein_d14c665
  REGION 13..167: note = RuvC_domain
  SITE 16: note = RuvC_P1
  SITE 64: note = RuvC_P2
  SITE 104: note = RuvC_P3
  SITE 106: note = RuvC_P4
  SITE 109: note = RuvC_P5
  REGION 274..360: note = Tnp_domain
  SITE 282: note = Tnp_P1
  SITE 312: note = Tnp_P2
  SITE 320: note = Tnp_P3
  SITE 321: note = Tnp_P4
  SITE 333: note = Tnp_P5
MSEEPEAPFTVWCGLDVGKQDHHACALDPAGKRLFDAPLPQDQHRLEDLFTKLQRHGRVLVIVDQPNTIGALPIAVARSMGIQVAYLPGLAMRRIADLHPGTAKTDARDAYVIADAARTLPHTLRRVDAGEETLAELKVLVGFDDDLAGEATRLSNRIRGLLTQVHPALERVLGPRLATKQVLALIKTHGGPQGMATAGKTRLLRTATKANPRRATELVDAIVKALGEQTVTVPGTAAADTVLPKLAASLAAVLDQRAEIATQVEQVLDAHPLAEVLTSMPGVGVRTAARILLDVGDGSAFRTAGHLAAYAGLAPVTRRSGTSIRGEFPARSGNKHLKRALFLSAFAALRADPVSRAYYDRKRAQGKKHNAALICLARRRCDVLHAMLRTGSHYQTPPVESVPAA

SEQ ID NO: 15557 - protein, 309 aa, unidentified
  source 1..309: note = protein_2cfcec2
  REGION 5..153: note = RuvC_domain
  SITE 8: note = RuvC_P1
  SITE 55: note = RuvC_P2
  SITE 95: note = RuvC_P3
  SITE 97: note = RuvC_P4
  SITE 100: note = RuvC_P5
  REGION 197..283: note = Tnp_domain
  SITE 204: note = Tnp_P1
  SITE 234: note = Tnp_P2
  SITE 242: note = Tnp_P3
  SITE 243: note = Tnp_P4
  SITE 256: note = Tnp_P5
MTIHVGLDVGSRTTAMAWRQKGSPAGTWVIDQTPKGRKIALKKLLALKPLSVVMEATGIYYLDLAIELSSAGLPVSVINPKSARNFARLMLQHNKTDAIDAQLLAEYGERMTPRLWLPPSPVQLELRAIGRHINRLTSHRTRAKNELHALQVTETTSPMLIEDEEEAIAMFDKRIERFRKAGRDLIRNCTSLDADFTHMLAAPGMGDVSTLAVLAELTTLPDTLKSSQVSRHAGLDVRLTQSGTSIDKPGRLSKCGNAYLRSALFMPALSAIRCDRYVKAFYETLVGRGKRKMQAICAVMRKYLTGLWA

SEQ ID NO: 15558 - protein, 400 aa, unidentified
  source 1..400: note = protein_37bc599
  REGION 10..164: note = RuvC_domain
  SITE 13: note = RuvC_P1
  SITE 61: note = RuvC_P2
  SITE 101: note = RuvC_P3
  SITE 103: note = RuvC_P4
  SITE 106: note = RuvC_P5
  REGION 272..359: note = Tnp_domain
  SITE 280: note = Tnp_P1
  SITE 311: note = Tnp_P2
  SITE 319: note = Tnp_P3
  SITE 320: note = Tnp_P4
  SITE 332: note = Tnp_P5
MGNDDIDVWLGLDVGKQSHHACALDRHGKRIVDKPLGQDEAQIRELLACLGGHGNVLLVVDQPNTIGSLPLAVARDMGVAVGYLPGSAMRKAAQLLPGDAKTDARDAYVIAFTALHMPDTLRDAGSDDETMARLKVLAGFDDDLAFECNRQINRLRSLLLQIHPAFERALKGDRITRDTTLALLEHYGGPTGMRRSGRTRVGKWAKSAGLRRCDGIIDDLFDAIGQQNVTVAGTQAVEEIVPVLASRIRQLREQREQLAAKVETLLEDHPLLTVLTSMPGIAVRTASQILLAISGDITRFNSAAHLAAYAGIAPVTRRSGTSIRGEHPARGGNKRLKNALWQTSFIAAFHDPESHAYYQRKRNEGKRHNAAIICLARRRCNVIYSMLKNATLYQPMHLTA

SEQ ID NO: 15559 - protein, 344 aa, unidentified
  source 1..344: note = protein_48d031f
  REGION 7..148: note = RuvC_domain
  SITE 10: note = RuvC_P1
  SITE 53: note = RuvC_P2
  SITE 88: note = RuvC_P3
  SITE 90: note = RuvC_P4
  SITE 93: note = RuvC_P5
  REGION 212..305: note = Tnp_domain
  SITE 220: note = Tnp_P1
  SITE 250: note = Tnp_P2
  SITE 258: note = Tnp_P3
  SITE 259: note = Tnp_P4
  SITE 271: note = Tnp_P5
MGEVITIGLDIAKAVFQVHGVDVDGAVVIRKRIGRAKLLDFFADLPPCLVGIEACPSAHHWGRELAGLGHTVKLMPPSYVKAYLKRSKNDANDAAAICEAVTRPSMRFVPIKTKQQQTALMLHRTRQLLVRHRTMLSNALRGHLAELGVVSARGSNGTAELLRIIADSADNRVPSSARGILDVLAQRYISIGAEIGSIDKNILAWHRSCEASRRLAEIPGIGPIVATALVAEIGDWKAFSSGRNLAAWIGLVPKQHTTGGKDRLGSITKQGNRYLRWLLVVGATAVIRYAQKHGTKNRPWLARLMERRPTKVAAVALANKIARMAWAIMVRDDRYKEPKLLVAA

SEQ ID NO: 15560 - protein, 321 aa, unidentified
  source 1..321: note = protein_1c63dd7
  REGION 6..147: note = RuvC_domain
  SITE 9: note = RuvC_P1
  SITE 52: note = RuvC_P2
  SITE 87: note = RuvC_P3
  SITE 89: note = RuvC_P4
  SITE 92: note = RuvC_P5
  REGION 211..246: note = Tnp_domain
  SITE 219: note = Tnp_P1
MELHTIGIDLGKTVFHLVGLNLRGEVSVRKKCPRTQLLRFTANVHVRLIGMEACGGSHFLGRALREQGHQVRLIPAQYVKPYVKTNKSDYIDAEAIAEAVARPTMRFVPIKTDDQLDLQSLHRVRERWVMRRTAVINQIRGLLLERGITLRKGRRYVDAALPGILEDADAKLSGALRMLLAQLKLELDHLDLRIDEADALIKKTARENEACQRLVAIPGIGPVTATALIAAIGNGGAFRKGREFAGNSYLRRLFVQGARAVMQQRTKQSSGLSAWLAQLTSRTHRNVAAVALANKLARIAWAVLARNEQYRPPVLANVAAA

SEQ ID NO: 15561 - protein, 332 aa, unidentified
  source 1..332: note = protein_a6d1541
  REGION 7..162: note = RuvC_domain
  SITE 10: note = RuvC_P1
  SITE 62: note = RuvC_P2
  SITE 100: note = RuvC_P3
  SITE 102: note = RuvC_P4
  SITE 105: note = RuvC_P5
  REGION 205..293: note = Tnp_domain
  SITE 213: note = Tnp_P1
  SITE 243: note = Tnp_P2
  SITE 251: note = Tnp_P3
  SITE 252: note = Tnp_P4
  SITE 265: note = Tnp_P5
MENFYFIGVDISKKKLDFCVMFEGKVVHEEETANHQNAIMSLIRHLEKDYGIDGSRMLICAEHTGQYTFPLACACKAAECKLWLENPAEIKYSSGIQRGKNDKVDAKRIAVYASRFQDKVQYYERPSEDIERLKQLESERSLYVTDLAKYKGQLKDQREYMPTALYERKVKRLTALMENLEQAIQAITNEMDEVITSCPVLSRQMELLMSIDGVGRVVATNMIITTEAFTRFDDPRKFNCYAGVAPFSYSSGTSQQSKARVSHRADKVMKRLLHMAAVAVTHRNGGELKKYYDRKVAEGKNKMSVINALRAKIVARMFAVIKRNELYKPILS

SEQ ID NO: 15562 - protein, 315 aa, unidentified
  source 1..315: note = protein_657ef43
  REGION 7..159: note = RuvC_domain
  SITE 10: note = RuvC_P1
  SITE 55: note = RuvC_P2
  SITE 94: note = RuvC_P3
  SITE 96: note = RuvC_P4
  SITE 99: note = RuvC_P5
  REGION 192..276: note = Tnp_domain
  SITE 200: note = Tnp_P1
  SITE 229: note = Tnp_P2
  SITE 237: note = Tnp_P3
  SITE 238: note = Tnp_P4
  SITE 249: note = Tnp_P5
MNELNFCGIDVAKRSFVIGISSRKQTKTFTNNPKGIQQAVEYLKQCANLSLIVLESTGGLEIPLAKALYRADFRVVIANPRQTHQFAMSKSLAKTDAKDAKMLASYAKMLVLDGEVETQLYIPPTPEMEQLEALVLRRTQLVEMRVAEKNRLHQVHESQQASVRQLIAHFDGLIDELEKQIAVVNESFNDTLKKFNDIKGIGAITSATLMSMLPELGKLNHKQIASLVGVAPHPKESGSQKWYSRCSGGRQAVRNVLYNAANVARRHEPKFKAFYERLIARGKPFKVAVNACMRKLLSVINTIVRDGSQWQAHAV

SEQ ID NO: 15563 - protein, 381 aa, unidentified
  source 1..381: note = protein_81cda8b
  REGION 4..159: note = RuvC_domain
  SITE 7: note = RuvC_P1
  SITE 57: note = RuvC_P2
  SITE 98: note = RuvC_P3
  SITE 100: note = RuvC_P4
  SITE 103: note = RuvC_P5
  REGION 255..341: note = Tnp_domain
  SITE 263: note = Tnp_P1
  SITE 293: note = Tnp_P2
  SITE 301: note = Tnp_P3
  SITE 302: note = Tnp_P4
  SITE 314: note = Tnp_P5
MLYIGIDVAKNKHDIAVLNDKGKTILTSLTVSNSRAGFDLLHQSLKQLNQDCLIALEDTGHYTFNLLNFLHEHHYQVYTYNPLLIKEFAKSLSLRKTKTDKKDARVIALKLLSDPNREQFKHDKRQEELKILTRHLNRLKKKQTDWKVQYTKCIDIIFPELDKLIGKHSDYAYELLSRYPSPEKMVQAGFDNLLDIKRLSAHKIKDILDIAPSSIGTSSLAREFELREIIENIQHYNRLIKTAETQIDELMADIKSVITTVTGIGNRLEAVILAEIRNIHTFDNPAQLQAFAGLEPAIYQSGQMEMTGKMVKRGSPHLRWAILQAAKACTRYSPQFRQFLSLKLEQGKHYNVAITHVAKKLIRVIFYLLKHDIPFDEKRLR

SEQ ID NO: 15564 - protein, 343 aa, unidentified
  source 1..343: note = protein_9b4068e
  REGION 7..149: note = RuvC_domain
  SITE 10: note = RuvC_P1
  SITE 53: note = RuvC_P2
  SITE 88: note = RuvC_P3
  SITE 90: note = RuvC_P4
  SITE 93: note = RuvC_P5
  REGION 212..303: note = Tnp_domain
  SITE 220: note = Tnp_P1
  SITE 250: note = Tnp_P2
  SITE 258: note = Tnp_P3
  SITE 259: note = Tnp_P4
  SITE 271: note = Tnp_P5
MHTITTIGLDIAKSVFQVHGTDAAGQVVIRRQLKRRAVLAFFQKLPPCLVGIEACASSHHWSRELQALGHAVRLMPPAYVKPYVKRQKNDMADAEAICEAVTRANMRFVPTKTPEQQGCLMLHRTRHLFIRQQTAVINSIRAHLAEFGIVAPVGRKGVMELLQVVADPSDKRVSEITRACLTALGNQLLSLKEQILEFDRMIMAWHRSNEPSKRLRYIPGVGPMLATALVASVADPKTFRSGRNFSAWVGLVPKQHSSGGKDRLGSISKQGDRYLRSLFVAGALSVIRYAKIHGTKHRPWLTALLARKPTKVAAIALANKLARMAWAMMARGERYRNPVALAA

SEQ ID NO: 15565 - protein, 342 aa, unidentified
  source 1..342: note = protein_dcb39ee
  REGION 7..148: note = RuvC_domain
  SITE 10: note = RuvC_P1
  SITE 53: note = RuvC_P2
  SITE 88: note = RuvC_P3
  SITE 90: note = RuvC_P4
  SITE 93: note = RuvC_P5
  REGION 211..296: note = Tnp_domain
  SITE 219: note = Tnp_P1
  SITE 249: note = Tnp_P2
  SITE 257: note = Tnp_P3
  SITE 258: note = Tnp_P4
  SITE 270: note = Tnp_P5
MEKVSIIGLDLAKRSFQAHGALADGCVAFRKKLSREKVLGFFAEQPRCIVAMEACGSARHWGRAIRDLGHEVRLIPPIYVKPFVKRQKNDAADSEAIAEAASRPTMRFVAVKTEEQQARAMLFRTRDLLVRQRTQLTNALRGHLSEHGVVAAQGPANVKVLKEAVEDQPTSLPLLVVELARVFLDQIEGLSKRISELEKVTVHQAACGETTRRLRTMPGVGPITALAIATFAPPMDVFKRGRDFAAWLGLVPRQHSTGGKQVLGKISKMGQRDIRRLLIIGAMAVVRSASRKGAPEGSWLQRMLARKPKMLVAIALANKMARSVWAMLAKGEDFRIPVVAAS

SEQ ID NO: 15566 - protein, 283 aa, unidentified
  source 1..283: note = protein_9ec9c36
  REGION 7..148: note = RuvC_domain
  SITE 10: note = RuvC_P1
  SITE 53: note = RuvC_P2
  SITE 88: note = RuvC_P3
  SITE 90: note = RuvC_P4
  SITE 93: note = RuvC_P5
  REGION 209..270: note = Tnp_domain
  SITE 217: note = Tnp_P1
  SITE 247: note = Tnp_P2
  SITE 255: note = Tnp_P3
  SITE 256: note = Tnp_P4
MENIALIGIDLGKNSFHIHCQDQHGKAIYRKKFTRQKLYEFLVTCPATTIVMEACGEVHFMVRKLSELGHTPKLISPQFVRPFVKTNKNDFVDAKAICEAASRPSMRFVKPRTESQKAMHALHRVREPLVSDRVKTTNQIQAFLLEFGVSAPKGPTLIKRLAEIMETNNLPPYMTGLLQKLREHYDYLVGQIKDLEIQLQISLDEDETGQHLLSIPCIGPLTASLLSTQLGDGKQYGSSRDFAASTGLVPRQYSTGGRLPCRASVSEEIKGCGHCWFSAPVYI

SEQ ID NO: 15567 - protein, 396 aa, unidentified
  source 1..396: note = protein_cd8d120
  REGION 6..160: note = RuvC_domain
  SITE 9: note = RuvC_P1
  SITE 58: note = RuvC_P2
  SITE 98: note = RuvC_P3
  SITE 100: note = RuvC_P4
  SITE 103: note = RuvC_P5
  REGION 265..352: note = Tnp_domain
  SITE 273: note = Tnp_P1
  SITE 304: note = Tnp_P2
  SITE 312: note = Tnp_P3
  SITE 313: note = Tnp_P4
  SITE 325: note = Tnp_P5
MLRIWAGMDIGKQHHHCVVIDADGRRLLSRRVANDEAALLELIADVLDLGEDVLWAVDLNHGGAALLIGLLLAQGQPVAYLTGRAVHHASGAYRGEGKTDARDAFVIADQARMRRDLGLLRPGDEIATDLRILTTRRADLVADRTRQINRLRAQLLEIFPALERALDLTDKGPVMLLTGYQTPAAIRRAGARRIHAWLKDRKVRGAAALAHTAVQAAQAQHTALPGEKLAAAMVARLAGEVMRLDEQIAELDALIQARFREHPHAEVITSLPGMGPRLGAEFLAATGGDMTLFGSADRLAGYAGLAPAPRDSGRISGNLRRPRRYHRGLLRVFYLSALVSLQACPASRAYYDRKRTEGKTHQQALLSLARRRVNVVWAMLRDGTHYQPSPAATPAA

SEQ ID NO: 15568 - protein, 407 aa, unidentified
  source 1..407: note = protein_c710d6a
  REGION 4..161: note = RuvC_domain
  SITE 7: note = RuvC_P1
  SITE 57: note = RuvC_P2
  SITE 98: note = RuvC_P3
  SITE 100: note = RuvC_P4
  SITE 103: note = RuvC_P5
  REGION 276..364: note = Tnp_domain
  SITE 284: note = Tnp_P1
  SITE 314: note = Tnp_P2
  SITE 322: note = Tnp_P3
  SITE 323: note = Tnp_P4
  SITE 336: note = Tnp_P5
MISIGIDIAKEKFTVCALEQGSKIIWKPFDIHLNKTKVEELLKKLDTLNEEVKIVMEATGKYHLPILYELKDKGYFVTVVNPLKMKQFCRVLNFRKAKNDNIDAIQIAEYGLMYWKELQEYKVDSESFRVLKELNRSYQHYMDLRINQMNFIDQTISQTFPGIKKLIPHGSNDFSKDKLLDFLEIWWHKNLVLEKTEEKFIEDFKNWAKEKRYHPNADKAKSIYKLAEESISTQPSSSSYIKMNIQERIELIKHINQILHTILSQMIEIAEPLEEYQEAKKFSGISDKLAVQITAEFGDLSKFKNKKSLVSFVGIDSPPYESGNFKADQRKITKRGNAILRKVGYQAMKCMMSAKDPENEIYLYMVKKENDGKAKKVCKFAGLNKFLRTYYAKVMASKQEKKLLKVA

SEQ ID NO: 15569 - protein, 330 aa, unidentified
  source 1..330: note = protein_a12526a
  REGION 8..157: note = RuvC_domain
  SITE 11: note = RuvC_P1
  SITE 59: note = RuvC_P2
  SITE 97: note = RuvC_P3
  SITE 99: note = RuvC_P4
  SITE 102: note = RuvC_P5
  REGION 202..289: note = Tnp_domain
  SITE 210: note = Tnp_P1
  SITE 240: note = Tnp_P2
  SITE 248: note = Tnp_P3
  SITE 249: note = Tnp_P4
  SITE 262: note = Tnp_P5
MKSWNVILGVDVSKLTLDISCAEQNLHIKIDNCSKGFSEFIKWCKTNHIDLKETLVVMEYTGGYEYRLVQFCDSKSIAFCRLPGMEIKQSMGMVRGKNDKADSFRIGRYGEEKRDRLTPSKPLDNNILTLKQLLSFRKRLVREKAGLQSTSKEREHMYDVKKTDTIMHIAQAKMKADEKYIKVVELQIRELIKSNNELLQNYRIITSIKGIGEINGWMTIAHTENFTSFPDARTYGVYVGVIPFGYSSGTSIKGRKRVSHLANKELKSELTQAAKSAVIHDKELHDYAKRKLTNKSYGLVLNNVKFKLILRMFSLVKRGEMYVDNYKRSA

SEQ ID NO: 15570 - protein, 405 aa, unidentified
  source 1..405: note = protein_17912cd
  REGION 4..160: note = RuvC_domain
  SITE 7: note = RuvC_P1
  SITE 57: note = RuvC_P2
  SITE 97: note = RuvC_P3
  SITE 99: note = RuvC_P4
  SITE 102: note = RuvC_P5
  REGION 274..361: note = Tnp_domain
  SITE 282: note = Tnp_P1
  SITE 312: note = Tnp_P2
  SITE 320: note = Tnp_P3
  SITE 321: note = Tnp_P4
  SITE 334: note = Tnp_P5
MNAVGIDVSKGKSTVTIRKPGDVILMKPRDIPHTRSAISALILQIQSLEGDTKVCMEHTGRYYEPIASCLSDAGLFVCAVNPLLTKYYNDGTLRSPKTDKADSKKLAKFTLANWENLHQYSVMDKTRTQLKTMNRQFGFYMDQKTAMKNNLIALLDQSFPGANDFFTSPVRCDGSQKWVDFIYTYWHVDCVRGKSLKAFTAHYQNWCKRRGYNFNAEKAHQIYAFSEDLIAMFPKNETTKLLIRQSVSMLNAVSQTVEELRIKMDQLASTLPEYPIVMAMEGVGSTLGPQLMAEIGDVTRFSHRGALTAFAGVDPGKNDSGQYVQKSVPTSKKGSPHLRKTLFLIMDGLIKRSPADDPVYAFMDKKRTEGKPYLVYMTAGANKFLRIYYGRVKEYLTSLEKHQES

SEQ ID NO: 15571 - protein, 391 aa, unidentified
  source 1..391: note = protein_89ee729
  REGION 4..163: note = RuvC_domain
  SITE 7: note = RuvC_P1
  SITE 60: note = RuvC_P2
  SITE 101: note = RuvC_P3
  SITE 103: note = RuvC_P4
  SITE 106: note = RuvC_P5
  REGION 266..353: note = Tnp_domain
  SITE 274: note = Tnp_P1
  SITE 304: note = Tnp_P2
  SITE 312: note = Tnp_P3
  SITE 313: note = Tnp_P4
  SITE 326: note = Tnp_P5
MIIVGIDVAKDKHDCFIMNSEGEVLFDVFTISNTLEGFLTLLSNIKSVSLDFDKIKIGLEATGHYSYNLLGFLLNNGLPTYVLNPLHTNLYRKSLSLRKTKTDKVDARVIASMLMSCVDLKPYTSTLYQNEELKSMTRYRFDKVSQRAKLKSSVSRLVIILFPELEKLVPTLHMKSVYALLSEFPSAKHIARAHLTRLTNLLYEASKGRYGKDKAIQIRDAAKHSVGSVMPAKSLELKHTIKLIGELTDEIDEIDMEIKKIVDESGTTLLTVPGISYSTAAVILAEVGDFSNFATPDKVLAFAGMSPSTYQSGQLTNCYAHMEKRGSKYLRYALYNAAKYVCKWDKTFSEYLSKKRSEGKHYYVALSHAVKKLVRLIFALEKSHLPYQPAA

SEQ ID NO: 15572 - protein, 452 aa, unidentified
  source 1..452: note = protein_e95b6f4
  REGION 26..185: note = RuvC_domain
  SITE 29: note = RuvC_P1
  SITE 84: note = RuvC_P2
  SITE 124: note = RuvC_P3
  SITE 126: note = RuvC_P4
  SITE 129: note = RuvC_P5
  REGION 301..395: note = Tnp_domain
  SITE 308: note = Tnp_P1
  SITE 338: note = Tnp_P2
  SITE 346: note = Tnp_P3
  SITE 347: note = Tnp_P4
  SITE 360: note = Tnp_P5
MPARKDLTMKYQKVLTMLETIPYLSVGLDVGSDFSWMSIMLPNGILIGKPFKIIHSDPLSRELAVAKIKEAQETYSLESRCFLESTGIYHIPLLYFLRDKGFDCSVINPIITKNSTNLNVRKLHNDIFDSKKVAKVGLDASLKTSIVPDDAVIDLRNLVRDYYYFKDLQSAVVLKLNAELKVSFPAYLHVFSKITTQTSLKLLEAYPLAADMLAASKDELVETIRRTARFGMKYAISKYDAICAAAKDAAVFGHALQCNALRIRLYIKAYRQYQEHLDTILGELHKAVDKLEGTPVYDRIFLLQSLRGVGFLSSVVLIAEMGSFDLFSSPKKLYAYFGLDPAVKQSGKFHGDKVHMSKRGSSLARRILHMVALNNLKVEKGTKAPVNPVIHSYYADKCKSKKKNVAVGAVMHKICNIIFAMLRDNKPFAIMTPQEHCERYLAEHPDKIQNVA

SEQ ID NO: 15573 - protein, 392 aa, unidentified
  source 1..392: note = protein_c6e38c8
  REGION 4..161: note = RuvC_domain
  SITE 7: note = RuvC_P1
  SITE 60: note = RuvC_P2
  SITE 100: note = RuvC_P3
  SITE 102: note = RuvC_P4
  SITE 105: note = RuvC_P5
  REGION 266..353: note = Tnp_domain
  SITE 274: note = Tnp_P1
  SITE 304: note = Tnp_P2
  SITE 312: note = Tnp_P3
  SITE 313: note = Tnp_P4
  SITE 326: note = Tnp_P5
MFYVGIDIAKKSHEASIIDSGGKLLDKSISFSNSESGCNKLLTLLEKFEANSSNTIIGMEATGHYWLSLYSHLLDLGFTVYVINPIQSDAFRKMYIRQTKNDSKDSFVIAQIMRFGEFSTTSLADEDIMALRQLSRYRFSLVDECSDWKRKCIALLDQVFPEYSKLFSDIFGVTSRELLSKYPTPEDMMSIDANTLSELLSRASRGRFGISKASEIQESASNTFGISFARDAFAFQIKQIIGQINFIEMQLKELESEISFLLHKTNQVITTIIGIGDVLGAVIIGEIGDISRFDSASQLVAYAGLDASVKQSGDFVGTHTKISKRGSPYLRRAIWLAATVAAFKDPALSVYYQSLKARGKHHLTAIGAVARKICNIIFAVLTNNKPYVPHIR

SEQ ID NO: 15574 - protein, 395 aa, unidentified
  source 1..395: note = protein_fa16e53
  REGION 3..162: note = RuvC_domain
  SITE 6: note = RuvC_P1
  SITE 59: note = RuvC_P2
  SITE 99: note = RuvC_P3
  SITE 101: note = RuvC_P4
  SITE 104: note = RuvC_P5
  REGION 270..356: note = Tnp_domain
  SITE 278: note = Tnp_P1
  SITE 309: note = Tnp_P2
  SITE 317: note = Tnp_P3
  SITE 318: note = Tnp_P4
MYIGDDWAEDHHDVEVQDEHGRVLRRERLPEGIAGIRGFGELAGRFADDDTECADVLVCIETDRGPWVQALLAAGYTVFSVDPKQAARHREILGNSGAKSDKGDAHALADMLRTRRHQLREVAADSEVAEAVKVVARAHQTLIWERTRHLLRLRVALRDYFPAALEAYTPLGLTSTTVLALLTKAPAPDAAAALTLRQITAALKGRRDIETKAAALQQALRAEHLGQPGPVSAAYAATVRSLVAILTTLNTEIANLEKDVSTHFGEHPDAGILLSQPGLGVVLGARVLAEFGDAPGRYASAKARKNYAGTSPITRQSGKTRVVSARHVHNDRLVDALHMQASCAILHDEQVRVYYDQLRARNVSHNAALRQVGNRLVGILHGCLKTHTHYDQATA

SEQ ID NO: 15575 - protein, 339 aa, unidentified
  source 1..339: note = protein_f7b727f
  REGION 6..146: note = RuvC_domain
  SITE 9: note = RuvC_P1
  SITE 52: note = RuvC_P2
  SITE 87: note = RuvC_P3
  SITE 89: note = RuvC_P4
  SITE 92: note = RuvC_P5
  REGION 211..300: note = Tnp_domain
  SITE 219: note = Tnp_P1
  SITE 249: note = Tnp_P2
  SITE 257: note = Tnp_P3
  SITE 258: note = Tnp_P4
  SITE 270: note = Tnp_P5
MEIEILGIDLAKHVFQLHGADRSGRAVHRSKVARGALAETVHKLHPQIVAMEACSSAHHWARRFIALGIEVRLISPQYVSPFVKTNKNDRNDAEAIVEAAGRPTMRFVSIKSVEQEDIQAVHRMRAILVRQRTAVINQVRGLLAERGLIIARTPQAFKHAIHEVLSNEGSELTGFCQALLTEMLQHLQALEARIHWLEVSIKNFVKSSQLCRKITAVEGVGPLTATAIVGAVGDAKQFSNGRHLAAWLGLVPRQYSSGGKARLQGISKRGDTYLRTLLIHGARTVLQYAAGKTDKRSRWLQQLIARRGYNCAAVALANKNARVIQVLLSGNAAYRPAAF

SEQ ID NO: 15576 - protein, 437 aa, unidentified
  source 1..437: note = protein_2d07510
  REGION 4..162: note = RuvC_domain
  SITE 7: note = RuvC_P1
  SITE 60: note = RuvC_P2
  SITE 101: note = RuvC_P3
  SITE 103: note = RuvC_P4
  SITE 106: note = RuvC_P5
  REGION 267..354: note = Tnp_domain
  SITE 275: note = Tnp_P1
  SITE 305: note = Tnp_P2
  SITE 313: note = Tnp_P3
  SITE 314: note = Tnp_P4
  SITE 327: note = Tnp_P5
MIYAGVDIAKADHVIAAVDETGAEVARPMAFKNTEAGFERCVAWLESIAQTEDDVFVGMEATGHYWMACFAYLTAAGYRACVVNPMQVSAMRRLKGLSGVKNDRIDSLLVAETLRQGDYDQTGLATDEVQALKQLTRYHQGLKRELATVKTQAICVLDAYFPEYAGLFSDMFGAASLKVLSECPTPSEVARKRASSIAKMLSEGSHGRLGADRAARVKAAARSSVGIRLGEDAASFQIKTMVSQIEFLNATIAKVEREVEGLLERIEPNITTIPGVSITTGAQIVAEIGDVKRFKNAASIVKYAGLNSGVDESGKFSAEGVPITKQGSPYLRRSLWLAANRAPIRSQAQGLLRQEAAGGQAPSGGRDRLREEAVPCSLRGHARRGALRPRQVGKAPYPRSHIACAMRPIAPKSIRYTAVKVQKRMISLVLEKPRIIP

SEQ ID NO: 15577 - protein, 307 aa, unidentified
  source 1..307: note = protein_81a0510
  REGION 1..111: note = RuvC_domain
  SITE 16: note = RuvC_P2
  SITE 51: note = RuvC_P3
  SITE 53: note = RuvC_P4
  SITE 56: note = RuvC_P5
  REGION 176..259: note = Tnp_domain
  SITE 184: note = Tnp_P1
  SITE 214: note = Tnp_P2
  SITE 222: note = Tnp_P3
  SITE 223: note = Tnp_P4
  SITE 235: note = Tnp_P5
MIKFAASLPPCIVAMEACCGAHHLGRILRSQGHEVRLMSPEYVRPYVKAQKNDDRDAEAIAEAATRPTMRFVELKSEAQLDMQTLHRARDRLVGERTALINQLRAVLLERGIVVPQGRRKLEQHLAAMLDEGEGLPLSPRVRALVADMRAEWRELDRRIGAFDDEFAARARSDEAARRLATIPGIGVLNATALLAAIGTGEAFRRGRDLAAWLGLVPRQASTGGRAKLLGISKRGNKYLRKLLIHGARSVLRPLSRSATPLGAWLRGLLARAHVNTAVVALANKLARIAWAVLSRTRTFNAGAVMVA

SEQ ID NO: 15578 - protein, 312 aa, unidentified
  source 1..312: note = protein_e95dc4b
  REGION 6..150: note = RuvC_domain
  SITE 9: note = RuvC_P1
  SITE 54: note = RuvC_P2
  SITE 94: note = RuvC_P3
  SITE 96: note = RuvC_P4
  SITE 99: note = RuvC_P5
  REGION 189..273: note = Tnp_domain
  SITE 197: note = Tnp_P1
  SITE 226: note = Tnp_P2
  SITE 234: note = Tnp_P3
  SITE 235: note = Tnp_P4
  SITE 246: note = Tnp_P5
MDALYIGIDVSKDRLDVAANTPSIAPFHVPRDHGGLADLVERLKPLQAERIAIEATGGFETVVTAALAAAGLPVVIVNPAQVRAFAKALGKRAKTDPIDAAVIARFAEATRPDLRPLPDAETEALGDFVARRRQIVTMIGAENQRLKRASARMTKSIKRLLKALEKELAEIDQDIDDAIRRSPNWLDKVELVKSVPGIGDQIARTLIAELPELGTLDRRQIAALVGLAPWTRQSGQWRGKSFIGGGRAAVRTALYMGALVAARHNPTLKTFRDRLVAQGKPKLVAIIAVARKLITILNALVRDNQSWREQNV

SEQ ID NO: 15579 - protein, 341 aa, unidentified
  source 1..341: note = protein_0cc571d
  REGION 7..148: note = RuvC_domain
  SITE 10: note = RuvC_P1
  SITE 53: note = RuvC_P2
  SITE 88: note = RuvC_P3
  SITE 90: note = RuvC_P4
  SITE 93: note = RuvC_P5
  REGION 211..298: note = Tnp_domain
  SITE 219: note = Tnp_P1
  SITE 249: note = Tnp_P2
  SITE 257: note = Tnp_P3
  SITE 258: note = Tnp_P4
  SITE 270: note = Tnp_P5
MVNVVTVGLDIAKSVFQVHGVDVVGEVAIRRQLRRAQVLPFFAKLPACLIGIEACATAHYWARELGALGHQVKLIPPSYVKPYVKRQKNDAADAEAICEAVTRPTMRFVEAKSPEQQSVMVLHKVWLTLMRQRIQLSNTMRRHMAEFGLVAPIGREGLQQLIKLVEDSDPRVPDEARVCLAFLIAQLQLVNLQILETDRRIRTSARSTEVGRRLMSIPGVGPLLASALVATVANPTAFRSGCNLAAWIGLVPKQNSSGGKDRLGGITKQGDRYLRQLLVVGASAVVRYAERNGTRRPWLVQLLAKRPTKVATVALANKIARIAWAIMTSGESYREPEPAAA

SEQ ID NO: 15580 - protein, 320 aa, unidentified
  source 1..320: note = protein_e01d42c
  REGION 7..147: note = RuvC_domain
  SITE 10: note = RuvC_P1
  SITE 53: note = RuvC_P2
  SITE 88: note = RuvC_P3
  SITE 90: note = RuvC_P4
  SITE 93: note = RuvC_P5
  REGION 210..290: note = Tnp_domain
  SITE 218: note = Tnp_P1
  SITE 248: note = Tnp_P2
  SITE 256: note = Tnp_P3
  SITE 257: note = Tnp_P4
  SITE 269: note = Tnp_P5
MREIIRIGMDTSKHIFVLHGVDAAEQPVLRKKLSRKQVLEFFAKLPPTVIGMEACGAAHYWGRELGKLGHEVKLIAPQLVKPYVLRNKNDGRDADGVCEAMGRPRMRFVPVKSAEQQAALMLAGVRDGLIGRRTQLSNAIRGYAAEFGLIAPKGLDKIEPLLARITQDESVPAMARELFAMQGRDYAQLQGELKAVEARLLAWHQANATSRRLAQIPSVGPIIATSLVMKTPDPHAFRSGRLFAAWLGLTPKDHSTAGKTRLGKITRAGDETLRRLLVALLRRKPPKLAAVALANKVARIAWKLMATGESYDAARMNAVT

SEQ ID NO: 15581 - protein, 345 aa, unidentified
  source 1..345: note = protein_89d3e35
  REGION 5..152: note = RuvC_domain
  SITE 8: note = RuvC_P1
  SITE 55: note = RuvC_P2
  SITE 92: note = RuvC_P3
  SITE 94: note = RuvC_P4
  SITE 97: note = RuvC_P5
  REGION 212..315: note = Tnp_domain
  SITE 220: note = Tnp_P1
  SITE 250: note = Tnp_P2
  SITE 258: note = Tnp_P3
  SITE 259: note = Tnp_P4
  SITE 271: note = Tnp_P5
MKQYAGIDVSLEYSSVCVVDADGRIVREAKLLSEPDALTAWFAEHGVAMERIGLEAGPLSQWLYAGMAKTGLAVELIETRHVRAAFKTMPVKTDKKDARGIAQLMRLGWFRPVHCKSLAAQEVRALLTARKLIQGKFHDIEMSIRGILRGFGLKVGPTTRRTYAARICELIEGHPTLEAIAASLLKARDALADEFACFERKLRVIARQDDKARRLMTTPGVGVLVALTFAAAVDAPERFRTSRAVGPHFGLTPKKYQSGETDYSGRISKIGDVGVRTALYEAANVILTRPVKGSDLKTWALAVARRAGPRKARVALARKLAVVLHRMLRDGTNFLPRKAAPAMAG

SEQ ID NO: 15582 - protein, 410 aa, unidentified
  source 1..410: note = protein_d2da9ed
  REGION 5..167: note = RuvC_domain
  SITE 8: note = RuvC_P1
  SITE 64: note = RuvC_P2
  SITE 104: note = RuvC_P3
  SITE 106: note = RuvC_P4
  SITE 109: note = RuvC_P5
  REGION 275..361: note = Tnp_domain
  SITE 283: note = Tnp_P1
  SITE 314: note = Tnp_P2
  SITE 322: note = Tnp_P3
  SITE 323: note = Tnp_P4
MRLFVGDDWAEDHHDVEVMDGSGRRLAKARLPEGVAGMARLHAMVGELVGDDADADEDVEVLVGIETDRGPWVAALVAAGYTVLAVNPLQAARFRDRLGVSGAKSDAGDAHVLADMVRTHGHELRPVAGDSAEVEAVKVVARTHKTLIWERTRHTQRLRHALRDYFPAALVAFEDLDAADTLELLAKAPTPAKAARLTIAQIGAALKRARRRDVAEKAELVQAELRAEHLGQPEVVTTAYAASVQALIAVLTVLNTQVKAMQGQVEAHFGRHPAAEIVLSQPGLGPILGARVLAEFGDDPDRYTTAKARKNYAGTSPITRASGRKKVALARFVHNDRLIDALTTQAFTALRHSPGARAYYDRQRARGSGHNAALRQLANRLVGILHGCLKTGTRYDEATAWSHHAENVAA

SEQ ID NO: 15583 - protein, 282 aa, unidentified
  source 1..282: note = protein_36a751d
  REGION 4..156: note = RuvC_domain
  SITE 7: note = RuvC_P1
  SITE 54: note = RuvC_P2
  SITE 95: note = RuvC_P3
  SITE 97: note = RuvC_P4
  SITE 100: note = RuvC_P5
  REGION 197..281: note = Tnp_domain
  SITE 204: note = Tnp_P1
  SITE 234: note = Tnp_P2
  SITE 242: note = Tnp_P3
  SITE 243: note = Tnp_P4
  SITE 256: note = Tnp_P5
MNYVGIDVSQKELVVVNTQGKVGPAKSFENTTTGHQEIIRLLAKLKGETQICLEATGVYHFDLAVALSRANDLEVMVINPKAAHNFAQALMKRSKTDTIDAATLAAYCERMPFEAWQRPADEVIALRAMGRRIAALNKLKTQTKNQRHALKATLDTPDIVIEQTEELVNVLEKQVQAHRDSALELIRQHESLLCAFTLIIGIKGIAEASAIQLLAELLVLPQDMSAKQWVAYAGLDPRHYESGSSVAKKPRISKAGNKYLRQALYMPALVATRYEPKLPPLN

SEQ ID NO: 15584 - protein, 341 aa, unidentified
  source 1..341: note = protein_028e2fd
  REGION 6..146: note = RuvC_domain
  SITE 9: note = RuvC_P1
  SITE 51: note = RuvC_P2
  SITE 86: note = RuvC_P3
  SITE 88: note = RuvC_P4
  SITE 91: note = RuvC_P5
  REGION 210..295: note = Tnp_domain
  SITE 218: note = Tnp_P1
  SITE 248: note = Tnp_P2
  SITE 256: note = Tnp_P3
  SITE 257: note = Tnp_P4
  SITE 269: note = Tnp_P5
MNSSVIGLDIAKNIFHLYTMNEKNKPVKKKLKRADVLSFFANYQESLIGIEACGGAHYWARELTKLGHEVILLNARYVKNFVIGNKNDYNDAAGIFDAVTRPNKRVVAVKTVEQQDMQLIHRIREDLKGNRTALVNQTRGLLSERGIVIHQGINRVREQLPLIIEDAENNLTSLSREMFNEQYEKLTVLDDEIKNMDQKISRLCNQNELSKRFLDVPGIGPLTATIVASDIGHGKGYESSRDYAASLGIVPKQHSSGGKLVYLGISKRGNRYIRTLLIHGARSVLKNCADKKDKLSLWLQALIERRGFNKAAVALANKNARILWALATKNEDYKGDEELLA

SEQ ID NO: 15585 - protein, 306 aa, unidentified
  source 1..306: note = protein_ff7efd4
  REGION 1..76: note = RuvC_domain
  SITE 13: note = RuvC_P3
  SITE 15: note = RuvC_P4
  SITE 18: note = RuvC_P5
  REGION 183..267: note = Tnp_domain
  SITE 191: note = Tnp_P1
  SITE 220: note = Tnp_P2
  SITE 228: note = Tnp_P3
  SITE 229: note = Tnp_P4
  SITE 241: note = Tnp_P5
MRRIADLHAGEAKTDARDAAIIAEAARTLPHALRTLKLADEQIAELSMLCGFDDDLAAQTTQASNRIRGLLTQIHPALERVLGPRLEHPAVLDLLQRYPSPEKLASLGEKKLAAQLCKLAPRLGKRLAADIAQALAEQTVVVPGTNAAAVVLPRLALQLITLRKQRDEVALEVEQRVLAHPLYPVLTSMPGVGVRTAARHLTEVACRAFASAAHLAAYAGLAPVTRRSGSSIRGEHPSRRGNKALKRALFLSAFAALRDPLSRAYYTRKMSQGKRHNQALIALARRRCDVLFAMMRDGTFYTPQGS

SEQ ID NO: 15586 - protein, 352 aa, unidentified
  source 1..352: note = protein_4e55af3
  REGION 11..176: note = RuvC_domain
  SITE 14: note = RuvC_P1
  SITE 67: note = RuvC_P2
  SITE 107: note = RuvC_P3
  SITE 109: note = RuvC_P4
  SITE 112: note = RuvC_P5
  REGION 277..340: note = Tnp_domain
  SITE 285: note = Tnp_P1
  SITE 315: note = Tnp_P2
  SITE 323: note = Tnp_P3
  SITE 324: note = Tnp_P4
MSEEKSVQLRVSMDVGYRRHSVAIGLPSGEVLEEFEIGHRLEGFQDFFSRIEKHSHKQGYSVSVAMEGYNGYARPLDSMVRQHGYRLYNINNLKLARFKEIFPGSAKSDRIDARKGLELFQLSDHLPLAKEVLQEVSGTPQENEVLKRLTRRRRRLVNERVRVVNNLQADLQAVCPGLLEITSEASNQWFLNFLLSVKTLPQPARIRKATLLKIPAVGRKYASLIEGWQKRAYFGAEVDWVSEMIQEDGQRCVELEEKIKALLQTKIKQVAKESKIANILISLPGFGPVCSSELAGEIGTIERFSKEGGLALYLGMSTLDNSSGKYQGTEARQHTGESGNDDRLGSSSKICA

SEQ ID NO: 15587 - protein, 344 aa, unidentified
  source 1..344: note = protein_b13379d
  REGION 4..157: note = RuvC_domain
  SITE 7: note = RuvC_P1
  SITE 55: note = RuvC_P2
  SITE 96: note = RuvC_P3
  SITE 98: note = RuvC_P4
  SITE 101: note = RuvC_P5
  REGION 219..305: note = Tnp_domain
  SITE 227: note = Tnp_P1
  SITE 257: note = Tnp_P2
  SITE 265: note = Tnp_P3
  SITE 266: note = Tnp_P4
  SITE 277: note = Tnp_P5
MITIGIDPHKASHTAVALDGGGRVQGELRCLANQATLERLLRWAERWPERIWAIEGAAGLGHLLAQQLVAREETVLDVPATLVARARLLAPGHGRKTDGIDAASVATVAQNQPDLRRVGPEDHSAVLRLLSDRRDELSGERRRAVNRLHRLLRDLRPGGAPTELSAARASELLGHIRPGAVVDLERKAMARALVADLRRIDRALTENRSRCAAAVATSGTSLTAVFGISDVLAAKILGHVRDITRFGSADRFASYTGTAPIEVSSGEVTRHRLSRSGNRSLNNALHLAARVQTMHPGPGRDHYGRKLAEHKSSREALRSLKRQLAKVVYRHLVADQVRRLDLAS

SEQ ID NO: 15588 - protein, 345 aa, unidentified
  source 1..345: note = protein_902b37f
  REGION 4..157: note = RuvC_domain
  SITE 7: note = RuvC_P1
  SITE 55: note = RuvC_P2
  SITE 96: note = RuvC_P3
  SITE 98: note = RuvC_P4
  SITE 101: note = RuvC_P5
  REGION 219..304: note = Tnp_domain
  SITE 227: note = Tnp_P1
  SITE 257: note = Tnp_P2
  SITE 265: note = Tnp_P3
  SITE 266: note = Tnp_P4
  SITE 277: note = Tnp_P5
MITIGVDPHKSSHTAVALDEAGQVHGELRVPADTATWRRLWGWAERWPERTWAIEGANGLGRLLAQQLVAAGEVVVDVPATLAARARQLDRGHGRKTDGIDARTVAAVAQRRPDLRRVAPEDHAMVLRLLSDRRDELAEERRRVVNRLHRLLRDLHPGGAPTELSAEGAAGLLGRIRPRGAAALERKAMARQLVADLRRLDRALADNRRRCAAAVAASGTSLTAVFGISDVLAAKILGHTGDVGRFVTADRFASYTGTAPVEVSSGELTRHRLSRGGNRSLNNALHLAARVQIMHPGPGRDHYARKLAEHKSSTEALRSLKRQLAKIVYRHMVADRAVRLEPALT

SEQ ID NO: 15589 - protein, 347 aa, unidentified
  source 1..347: note = protein_0bae753
  REGION 6..150: note = RuvC_domain
  SITE 9: note = RuvC_P1
  SITE 54: note = RuvC_P2
  SITE 89: note = RuvC_P3
  SITE 91: note = RuvC_P4
  SITE 94: note = RuvC_P5
  REGION 213..299: note = Tnp_domain
  SITE 221: note = Tnp_P1
  SITE 251: note = Tnp_P2
  SITE 259: note = Tnp_P3
  SITE 260: note = Tnp_P4
  SITE 272: note = Tnp_P5
MKITRIGVDIAKTVFHVHGIDRHGRVQWQAKLKREQWIAAVIEHAEAGCEIGMEACASSHHWGRELQKQGYTVRLIAAQFVKPFVKSNKNDRVDAEAITEAMCRPSMRFVAVKSVEQQDVQAMHRTRSALVSQRTARANHIRGLVGEYGIVAPKGIGQLRRAIPCWLEDADNGLSDAFRVQLSELYEDLMHLDERVDTLSERIGQSVKQNPDIRRLTTVRGIGPLGASALSVALGDGSSFASGRDFAASLGLVPRQHSTGGRDRLLGISKRGNSYIRTLLVHGARAVIWHSKDRDDALSLWIQSLLARKPANVVAVALANKIARIAWAVTTKEAEYDPALSALSTTH

SEQ ID NO: 15590 - protein, 298 aa, unidentified
  source 1..298: note = protein_6d4dcf3
  REGION 7..148: note = RuvC_domain
  SITE 10: note = RuvC_P1
  SITE 53: note = RuvC_P2
  SITE 88: note = RuvC_P3
  SITE 90: note = RuvC_P4
  SITE 93: note = RuvC_P5
  REGION 212..297: note = Tnp_domain
  SITE 220: note = Tnp_P1
  SITE 250: note = Tnp_P2
  SITE 258: note = Tnp_P3
  SITE 259: note = Tnp_P4
  SITE 271: note = Tnp_P5
MGEVTTVGLDIAKSVFQVHGVDAEGAVVVRRRLTRARVLPFFEKLAPCMVGIEACAAAHHWARQLRAFGHEVRLMPPSYVKPYVKRQKNDAADAEAICEAVTRPSMRFVEVKTPEQQSVLVLHRTRQVLIRQRTQITNATRGHMAEFGLVAPIGRNGLETLIEIIGNEADQRLPEAARRCLVTLIAQLQLVNAQILETDRRIMASARATEMGRRLMGIPGVGPLLASALVTAIPDPHAFRSGRNLAAWIGLVPKQNSSGGKERLGGISKQGNRYLRQMLVVGAFAVIRYAERHGSRRP

SEQ ID NO: 15591 - protein, 322 aa, unidentified
  source 1..322: note = protein_8a94e56
  REGION 6..147: note = RuvC_domain
  SITE 9: note = RuvC_P1
  SITE 51: note = RuvC_P2
  SITE 86: note = RuvC_P3
  SITE 88: note = RuvC_P4
  SITE 91: note = RuvC_P5
  REGION 208..274: note = Tnp_domain
  SITE 216: note = Tnp_P1
  SITE 246: note = Tnp_P2
  SITE 254: note = Tnp_P3
  SITE 255: note = Tnp_P4
  SITE 267: note = Tnp_P5
MALELLAIDLGKRSFHLYGIDTDGVILSRKVSRAKLAEVVGDLAPTAIAMEACASAHYWGRCWLAAGREVRLINPRFVKPFVKGSKNDAVDAEAIFEAAMRPTMRFVPVKSKDQQDLQSLHRARDRLICQRTALINHTRGLLAEYGIVLPQGPWRFTAQAPAAIADADLSDLARAIFGELLDQLDELDRRVKKLDTTMVTFCRTNATCRRLAKLPGVGPVVATAILAAVNDGRQFRSGREMAAWIGLVPRQYTTGGKPRLGGIGRRANHYLRRQPKHDDRRSIWLNALVARRGFNRTIVALANKTARIAWALLNRKEEYAVS

SEQ ID NO: 15592 - protein, 275 aa, unidentified
  source 1..275: note = protein_ca133d5
  REGION 2..76: note = RuvC_domain
  SITE 17: note = RuvC_P3
  SITE 19: note = RuvC_P4
  SITE 22: note = RuvC_P5
  REGION 141..226: note = Tnp_domain
  SITE 149: note = Tnp_P1
  SITE 179: note = Tnp_P2
  SITE 187: note = Tnp_P3
  SITE 188: note = Tnp_P4
  SITE 200: note = Tnp_P5
MRLIAAQFVKPFVKSYKNDFVDAEAIAEAVERKNMRFVPIKTDDQLDLQTIHRVRDRLISRRTAVINQLRAFLLERGLVFAKTPAKLRTALPDILENANLDLTTQMRNLIDLRWNEWKTVEAQIEGLSLQLERISAADPGCTRIRQIPRVGPIVATAIVAAIGNGAAFRKGRDFAAWLGVVPRQYSTGGKARLLGISKRGNVYLRKILIHGARAAVLRIKRDRAPIGAWLDALDARATLPHYGGGLKLPTEVCMRTARTKEQSQRRAWKPAGRIG

SEQ ID NO: 15593 - protein, 399 aa, unidentified
  source 1..399: note = protein_2abf6b6
  REGION 7..162: note = RuvC_domain
  SITE 10: note = RuvC_P1
  SITE 59: note = RuvC_P2
  SITE 99: note = RuvC_P3
  SITE 101: note = RuvC_P4
  SITE 104: note = RuvC_P5
  REGION 269..354: note = Tnp_domain
  SITE 277: note = Tnp_P1
  SITE 306: note = Tnp_P2
  SITE 314: note = Tnp_P3
  SITE 315: note = Tnp_P4
  SITE 327: note = Tnp_P5
MEPQVFVGIDVGKSQHHATAVNQEGGVVHDKPLPQSEPKIQELLTDLVAKHGELLVVVDQPKTIGALVVAVAQQMDTQVAYLPGLTMRRVADLHPGQAKTDARDAYIIAETARTMPHTLRGITVAEEQIAELSMLCGFDDDLAAQLTQVRNRLRGLLTQIHPALERVLGPRLAHPAVVDLLGRYPTPAGLKRAGRGHVRARLKKLAPRMAARLTDEIFRALAEQTTIVTGTHAAEHIIGRLAAQLQQLTQQRSDVEAEILLLVDAHPLTEVLTSMPGVGVRTAARILTEVVGKDFKTAAHLASYAGIAPVTRQSGTSIRGESPSRRGNKVLRRVLFLSAFASIKGDPVSRAYYDRKRAEGKRHNQAIIALARRRSDVLFAMLRDGTFYESRPTQLATAA

SEQ ID NO: 15594 - protein, 315 aa, unidentified
  source 1..315: note = protein_6e3384b
  REGION 12..162: note = RuvC_domain
  SITE 15: note = RuvC_P1
  SITE 57: note = RuvC_P2
  SITE 97: note = RuvC_P3
  SITE 99: note = RuvC_P4
  SITE 102: note = RuvC_P5
  REGION 193..276: note = Tnp_domain
  SITE 200: note = Tnp_P1
  SITE 229: note = Tnp_P2
  SITE 237: note = Tnp_P3
  SITE 238: note = Tnp_P4
  SITE 250: note = Tnp_P5
MAMPVSVSKPIVGVDVAKNELVIYHAEADLLETIANNKAAIKKWLKTLSCKVAIAIEATNIYHLEFSDLAHEAGCVVYMVGGYELKHYRESLKIRAKTDALDAQLLARYLRKEADELRPWTPPSPLYRHLLSLFRRRAALVQARVSLTQSWANEPLLKASFAEQVKSMQRLEGLIEKMISDCLKEAGMLGQLKRCLKVEGIGFLTGARLIATFQRGEFRNSDAFIAFLGMDLRVNKSGQKDGRRSLSKRGDSEARRLLHNAAMAASRTETWKAFYQAQRARGYSTTQALVILARKLARVVFALLKGQSEYQPKVG

SEQ ID NO: 15595 - protein, 348 aa, unidentified
  source 1..348: note = protein_5dd2041
  REGION 7..147: note = RuvC_domain
  SITE 10: note = RuvC_P1
  SITE 53: note = RuvC_P2
  SITE 88: note = RuvC_P3
  SITE 90: note = RuvC_P4
  SITE 93: note = RuvC_P5
  REGION 211..297: note = Tnp_domain
  SITE 218: note = Tnp_P1
  SITE 248: note = Tnp_P2
  SITE 256: note = Tnp_P3
  SITE 257: note = Tnp_P4
  SITE 269: note = Tnp_P5
MGEIIRIGMDTSKRVFQLHGVNAQEVPVLRKRLARKAMVAFFEKLEPTEIALEACGASHHWARLLQSFGHRVKLIPPQLAKPYVKRGKNDAADAEALCEAMSRPTMRFVPVKTVEQQAALMLVGVRDRLIRTRTQLANAIRGYAAEFGLSAARGTAHLVPLLERLQADESLPVLARELFAIQAKEYAQLQEEIGEIEAKLMVCHRADECSWRLAKIPGIGPIGAVLLTMKTPQPKLFRSGRQFAAWIGLTPRDHSTAGKVRLGVITRAGDEALRSILVVGATSVIRQVRTGRSRNASPWLVALLTRKPPKLAAVALANKMARIAWKMMVSGEVYRGVKTMPPILARIA

SEQ ID NO: 15596 - protein, 408 aa, unidentified
  source 1..408: note = protein_28ebf71
  REGION 16..170: note = RuvC_domain
  SITE 19: note = RuvC_P1
  SITE 67: note = RuvC_P2
  SITE 107: note = RuvC_P3
  SITE 109: note = RuvC_P4
  SITE 112: note = RuvC_P5
  REGION 277..362: note = Tnp_domain
  SITE 285: note = Tnp_P1
  SITE 315: note = Tnp_P2
  SITE 323: note = Tnp_P3
  SITE 324: note = Tnp_P4
  SITE 336: note = Tnp_P5
MSNSEAASAVPFAVFCGLDVGKSEHHACALDAAGRRLHDKALPNDETALRTVFERLGEHGRVLVVVDQPASIGALAVAVARDLEVEVAYLPGLAMRRIADLHPGQAKTDARDAHVIADAARTMPHTLRRIRGDEETLAELTVLAGYDDDLAGQSTRLSNRLRDALLHVHPALERLLGPRLDRGGVLDLLAAAPTPAALAELGAQGMAAVMAPRSPRLARTLPAQILTALLAQSVVIPGTAAFARVISGVAGQLREVHTERDQLATELEARLEAHPLGPVLTSMPGLGVRTAIKILTIVGDGSAFPSAAHLAAYAGLAPVTRRSGSSIKGESRSQRGNHALKSALFLSAFASLADPTSRAYYDRKKAEKKKHNAAVICLARRRLDVIYAMLRDRQPYRAPSPSPAPLAA

SEQ ID NO: 15597 - protein, 366 aa, unidentified
  source 1..366: note = protein_74d4e8e
  REGION 9..163: note = RuvC_domain
  SITE 12: note = RuvC_P1
  SITE 60: note = RuvC_P2
  SITE 100: note = RuvC_P3
  SITE 102: note = RuvC_P4
  SITE 105: note = RuvC_P5
  REGION 270..359: note = Tnp_domain
  SITE 278: note = Tnp_P1
  SITE 308: note = Tnp_P2
  SITE 316: note = Tnp_P3
  SITE 317: note = Tnp_P4
  SITE 329: note = Tnp_P5
MDTSYAVFCGIDVGKSDHHAIGLDAAGGRLFDKALPNDEARLRAVFADLAAHGPILVVVDQPNTIGALLVTVARACGHDVAYLPGLSMRRVADLYPGEAKTDARDAFIIADTARTMPHTLRRVDVGDETLTELGVLVGFDDDLAGEATRISNRIRGLLAGIHPALERALGPRVAHLAVLEILSRFGGPDGIRQAGKRRVTTLAVKHAPRMGTRLAEEIFAALDAQTVTVPGSKTTEIVLPKLADSLKEVLQQRRTIGDDVERMLADHPLSQVLTSMPGIGVRTAARILVEIGDGSGFATAGHLAAYAGIAPVTRRSGSSIRGEHPGHSGNRKHNAALICLARRRCDVLHAMLKNKTFYQPPNAEAA

SEQ ID NO: 15598 - protein, 418 aa, unidentified
  source 1..418: note = protein_5cf1a6a
  REGION 26..179: note = RuvC_domain
  SITE 29: note = RuvC_P1
  SITE 77: note = RuvC_P2
  SITE 118: note = RuvC_P3
  SITE 120: note = RuvC_P4
  SITE 123: note = RuvC_P5
  REGION 241..326: note = Tnp_domain
  SITE 249: note = Tnp_P1
  SITE 279: note = Tnp_P2
  SITE 287: note = Tnp_P3
  SITE 288: note = Tnp_P4
  SITE 299: note = Tnp_P5
MPTSSSPTGTTTDEVNRLKTTRDVIIGVDPHKMSVTIEVVDPNERLLGTGRFGTDQAGYAAMQRYVKQWPHRTWAVEGANGAGRPLAQRLIAAGEHVVDVPAKLAARVRLFDTGHNRKTDALDAHSIAVVAVRTPGLRVVVEDGELEALRMLTERRDELAHQRVQTVNRLQRLLSELLPGQRKRDLSAAQAKAMLATVRPRDVAGKTRRRMAAEQVADLVVLDAKLKKIKAELKDAVTARGSNLMGIYGIGPAGAARILADVGDVARFADRNRFASWTGTAPLDASSGEQNRHRLSRAGNRRMNHVLHIAAIVQIRHDTEGRAYYRRKLAEGKTPMEALRCLKRRLSDVVYRQLVADSKAPTTPVDADPGGHRGATLHSSAVDSHPHIDTSDQPLPGPARPTLRPDREHVKNLVPSTR

SEQ ID NO: 15599 - protein, 343 aa, unidentified
  source 1..343: note = protein_3057b76
  REGION 7..147: note = RuvC_domain
  SITE 10: note = RuvC_P1
  SITE 53: note = RuvC_P2
  SITE 88: note = RuvC_P3
  SITE 90: note = RuvC_P4
  SITE 93: note = RuvC_P5
  REGION 212..300: note = Tnp_domain
  SITE 220: note = Tnp_P1
  SITE 250: note = Tnp_P2
  SITE 258: note = Tnp_P3
  SITE 259: note = Tnp_P4
  SITE 271: note = Tnp_P5
MTKVTTVGLDLAKTVFQVHGADQDGKPVVRKKLRRAQMVPFFAELAPCLIGLEACASAHYWARELQALGHEVRLIPPQYVKPFVKTNKNDASDAEAICEALVRPTMRFAAVKSAGQQSVLMLHRSRDLLVRQHTMLINALRGHCGEFGIIAAQGAAKVEALVALIDDADDSRLPSVARDALGYLVEQLRSTQDRIKELEASLTSWHRSNEASLRLATIPGVGVITATALVATIGDASQFHSGRQLAAWLGLVPRQHSSGGKERLGRISKRGDGYLRRLLVHGARADLRWSRHRKEQRSVWQESLLARRPTNVVLVAMANKTARVVWAMLSRGEAFRTEARSAA

SEQ ID NO: 15600 - protein, 387 aa, unidentified
  source 1..387: note = protein_3349505
  REGION 54..185: note = RuvC_domain
  SITE 81: note = RuvC_P2
  SITE 118: note = RuvC_P3
  SITE 120: note = RuvC_P4
  SITE 123: note = RuvC_P5
  REGION 255..342: note = Tnp_domain
  SITE 263: note = Tnp_P1
  SITE 292: note = Tnp_P2
  SITE 300: note = Tnp_P3
  SITE 301: note = Tnp_P4
  SITE 313: note = Tnp_P5
MNQVSDLSRSLAPFDQNATLTVVVELSEASWLVAGLIPGIERQPVKKQGPDPIALLRLLERWRLEAMKAGKTIGQIALAFEAGRDGFWLARWLQARDIAVHVVHSTSVAVSREHRRAKTDRLDTAMLMRVFVGWLRGERGHCRMVAIPTLEQEDAKRPSREREGLVGERTRIINRMKATLARLGIRGFKPALRKAPQRLAALRTPEDVPIPPNTLDEIRRDMDRLAVVREQINAIEMARLARLEKAPAAGPHAMVRLLARIVGVGMETADMLVQEVLSRNLRDRRAVARYVGLTGSPDESGKKRRERGLAKAGNARARRGLIQLAWRFLRFQSDSALAQWYRSRTGGPKGARKTTMIVALARKLLIALWRMVTIGEIPAGVALRQTI

SEQ ID NO: 15601 - protein, 339 aa, unidentified
  source 1..339: note = protein_c0acc25
  REGION 4..156: note = RuvC_domain
  SITE 7: note = RuvC_P1
  SITE 55: note = RuvC_P2
  SITE 96: note = RuvC_P3
  SITE 98: note = RuvC_P4
  SITE 101: note = RuvC_P5
  REGION 219..304: note = Tnp_domain
  SITE 227: note = Tnp_P1
  SITE 257: note = Tnp_P2
  SITE 265: note = Tnp_P3
  SITE 266: note = Tnp_P4
  SITE 277: note = Tnp_P5
MTMIGIDPHKATHTAVAIDDDENVIDEFTLEASKDQVERLCGWADRFTKREWAVESANGLGYLIARQLVACGETVFDVPPVLASRVRLMGSGKSQKNDPNDARSIAIAALRSDRLATVRPDDHVVVLRLLVKRHRDMARLRNKHCSRLHALLGELEAGGIGVKISVGNASGLLDRIDVGDEAARYRVLVAREVVGDIARLDEILRASKKRIAVAVQASGTSLTGIVGIGPIGAATIIGYTKDITRFPTKGHYATYNATAPIEVSSAGNTRHRLNLRGNRILNHAIHIAAVTQLRHDTNGRIYFDKKIAEGKTPKEAIRALKRRISDAVYQRLIADANNQ

SEQ ID NO: 15602 - protein, 343 aa, unidentified
  source 1..343: note = protein_23cfad1
  REGION 6..150: note = RuvC_domain
  SITE 9: note = RuvC_P1
  SITE 54: note = RuvC_P2
  SITE 89: note = RuvC_P3
  SITE 91: note = RuvC_P4
  SITE 94: note = RuvC_P5
  REGION 213..300: note = Tnp_domain
  SITE 221: note = Tnp_P1
  SITE 251: note = Tnp_P2
  SITE 259: note = Tnp_P3
  SITE 260: note = Tnp_P4
  SITE 272: note = Tnp_P5
MKIIRVGVDLAKNVFQVHGVDCNEKPVWRRKLNRAEWLRVLLEKIEPDCEIGMEACGGAHHWARQLQAKGFTVRLMAPRFVKPYVKSNKNDANDAEAICEAMSRPHMRFVPVKTVEQQDIQALHRVRAALMDQRKAKANQVRGLAAEYGIVAPKEWLHLRQAIPCWLEDAENGLSSRFRRLLAGLWQDLQQLNDRVTELDQEVALIAASDPMAKRLQQLRGVGPMIATALLASVGDAHPFANGRQMAASLGLTPKQVSSGGKDRLLGISKRGDAYVRSLLVHGARAMIRTAKTKDDRLSQWGTRIATRRHPNIAAVAMANKTARIAWAMMTSGKDYQPELAAG

SEQ ID NO: 15603 - protein, 353 aa, unidentified
  source 1..353: note = protein_910ab7c
  REGION 4..158: note = RuvC_domain
  SITE 7: note = RuvC_P1
  SITE 56: note = RuvC_P2
  SITE 97: note = RuvC_P3
  SITE 99: note = RuvC_P4
  SITE 102: note = RuvC_P5
  REGION 220..306: note = Tnp_domain
  SITE 228: note = Tnp_P1
  SITE 258: note = Tnp_P2
  SITE 266: note = Tnp_P3
  SITE 267: note = Tnp_P4
  SITE 278: note = Tnp_P5
MIVIGVDPHKSTHTATALDPATNSDVGSVRIEASLAEYQRLISWAKAWPDRTWAIENADGLGHHLALWLLARGEVVLDIPTTATARVRELSRGGRRKNDRIDAAAAASVAALQGDAREVYAETTADSLALLDERRVNLSHSRTRTVNQLHALLRDLMAGGAPTSLSPASATAALRGFRPRTGPDRTRVALAKELIADVRRFDEQLAANAKTVTVLLDEHGTRLREVDGVGPVLAARLLGRSGSPKRFASAAAYANYTGTAPVQIASADSSQHRLSRYGDRQLNSAIYTVAMIQIRMPASAGRAYYDKKIAEGKSPRYATRALKRHLASHLWRVMLADESRTVRIPSETAAIPS

SEQ ID NO: 15604 - protein, 320 aa, unidentified
  source 1..320: note = protein_2713ffe
  REGION 6..153: note = RuvC_domain
  SITE 9: note = RuvC_P1
  SITE 54: note = RuvC_P2
  SITE 94: note = RuvC_P3
  SITE 96: note = RuvC_P4
  SITE 99: note = RuvC_P5
  REGION 193..280: note = Tnp_domain
  SITE 201: note = Tnp_P1
  SITE 231: note = Tnp_P2
  SITE 239: note = Tnp_P3
  SITE 240: note = Tnp_P4
  SITE 253: note = Tnp_P5
MKKITAGIDVSKETLDISLYNGEKHDNITIANNLRAFSKFLKKYSADGLQIVMEATGIYHLRIALEAHDLGYFVSVVNPLIIKRYGEMKMLRAKTDRVDARLIAEYGYEQNPKEFSPHSDERMILFQLLKAIEDLYKTHTEFSNRLESYTHGYPVSKEVGKTYRSMVKKIEREIDKLKKMLYDYLDTHFPDQSSKLTSIKGVGKMTASMIMAFYGNFEQFETAKQAVSFAGLNPNPRQSGTSVRRGSAISKKGHALIRKTLYMSALSAKKHNPIYREYYERLLASGKSKKVALVAVAHKLLRHIFAIVKYDREWDPQYAK

SEQ ID NO: 15605 - protein, 322 aa, unidentified
  source 1..322: note = protein_ddbd507
  REGION 5..153: note = RuvC_domain
  SITE 8: note = RuvC_P1
  SITE 55: note = RuvC_P2
  SITE 93: note = RuvC_P3
  SITE 95: note = RuvC_P4
  SITE 98: note = RuvC_P5
  REGION 213..301: note = Tnp_domain
  SITE 221: note = Tnp_P1
  SITE 251: note = Tnp_P2
  SITE 259: note = Tnp_P3
  SITE 260: note = Tnp_P4
  SITE 272: note = Tnp_P5
MKHYAGLDVSVKETSVCIVDASGKTCREKKVVSHPQDLVAILRDPALSLERVGLEAGPMSQWLFEGLAKAGLPVFCIETRHTKAFLKASQTNKSDRNDARGIAQMMRVGLFKSVHVKTLTSQKRRALLTARSLLQEKAIALENDMRGLLRNFGLKVGVVSGGTFEEKIRELIEADPDLAEIMEPLLAGRRKLREEFAKLDKKVAHEARCDEVCKRLMTVPGVGPVVSLAYVSTIDIPSRFRHSRAVGAVLGLTPVLNQSGESKRIGHVSLCGDAMMRALLYEAAQTMLTRVVKWCWLKAWAMNIARRHGRKKANVWRAGLLW

SEQ ID NO: 15606 - protein, 350 aa, unidentified
  source 1..350: note = protein_6b592a7
  REGION 11..151: note = RuvC_domain
  SITE 14: note = RuvC_P1
  SITE 57: note = RuvC_P2
  SITE 92: note = RuvC_P3
  SITE 94: note = RuvC_P4
  SITE 97: note = RuvC_P5
  REGION 216..301: note = Tnp_domain
  SITE 224: note = Tnp_P1
  SITE 254: note = Tnp_P2
  SITE 262: note = Tnp_P3
  SITE 263: note = Tnp_P4
  SITE 275: note = Tnp_P5
MQLNPKTCAVFGIDIGKTLFHVVGLDASGAPIQKAKLRRDTVLQFFAEADPTLVGMEACPGSQWLARKLRELGHDVRIIPAQFVKPYVKSHKNDIIDAEAIAEAATRPTMRFVGIKEAHQVDLQMLHRVRSRLVKGRTNLICQMRSYCLEHGVALRQGAGVFKLDIVRAIDNLENDLTDRARVVLRELQEDLLRLEERILSVSTEIKNIADRDETARRLMTIPGVGPLGATAILASIGVPTRFKKARDVAAWLGLVPRQHSTGGKQTLLGIAKRGSSYVRTLLIHGARSVLMHLDRAKDRLGLWVDELRTRMHVNKVTVALAAKLARVIWVVLSKPGATYERRAPEGGCV

SEQ ID NO: 15607 - protein, 405 aa, unidentified
  source 1..405: note = protein_191f2de
  REGION 5..161: note = RuvC_domain
  SITE 8: note = RuvC_P1
  SITE 58: note = RuvC_P2
  SITE 98: note = RuvC_P3
  SITE 100: note = RuvC_P4
  SITE 103: note = RuvC_P5
  REGION 271..357: note = Tnp_domain
  SITE 279: note = Tnp_P1
  SITE 310: note = Tnp_P2
  SITE 318: note = Tnp_P3
  SITE 319: note = Tnp_P4
MEIFVGIDWAEAHHDICVLDEIGTVVAKRRIADGLEGVGQLHALLGDHATEPNQVVIGIETDRGLLVGALLAAGYQVYAINPLAASRYRDRHGTSGAKSDPGDAKVLADLVRTDRHNHRPVAGDSELAASLQVLARAHQNLIWSRQRLVNQLRNNLREYYPAALAAFGTELAHPVALGVLDVAPTPARGRTLSRAKLVAILRRAGRERGVDEKAAAIQAQLRAPQLAAPALVDAAYGKSVASTVRILREVNAELATLETELAPSFEKHPDAEIYRSLPGLGIVLGARVLSEFGDDRTRFTHPKARKNYAGSSPITKASGTRRVVLARMARNRRLADACHQWAFCALRSSAGAHDYYRVLRQRGKTHHQALRALANRLVGILHGCLDHRQTYREEIAWPRSLTAAA

SEQ ID NO: 15608 - protein, 408 aa, unidentified
  source 1..408: note = protein_cbe7790
  REGION 19..174: note = RuvC_domain
  SITE 22: note = RuvC_P1
  SITE 71: note = RuvC_P2
  SITE 111: note = RuvC_P3
  SITE 113: note = RuvC_P4
  SITE 116: note = RuvC_P5
  REGION 281..366: note = Tnp_domain
  SITE 289: note = Tnp_P1
  SITE 319: note = Tnp_P2
  SITE 327: note = Tnp_P3
  SITE 328: note = Tnp_P4
  SITE 340: note = Tnp_P5
MIERESTSVSDLSDIAVYLGLDVGKGEHHAVGLTPAGKKVHDRALPNSEPKLRELLDKLTAKHGQILVVVDQPASIGALPLTVARDAGCLVAYLPGLSMRRVADLYPGQAKTDARDAFIIADAARTMPHLLRDLKTDDETIAAPAMILGFDDDLAAEATRTVNRIRGLLTAIHPSLERAIGPKLAHPAVLDLLTRHGTPGQIQAARIGQITAALRERAPRMATRLATEIFDALAEQTVVVPGTDAAKIIIPGLATSLKTTLDQRKRLEAEIEDLLEAHPLSPVLTSMPGIGVRTAARILAEAGDATAFASAAHLASYAGLAPVTRRSGTSIRGEHPNRSGNKQLKRAFFLAAFAALRDPTSRAYYDRKINEGKRHNQALICLARRRCDVLYAMLKNGTFYEPQPTHTA

SEQ ID NO: 15609 - protein, 330 aa, unidentified
  source 1..330: note = protein_aec3ccf
  REGION 5..156: note = RuvC_domain
  SITE 8: note = RuvC_P1
  SITE 55: note = RuvC_P2
  SITE 95: note = RuvC_P3
  SITE 97: note = RuvC_P4
  SITE 100: note = RuvC_P5
  REGION 197..283: note = Tnp_domain
  SITE 204: note = Tnp_P1
  SITE 234: note = Tnp_P2
  SITE 242: note = Tnp_P3
  SITE 243: note = Tnp_P4
  SITE 256: note = Tnp_P5
MSGFVGIDVAAKTFDVVARIDGKANKVEQFSQTPDGHAAVVRKLQKLAPELVVMEATGIYYLDLAVALAKANLPVSVINPKSFHHFAAMKLNGNKTDAVDAALLAEFAQCMSPRLWNAPQDELLGLRDIGRQLNRLTASRTQAKNRLHALTSKSMTLPMLIEDEQDGIEQLERRIKRLTQAALALIAGNATLAAHFSHITAAKGIGETSAIAILAELCVLPSTMKSPQVSRYAGLDVRHTQSGSSVNKPARLSKAGNVYLRAALYMPAMSAVRHDVRAKAFYEALTGRGKKKIQAQCAVMRKYLTGIWACMQAQTAFDSTLLFSEIHIKN

SEQ ID NO: 15610 - protein, 371 aa, unidentified
  source 1..371: note = protein_26611de
  REGION 7..150: note = RuvC_domain
  SITE 10: note = RuvC_P1
  SITE 53: note = RuvC_P2
  SITE 88: note = RuvC_P3
  SITE 90: note = RuvC_P4
  SITE 93: note = RuvC_P5
  REGION 212..297: note = Tnp_domain
  SITE 220: note = Tnp_P1
  SITE 250: note = Tnp_P2
  SITE 258: note = Tnp_P3
  SITE 259: note = Tnp_P4
  SITE 271: note = Tnp_P5
MDNLKRIGMDTSKSVFQLHGVDEAEQPILRRKLRRRQVVDFFRKLPATQVGIEACGGSQYWARELAALGHDVKLLPAQHVKPYVRRNKNDAADAEAICEAMSRPRMQERFVPVKSAEQQAGLMLAGVRGQLIARRTQLSNMIRGHAAEFGLVAAKGLDKLEPLLARIATDETVPELARELFAELGEEYAWLGSKLRQVEARLLAWHRGNELSVRLAEIPSIGPICAAGLVMKVANPHAFRCARDFAAWLGLTPKDHSTAGKHRTSAITRAGDEDLRRLLVAGATAVIQQASKSRGKPMPWLIALIKRKPKKLAAVALANKVARIAWRLMVSGERYDRTHALTTRSSGAQEASLTLSARARRAASHVAARAA

SEQ ID NO: 15611 - protein, 373 aa, unidentified
  source 1..373: note = protein_f241b76
  REGION 7..148: note = RuvC_domain
  SITE 53: note = RuvC_P2
  SITE 88: note = RuvC_P3
  SITE 90: note = RuvC_P4
  SITE 93: note = RuvC_P5
  REGION 210..300: note = Tnp_domain
  SITE 218: note = Tnp_P1
  SITE 248: note = Tnp_P2
  SITE 256: note = Tnp_P3
  SITE 257: note = Tnp_P4
  SITE 269: note = Tnp_P5
MEQVIRIGMDTSKSVFQLHGVDALERPVLIRKLQRRAVVPFFARLAPVKVGLEACGGSHHWARTLSALGHDPVLMAAQHVKAYLRRGKHDAADAEANCEAMSRPRTRFVAVKSVEQQAGQMLFGVREQMVRRRTQLSNAIRGHAAEFGLVAAKGLAHVKPLLARVAADDGVPALAQELFNMLGEEYRATCTRLAALEKKLVAHYRQDETARRLAAMPGVGPIGATLLGIKVGDATAFRSGRDFAAWLGLTPKNHSTAGKTRLGVITRAGDEMLRQVLVVGATAHIQQVRRGRIAASPWLAALLARKPPKLAAVALANKNARFAWKMMVTGEPYRCDQAGSLAPASPPSRPSGAACGGGLRPALTAAPSDAAMP

SEQ ID NO: 15612 - protein, 347 aa, unidentified
  source 1..347: note = protein_ff0e827
  REGION 7..147: note = RuvC_domain
  SITE 10: note = RuvC_P1
  SITE 53: note = RuvC_P2
  SITE 88: note = RuvC_P3
  SITE 90: note = RuvC_P4
  SITE 93: note = RuvC_P5
  REGION 210..297: note = Tnp_domain
  SITE 218: note = Tnp_P1
  SITE 248: note = Tnp_P2
  SITE 256: note = Tnp_P3
  SITE 257: note = Tnp_P4
  SITE 269: note = Tnp_P5
MEHIIRIGMDTSKHVFQLHGVNAGEDPVLRKKLRRKEMVAFFEKAPPTVIAIEACGGSHHWARLLQSFGHEVKLIPPQFVKPYVKRGKNDAADAEALCEAMSRPTMRFVPVKTADRQTALMLAGMRDRLIRNRTQLANSIRGYAAEFGLTAAKGICKIEPLLERIAADETLPELARELFALHGAEYAQLQARLEEVDAKLMAWHRADECSRRLAQIPGVGPIGASLLMMKTPTPEGFRSSRHFAAWIGLTPKDHSTAGKVRLGVITRAGDEALRSTLVVGATALLRRVRDGRGRNSSPWLLDLLKRKPPKLVAVALANKIARIAWKMMVTGEAYRTNAVPPSMASAA

SEQ ID NO: 15613 - protein, 316 aa, unidentified
  source 1..316: note = protein_e38420e
  REGION 4..122: note = RuvC_domain
  SITE 26: note = RuvC_P2
  SITE 61: note = RuvC_P3
  SITE 63: note = RuvC_P4
  SITE 66: note = RuvC_P5
  REGION 185..270: note = Tnp_domain
  SITE 193: note = Tnp_P1
  SITE 223: note = Tnp_P2
  SITE 231: note = Tnp_P3
  SITE 232: note = Tnp_P4
  SITE 244: note = Tnp_P5
MLRRKVNRVQLAEYAATAPRCVVATESCPGSQYWGRIFTQAGHEVRILPAQFVKPYLKANKNDFNDAEAIAEAGGRASMRCVPLKTNEQLELQALHRVRRRFVIERTAVINQMRALLLEHGIVIPLGRALFARRLPTIFEDAENGLSPRLVVLLHRLRQRWLAIDVEIDQATRDLTEWAEQSDLCRRATTVPGIGPMISTAVVAAVGDGRMFARGRDMAAWLGLVPSQYSTGGKPTLGRISKRGNTYLRQLFIQGAHTLYLNMKRDRSYLGEWLRQVEARSHRNVAIVALANKMVRICWKVLTSEQLYQPYPSRVA

SEQ ID NO: 15614 - protein, 315 aa, unidentified
  source 1..315: note = protein_f6a53a3
  REGION 9..151: note = RuvC_domain
  SITE 12: note = RuvC_P1
  SITE 56: note = RuvC_P2
  SITE 96: note = RuvC_P3
  SITE 98: note = RuvC_P4
  SITE 101: note = RuvC_P5
  REGION 192..276: note = Tnp_domain
  SITE 200: note = Tnp_P1
  SITE 229: note = Tnp_P2
  SITE 237: note = Tnp_P3
  SITE 238: note = Tnp_P4
  SITE 249: note = Tnp_P5
MHHPIPQTAGIDIAKDQLDVCLYPDGATRRFPNDAKGHRALIAWLAAYSIQRVVFEPTGAYHRVLERSLASADLPLAKINPRHARRFAQALGQLAKTDRLDAALLARFGALLEPPTRPVLSPTLEAMKELLVARQALIKDRTAALNRQKVVGSPLLRRQLEQRLRQVARHLAAIDAQLHSLCLGDADLTPRLAILMSIPGIAQATALSLLVEMPELGSLDQSQVASLAGLAPVARDSGASRGRRTIRGGRAHLRQALYMPALVAARFNPDLKAKYQALRAAGKPVKVALTAIMRKLIILANALLRDQRNWSPKPA

SEQ ID NO: 15615 - protein, 342 aa, unidentified
  source 1..342: note = protein_4a08703
  REGION 7..148: note = RuvC_domain
  SITE 10: note = RuvC_P1
  SITE 53: note = RuvC_P2
  SITE 88: note = RuvC_P3
  SITE 90: note = RuvC_P4
  SITE 93: note = RuvC_P5
  REGION 211..296: note = Tnp_domain
  SITE 219: note = Tnp_P1
  SITE 249: note = Tnp_P2
  SITE 257: note = Tnp_P3
  SITE 258: note = Tnp_P4
  SITE 270: note = Tnp_P5
MNEVSIVGVDLAKRVFQLHGSRADGTVAFRKKVTRGHVLTVLAGLPKCIVAMEACATAHFWAREIGKLGHSVRLIPPVYVKPFVKRQKNDAADAEAIAEAASRPTMRFVQPKSEQQQARAMVFRTRDLLVRQRTQLINALRAHLAEHGVIAAQGITNVAALGALIEQADCDLDLMVVETARLYLDQIEVLSDRIATLEKVLKLEAARSQSAVRLMTMPGIGPVTAMAVDAFAPSMTAFKRGRDFAAWLGLVPRQHSSGGKQVLGRTSKMGQRDIRRLLIIGAMTVIRWADRKGVSESSWLGRMLSRKPRMLVAIALANKMARSIWAMMTKNEDYRTPALSAA

SEQ ID NO: 15616 - protein, 344 aa, unidentified
  source 1..344: note = protein_38c0a86
  REGION 7..147: note = RuvC_domain
  SITE 10: note = RuvC_P1
  SITE 53: note = RuvC_P2
  SITE 88: note = RuvC_P3
  SITE 90: note = RuvC_P4
  SITE 91: note = RuvC_P5
  REGION 210..297: note = Tnp_domain
  SITE 218: note = Tnp_P1
  SITE 248: note = Tnp_P2
  SITE 256: note = Tnp_P3
  SITE 257: note = Tnp_P4
  SITE 269: note = Tnp_P5
MKQITTIGLDLAKQFFQVHAADAEGTPILNRKLRRAEVLRFFEKQPACLVGIEACGSAHHWAREIGALGHEVRLIPPAYVKPFVKRGKTDDAEAISEAVTRKTMRFVPVKSAEQQAAGMVLKTRALLVRQQTQAINALRAHLSDLGIIAGIGTTKIVGLMAIVRDETDKRLPKAARFALTTIADQIEALALQINKLERELVAEAKRDQDMRRLTTIPGVGAITAASIKALIPDPSGFKSGRHLAAWLGLTPKPHSSGGKERLVGISKMGNPELRSLLVLGATAVLRYVRGHANAPKWLGDLLGRRPFKVAAVALANKMARIIWALLTKGGVYRGLERAKDVASA

SEQ ID NO: 15617 - protein, 267 aa, unidentified
  source 1..267: note = protein_5874f0c
  REGION 1..75: note = RuvC_domain
  SITE 15: note = RuvC_P3
  SITE 17: note = RuvC_P4
  SITE 20: note = RuvC_P5
  REGION 139..224: note = Tnp_domain
  SITE 147: note = Tnp_P1
  SITE 177: note = Tnp_P2
  SITE 185: note = Tnp_P3
  SITE 186: note = Tnp_P4
  SITE 198: note = Tnp_P5
MIAPQFVKPYVKGGKNDANDAEAICEAGSRPTMRYVPVKSEEQQAALSVHRIRSRAIRARTALANEVRGLLGEFGLIAARKGVPATRALLAEVLEEDSSLPVAMRGLMSELQDELQEKDKRIAHLDRLIQQQARQDERVQRLMQIEGLGPISATAMVAAVGDASQFKSGRQLAAWLGLVPNQHSSGGKERLGSISKRGDTYLRTLLIHGARSALNASAKKTDPRSIWINEVKSRRNTNIATVALANKNARIIWALLSKGESYHNAAC

SEQ ID NO: 15618 - protein, 343 aa, unidentified
  source 1..343: note = protein_e119a66
  REGION 6..147: note = RuvC_domain
  SITE 9: note = RuvC_P1
  SITE 52: note = RuvC_P2
  SITE 87: note = RuvC_P3
  SITE 89: note = RuvC_P4
  SITE 92: note = RuvC_P5
  REGION 211..296: note = Tnp_domain
  SITE 219: note = Tnp_P1
  SITE 249: note = Tnp_P2
  SITE 257: note = Tnp_P3
  SITE 258: note = Tnp_P4
  SITE 270: note = Tnp_P5
MQIRSVGIDLGKTTFHLIALSAAGKVLLRKKFTQKQLITFTANLQTSLIGMEACSGAHFLGRVLRQQGHNVKLIPAQFVKPFVKSNKNDFLDAEAIAEAVDRQNMRFVPIKTDDQLDLQAMHRVRDRLIARRTSVINQLRAFLLERGMTFAKTPAKLKEAMPEILENADANLTPRMRNLVSLLWSEWKDLEQQIVAMNEEVEQIASSDPACQRLRQIPGIGPLVATAIVAAIGNGAAFQKGREFASWIGLVPRQHSTGGKARLFGISKRGNSYLRKILVHGARSAVLRVKRERSPFGGWLDALKQRAPINVVITAAANKLARIAWAVLSSGQDYRTATSMPSV

SEQ ID NO: 15619 - protein, 429 aa, unidentified
  source 1..429: note = protein_f0d6025
  REGION 15..166: note = RuvC_domain
  SITE 18: note = RuvC_P1
  SITE 67: note = RuvC_P2
  SITE 105: note = RuvC_P3
  SITE 107: note = RuvC_P4
  SITE 110: note = RuvC_P5
  REGION 227..313: note = Tnp_domain
  SITE 235: note = Tnp_P1
  SITE 266: note = Tnp_P2
  SITE 274: note = Tnp_P3
  SITE 275: note = Tnp_P4
  SITE 286: note = Tnp_P5
MRTESTPGSRGPVFCGVDTHADSHWLCVLDWRGRRVLSRRFPADAAGYEALAGAIAAAGEPACVAMEGTSSYGAGLTRHLASLGMPVREALSPAGMQRRRPGQGKCDEADAERAARAAMSGSKLGTPKSQDGWVDGVRCMLAARSGAVEARTSAINTARSLLTTASEGLRSRFRGMAGPRLMEELPSVRAEGALGAALGALADLWAAARDAALDMERAIEASLEENCPALLAMYGCGPVSAAKLAVAAGDNPGRLRSEASFAAICGACPIPASSGKTVRHRLNRGGDRQANSALHEIARQRVMRDPETAEYAERARARGKSDREVMRCLKRYMAREAYRALMRSHEIRRPEDASELVAARRAAKVSQVRAASILGTSEKYISMLERGQRELKPIRRAYEAWVEAGLPLNWDRQAFEAERKMDSKKHLAK

SEQ ID NO: 15620 - protein, 393 aa, unidentified
  source 1..393: note = protein_2fc30d9
  REGION 4..163: note = RuvC_domain
  SITE 7: note = RuvC_P1
  SITE 60: note = RuvC_P2
  SITE 101: note = RuvC_P3
  SITE 103: note = RuvC_P4
  SITE 106: note = RuvC_P5
  REGION 266..355: note = Tnp_domain
  SITE 274: note = Tnp_P1
  SITE 304: note = Tnp_P2
  SITE 312: note = Tnp_P3
  SITE 313: note = Tnp_P4
  SITE 328: note = Tnp_P5
MICVGIDVAKDKHDCFFLSSEGEVLADVFTIPNNAEGFDLLLQTIRRCTRPQDKIKVGLEATGHYSYNILGFLLDKGMPTYVINPLHTNLYRKSLSLRKTKTDRVDARTIATMLMSDVDLKSYTDTAYHNEELKSLTRYRFDKVRERAKWKQSVSRLVTILFPELEKLVPTLHIPSVYALLSEFPGAKQLSSAHLTHLKTLLQDASNGHYKQDMATELRDAARHSVGSVMPAKSLELQHTIRLIRELDAEIDDIEAAIQAMMDEIQSPITTVPGIGVRMGAMILAEIGDFSRFDSPDKIVAYAGMSPSTYQSGQLSLSGAYSHMEKRGSRYLRYALYNATKYVCLWDPTFAAYLAKKRAEGKHYNVAISHAAKKLVRLIYAMENSRRPYNAAT

SEQ ID NO: 15621 - protein, 341 aa, unidentified
  source 1..341: note = protein_ec002f9
  REGION 7..149: note = RuvC_domain
  SITE 10: note = RuvC_P1
  SITE 53: note = RuvC_P2
  SITE 88: note = RuvC_P3
  SITE 90: note = RuvC_P4
  SITE 93: note = RuvC_P5
  REGION 211..296: note = Tnp_domain
  SITE 219: note = Tnp_P1
  SITE 249: note = Tnp_P2
  SITE 257: note = Tnp_P3
  SITE 258: note = Tnp_P4
  SITE 270: note = Tnp_P5
MGEVSTIGLDLAKSVFQVHGADASGAVLFRRKLRRHQVLTFFAGQPPCTVAMEACGSSHHWAREIGRLGHAVRLIPPAYVKPFVKRQKNDAADAEAICEAAQRPTMRFVAPKSEQAQAAALVFRARDLLVRQRTQIINALRGHLTEFGIVVAKGPAHVPHLVRTVEDLDGPIPELARPVLQMLVDTLRRLDKQVADLDREVSQRATENETARRLMTIPGVGPVTAVALAALAPPAETFKCGRDFAAWVGLTPLQHSTGGKQKLGATSKMGERTLRRLLIIGASAVVRWAARNGAPAGSWIARMVARKPPMLVRVALANKMARIAWALMARGEVYRAPAVAA

SEQ ID NO: 15622 - protein, 347 aa, unidentified
  source 1..347: note = protein_bde322e
  REGION 7..149: note = RuvC_domain
  SITE 10: note = RuvC_P1
  SITE 53: note = RuvC_P2
  SITE 88: note = RuvC_P3
  SITE 90: note = RuvC_P4
  SITE 93: note = RuvC_P5
  REGION 212..304: note = Tnp_domain
  SITE 220: note = Tnp_P1
  SITE 250: note = Tnp_P2
  SITE 258: note = Tnp_P3
  SITE 259: note = Tnp_P4
  SITE 271: note = Tnp_P5
MKEVTTIGLDLAKLVFQAHGSDAEGNTLFNRKLRRAEVLRFFAKLPPCLVGMEACGSAHYWAREISAFGHEVRLIPAQYVKPFVKRGKTDAADAEAISEALTRKTMRFVPIKSAEQQASVMVFHARALLVRQRTQAINSLRAHMSELGIIASVGIANIKPLAEIVRDESDPRLPAAARFALEEIVDLIDRLAVRIEKLERAMIAVARQDEDMRRLATIPGVGAITAMAIKAFVPDPAGFKSARHFAAWIGLTPKSHSTGGKQRLGRISKMGNSQMRSLLVVGAASTLRHVRKDDKARPWLRELLTRRPFKVVAVALANKTARVIWSLLIRGGVYRGPTTLAAESVPA

SEQ ID NO: 15623 - protein, 343 aa, unidentified
  source 1..343: note = protein_06f1d0b
  REGION 7..149: note = RuvC_domain
  SITE 10: note = RuvC_P1
  SITE 53: note = RuvC_P2
  SITE 88: note = RuvC_P3
  SITE 90: note = RuvC_P4
  SITE 93: note = RuvC_P5
  REGION 212..306: note = Tnp_domain
  SITE 220: note = Tnp_P1
  SITE 250: note = Tnp_P2
  SITE 258: note = Tnp_P3
  SITE 259: note = Tnp_P4
  SITE 271: note = Tnp_P5
MEKTITIGLDLAKSVFQVHGIAEDGRVVVRKALRRSQVLDFFRGLEPCLVGLEACASAHHWANAIGHFGHTVRMMPAAYVKAYVKRNKTDAADAEAICEAVTRPTMRFVPIKTPNEQAACMVLKTRELFVRQRTQTSNAMRAHMAEFGIIAATGMASIDKLIAILRDEADTRLPLAARAALLEVAEQIEQLSARIEALDTKIVKAVKEDETARRLTSIPGVGPIIAASVRAMIQDPGAFRTGRDLAAWIGITPSARSSGGKERLGGITKRGNTQLRSLLVVGATSILKQARRGLKMPAWVVSLMARKPYKVAAVALANKMARTIWALMVKGGTYRAPTVMVGA

SEQ ID NO: 15624 - protein, 344 aa, unidentified
  source 1..344: note = protein_dc36af7
  REGION 9..150: note = RuvC_domain
  SITE 12: note = RuvC_P1
  SITE 55: note = RuvC_P2
  SITE 90: note = RuvC_P3
  SITE 92: note = RuvC_P4
  SITE 95: note = RuvC_P5
  REGION 213..297: note = Tnp_domain
  SITE 221: note = Tnp_P1
  SITE 251: note = Tnp_P2
  SITE 259: note = Tnp_P3
  SITE 260: note = Tnp_P4
  SITE 272: note = Tnp_P5
MTKTPIAVLGIDLGKNSCSLAGMDTTGAVVLRKRMTRDAIVTFATTLPSCVIAMEACCGAHFLGRTLALHGHTIWLMSPENVQPYVKAQKTDDRDAEAIAEAATRSTMRFVSLKSEAQLDLQILHRVRERLVNARTALINQLRAVLLERGIILPKGRINLMRRLEELMAGDPAVSARTGALLADLRAEWAGLDQRIKAYDDELAALTREDEQARRLATIPGIGVINATALLAAVGDGSAFAKGRDLAAWLGLTPRQHSTGGKTKLLGISKRGNGYLRKQLIHGARAAMPHLAARPSQLGGWLQAMLTRAHPNVVVVALAAKLARIAWAVLRHEKDFDRQAPVAA

SEQ ID NO: 15625 - protein, 396 aa, unidentified
  source 1..396: note = protein_0fd0470
  REGION 10..163: note = RuvC_domain
  SITE 13: note = RuvC_P1
  SITE 61: note = RuvC_P2
  SITE 102: note = RuvC_P3
  SITE 104: note = RuvC_P4
  SITE 107: note = RuvC_P5
  REGION 225..310: note = Tnp_domain
  SITE 233: note = Tnp_P1
  SITE 263: note = Tnp_P2
  SITE 271: note = Tnp_P3
  SITE 272: note = Tnp_P4
  SITE 283: note = Tnp_P5
MKEQTERVVIGMDPHKRSVTIEVMAADETVLGGGRYATDEAGFAAMRRYVSQFTDRIWAIEGCSGIGHHVAVRLLATGEEVVDVPPKLSARTRVLATGQGRKTDATDAHSVALVGTRMAGLRPVVNDEQLAVLRILVDRRRSLGEDHTRMIAQLHQLLLELIPGGVKKDLSAAQAKALLAKVRPRDTVGKTRRRVAAELISDLERIYQRKKAANKELTQLLAATGTTLTDLPGIGPSGAARLLVEVGDITRFPDRDHFASWNGTAPIDASSGDQIRHRLSRAGNRQINRVLHIMATVQLRNPGEGRAYYDRRKAEGKTSMEAMRALKRRLSNIVYKTMLDDTITQPAAGARTGPGGQRGSDSDSSATGSQPQHRHFGQATPGPVTKQPKPALPKVS

SEQ ID NO: 15626 - protein, 321 aa, unidentified
  source 1..321: note = protein_e59841e
  REGION 4..148: note = RuvC_domain
  SITE 7: note = RuvC_P1
  SITE 52: note = RuvC_P2
  SITE 92: note = RuvC_P3
  SITE 94: note = RuvC_P4
  SITE 97: note = RuvC_P5
  REGION 191..278: note = Tnp_domain
  SITE 199: note = Tnp_P1
  SITE 229: note = Tnp_P2
  SITE 237: note = Tnp_P3
  SITE 238: note = Tnp_P4
  SITE 251: note = Tnp_P5
MTYIGIDVSKDSFVVAYSPDKNSKTKTFKNTTKGIHEFIRTISKDEHHCVMEATGNYSALLVYLLSEAGITTSLENPLKVKNFARAMLSTIKTDEIDARLIALYGEKMQPAPYKLRSDAILTLKQKRTVIRQLKKQLIATRNLKGSMEALPFFDAKCRKSVEKTIAFLEKQIIDLEEDLASLAKSEYKKQMDLLTSVKGIGITLAAALIMATGGFTYFDNAKQLTRHLGLSPTYQQSGTSVNFKGHINRNGDSSLRSQLYVAAFSSIRCNTECRACYDRLRSNGKPGKVAVIAVANKLIRQAFAVVTQEKPYVDGYISSKK

SEQ ID NO: 15627 - protein, 317 aa, unidentified
  source 1..317: note = protein_6fdbb6d
  REGION 8..150: note = RuvC_domain
  SITE 11: note = RuvC_P1
  SITE 52: note = RuvC_P2
  SITE 92: note = RuvC_P3
  SITE 94: note = RuvC_P4
  SITE 97: note = RuvC_P5
  REGION 189..274: note = Tnp_domain
  SITE 197: note = Tnp_P1
  SITE 226: note = Tnp_P2
  SITE 234: note = Tnp_P3
  SITE 235: note = Tnp_P4
  SITE 247: note = Tnp_P5
MQASTLCIGVDVAKAELVVAVAGQRPYSVPNEAASISRWLRTVPAHALIAMESTGRYHGLLAGLANQMGLNVYVLNARDVFFYARALGTRAKTDGVDATVIARYLSERHLQLHPWRPADSTHRQVQELLTRRAQVVMHRSALCQAFKATDLQDSIDTSALHGAFDALLRSIDAQVQRLIASDTQLAEGYHRLCTITGIGAQTGALLATLLSRIPFANADALVAYSGLDPRPNDSGARRGRRRLSKKGPAFLRRQMYLAGLAASHSKALGPLYRAIRAKGFASTEAIVILGRKLLRVAFAVWKGSEGFDAARFAPRTT

SEQ ID NO: 15628 - protein, 318 aa, unidentified
  source 1..318: note = protein_7fb2274
  REGION 7..149: note = RuvC_domain
  SITE 10: note = RuvC_P1
  SITE 53: note = RuvC_P2
  SITE 88: note = RuvC_P3
  SITE 90: note = RuvC_P4
  SITE 93: note = RuvC_P5
  REGION 201..271: note = Tnp_domain
  SITE 223: note = Tnp_P2
  SITE 231: note = Tnp_P3
  SITE 232: note = Tnp_P4
  SITE 244: note = Tnp_P5
MNKVAIVAIDLGKLTFHVHEQDDHGHPLLRKKFKRVELLQHLANLEPCIVVMEACGGAHFMAQEVAKLGHSPKLIAPHLVRPYVKSNKNDFADAEAICEAASRPTMRFVPVKNQTQQALAMLNSVRDSLIKDRTATVNRIHAAFLEVGISLTPGYKSLKDIPALLEASSFHGLIRKLVADLYEHYLYLNLRIKVLDKEVDCQAAEVGDGKQFKCGRDYSASIGLVPKQHSTGGRTVLLGISKRGDRNQRRLFVQCAQTYVNRLDRQEGKLADWARKLLASHRHCNLVVCALANKFARIAWSIAANHTVFDAGPSAMNA

SEQ ID NO: 15629 - protein, 404 aa, unidentified
  source 1..404: note = protein_366d007
  REGION 6..161: note = RuvC_domain
  SITE 9: note = RuvC_P1
  SITE 58: note = RuvC_P2
  SITE 98: note = RuvC_P3
  SITE 100: note = RuvC_P4
  SITE 103: note = RuvC_P5
  REGION 269..355: note = Tnp_domain
  SITE 277: note = Tnp_P1
  SITE 308: note = Tnp_P2
  SITE 316: note = Tnp_P3
  SITE 317: note = Tnp_P4
  SITE 328: note = Tnp_P5
MNQFFAGLDWGSTAHAACVVDAQGGVVVRLEVGHDAAGLRRLREALGRVAPTPDLPIAIERPSGLIVDTLLEAGHPVVPIHPNVVKACRPRYRAAGGKHDLGDAYLLADVLRTDGHRFRPLVPQSDAIKALRALVRTRDDLVAERIALANQLRALLDTFWPGAAAIFADIDSPIALAFVSRYPTPTRAARLGEKRLASFLAGEQYCGRRRPAELLARLRASPKGQAAPAEEDAKGELVRTLARILSPLVAEIAKLTSRIEHEVAQIAEGRLIMALPRTGRLNAAQILAELGDVRERFATPDQLAAEAGVAPVTYQSGKSRCVAFRWACNHRLRRAITTWANNSRHASPWAKHVYAQARARGCDHPHAIRILARAWVRILWKTWTTGIPYEPHKHTSAATFLKAA

SEQ ID NO: 15630 - protein, 320 aa, unidentified
  source 1..320: note = protein_ee69b30
  REGION 7..159: note = RuvC_domain
  SITE 10: note = RuvC_P1
  SITE 61: note = RuvC_P2
  SITE 101: note = RuvC_P3
  SITE 103: note = RuvC_P4
  SITE 106: note = RuvC_P5
  REGION 196..280: note = Tnp_domain
  SITE 204: note = Tnp_P1
  SITE 233: note = Tnp_P2
  SITE 241: note = Tnp_P3
  SITE 242: note = Tnp_P4
  SITE 253: note = Tnp_P5
MSDEIFVGVDVCKAWLDTAQVCSSSAAVPGELTARVNNDEAGRAELVNQLKRLSPTLVVLEATGGFEAALASELCAAGIAVAVVNPKRVRDFARSMGVLAKTDRLDARVLAKFALAARPQVYALPDETQQEITELVDRRAQLVTMRAQEKNRLATVKQVARTSVRHHIEWLDKRIKEIDKDLDGRLKDSTIYQPKYELLDSVPGIGRVTISTLLGRLPELGTLNRKRLAALVGLAPMADDSGRRHGQRYIQGGRADVRAVLYMAALSARRCDGPIKDLYSRLRASGKPYKVAMTACMRKLLIILNAILKSGQPWRLIESA

SEQ ID NO: 15631 - protein, 325 aa, unidentified
  source 1..325: note = protein_b22dd64
  REGION 8..158: note = RuvC_domain
  SITE 11: note = RuvC_P1
  SITE 55: note = RuvC_P2
  SITE 95: note = RuvC_P3
  SITE 97: note = RuvC_P4
  SITE 100: note = RuvC_P5
  REGION 195..281: note = Tnp_domain
  SITE 202: note = Tnp_P1
  SITE 232: note = Tnp_P2
  SITE 240: note = Tnp_P3
  SITE 241: note = Tnp_P4
  SITE 254: note = Tnp_P5
MQSQTNYTGIDISKLFFDVAFQIEGRNYHYKFGNDLPGFKSLLKVLPTDSHVVMEASGPYYLKLACFLEANNIWVSVVNPLVIRRFCQMRMSRTKTDKKDSGMIAEYGRTEKPGLWQSPKQHVITLQQLETLLSNLNKEKTALSNQLESFNSSGMLDGKLKKTINKELEHKQALIEKLTKEMHTLAEVHYSEMLINLGSIPGMGKKTAMMLIVLSGGFNRFDDYRKLSSYIGICPRIYDSGTSVKGKARICKMGMSKIRAMLYLCAWSAKRCNKACRELYGRLINNGKAKKQALIAVANKLLKQAFAIATQKTKYNENYSNIICF

SEQ ID NO: 15632 - protein, 340 aa, unidentified
  source 1..340: note = protein_319db4c
  REGION 4..158: note = RuvC_domain
  SITE 7: note = RuvC_P1
  SITE 55: note = RuvC_P2
  SITE 96: note = RuvC_P3
  SITE 98: note = RuvC_P4
  SITE 101: note = RuvC_P5
  REGION 221..306: note = Tnp_domain
  SITE 229: note = Tnp_P1
  SITE 259: note = Tnp_P2
  SITE 267: note = Tnp_P3
  SITE 268: note = Tnp_P4
  SITE 279: note = Tnp_P5
MFVIGIDPHRGSHTAAVLDGTEELLDEFRVVADRRQRQRLLEWAAPFMPRVWAVEGATGTRALLAQQLVAAGEQVLDVPPTLSARVRLLDSGRSDKTDSHDARAVAVVALRHRSLWPVRAEDEDHVAVLRLLAKRHHDLVAARTRAVCRLHTTLCHLAEGHFPKRMKASQAAAILARIRPSVPVSVERKALARDLLGEIRRVDRDLAGLVARIKTAATASGTTVTDVFGVGPVVAAYLIGHSGDIRRFPTAGHYARYNGTAPIQASSGPTTRHRLNPRGNRQLNHALHMAAVTQVRNDTPGRAYYLRKQAAGHSRKEAIRALKRRISDAVYRQLVADSHR

SEQ ID NO: 15633 - protein, 344 aa, unidentified
  source 1..344: note = protein_b7d7d91
  REGION 13..155: note = RuvC_domain
  SITE 16: note = RuvC_P1
  SITE 59: note = RuvC_P2
  SITE 94: note = RuvC_P3
  SITE 96: note = RuvC_P4
  SITE 99: note = RuvC_P5
  REGION 218..304: note = Tnp_domain
  SITE 226: note = Tnp_P1
  SITE 256: note = Tnp_P2
  SITE 264: note = Tnp_P3
  SITE 265: note = Tnp_P4
  SITE 277: note = Tnp_P5
MTQTISNAEVHTLAIDLAKTSFHIHAADRSGVKIHSKPVNRSKLIQYVSNLQPCTVVMEACGGANHFARKFTAMGHTVKLIAPQFVKPFVKSNKNDAFDAQAICEASQRPDMRFVSPKDTAQQDIQSIHRARSLVVAHRTALSNQIRGLLTEYGIVLPQGISILRRSLPSIIDSDNRELSILFRELLQNLYSALITVDQQVESFNQKIELLARQDERCVRLQTIPGIGPMAATALVATLGDGSAFKDGREASAYLGLVPRQNSTGGRSTLLGISKRGDQYLRSLSIHGGRAVVRTSPKHNDYRSNWITDLARRRNVNVASVAVANKNVRTAWKILQDGNNYLAA

SEQ ID NO: 15634 - protein, 322 aa, unidentified
  source 1..322: note = protein_1aa90cc
  REGION 9..159: note = RuvC_domain
  SITE 12: note = RuvC_P1
  SITE 56: note = RuvC_P2
  SITE 96: note = RuvC_P3
  SITE 98: note = RuvC_P4
  SITE 101: note = RuvC_P5
  REGION 195..279: note = Tnp_domain
  SITE 203: note = Tnp_P1
  SITE 232: note = Tnp_P2
  SITE 240: note = Tnp_P3
  SITE 241: note = Tnp_P4
  SITE 252: note = Tnp_P5
MSQPGPLCVGIDVSKATLDIAANSDITPFTASNDTDGFDAIIAELSKRPVSLVLMEATGGLEAAVACTLQAEGFDVTVINPRQARDFARAMGYLAKTDQIDARMLAQMAEVINRHPERERFIRSLPDVERQVLAAMIVRRRQLIAMLVAERNRLYTAHPQSKKSINIIVKALEDELARIDEDMNNHIRNHFKDLAARLSSIKGVGTMTVAALLAEVPELGSLSRRSISALVGVAPINRDSGTMRGRRTIFGGRNGVRAALYMAALVATRFNPVIKAFYMRLLVAGKPKKVALVACMRKLLTILNAMLRKNEEWSESYHHVVP

SEQ ID NO: 15635 - protein, 346 aa, unidentified
  source 1..346: note = protein_805ed55
  REGION 7..147: note = RuvC_domain
  SITE 10: note = RuvC_P1
  SITE 53: note = RuvC_P2
  SITE 88: note = RuvC_P3
  SITE 90: note = RuvC_P4
  SITE 93: note = RuvC_P5
  REGION 210..295: note = Tnp_domain
  SITE 218: note = Tnp_P1
  SITE 248: note = Tnp_P2
  SITE 256: note = Tnp_P3
  SITE 257: note = Tnp_P4
  SITE 269: note = Tnp_P5
MNQIIRIGMDTSKHIFQLHGVDAAEQAVLRKRLRRKEVLAFFAKLPPTVIGMEACGAAHYWGRELRKLGHEVKLMAPQHVKAYVKRNKNDGRDAEGLCEAMSRPTMQFVPVKTEEQQAALMLAGVRQQLIARRTQLSNAIRGYAAEFGVTAAKGLDKIEPLLARIAQDESLPALARELFAIEGREYAQVQAELKAIEAKLMAWHRANAASRRLAQIPGVGPIGATALVMKTPDPRAFPSGRHFAAWLGLTPKDHSTAGKTRLGKITRAGDEVLRSLLVAGATAVIQQVRRGRGRPSPWLVALLKRKPPKLAAVALANKIARIAWKLMTTGESYDGARMPGASALAA

SEQ ID NO: 15636 - protein, 386 aa, unidentified
  source 1..386: note = protein_84703c5
  REGION 37..185: note = RuvC_domain
  SITE 79: note = RuvC_P2
  SITE 118: note = RuvC_P3
  SITE 120: note = RuvC_P4
  SITE 123: note = RuvC_P5
  REGION 255..343: note = Tnp_domain
  SITE 263: note = Tnp_P1
  SITE 292: note = Tnp_P2
  SITE 300: note = Tnp_P3
  SITE 301: note = Tnp_P4
  SITE 313: note = Tnp_P5
MPQLNDLSRSLITLEQDATLIAVIEMGQSSWLVAGIVPGVERHPLKKLAVDESALLKLLNRWREEAEQAGHRIKRIAVAFEAGRDGFWLARWLRTRGIETHVIHASSVAVSREHRRAKTDRLDTELLKRAFLGWLRGERDHCKMVAIPTTKDEDAKRPNRERESLVGEQSRIVNRMKATLTRLGIRGFNPKLKKAAERLDGLRTPEDAPIPPNTLAELRRDMVRRRLVSDQIRQIEGARLERLEQAPCDGPHAMVRLLARVIGVGIETADMLVQEVLSRNMRDRRAVARYAGLTGSPDESGQKRREKGLARSGNARVRRGMIQLAWRFLMFQKDSALAQWFRARTENARGTRKTMIVALARKLLIALWRLVRDGVVPDGVILRPAQ

SEQ ID NO: 15637 - protein, 354 aa, unidentified
  source 1..354: note = protein_92ccb3a
  REGION 7..149: note = RuvC_domain
  SITE 10: note = RuvC_P1
  SITE 53: note = RuvC_P2
  SITE 88: note = RuvC_P3
  SITE 90: note = RuvC_P4
  SITE 93: note = RuvC_P5
  REGION 212..298: note = Tnp_domain
  SITE 220: note = Tnp_P1
  SITE 250: note = Tnp_P2
  SITE 258: note = Tnp_P3
  SITE 259: note = Tnp_P4
  SITE 271: note = Tnp_P5
MEKVSTIGLDVAKHVFQVHGVDAEGAVVVRRKLRRDDVVAFFASLPACLIGIEACATSHHWARVLMGLGHKVRLMPASYVKSYVKRQKNDATDAEAICEAVTRPSMRFVPVKSEEQQSVLMLHRVRELLVRQRTMLVNALRGHLAEFGIVTRQGIAGVGMLIGLAEDENNELVPPLARDALVPLVEQLRAAHEKVRELDHQIQDWHRSNELSRRLETIPGIGPITASAIVATVTDASLFKSGRQLAAWLGLVPRQNSSGGKDRLGRISKQGDPYIRRLLVVGAHAVLRFSRKGKAAPTRWAAELLTKKPYNVVAVALANKMARIVWALMTTGSASQLRRQRDVVAEETQRLVRC

SEQ ID NO: 15638 - protein, 391 aa, unidentified
  source 1..391: note = protein_f3925db
  REGION 6..163: note = RuvC_domain
  SITE 9: note = RuvC_P1
  SITE 61: note = RuvC_P2
  SITE 102: note = RuvC_P3
  SITE 104: note = RuvC_P4
  SITE 107: note = RuvC_P5
  REGION 266..351: note = Tnp_domain
  SITE 273: note = Tnp_P1
  SITE 303: note = Tnp_P2
  SITE 311: note = Tnp_P3
  SITE 312: note = Tnp_P4
  SITE 324: note = Tnp_P5
MSLYFCGIDISKYKHDCCIICAANQQVVAKLTFKNDRTGFEKFLSTLNSLQDSEDIRIGFESTSHYALNLELFLESSNLSFMEVNPVLISEYRKSSSLRRTKTDSVDCETIARWLMSVEYKPHTRGFYHAYSLKSLTRLRDRLIRQRSLYLVKITDVLDHTFPEFKPFFNEKFSATALYLLETYGSAQKMSHMNQASYEKLRSISRGKFSIQKFFSLKELAANSVGTNNTIFDLELSSLISLYKNLQIEINKIEAEIIRLVDELHLHFTSIPGIGPLSAAVIYSEYGDISSFSTPAKMLAYAGLEPGIDESGTESYKGRMVKHGSSMLRFTLLNCCLPTIRFDLTFAQYYAKKRREGKSHRVAMSHVAKKLVRVIHALERQGIDYDPIKLR

SEQ ID NO: 15639 - protein, 395 aa, unidentified
  source 1..395: note = protein_e476a59
  REGION 6..159: note = RuvC_domain
  SITE 9: note = RuvC_P1
  SITE 57: note = RuvC_P2
  SITE 98: note = RuvC_P3
  SITE 100: note = RuvC_P4
  SITE 103: note = RuvC_P5
  REGION 221..306: note = Tnp_domain
  SITE 229: note = Tnp_P1
  SITE 259: note = Tnp_P2
  SITE 267: note = Tnp_P3
  SITE 268: note = Tnp_P4
  SITE 279: note = Tnp_P5
MTGVIIGVDPHKLSATIEVVDHHEKLLGSGRFTTDQAGYTAMRRYVAAWPDRMWAVEGSNGAGRPLAQRLLEAGERVVDVPAKLSARVRLFDTGHNRKTDARDAHSIAAVAVRTKTLRVLRVDGELEALRMLADRREELTRSRVQTVNRLQRLLSELLPGQAKRDITTAQAKALLATVRPRDIAGKTRRRIAAEELAELVAIEVKMKKSTAELKALVAARGSRLMDLHGVGPVVAARTLADVGDVTRFADRNRFASWTGTAPLDASSGEQIRHRLSRAGNRRMNHMIHIAAISQIRLETPGRDYYRRKLADGKTKLEALRCLKRRISDAIYRQLVADAQAAEGAGPGGHRGASQESSAVDSHPPHRHFGSATPGSATPTLRPTTPTRKRQLRPPA

SEQ ID NO: 15640 - protein, 344 aa, unidentified
  source 1..344: note = protein_7840163
  REGION 6..147: note = RuvC_domain
  SITE 9: note = RuvC_P1
  SITE 52: note = RuvC_P2
  SITE 87: note = RuvC_P3
  SITE 89: note = RuvC_P4
  SITE 92: note = RuvC_P5
  REGION 210..293: note = Tnp_domain
  SITE 218: note = Tnp_P1
  SITE 248: note = Tnp_P2
  SITE 265: note = Tnp_P5
MDRTTYGLDLAKNVMQLHWVDSETGEIGRKKLARAKLGEFFAQLQPARVAMEACGSAHHWARVLGGLGHQVELLPARQVRAFVRSNKDDAADARAIWLAAQQCDIRRAPVKTVEQQAVMSLHRARSHWVSVRTATLNMLRGLLYEFGVLLPGKKAGLKTMSARRAQVDDQLPPLMRRLVDLQLETLKGIERSIDQLEAEIAEQQRKGDTARTLREVPGIGVLGATALAATLGDASNWRSGREFAASLGLVPAHTKTRIGHLSKRGDPYLRTLLIHGARAVITQARFKPAWLEQLLRRRPLNVAAVALANKMARTAWALIAHGRAYQAEWKSTPPSGCGAQAQAA

SEQ ID NO: 15641 - protein, 346 aa, unidentified
  source 1..346: note = protein_3cef7cf
  REGION 6..148: note = RuvC_domain
  SITE 9: note = RuvC_P1
  SITE 52: note = RuvC_P2
  SITE 87: note = RuvC_P3
  SITE 89: note = RuvC_P4
  SITE 92: note = RuvC_P5
  REGION 211..297: note = Tnp_domain
  SITE 219: note = Tnp_P1
  SITE 249: note = Tnp_P2
  SITE 257: note = Tnp_P3
  SITE 258: note = Tnp_P4
  SITE 270: note = Tnp_P5
MKIMRIGIDLAKNVFQVQGVDAHEHPVCRRQLRRHQLLEFFQKLDPCLIGMEACAGAHHWARQLQAMGHTVRLIAPQFVKAYVKGNKNDANDAEAICEAVSRPGMRFVPIKTIEQQDLQALHRIRTELIHQRTAKVNQIRGLLAEYGIVIAVTVKQLRKALPLILEDAENGLSARFRHLLDGLREDLVYLDEQIAIVDQDMVRQATDNALARKLQQLRGIGPITATALVAAIGNAKDFKRGRDLAAWLGLVPGQHSSGGKDRLLGISKRGNTYLRTLVIHGARAVVRAAATQTDRLSCWIQSLCARRNNNIAAVALANKTVRLAWALMTREADYDPDYGLAGDTAA

SEQ ID NO: 15642 - protein, 359 aa, unidentified
  source 1..359: note = protein_a115a78
  REGION 18..160: note = RuvC_domain
  SITE 21: note = RuvC_P1
  SITE 64: note = RuvC_P2
  SITE 99: note = RuvC_P3
  SITE 101: note = RuvC_P4
  SITE 104: note = RuvC_P5
  REGION 231..320: note = Tnp_domain
  SITE 239: note = Tnp_P1
  SITE 269: note = Tnp_P2
  SITE 277: note = Tnp_P3
  SITE 278: note = Tnp_P4
  SITE 290: note = Tnp_P5
MLANHREEWSATMKIATIGLDLAKHAFQVHGIDAEGNVVVRRALRRKEVLLFFGKIDPCLVGIEACATAHHWAREIERFGHVVRLMPPAYVKPYVKRNKNDMTDAEAICEAVTRPTMRFVSVKSAEQQSVLMLHRTRALLVRQRTMLSNAVRAHLAEFGIVTTQGVQNVIGIIQKLMAQPADEELIRERELLPELVRIVLGPVLSALLDLAVRIKVLENEIVKWHRANATSRRLETIPGFGAMTASAVAATVSDPSVFASGREFAAWIGLTPRQNSSGGKERLGGITKMGDAYIRTLLVVGAIAVIRYARNDSSTKSAWVRRLLEKKPVRVVAVALANKMARVAWALMMRKENYRAAQA

SEQ ID NO: 15643 - protein, 309 aa, unidentified
  source 1..309: note = protein_133d057
  REGION 7..148: note = RuvC_domain
  SITE 10: note = RuvC_P1
  SITE 53: note = RuvC_P2
  SITE 93: note = RuvC_P3
  SITE 95: note = RuvC_P4
  SITE 98: note = RuvC_P5
  REGION 188..272: note = Tnp_domain
  SITE 196: note = Tnp_P1
  SITE 225: note = Tnp_P2
  SITE 233: note = Tnp_P3
  SITE 234: note = Tnp_P4
  SITE 245: note = Tnp_P5
MIHPVYIGCDVSKAHLDLFDTITQKHIRIPNTAVAIDEWLSTLEGREARVILEATGRYDRLLCTALERWQRPYCRVNPAKARNFARATGQLAKTDSIDARLLARMGEALSPAVTPVSDPARQRLESLHTRRDQLVAMRQQERVRLHTADPSERDSIERHLGWLNREIAVVEKECQSHVRENAMLSEQSERLRSIPGIGQVTAFTLMAHMPELGDSSPGSMAALAGLAPFNADSGIHRGQRHIRGGRKRVRDALYMAALVAYRLKSSFACLIQTMQARGKPFKIMIIAIARKLLVIANAILRDKTTFKTA

SEQ ID NO: 15644 - protein, 316 aa, unidentified
  source 1..316: note = protein_fa1eab3
  REGION 30..182: note = RuvC_domain
  SITE 33: note = RuvC_P1
  SITE 79: note = RuvC_P2
  SITE 119: note = RuvC_P3
  SITE 121: note = RuvC_P4
  SITE 124: note = RuvC_P5
  REGION 196..280: note = Tnp_domain
  SITE 203: note = Tnp_P1
  SITE 232: note = Tnp_P2
  SITE 240: note = Tnp_P3
  SITE 241: note = Tnp_P4
  SITE 253: note = Tnp_P5
MSAEGEAIRSNDYRKDTTVKAPSTRPAAVLGLDVGKSSHWACLIDRDGEVLASAPVRNREAELDALFASAPAGTLVVVDQFRNIGSLAVRRARAAGLGVAYLPGLAASRAAGLFAGEAKTDERDAAVIARTALGVLDSLSGVPGRGEALEAARALSSQRDHVVACATRDKNRLRAVLLESCPALEAAVDLSDRRWLELLTVPGIGPRTAAQLAVSVDIGRFPDHDHLASYCGIAPRVRSSGTSVRSVRASRRGDARLKSLLIFSCNSLVRSSGRYGEYYRACRARGMGHGRALKAVARKRLRAIYAVMRDRVPYRE

SEQ ID NO: 15645 - protein, 252 aa, unidentified
  source 1..252: note = protein_37461e9
  REGION 1..87: note = RuvC_domain
  SITE 31: note = RuvC_P3
  SITE 33: note = RuvC_P4
  SITE 36: note = RuvC_P5
  REGION 126..211: note = Tnp_domain
  SITE 134: note = Tnp_P1
  SITE 163: note = Tnp_P2
  SITE 171: note = Tnp_P3
  SITE 172: note = Tnp_P4
  SITE 183: note = Tnp_P5
MEHLRAAGVIVLVLQPIQVKAFGRSRLRRAKNDTLDAALIAACAASLEEVRSAPDPRLAELAEQLTFLEQIEDDIKRFKTRLEHLDKPGLRRIVLDDIARLKARRLSQIRHIAKQLRAHHDLAVRLDLVMSIPGIGERTALALLVRMPELGRVSREEVAALAGLAPFDNDSGQYKGQRRIAGGRARLRRSLFAAALPAAFRWNKAVMALYARLTAAGKAHNAALIACARKLLIYANTVVQRGTPWTEKLLGV

SEQ ID NO: 15646 - protein, 342 aa, unidentified
  source 1..342: note = protein_bd3365c
  REGION 6..152: note = RuvC_domain
  SITE 9: note = RuvC_P1
  SITE 53: note = RuvC_P2
  SITE 91: note = RuvC_P3
  SITE 93: note = RuvC_P4
  SITE 96: note = RuvC_P5
  REGION 211..298: note = Tnp_domain
  SITE 219: note = Tnp_P1
  SITE 249: note = Tnp_P2
  SITE 257: note = Tnp_P3
  SITE 258: note = Tnp_P4
  SITE 270: note = Tnp_P5
MPIVTVGIDLAKNVFAVHGVDASGKPALVRPSVARDKLLELIASLPPCLIGMEACSGAHHWAREFAKHGHSVRLMAPKFVAPYRLSGKRGKNDAADAAAICEAVTRPHMRFVPIKTIEQQGQLMVHRARQGFVEQRTATLNRIRGLLSELGIVLPLKAATVRRQALARLEELPGWANTVIGDLLSEVDRLDERIAQYDRHIALMARQSTQAQQLMQLAGIGETTATALISTVGGGHDFASGRSFSAWLGLVPGQYSSGGKQRLGRITKAGDSYLRSLLVMGARAVLAAAMNTRTPKQDSVSRWARSLAERRGYWRAVVAIAAKNARMCWAVLQRGEGFKMPA

SEQ ID NO: 15647 - protein, 411 aa, unidentified
  source 1..411: note = protein_760452a
  REGION 5..163: note = RuvC_domain
  SITE 8: note = RuvC_P1
  SITE 62: note = RuvC_P2
  SITE 102: note = RuvC_P3
  SITE 104: note = RuvC_P4
  SITE 107: note = RuvC_P5
  REGION 273..373: note = Tnp_domain
  SITE 281: note = Tnp_P1
  SITE 311: note = Tnp_P2
  SITE 319: note = Tnp_P3
  SITE 320: note = Tnp_P4
  SITE 333: note = Tnp_P5
MNPVVGLDVSKGESQVQAFLDKKKPYRKNFKVDHTRDGLTTLHEFLKHLKEVTGQDPAIVLEATGHYHAPVVQFLEEHNYLLIIVNPLVSFRAKSSNLRKVKTDAVDAYLLCELYYKEDLEPYKKRGVQLLNLRNLTRQHENITGNFIQTKLQFQAVLEQVFPEYKGVFGELYSFVSLRILKEYKSSEDILRTSEDRLANRIADLCTSRSEKWAYEKAQTLKAAAARNPFKKTLYQSHLLSMGMYIDMLLQFKEHLSKLDAEIDTLAKEIEEYKIIKSIPGIGEKIAATIISEIGEIDRFNHPKKLVAFAGVDPSVFESGRFTASNNRITKRGSSRLRHALYLAVCCAIRDKRKKKTTDEILPRNKKLREFYDKKRNEGKPFRVAVIACVNKLLHWIYALLKSRTNFQEIA

SEQ ID NO: 15648 - protein, 341 aa, unidentified
  source 1..341: note = protein_b08cb8b
  REGION 6..147: note = RuvC_domain
  SITE 9: note = RuvC_P1
  SITE 52: note = RuvC_P2
  SITE 87: note = RuvC_P3
  SITE 89: note = RuvC_P4
  SITE 92: note = RuvC_P5
  REGION 211..302: note = Tnp_domain
  SITE 219: note = Tnp_P1
  SITE 249: note = Tnp_P2
  SITE 257: note = Tnp_P3
  SITE 258: note = Tnp_P4
  SITE 270: note = Tnp_P5
MKTMTIGLDLAKSVFQVHGVDDAGTVTLRRKLRRSEVLEFFDSFPACQIGMEACATAHNWARELAALGHEVRLMPPNYVKPYVRRQKNDAADAEAICEAVTRPTMRFVPVKSAERQAILTLHRTRELLVRQRTMLINAIRSHCAEFGLIAPQGAGRVAELVNRVRAAGDEVLPDLARSTLVMLADQLQTLAVQIHQLERRPLAWHRQDQISQRLATIPGVGIISATALSASVTDPSLFRSGREFAAFLGLVPRQNSSGGKDRLGRISKMGDGYLRKLLVVGATSVIRRIRTGVSLASADWARALLERRPARVVTVAMANKTARIAWAVMTRGEAYRPPAMA

SEQ ID NO: 15649 - protein, 342 aa, unidentified
  source 1..342: note = protein_cecbd9c
  REGION 6..148: note = RuvC_domain
  SITE 9: note = RuvC_P1
  SITE 52: note = RuvC_P2
  SITE 87: note = RuvC_P3
  SITE 89: note = RuvC_P4
  SITE 92: note = RuvC_P5
  REGION 211..299: note = Tnp_domain
  SITE 219: note = Tnp_P1
  SITE 249: note = Tnp_P2
  SITE 257: note = Tnp_P3
  SITE 258: note = Tnp_P4
  SITE 270: note = Tnp_P5
MHATTIGLDLAKSLFQVHGVDAHGKVVVTKRLRRDAVLEFFATLPPCVVGMEACATAHHWARQIARFGHTVRLMPPQYVKPYVKRHKNDQADAETICEAVQRPNTRFVPVKTEEQQSTLIIHRVRGTLVHQKTQLINALRGHLAEFGIVAPKGASKLVDLTARLADPGEERLPEMARALLQVLVDQLRDTERRIADLDARLRDQAKQDESCRRLMTIPGVGPITATVLVATIGDGKAFTSGRHLAAWLGLVPRQHSSGGKDRLGGVSKAGDGYLRSMLVNGARAVVRWWRSSSPWLASLLARRPVNVAVVALANKMARIVWAVLTRGETYRRPIPTPTPAEA

SEQ ID NO: 15650 - protein, 405 aa, unidentified
  source 1..405: note = protein_19d4c27
  REGION 4..160: note = RuvC_domain
  SITE 7: note = RuvC_P1
  SITE 57: note = RuvC_P2
  SITE 97: note = RuvC_P3
  SITE 99: note = RuvC_P4
  SITE 102: note = RuvC_P5
  REGION 274..361: note = Tnp_domain
  SITE 282: note = Tnp_P1
  SITE 312: note = Tnp_P2
  SITE 320: note = Tnp_P3
  SITE 321: note = Tnp_P4
  SITE 334: note = Tnp_P5
MNAVGIDVSKGRSTVTIRQPGDVVVLPPRDFRHTQSSINDLIAAIKELDGETKVCMEHTGRYYEPVASWLSSAGIFVSAVNPCLIKDFGDESLRAPKTDKADAKKIARFALDRWTKLRQYSRMDELRNQLKTMNRQFGFYMDQKTAMKNNLIALLDQTFPGANDFFDSPARSDGSQKWVDFVYTYWHVDCVRGKSLDAFTEHYRNWCKRKEYNFSAEKAETIYHAASDLIAVFPKDDNTKLLIRQAVAMLNTASETVETLRAKMNQTASLLPEYPVVMEMNGVGPTLGPQLIAEIGDVTRFEHRGSLTAYAGVDPRPNESGDYKRQSNPTTKKGSPYLRKTLFQIMDGLIKRSPVDDPVYAFMDKKRAEGKPYHVYMTAGANKFLRIYYGRVNAFLSPSVETEEL

SEQ ID NO: 15651 - protein, 409 aa, unidentified
  source 1..409: note = protein_e8aad63
  REGION 4..163: note = RuvC_domain
  SITE 7: note = RuvC_P1
  SITE 60: note = RuvC_P2
  SITE 100: note = RuvC_P3
  SITE 102: note = RuvC_P4
  SITE 105: note = RuvC_P5
  REGION 272..358: note = Tnp_domain
  SITE 280: note = Tnp_P1
  SITE 311: note = Tnp_P2
  SITE 319: note = Tnp_P3
  SITE 320: note = Tnp_P4
MLFVGDDWAESHHDIEIVDEGGRRLVRRRVPEGVAGIAVLHGLVADHLPDQGEPVDVVVGIETDRGPWVQALIAAGYTVYAVNPLQAARYRERHAVSGAKSDAGDAHVLAELVRLDRAHHRPVAGDSALAEHVKVVARAHQSLVWSRQRQTNTLRSTLREFYPGALAAFDDLASRDALAVLTLAPTPAKGARLTQKRVEQVLARAGRKRNLPGTAETIVTALAAQQLPAREGVVDAYAASVAALVAVISELSRQIQTLEGEVEAGFGRHPDAEIYLSQPGLGMTLGARVLAEFGDDPHRYTDARARKNYSGMAPVTKASGKKRVVLARHARNRRLADALYQQAFAALGASPGARAYYDTHRARGATHHQALRTLANRLVGILHGCLRHHTPYNETTAWPPTNQTDHQAA

SEQ ID NO: 15652 - protein, 338 aa, unidentified
  source 1..338: note = protein_134e291
  REGION 5..151: note = RuvC_domain
  SITE 8: note = RuvC_P1
  SITE 54: note = RuvC_P2
  SITE 90: note = RuvC_P3
  SITE 92: note = RuvC_P4
  SITE 95: note = RuvC_P5
  REGION 211..297: note = Tnp_domain
  SITE 219: note = Tnp_P1
  SITE 249: note = Tnp_P2
  SITE 257: note = Tnp_P3
  SITE 258: note = Tnp_P4
  SITE 270: note = Tnp_P5
MKTHVGVDLHQRFCYLTAMNASGRICRQGQVVNEGGALQAWLRELPRPRQVVVEASGFWPAFARAAAVESERLVMVHPQRVKAIASAKLKNDRVDSETLAHLSRCDLLPEAWMADPATQQLRLRVRLRIALGRQRARAKNQLQAVLHQEGFRKPVTDVFGRRGRAWLKGLELSEAGRLVVDTWLREVDRLDAELTTQTRELERLAKADARAGWLQSVPGIGAYAAMVILAEIGDVERFASKRALASYAGLTPVVRESAGRRKRGGITHQGSNTLRWIMLQVAQVAARWSPGARSYYAGLRARKPAQVARTALARKLLTVVWALLRHGVDFDEELFIRG

SEQ ID NO: 15653 - protein, 338 aa, unidentified
  source 1..338: note = protein_63a54bb
  REGION 6..152: note = RuvC_domain
  SITE 9: note = RuvC_P1
  SITE 53: note = RuvC_P2
  SITE 91: note = RuvC_P3
  SITE 93: note = RuvC_P4
  SITE 96: note = RuvC_P5
  REGION 211..298: note = Tnp_domain
  SITE 219: note = Tnp_P1
  SITE 249: note = Tnp_P2
  SITE 257: note = Tnp_P3
  SITE 258: note = Tnp_P4
  SITE 270: note = Tnp_P5
MTIVTVGIDLAKNVFAVHGVDETGKPALVRPEVARAKLLEFIANLPRCLIGMEACSGAHHWAREFAKFGHTVRLMAPKFVTPYRMSGKRGKNDAADAAAICEAVTRPNMRFVPVKDIEQQSRLFVHRARQGYVEQRTALINRIRGLLSELGIVLPLKAATVRREAHKHLEDLPGWCNTVVGDALSELTHMDERINQYDKYIAQAANENEQSRQLMRLCGIGPTTASAIVATVGKGHDFACGRQFCAWLGLVPGQYSSGGKQRLGRITKAGDPYLRTLLIMGAKAVLNAAKNKTDPVSRWAIQIQQRRGYWKAVVAVAAKNARMCWAMLQLGDAFKLPA

SEQ ID NO: 15654 - protein, 348 aa, unidentified
  source 1..348: note = protein_abe0608
  REGION 14..161: note = RuvC_domain
  SITE 17: note = RuvC_P1
  SITE 66: note = RuvC_P2
  SITE 102: note = RuvC_P3
  SITE 104: note = RuvC_P4
  SITE 107: note = RuvC_P5
  REGION 230..316: note = Tnp_domain
  SITE 238: note = Tnp_P1
  SITE 269: note = Tnp_P2
  SITE 277: note = Tnp_P3
  SITE 278: note = Tnp_P4
  SITE 289: note = Tnp_P5
MALTIVEDTRAVTGGVDTHADMHVAAALDPVGGLLGVGEFPATAAGYARLLGWLGGFGTVCLAGIEGTGSYGAGLARHVTAAGIRVVEVDRSDRQDRRRQGKSDPLDAVSAARAAQSGRARGAPKGRDGAVEAIRALMVAKRSARSERTQTINQARALIVTGPDDLRARFARHTAAGLVSELAALRPRPGATVGYATRIALRELGRRAEFLDGQLGRLDELIVPLVTARAPALLALHGVGPDTAALLLIAAGDHPHRLRSEAAWAHLCAVAPIPASSGKRTRHRLNPGGNREASRALWRIVITRMSSHAPTRAYVERRTKEGLSKKEIIRCLKRYAARQVYRHLRPAG

SEQ ID NO: 15655 - protein, 332 aa, unidentified
  source 1..332: note = protein_26f9493
  REGION 12..168: note = RuvC_domain
  SITE 15: note = RuvC_P1
  SITE 67: note = RuvC_P2
  SITE 107: note = RuvC_P3
  SITE 109: note = RuvC_P4
  SITE 112: note = RuvC_P5
  REGION 207..293: note = Tnp_domain
  SITE 215: note = Tnp_P1
  SITE 244: note = Tnp_P2
  SITE 252: note = Tnp_P3
  SITE 253: note = Tnp_P4
  SITE 266: note = Tnp_P5
MNKGSIQEMNTIGIDVSKAKIDCAWLREEGKLKFKVLPNTKAGCNELIEWSLKSTSLEITQLHFIMEATGVYHEQLAIQLHNAGAMVSVVNPAQVKFYSQGLGVRTKNDKKDSAILARYGLKESPKAWQPEPVEIRTLKALIARFDGIEKDLQREKNRQEKAVISKAPQEVLNSITQMIELLETEQKRLDKLIEDHINKHEELKKNKELLKSIPGVGKVIATRILMVIGSRDFKSASQCSAYLGLVPVEHESGSSIRGRPRLSKAGNPIIRAKLYMAAVVAIQHNPDINAQYERLTARGKSKMSALGAAMRKLVQICFGVLKHQQTYQPQVT

SEQ ID NO: 15656 - protein, 391 aa, unidentified
  source 1..391: note = protein_1aed8a5
  REGION 4..163: note = RuvC_domain
  SITE 7: note = RuvC_P1
  SITE 60: note = RuvC_P2
  SITE 101: note = RuvC_P3
  SITE 103: note = RuvC_P4
  SITE 106: note = RuvC_P5
  REGION 266..353: note = Tnp_domain
  SITE 274: note = Tnp_P1
  SITE 304: note = Tnp_P2
  SITE 312: note = Tnp_P3
  SITE 313: note = Tnp_P4
  SITE 326: note = Tnp_P5
MISVGIDVAKDKHDCFIISLEGEVLADVFTIPNSMEGFRHLLQKIRDCTSPQDKIKVGLEATGHYSYNILGFLLDNGLVTYVLNPLHTNLYRKSLSLRKTKTDRVDARTIAAMLMSDVGLKPYTDTAYHNEELKSLTRYRFDKVKERAKLKQSVSRLVCILFPELETLVPSLHMASVYALLNEFSEAKQIAEAHLTRLKTLLHDASKGRYGRDMAVVIRDAARDSIGSVMPAKSLELRHTIRLIRELDAEIDEIESKIQVLMDELHSPITTIPGIGYRMGAMILAEAGDFSRFDSPDKLLAYAGLSPSTYQSGQLKNCYAHMEKRGSRYLRYAIFNAAKFVCLWNPTFAAYLSKKRAEGKHYNVAISHAAKKLVRLIFALEKSRKPYRLPA

SEQ ID NO: 15657 - protein, 289 aa, unidentified
  source 1..289: note = protein_4c41907
  REGION 13..166: note = RuvC_domain
  SITE 16: note = RuvC_P1
  SITE 64: note = RuvC_P2
  SITE 105: note = RuvC_P3
  SITE 107: note = RuvC_P4
  SITE 110: note = RuvC_P5
  REGION 228..288: note = Tnp_domain
  SITE 236: note = Tnp_P1
  SITE 266: note = Tnp_P2
  SITE 274: note = Tnp_P3
  SITE 275: note = Tnp_P4
  SITE 286: note = Tnp_P5
MQQTQQITKQIIIGVDPHKLSATIEVVDDRERFLGSGRFTSDRAGYTAILTYAKAWPERVWAVEGSNGAGRPLAQRLLEAGEQVVDVPAKLAARVRLFDTGHNRKTHALDAHSIAVVAVRTAGLRVLEVDGELEALRMLTDRRETLTRRRVQTVNRLQALLAELLPGQAKKDITPLQAKALLASVRPRDIAVKTRRRIAAEELAELVAVDAKIKKATAELKAIVLARITRLMDLRGVGPVVAARTLADVGDVTRFADRNRFASWTGTAPLDASSGEQNRHRLSRAGTGG

SEQ ID NO: 15658 - protein, 348 aa, unidentified
  source 1..348: note = protein_7e3829a
  REGION 7..147: note = RuvC_domain
  SITE 10: note = RuvC_P1
  SITE 53: note = RuvC_P2
  SITE 88: note = RuvC_P3
  SITE 90: note = RuvC_P4
  SITE 93: note = RuvC_P5
  REGION 210..300: note = Tnp_domain
  SITE 218: note = Tnp_P1
  SITE 248: note = Tnp_P2
  SITE 256: note = Tnp_P3
  SITE 257: note = Tnp_P4
  SITE 269: note = Tnp_P5
MDDIIRIGMDTSKHVFQLHGVNAAEEPVLRRKLRRNDMVVFFERLAPTIIAIEAAGASHHWARLLRSFGHEVKLIAPQLVKPYVKRGKNDAADAEALCEAMSRPTMRFVPVKTAERQAALMLLGLRDRLVRNRTQLANAIRAYAAEFGLAAAKGIAHLAPLLARIQSDESLPGLARELFAAHAQEYAQLQAQIDEVEGKLMAWHKTNPGSQRLAQIAGIGPIGAAMLIMKTPAPETFRSGRQFAAWIGLTPKDHSTAGKVRLGVITRAGDEDLRSALVVGATAVIRHLRNGKGRSMLSAWVEQLVKRKPPKLAAVALANKLARIAWKLMVTGETYAAKPRPVASAGIA

SEQ ID NO: 15659 - protein, 344 aa, unidentified
  source 1..344: note = protein_7d455d0
  REGION 5..152: note = RuvC_domain
  SITE 8: note = RuvC_P1
  SITE 55: note = RuvC_P2
  SITE 92: note = RuvC_P3
  SITE 94: note = RuvC_P4
  SITE 97: note = RuvC_P5
  REGION 212..300: note = Tnp_domain
  SITE 220: note = Tnp_P1
  SITE 250: note = Tnp_P2
  SITE 258: note = Tnp_P3
  SITE 259: note = Tnp_P4
  SITE 271: note = Tnp_P5
MKHYAGLDVSVKETSICIVDEAGRSCREMKVISHPEDLLAVLCDPAWRLERVGLEAGPLSQWLFRGLAEAGVPAICIETRHAKAFLKAQVNKSDRNDARGIAQMMRVGLFQPVHVKTLASQKRRALLAARKILQEKALAIANDIRGLLRNFGLKVGIVGVVGFEQRIHDLVEGVPELADIMEPLLAARRVLREKFAKLHRKVLLLARDNEVCQRLMTIPGVGPVVSLAFISTVDVPARFRNSKAVGPSLGLTPVLNQSGESHRVGRISLCGDEAMRALLYEAAQVMLTRVQKWSWLKAWAMNIAKRRGQKKAIVALARRLAVIMHRMWSDGTEFRWTREMAPTI

SEQ ID NO: 15660 - protein, 332 aa, unidentified
  source 1..332: note = protein_87732b6
  REGION 1..104: note = RuvC_domain
  SITE 43: note = RuvC_P3
  SITE 45: note = RuvC_P4
  SITE 48: note = RuvC_P5
  REGION 166..250: note = Tnp_domain
  SITE 174: note = Tnp_P1
  SITE 204: note = Tnp_P2
  SITE 212: note = Tnp_P3
  SITE 213: note = Tnp_P4
  SITE 224: note = Tnp_P5
MEGCNGIGRHLAHRLVHDGETVIDVPAKLSAQVRVFATGNGRKTDPVDAHSVALAALRAPNLRRVQADPELVALGMLVDRRDELGRARTETVNRLHRLLLELVPGGAKRWLSAGQARTLVQTCTVDDSAARIRLRVVLELITDLEVVDARIKAANKELRQLVTATGSTLMELPGIGPAGAARLLADVGDIRRFATRDRFASWNGTAPLDASSGDQKRHRLSRAGNRKINRVLHIMAVVQQCGYGGGRDYVKQKKAEGKTSKEALRCLKRRLSNVVYSRMLADAHRNEKASPGGQSGAHPDSCATGSTPYADPSDKPQPGPAVHQLIELPTAT

SEQ ID NO: 15661 - protein, 343 aa, unidentified
  source 1..343: note = protein_282af23
  REGION 7..149: note = RuvC_domain
  SITE 10: note = RuvC_P1
  SITE 53: note = RuvC_P2
  SITE 88: note = RuvC_P3
  SITE 90: note = RuvC_P4
  SITE 93: note = RuvC_P5
  REGION 212..303: note = Tnp_domain
  SITE 220: note = Tnp_P1
  SITE 250: note = Tnp_P2
  SITE 258: note = Tnp_P3
  SITE 259: note = Tnp_P4
  SITE 271: note = Tnp_P5
MQTITTIGLDIAKSVFQVHGVDAGGQVIVRRQLKRRYVLTFFQKLSPCLVGIEACGSAHHWSRELQALGHTVRLIPPAYVKPYVKRQKNDAADAEAICEAVTRANMRFVPTKTPEQQSGLVLHRTRHLFIRQQTAVINAIRAHLAEFGIVAPVGRHGVEELLNVVTDPNDRRVPEMARACLSAFGAQLRRIQEQVREFDRLIRAWHRSDEMSMRLDEVPGVGPVLATAVVATVADPKSFRSGRNFSAWIGIVPKQHSSGGKNRLGNISKQGDRYLRGLFVAGALAVIRYAKIHGTKHRPWLTALLARRPTKVAAIALANKLARMVWAMMARGERYKEPVALAA

SEQ ID NO: 15662 - protein, 343 aa, unidentified
  source 1..343: note = protein_0a870da
  REGION 7..149: note = RuvC_domain
  SITE 10: note = RuvC_P1
  SITE 53: note = RuvC_P2
  SITE 88: note = RuvC_P3
  SITE 90: note = RuvC_P4
  SITE 93: note = RuvC_P5
  REGION 211..303: note = Tnp_domain
  SITE 219: note = Tnp_P1
  SITE 249: note = Tnp_P2
  SITE 257: note = Tnp_P3
  SITE 258: note = Tnp_P4
  SITE 270: note = Tnp_P5
MSEISMIGLDLAKNVFQVHGVDASGSVVLRRQLRRGAVEKFFAQLPPCTVGIEACGSAHHWARVIGRYGHEVRLMPPSYVKPYVKRNKNDGRDAEAIYEAVGRPTMRFVPVKSVEQQATLAVHSTRALLVRQRTMVANSLRAALSEIGIVAAQGLEGLRALMARLEAPNEEVPEIMRGALLLLAKHWQALDADERTLERQIAKAARADREARRLMEVPCVGPIIASTVLAKVPDAKVFRSGRDFAAWIGLTGRDHGTGGKHRPGRISKQGDRMLRALLISGASAYLRHQRTRGVSDPWLRDLLARRPYKVVMVALAAKTARILWAMLAKGEPYRDRASASAAA

SEQ ID NO: 15663 - protein, 325 aa, unidentified
  source 1..325: note = protein_8882050
  REGION 19..169: note = RuvC_domain
  SITE 22: note = RuvC_P1
  SITE 66: note = RuvC_P2
  SITE 106: note = RuvC_P3
  SITE 108: note = RuvC_P4
  SITE 111: note = RuvC_P5
  REGION 202..286: note = Tnp_domain
  SITE 210: note = Tnp_P1
  SITE 239: note = Tnp_P2
  SITE 247: note = Tnp_P3
  SITE 248: note = Tnp_P4
  SITE 259: note = Tnp_P5
MTQTDADSKKQMPGQAITIGIDISKDHLDVALYPGGETRRFLNARSGHTALLRWLGKQVVARIVFEATGPYHRDLERRLEQAGLPFAKVNPRQARRFAEATGKLAKTDRVDALMLARFGVLLEPQSRPARSENLVQLAELVAGRRILIKDRTATLNRLKTLGQELLKRHARHRLRQIEAHLTSLNVAIDAVIAADPVLTRRLAILTSIPGLGEITAQALIADMPELGTMDERQTAALAGLAPITRQSGKWQGKSFIQGGRSHLRQALYMPALVAMRFNPDLKSRYDALVTRGKHAKVAITAVMRRLVVIANALLRDDRTWTPKVA

SEQ ID NO: 15664 - protein, 282 aa, unidentified
  source 1..282: note = protein_5e3215c
  REGION 16..98: note = RuvC_domain
  SITE 37: note = RuvC_P3
  SITE 39: note = RuvC_P4
  SITE 42: note = RuvC_P5
  REGION 157..258: note = Tnp_domain
  SITE 165: note = Tnp_P1
  SITE 195: note = Tnp_P2
  SITE 203: note = Tnp_P3
  SITE 204: note = Tnp_P4
  SITE 216: note = Tnp_P5
MEACSGAHEWARRFAAFDHIVKLMAPKFVTPYRKSGKNDGNDAEAICEAVARPNMRFVPVKSIEQQADLTLHRVRQGFVEERTAMLNRIRGLLAEFGHVLPLRAAEVRRRVPELLEVLPTRVANCVRDLLEHAIRLDARALEYEREIRAHVRTNALARRAQTRQGIGPITASALVATVGNAHDFKNGRQFAAWLGLVPRQYSTGGKTRLGHITKRGDPYLRTLLVMGARAVLQNAARLNDPLSRWALAVQQRRGYHRACIAIAAKNARVAWALLAKDTAVAT

SEQ ID NO: 15665 - protein, 426 aa, unidentified
  source 1..426: note = protein_3b9f8c4
  REGION 29..174: note = RuvC_domain
  SITE 32: note = RuvC_P1
  SITE 78: note = RuvC_P2
  SITE 113: note = RuvC_P3
  SITE 115: note = RuvC_P4
  SITE 118: note = RuvC_P5
  REGION 268..356: note = Tnp_domain
  SITE 276: note = Tnp_P1
  SITE 307: note = Tnp_P2
  SITE 315: note = Tnp_P3
  SITE 316: note = Tnp_P4
  SITE 327: note = Tnp_P5
MLEQRLLHQLFLRTKQGGRPMRVLYERCCGLDVHKQSITACALTPEGKEIRTFGTLTDDLEELVDWLKEKKVTHVAMESTGVYWKPVYNLLEAEPIEVLVVNAQHIKAVPGRKTDVKDAEWIADLLRHGLLKGSYIPHRAQRELRERVRYRRSLIEERARELNRIQKVLEGANIKLSSVVSDINGMSARLIIRALIEGKNDPAALAQLAKGRLKQKTEELRRALKGMIGPHQRMMLAEQWRHVEYLDEAIARLDREIEERTSPFHEALELIDTIPGVGRQSAEQIVAEIGTDMSRFPTAAHLASWAGMAPGNHESAGKRLSGRTRKGNKKLRSCLVECARAAARTKNTYLSAKYHRIAKRRGANRASVAVGRTILEMIYYILTRKEPYRELGTDYWDRQREASIVRQTVKRLEGLGYEVKLEKTSA

SEQ ID NO: 15666 - protein, 339 aa, unidentified
  source 1..339: note = protein_76916c0
  REGION 7..149: note = RuvC_domain
  SITE 10: note = RuvC_P1
  SITE 53: note = RuvC_P2
  SITE 88: note = RuvC_P3
  SITE 90: note = RuvC_P4
  SITE 93: note = RuvC_P5
  REGION 209..296: note = Tnp_domain
  SITE 217: note = Tnp_P1
  SITE 247: note = Tnp_P2
  SITE 255: note = Tnp_P3
  SITE 256: note = Tnp_P4
  SITE 268: note = Tnp_P5
MNAVTVIGIDLGKHSFHLHAQDAVGRMVFRKKLSRQQLLRTLANVPACRVVMEACAGSHWLARRLAGMGHEARLISPQFVRPFVAGNKNDFGDAQAICEAACRPSMRFVSPRNEAQQTVSALHRIRERLVRERTATVNQIHGFLLEFGISLPRGAALMGRLPAVLSHEPLPPRLVALAVRLRGHVHYLGEQIKQVEQELMTALREDDRSRRLLEIPGIGPITASALAVELGDAQQFANARQFSASIGLVPRQYSTGGKPTLLGISKRGDRNLRRLLVQCARAVMQRADSRTDALGAWVKALSTRRHSNVVACALANKLARIAWAVLARGTHYEARPQLA

SEQ ID NO: 15667 - protein, 250 aa, unidentified
  source 1..250: note = protein_c5c957b
  REGION 5..152: note = RuvC_domain
  SITE 8: note = RuvC_P1
  SITE 55: note = RuvC_P2
  SITE 92: note = RuvC_P3
  SITE 94: note = RuvC_P4
  SITE 97: note = RuvC_P5
  REGION 212..250: note = Tnp_domain
  SITE 220: note = Tnp_P1
MKHYVGLDVSVKDSAICIVDETGTVCREVKVPTHPEDLARVLKDPAWRLERVELEAGPLSQWLFEGLAKAGLPVVCIETRHVNAFLKAQPNKTDRNDARGIAQMMRVNLFRPVHVKTLTSQKRRALLTARKLLKDKAIAIENDIRGLLRNFGLKVGKVGAVKFEERIRELTEGMPDLAEIVEQLLDASRKLRQNYAALHRKLLAIVRDDEVCRRLMSIPGVGPVVSLAYTATIDIPARFRNSKASVRFWA

SEQ ID NO: 15668 - protein, 274 aa, unidentified
  source 1..274: note = protein_25e8a61
  REGION 1..81: note = RuvC_domain
  SITE 21: note = RuvC_P3
  SITE 23: note = RuvC_P4
  SITE 26: note = RuvC_P5
  REGION 141..229: note = Tnp_domain
  SITE 149: note = Tnp_P1
  SITE 179: note = Tnp_P2
  SITE 187: note = Tnp_P3
  SITE 188: note = Tnp_P4
  SITE 200: note = Tnp_P5
MPVVCIETRHTKAFLKAQVNKSDRNDARGIAQMMRVNLFRPVHVKTLTSQKRRALLTARKILQDKALAIENDIRGLLRNFGLKVGIVGVGKFDERIRELVERMPELVEIMEPLLTARQKLRETFTALHRKLLAIVRDDGVCRRLMTIPGVGPVVSLAFCATIDVPARFKNSKAVGPSLGLTPVLNQSGESLRVGRVSLSGDEMMRALLYEAAQVMITRVQKWSWLKAWAVNVAKRRGLKKAIVALARRLAVIMHRIWIDGTVFRWTKEAAPATA

SEQ ID NO: 15669 - protein, 347 aa, unidentified
  source 1..347: note = protein_b984ca0
  REGION 7..149: note = RuvC_domain
  SITE 10: note = RuvC_P1
  SITE 53: note = RuvC_P2
  SITE 88: note = RuvC_P3
  SITE 90: note = RuvC_P4
  SITE 93: note = RuvC_P5
  REGION 212..298: note = Tnp_domain
  SITE 220: note = Tnp_P1
  SITE 250: note = Tnp_P2
  SITE 258: note = Tnp_P3
  SITE 259: note = Tnp_P4
  SITE 271: note = Tnp_P5
MQEVATIGLDLAKQVFQAHGADFEGAPLFSRKLRRAEVLRFFEKLPRCLVGMEACGGSHYWAREISALGHDVKLIPPAYVAPFVKRGKTDAGDAEAISEAVTRKTMRFVPIKTAEQQAAAMMLKTRALLVRQRTQAVNALRAHLTELGVIAGAGIAKIDSLIAIVRDETDDRLPPAARFALTAIADQVESLKTQARQLEDAIVREAKVDQDMRRLATIPGIGAITAATIKALVPDPGGFKSARHFAAWIGLTPKPRSSGGKERLGRISRMGNPDLRSLLVVGATSVLRHAELNATTMPWLTGIVARRPYKVAAVALANKMARIAWAVLTRGGVYQRPNSLAGCVVTG

SEQ ID NO: 15670 - protein, 400 aa, unidentified
  source 1..400: note = protein_0d21f6f
  REGION 6..160: note = RuvC_domain
  SITE 8: note = RuvC_P1
  SITE 57: note = RuvC_P2
  SITE 97: note = RuvC_P3
  SITE 99: note = RuvC_P4
  SITE 102: note = RuvC_P5
  REGION 268..354: note = Tnp_domain
  SITE 276: note = Tnp_P1
  SITE 307: note = Tnp_P2
  SITE 315: note = Tnp_P3
  SITE 316: note = Tnp_P4
MLYHGGLDWGGAAHAVCVVDATGRIVARIEARHDAAGLTDMLARLKRVAPPAELPVAIERPSGLIVDALVEAGHPVIPIHPNVVKACRPRYRAAGGKSDPGDAYMLADILRTDGHRFRPLVPLSDDIRALRALVRGRDDLVSQRVTLANQLRSLLEGFWPGAAVIFAAIDSPIALAFVSRYPTPDSASRLGEKRMASFMAQHAYCGRRSAAELLARLRDAPAGLASDAEAKAKGEVVCALASLLGRLVGEIAKLSSQVEHAVAELPDGKIVMSFPRAGRINAAQILAELGDVRERFPTEDQFAAEAGVAPVTHASGKSRGVVFRWACNKNLRQAITCFADNSRHASNWAADIYARARQRGCKHAHAVRILARAWVRVLWRAWQDGTGYDPAKHKAAARIA

SEQ ID NO: 15671 - protein, 357 aa, unidentified
  source 1..357: note = protein_a2e584e
  REGION 17..164: note = RuvC_domain
  SITE 20: note = RuvC_P1
  SITE 67: note = RuvC_P2
  SITE 104: note = RuvC_P3
  SITE 106: note = RuvC_P4
  SITE 109: note = RuvC_P5
  REGION 224..312: note = Tnp_domain
  SITE 232: note = Tnp_P1
  SITE 262: note = Tnp_P2
  SITE 270: note = Tnp_P3
  SITE 271: note = Tnp_P4
  SITE 283: note = Tnp_P5
MKQPQHQMEKRSMKHYAGLDVSVKETSVCIVDEAGAICCEGKVPSHPEDLARLLRDTAWRLVRVGLEAGPLSQWLFSGMAEAGLPVVCIETRHTKAFLKAQVNKSDRNDARGIAQMMRVQLFRPVHVKTLTSQKHRALLTARKLLQEKFIAIENDIRGLLRNFGLKVGVVGVLKFDQRIRELVEGLPDLVEIMEPLLASRKQLREAFMALHRRLLAIVRDDAVCRRLMTIPGVGPVVSLAFRSTIDSPARFTSSKAVGPALGLTPVLHQSGESHRLGRISLCGDEMMRHLLYEAAQVMLTRAQTWSWLKAWAMSIAKRRGQQKAIVALARRLAVIMHRMWMDGTEFRWTRESIPASV

SEQ ID NO: 15672 - protein, 346 aa, unidentified
  source 1..346: note = protein_d990c89
  REGION 7..148: note = RuvC_domain
  SITE 10: note = RuvC_P1
  SITE 53: note = RuvC_P2
  SITE 88: note = RuvC_P3
  SITE 90: note = RuvC_P4
  SITE 93: note = RuvC_P5
  REGION 210..299: note = Tnp_domain
  SITE 218: note = Tnp_P1
  SITE 248: note = Tnp_P2
  SITE 256: note = Tnp_P3
  SITE 257: note = Tnp_P4
  SITE 269: note = Tnp_P5
MEQISRIGMDTSKRFFQLHGVNAAEKVVLRKKLRRKEMVEFFEKLAPTVIGIEACSASHHWARLLRSFGHEVKLIAAQLVKPYVKRSKNDTADAEALCEAMSRPTMRFVPVKTAEQQAALMLVGLRDRLIRNRTQLSNAIRGYATEFGFTAAKGIAHLEPLLEHIQADENVPDLARELFAAQAEEYAQLQAQIAEVAAKLMAWHKADECSRRLAKIPGVGPIGAALLMMKTPAPELFQSGRQFAAWIGLTPQDHSTAGKVRLGAITRAGDEALRAVLVSGATAVIRHAVRCGGRASPWLLDLLKRKPPKLAAVALANKMARIAWKLMVTGERYAMTFPPVAPAGAA

SEQ ID NO: 15673 - protein, 340 aa, unidentified
  source 1..340: note = protein_6f5304c
  REGION 6..147: note = RuvC_domain
  SITE 9: note = RuvC_P1
  SITE 52: note = RuvC_P2
  SITE 87: note = RuvC_P3
  SITE 89: note = RuvC_P4
  SITE 92: note = RuvC_P5
  REGION 209..292: note = Tnp_domain
  SITE 217: note = Tnp_P1
  SITE 247: note = Tnp_P2
  SITE 255: note = Tnp_P3
  SITE 256: note = Tnp_P4
  SITE 268: note = Tnp_P5
MKFIRIGVDLAKNYFQIHALSSEDAPAVKRKLTRRTMREFFSKIEPCRVGMEACGSAHYWARELKAMGHDVSLMPPAYTKPYVKRGKNDAVDAEAICEAVSRPAMRFVPIKSADQQATLMLHKTRELLVKQRTMSVNALRGHLAEFGLVVAKGTGRVDELLGLAEGDATLPDAAVVAAKVLGQQIDALGSALDDLEREIAKAHALSETSRSLGEIPGVGKLVASVITASVPDPSVFNSGRDFAAWLGLTPRQISSGGKPTLGTITKAGNRYIRKLLVLGATSLLNVVEKRRGGLRDWIVGLLAKKLARLVTVALANKLARIIWAMMKTGECFRTEMFAKP

SEQ ID NO: 15674 - protein, 342 aa, unidentified
  source 1..342: note = protein_0182188
  REGION 6..146: note = RuvC_domain
  SITE 9: note = RuvC_P1
  SITE 52: note = RuvC_P2
  SITE 87: note = RuvC_P3
  SITE 89: note = RuvC_P4
  SITE 92: note = RuvC_P5
  REGION 211..295: note = Tnp_domain
  SITE 219: note = Tnp_P1
  SITE 249: note = Tnp_P2
  SITE 257: note = Tnp_P3
  SITE 258: note = Tnp_P4
  SITE 270: note = Tnp_P5
MQIAVLGIDLGKNSCSVVGLDSTGHVVLRRRLQRGGVTKLTAGLPACVIAMEACCGAHHLGRLLEQQGHRVRLMSPEYVRPYVKAHKNDDRDAEAIAEAATRPTMRFVELKSETQLDIQSLHRARDRLVGQRTALINQIRGVLMERGIVVPQGRRKLETHLEALMTERTVALTVRICLLMVDLCAEWRDIDRRIAAFDDEFALLARTDESARRLTTIPGIGVLNATALTAAVGNAQTFRRGRDLAAWLGLVPRQMTTGGKPRLAGISKRGNKYLRKLLIHGARAALPSLAKSDTALGVWLRGLLVRAHVNTVVVALAAKLARIVWAVLRHGGRFDLKPMPTS

SEQ ID NO: 15675 - protein, 386 aa, unidentified
  source 1..386: note = protein_02851fb
  REGION 41..185: note = RuvC_domain
  SITE 81: note = RuvC_P2
  SITE 118: note = RuvC_P3
  SITE 120: note = RuvC_P4
  SITE 123: note = RuvC_P5
  REGION 255..342: note = Tnp_domain
  SITE 263: note = Tnp_P1
  SITE 292: note = Tnp_P2
  SITE 300: note = Tnp_P3
  SITE 301: note = Tnp_P4
  SITE 313: note = Tnp_P5
MQKLNDLSRSLTALEPDGTLIAVIEMSLSSWLVAGIVPGVERQPLKKLAVDESALLKLLHRWREEAEKAGRRIERIVVAFEAGRDGFWLARWLKARSIEAHVIHAASVAVSREHRRAKTDRLDSELLKRAFLGWLRGERDHCKMVAIPTIKDEDAKRPNRERESLVGEQSRIVNRMKAALVRLGIRGFNPKLKKAAGRLEDLRTPEDEPIPPNTLAELRRDMERRRLVRDQIRQIEEARLVRLDHAPSDGPHAMVRLLARVIGVGIETADMLVHEVLSRNMRDRRAVARYAGLTGSPDESGRKRREKGLARSGNGRVRRGMIQLAWRFLMHQKNSALAQWFRARTENARGTRKPMIVALARKLLIALWRLVRQGVVPDGVVLRPAQ

SEQ ID NO: 15676 - protein, 423 aa, unidentified
  source 1..423: note = protein_81e2d73
  REGION 25..177: note = RuvC_domain
  SITE 28: note = RuvC_P1
  SITE 76: note = RuvC_P2
  SITE 114: note = RuvC_P3
  SITE 116: note = RuvC_P4
  SITE 119: note = RuvC_P5
  REGION 284..370: note = Tnp_domain
  SITE 292: note = Tnp_P1
  SITE 323: note = Tnp_P2
  SITE 331: note = Tnp_P3
  SITE 332: note = Tnp_P4
MKSANTPDNEQTLSLPDDPPGDVTAGLDWARDDHAVSIVDHRGRELDRCMIEHTTDGLHSLLAFLARNNAAEVAIERPDGPVIDALLDAGITVVVVSPNQVKNLRRRYGSAGNKDDRFDAYVLADTLRTDRARLRPLIPDRDDTTALRRACRARKDLVAHRIAVGNQLRAHLRNALPAAVGLFKDIDSNIALAFLERFDSQDKLDWLTPTRLGSWLRKQGYSGRTNPTVLHAKTLTAPRGPIGEFATALAAITASYVKVLRTLQDQTRTLEKHIDRQLSIHTDAHIFTSLPRAGRIRAARLLAEIGDCRSRFPTPESLICLAGAAPSTRQSGKIRVVGFRWSCDKQLRDAVTDFAADSVKANPWAAHLYQRARDRGHDHPHAVRILARAWLTIIWHCWQDNVPYDPTKHRALQAYLDPKTEAA

SEQ ID NO: 15677 - protein, 311 aa, unidentified
  source 1..311: note = protein_34d9e2e
  REGION 6..155: note = RuvC_domain
  SITE 9: note = RuvC_P1
  SITE 52: note = RuvC_P2
  SITE 92: note = RuvC_P3
  SITE 94: note = RuvC_P4
  SITE 97: note = RuvC_P5
  REGION 188..272: note = Tnp_domain
  SITE 196: note = Tnp_P1
  SITE 225: note = Tnp_P2
  SITE 233: note = Tnp_P3
  SITE 234: note = Tnp_P4
  SITE 245: note = Tnp_P5
MMNDSIGVDISKDHLDVHRLSDGVSRRFANDSRGHRTLIGWLERPGLRIVCEPTGPYHRDLEHRLAEAGFALVKVNPRQARRFAEATGRLAKTDRLDAAMLARMGALLELQARPARGPTLNDLKDLRMAREALVKNRTAARNRAKNLTLPILKRHNAEQLRQIERQIAALENEIMALIKVDPDLARRFDILVSIPGVSAITAFALLIDMPELGTLDQAQVASLAGLAPVARQSGQWIGRAFIRGGRANVRRALYMPALVAIRFNPDLKAKYDRLKAAGKASKLAITAVMRKLIIIANALLRDGRIWEPTRT

SEQ ID NO: 15678 - protein, 341 aa, unidentified
  source 1..341: note = protein_b54ee21
  REGION 5..152: note = RuvC_domain
  SITE 8: note = RuvC_P1
  SITE 55: note = RuvC_P2
  SITE 92: note = RuvC_P3
  SITE 94: note = RuvC_P4
  SITE 97: note = RuvC_P5
  REGION 212..296: note = Tnp_domain
  SITE 220: note = Tnp_P1
  SITE 250: note = Tnp_P2
  SITE 258: note = Tnp_P3
  SITE 259: note = Tnp_P4
  SITE 271: note = Tnp_P5
MDYYAGIDVSLECSSVCVVDANGKILREAKVASEPEALITWFRSSGLDLERIGLEAGPLSQWLFAALREAGLAVELLETRHVRKAFEAMPVKSDRNDARGIAQLMRLGWFRPVHCKSMSAQETRTLLTARKLVQSKLRDVENSLRGILRGFGLKVGKTTERKFAGRIEELVAGHPHLQVIAKALLSVRAVLRSEFAAFEKQVRKMARSDMRTRLLMSTPAVGPIVALTYASAIDDPTRFKSSKQAGAHFGLTPKKYQSGETDYTGRISKIGDASVRTALYEAAHVMLTKPVKGCSQLKSWAMRIAKRAGMSKAKVALARRLAVILHRMLADATPFNAAAAT

SEQ ID NO: 15679 - protein, 342 aa, unidentified
  source 1..342: note = protein_2e1556a
  REGION 7..149: note = RuvC_domain
  SITE 10: note = RuvC_P1
  SITE 53: note = RuvC_P2
  SITE 88: note = RuvC_P3
  SITE 90: note = RuvC_P4
  SITE 93: note = RuvC_P5
  REGION 211..296: note = Tnp_domain
  SITE 219: note = Tnp_P1
  SITE 249: note = Tnp_P2
  SITE 257: note = Tnp_P3
  SITE 258: note = Tnp_P4
  SITE 270: note = Tnp_P5
MEKASMIGIDTSKNLFELHGRNERGEVVLRRRLKREQVESFFAEHPAATIGMEACGAAHHWARGLSRLGHQVRLMPPAYVKPYVKRNKNDAIDAEACCEALSRPGMRFVPVKTVDQQAALALHRSRELLVRQRTQISNALRALLAELGIVAAKGREGLGRLIADLRENVHGLPPAVQTAALVLADRRAELQAGIDALERHIVAEAKADPAARLLQTAPGVGPLTAHALLGTVPDPARFDSGRDFAAWLGLTPRENSTAGKRRSGAITKQGDRTLRRLLVLGATAWLRQVAARPDKGSPWLLGLMAHNRTKKKLVAVAQAARTARILWAMLTHNQPYRAPAAG

SEQ ID NO: 15680 - protein, 319 aa, unidentified
  source 1..319: note = protein_896caf6
  REGION 5..152: note = RuvC_domain
  SITE 8: note = RuvC_P1
  SITE 55: note = RuvC_P2
  SITE 92: note = RuvC_P3
  SITE 94: note = RuvC_P4
  SITE 97: note = RuvC_P5
  REGION 200..274: note = Tnp_domain
  SITE 224: note = Tnp_P2
  SITE 232: note = Tnp_P3
  SITE 233: note = Tnp_P4
  SITE 245: note = Tnp_P5
MKHYAGLDVSVKETSICIVNETGVICREIKVASHPEDLVQALKNPEWRLVRIGLEAGPLSQWLFSGLAEAGLPAICIETRHAKAFLKAQMNKTDRNDARGIAQMTRVNLFRPVHVKTLTSQHRRAPLTARKLLQEKAIAIENDIRGLLRNFGLKVGIVGTVGFDDHIRELVDGMPDLGEIMKPLLAARQKLRETFMGAPPQAAISTIDVPLRFRNSRAVGPALGLTPVLNQSGESYRVGRVSLCGDGMMRALLYEAAQVMLSRVRKWSWLKAWAMNVAKRRGRQKAIVALARRLAVIMHRMWSDGTEFRWTRERMPAAI

SEQ ID NO: 15681 - protein, 318 aa, unidentified
  source 1..318: note = protein_d607358
  REGION 6..150: note = RuvC_domain
  SITE 9: note = RuvC_P1
  SITE 55: note = RuvC_P2
  SITE 95: note = RuvC_P3
  SITE 97: note = RuvC_P4
  SITE 100: note = RuvC_P5
  REGION 190..276: note = Tnp_domain
  SITE 198: note = Tnp_P1
  SITE 228: note = Tnp_P2
  SITE 236: note = Tnp_P3
  SITE 237: note = Tnp_P4
  SITE 249: note = Tnp_P5
MTFTPIGIDIAKAKFDAAALRHGKYQTKVFHNTPEGFTAFLAWLQTFPAPHVCLEATGRYGDALALFLSDHDLAFSVINPTPIHAFGQAELSRTKTDKRDAKRIARFCHSQRPPLFQPPPPAVRQLQALVRRFDNLVEMRQMEKNRLEGADPTVRTSIETLLATLEAEIATPRNRIREHIDHDPDLRQRRDRLDTIPGVGDATIAVLLAALGDVHRFDRARCVEAFAGLSPKERQSGKWKGHTRLSKIGDARLRKALYFPALVAWRHNPLIRAFCERLKAQGKNGKIIACAALRKRLVLAYGVLKSGQPFDPNYALAA

SEQ ID NO: 15682 - protein, 318 aa, unidentified
  source 1..318: note = protein_14fefed
  REGION 8..148: note = RuvC_domain
  SITE 11: note = RuvC_P1
  SITE 54: note = RuvC_P2
  SITE 94: note = RuvC_P3
  SITE 96: note = RuvC_P4
  SITE 99: note = RuvC_P5
  REGION 190..274: note = Tnp_domain
  SITE 198: note = Tnp_P1
  SITE 227: note = Tnp_P2
  SITE 235: note = Tnp_P3
  SITE 236: note = Tnp_P4
  SITE 248: note = Tnp_P5
MQISGCFIGVDVGKFELQVADHEGAIVSGSLANSRSSIVGWLKRLPTGSAIAMEATGGYQELLARLAHERGFAVYVLNPTHVHHYAISLGNRGKTDRLDAEVIAQYIAQRHTKLHRYEPVSAELQQVRSLQSLRAAVVRVGASLRLSSQRHGCASGHQEKALASLRAWADALERELIAKVKAHSEWAKTYGLLTGICGIGPINGAALTTLFSRVPFASSDAAVAFCGLDPRPKESGRKVGRRRLSKQGDKAARTLLYNAASSAARTAHFKDYYATLRARGLPSTAALVVIARKLLRIAYGVWRTGQAFDPAKLNFKKT

SEQ ID NO: 15683 - protein, 332 aa, unidentified
  source 1..332: note = protein_7abf5d8
  REGION 7..149: note = RuvC_domain
  SITE 10: note = RuvC_P1
  SITE 53: note = RuvC_P2
  SITE 88: note = RuvC_P3
  SITE 90: note = RuvC_P4
  SITE 93: note = RuvC_P5
  REGION 209..271: note = Tnp_domain
  SITE 217: note = Tnp_P1
  SITE 247: note = Tnp_P2
  SITE 255: note = Tnp_P3
  SITE 256: note = Tnp_P4
MQDVTLIGIDLGKHSFHLPGQDARGKAIFRNKLSRKQLIEFLATLHACTLVMEACAGAHHMARRLATLGHQVKLISPQFVRPFVKSNKSDFVDAEAICEAASRPSMRFGTPKTGSQQTLCALHKVRDSFVQDRVKTINQIHGFLLEFGISLPVGNAVIRRLPAVLSEHPLPPRLITTLERLHAHFKYLSEQIGEIDRELAMQLADNDLGQRLLSIPGVGPVTASVLAAEIGDGKQYASSRDFAAPIGLVPRQYSTGGRTNLLGIRGGTRIFADSSFNAHGPTCTGFPTRLVHWPSGSVRCLLGGIPTWSLVHWPTNSRVSRGHCRRTMPRSL

SEQ ID NO: 15684 - protein, 344 aa, unidentified
  source 1..344: note = protein_21f3e85
  REGION 5..152: note = RuvC_domain
  SITE 8: note = RuvC_P1
  SITE 55: note = RuvC_P2
  SITE 92: note = RuvC_P3
  SITE 94: note = RuvC_P4
  SITE 97: note = RuvC_P5
  REGION 212..299: note = Tnp_domain
  SITE 220: note = Tnp_P1
  SITE 250: note = Tnp_P2
  SITE 258: note = Tnp_P3
  SITE 259: note = Tnp_P4
  SITE 271: note = Tnp_P5
MYHYAGIDVSLEQSAVCVVDGSGRIVREAKVASEPAALIAWYGSLATPLERIGLEAGPLSQWLYAALREAGLAVELLETRHVRDAFKAMSVKTDRNDARAIAQLMRLGWFRPVHCKSIEAQEVRAVLTARKLLQTKLLDVENSLRGILRGFGLKVGKTTERSFAARIEELTKGHAALASIAKAMLAVHAVLLREFKGLDKQVLQIAKAQPQARLLMTTPSVGPIVALTYANAIDDPARFKSSKAAGAHFGLTPKKYQSGQTDYTGRITKIGDASVREALYQAAHIMLTKPIKNCTELKSWAMRIAKRAGLRKAKVALARKLAVVLHRMLADAKPFNPNAKLATT

SEQ ID NO: 15685 - protein, 319 aa, unidentified
  source 1..319: note = protein_7eba8a0
  REGION 7..157: note = RuvC_domain
  SITE 10: note = RuvC_P1
  SITE 58: note = RuvC_P2
  SITE 99: note = RuvC_P3
  SITE 101: note = RuvC_P4
  SITE 104: note = RuvC_P5
  REGION 200..264: note = Tnp_domain
  SITE 208: note = Tnp_P1
  SITE 238: note = Tnp_P2
  SITE 246: note = Tnp_P3
  SITE 247: note = Tnp_P4
  SITE 260: note = Tnp_P5
MRKETEAGIDVSKDVLDVAARRDERQLETARFGNDAAGHQKLVRWLTRGGRTARVVLESTGTYSLDVALALHRTRGVAVTVANPRAIKQFTGALMQRSKTDLTAAIALREFAIRMPFVAWQPPAAHVLELRGIARRIATLVVERTRERNRLHALCATAERSAVVCNDIEVNVRHLDRRIELLTEQAIALIADHADLREAFERLVSVPGIAAHSAVQLLPELLVLPPGMTVRQWVAHAGLDPRAHQSGTSVDKPARISKVGNRPHPAGPLHARARRGAAQSARAGVLRQARGARQDSPPSVRRRHAEAPSRDLWNALDTH

SEQ ID NO: 15686 - protein, 341 aa, unidentified
  source 1..341: note = protein_fd710e5
  REGION 7..149: note = RuvC_domain
  SITE 10: note = RuvC_P1
  SITE 53: note = RuvC_P2
  SITE 88: note = RuvC_P3
  SITE 90: note = RuvC_P4
  SITE 93: note = RuvC_P5
  REGION 211..296: note = Tnp_domain
  SITE 219: note = Tnp_P1
  SITE 249: note = Tnp_P2
  SITE 257: note = Tnp_P3
  SITE 258: note = Tnp_P4
  SITE 270: note = Tnp_P5
MTEVTMIGLDLAKNVFQVHGMRPDGSVAFRVKLSRIKVLTFFAAQPICTVAMEACASAHYWGRELSGLGHDVKLIPPIYVKPFVKRQKNDMADAEAIAEAASRPTMRFVAVKSEEKQAAGMAFRTRDLFVRQKTQTINALRGHLAEYGVVAPKGPAHLGRLIRAVEEVESGLPDPVVALARMLLDQIAMLQAKIDELEKEIRHQVRRDDVTARLMTIPGIGPISAAAMMAFAPPPESFAKGRDFAAWMGLTPRQHSSGGKERLGRTSKMGQRDLRRLLITGAMAVVRWATRRGAPEGSWLWRMLQRKPRMLVAVALANRMARIAWALMAKGGVYKDPSVAA

SEQ ID NO: 15687 - protein, 269 aa, unidentified
  source 1..269: note = protein_c51b6e8
  REGION 39..107: note = RuvC_domain
  SITE 49: note = RuvC_P3
  SITE 51: note = RuvC_P4
  SITE 54: note = RuvC_P5
  REGION 150..214: note = Tnp_domain
  SITE 158: note = Tnp_P1
  SITE 188: note = Tnp_P2
  SITE 196: note = Tnp_P3
  SITE 197: note = Tnp_P4
  SITE 210: note = Tnp_P5
MRKETEAGIDVSKDVLDVAARRDERQLETARFGNDAAGQFTGALMQRSKTDLTAAVALREFAIRMPFVAWQPPAAHVLELRGIARRIATLVVERTRERNRLHALCATAERSAVVCNDIEVNVRHLDRRIELLTEQAIALIADHADLREAFERLVSVPGIAAHSAVQLLPELLVLPPGMTVRQWVAHAGLDPRAHQSGTSVDKPARISKVGNRPHPAGPLHARARRGAAQSARAGVLRQARGARQDSPPSVRRRHAEAPSRDLWNALDTH

SEQ ID NO: 15688 - protein, 406 aa, unidentified
  source 1..406: note = protein_2dc78e8
  REGION 5..163: note = RuvC_domain
  SITE 8: note = RuvC_P1
  SITE 58: note = RuvC_P2
  SITE 100: note = RuvC_P3
  SITE 102: note = RuvC_P4
  SITE 105: note = RuvC_P5
  REGION 277..363: note = Tnp_domain
  SITE 285: note = Tnp_P1
  SITE 315: note = Tnp_P2
  SITE 323: note = Tnp_P3
  SITE 324: note = Tnp_P4
  SITE 337: note = Tnp_P5
MLNAVGIDVSKGKSSVAVLRPAGEVVRKPFNVSHSVKELSELVSYVGCLDGETRVVMETTGHYHEPVLKAFLDAGIFVSAVNPSLIKHHDSDENPLRKVKSDPADAKKIAKYTLDKWEYLRQHSAMDNTRTQLKTLNTQFHFFMQQKVALKNNLISLLDLTYPGANALFDSPVRSDGSEKWIDYVHSFWHVDCVRKIGLKAFTERYQNFCKHHGYNFQPGKPEELFNASKELIAVVPKDAVYKQLILSNIEQLNTVSKQIEEFRRTMNQLASILPEYNTVMSMYGVGPTYGPQLMAEIGDISRFDHRSAITAFAGVDPGVNQSGTMNYESNRASKHGAPRLRKTLFQIMSTLLQLAPTDDPVYLFMMKKKAEGKPYQVYMTAGANKFLRIYYGKIKECLASQPSEV

SEQ ID NO: 15689 - protein, 307 aa, unidentified
  source 1..307: note = protein_1ce4651
  REGION 7..146: note = RuvC_domain
  SITE 51: note = RuvC_P2
  SITE 91: note = RuvC_P3
  SITE 93: note = RuvC_P4
  SITE 96: note = RuvC_P5
  REGION 187..276: note = Tnp_domain
  SITE 195: note = Tnp_P1
  SITE 224: note = Tnp_P2
  SITE 232: note = Tnp_P3
  SITE 233: note = Tnp_P4
  SITE 244: note = Tnp_P5
MPQTVIGCDLARGWIDTHVLPSGATARIENTPEGIARWIASWGDGALVVFEATSGCDGTLIEALASRGVRFARVNPRQAREFARALGVLAKTDRVDARILAEMGRMLPLEATAPPDPDRMRLADFLRRRKQLVEMRKAEKVRRHNAGQPAILSEIEAMIALLDQRIANMDRTIAALIAANQELSEQARLLAAVPGIGPTVLATLLGELPELGTLCRRRIASLAGLAPHPRESGTWRGTRRIWGGRRKVREALYIAALSASRRIPTLIAMRDRMRAAGKAPKTILIAIARQLLVILNAMIRHREPIRL

SEQ ID NO: 15690 - protein, 331 aa, unidentified
  source 1..331: note = protein_2090fa9
  REGION 5..151: note = RuvC_domain
  SITE 8: note = RuvC_P1
  SITE 55: note = RuvC_P2
  SITE 95: note = RuvC_P3
  SITE 97: note = RuvC_P4
  SITE 100: note = RuvC_P5
  REGION 201..283: note = Tnp_domain
  SITE 204: note = Tnp_P1
  SITE 234: note = Tnp_P2
  SITE 242: note = Tnp_P3
  SITE 243: note = Tnp_P4
  SITE 256: note = Tnp_P5
MSVHVGLDVGSRTTVMAWRDKTRPAGSWDIAQTPKGRKAAVKKLSALKPLSIVMEATGIYYLDLAMELSAAGLPVSVINPKSSRNFARLMLQHSKTDAIDAQLLAEYGERMSPRLWTPPTPAQLELRAIGRHINRLTGHRTRAKNELHALRATETSSTLMIEDEEEAIVMLDKRIERFRHAGREIIASCPTLQAQFDHMVVAPGMGEVSTLAALAELTTLPVTLKSSQVSRHAGLDVRLTQSGTSIDKPGRLSKCGNAYLRSSMFMPALSAIRCDPYVKAFYSSLVGRGKRKMQAICAVMRKYLTGLWACMQSGEDFDTAKLFSEKHLLKA

SEQ ID NO: 15691 - protein, 341 aa, unidentified
  source 1..341: note = protein_4f753c9
  REGION 7..148: note = RuvC_domain
  SITE 10: note = RuvC_P1
  SITE 53: note = RuvC_P2
  SITE 88: note = RuvC_P3
  SITE 90: note = RuvC_P4
  SITE 93: note = RuvC_P5
  REGION 210..295: note = Tnp_domain
  SITE 218: note = Tnp_P1
  SITE 248: note = Tnp_P2
  SITE 256: note = Tnp_P3
  SITE 257: note = Tnp_P4
  SITE 269: note = Tnp_P5
MKQFIRIGVDLGKRYFQVHALMSEDGRAVTRKLPRSGFLAFFADIEPCLIGMEACGSAHYWARELQAKGHEVRLIPPSYVKPYVKRGKNDAVDAAAVCEAVSRPDMRFVPIKSAGNQAALMLHKTRELLIKQRTMSVNALRGHLSEFGLVAAKGIGHADELVEMAKEDATLPAAAKAVVKVFAAQLEAINASIATLEREIAGAHAQSEVSKLLASVPGVGKIIATAIVASVPDPGVFKSGRDFAAWLGLTPRQDSTGGKVKLGPITKQGNRYIRKLLTLGSTSLLRVLAKRKGVLHDWLVALLAKKPARLVTVALANKLARILWAMMTTGEAFRMEMFERA

SEQ ID NO: 15692 - protein, 349 aa, unidentified
  source 1..349: note = protein_d9c5b18
  REGION 6..147: note = RuvC_domain
  SITE 9: note = RuvC_P1
  SITE 52: note = RuvC_P2
  SITE 87: note = RuvC_P3
  SITE 89: note = RuvC_P4
  SITE 92: note = RuvC_P5
  REGION 211..298: note = Tnp_domain
  SITE 219: note = Tnp_P1
  SITE 249: note = Tnp_P2
  SITE 257: note = Tnp_P3
  SITE 258: note = Tnp_P4
  SITE 270: note = Tnp_P5
MELDTIGIDLGKTVFHLVGLNRAGEVVVRRKFSRTQLLRFAANLRVRLIGMEACGGSHFLGRSLREQGHEVRLMPAQYVKPYVKTNKNDYIDAEAIAEAVGRANMRFVPIKSDDQLDMQSLHRVRDRWVARRTSAINQIRGLLLERGITFRKGRRHAEASLPAILEDADNRLSGFLRMLLAQLQSELRQLQSHIEEADALIAKAAREREACQRLMAIPGIGPLTATAVVASIGNGAEFRKGRSFAAWLGLVPKQESTGGRQKLLSISKRGNHYLRRLFVSGARAVLQRRDKQSSGLSAWLGQLASRVHTNVAAVALANKMARVAWAVLAKSEAYRPPLSVTPTEALACN

SEQ ID NO: 15693 - protein, 334 aa, unidentified
  source 1..334: note = protein_a745919
  REGION 6..147: note = RuvC_domain
  SITE 9: note = RuvC_P1
  SITE 51: note = RuvC_P2
  SITE 86: note = RuvC_P3
  SITE 88: note = RuvC_P4
  SITE 91: note = RuvC_P5
  REGION 208..295: note = Tnp_domain
  SITE 216: note = Tnp_P1
  SITE 246: note = Tnp_P2
  SITE 254: note = Tnp_P3
  SITE 255: note = Tnp_P4
  SITE 267: note = Tnp_P5
MTIQLLAVDLGKRSFHMHGITADGVVVSRKVSRSKFEAAVTKLDPVVIAMEACASAHHWGRRFKASGREIRLVNPRFVKAFVRGSKNDAVDAEAIYDAASRPTMRFVPVKTTEQQDLQSLHRVRERLITQRTSLINHTRGLLAEYGVALPKGAWRFRDQAPAAIAETELSELAYFLFSELLDQLRDVDARLSKVDTRIVAICREHDACRRLVALPGVGPVIATALVAAVGDGCHFRSGRELAAWIGLVPRQYTTGGKPRLGGIGKRANHYLRRQLIHGARAVISRLAGRDDRRSVWLKSIVARAGFNKALVALANKTARIAWVILARNEEYVPA

SEQ ID NO: 15694 - protein, 340 aa, unidentified
  source 1..340: note = protein_f6ed963
  REGION 7..149: note = RuvC_domain
  SITE 10: note = RuvC_P1
  SITE 53: note = RuvC_P2
  SITE 88: note = RuvC_P3
  SITE 90: note = RuvC_P4
  SITE 93: note = RuvC_P5
  REGION 212..298: note = Tnp_domain
  SITE 220: note = Tnp_P1
  SITE 250: note = Tnp_P2
  SITE 258: note = Tnp_P3
  SITE 259: note = Tnp_P4
  SITE 271: note = Tnp_P5
MSEIKTIGLDLAKHVFQVHGINAAGECVLRKRLRRGQVISFFAELPRCLVGLEACATAHYWARELQAAGHEVRLMPAQYVKAYVKRNKTDAADAEAICEAVRRPTMRFVPIKTAEQQAAVLLHRGRERLVRQRTTLVNALRAHLAEFGVVAPAGLRNVSQLIAIVRDASDRRLPDLARPVLRVLATQVELAQAAVAKVEKELTAWHRSNPLSQRLATIPGIGPIIATAIAAMVVEPSGFASAREFAAWLGLVPRQHSTGGKARLGGISKRGNRYLRRLLINGASANLLRSKATNADPWVIGLRRRRPSLVVAVALANKTARIAWAVMHRQEDYRSLAAAA

SEQ ID NO: 15695 - protein, 350 aa, unidentified
  source 1..350: note = protein_8ac21f3
  REGION 13..154: note = RuvC_domain
  SITE 16: note = RuvC_P1
  SITE 59: note = RuvC_P2
  SITE 94: note = RuvC_P3
  SITE 96: note = RuvC_P4
  SITE 99: note = RuvC_P5
  REGION 218..303: note = Tnp_domain
  SITE 226: note = Tnp_P1
  SITE 256: note = Tnp_P2
  SITE 264: note = Tnp_P3
  SITE 265: note = Tnp_P4
  SITE 277: note = Tnp_P5
MSIRNKPRDAAVFGIDIGKTVFHVVGLDASHAPIQKATFRRETLLQFFERASPVLVGMEACPGSQWLARKLQAMGHIVRIVPAQFVKPFVKSNKNDIIDAEAIAEAVTRPTMRFVEIRSPEQIDLQALHRVRDRMIAHRTRLISQMRAFCLEYGIAIHQGAGKFKADMPRVLGDMDNELTPAMRRMLTEVFGELGDLEQRIAAMNREIEAIAARSDTARRLMTVPGVGPLGATALLASAGTGRQFRKARDLAAWLGLVPREYSTGGKTRLLGISKRGNKYLRRMIIHGARSCVTHLDRSRDRLGPWLDGLERRMHKNKVTVALAAKIARILWVVLTKPGASYERRDPAFG

SEQ ID NO: 15696 - protein, 320 aa, unidentified
  source 1..320: note = protein_c64226a
  REGION 8..163: note = RuvC_domain
  SITE 11: note = RuvC_P1
  SITE 56: note = RuvC_P2
  SITE 96: note = RuvC_P3
  SITE 98: note = RuvC_P4
  SITE 101: note = RuvC_P5
  REGION 195..279: note = Tnp_domain
  SITE 203: note = Tnp_P1
  SITE 232: note = Tnp_P2
  SITE 240: note = Tnp_P3
  SITE 241: note = Tnp_P4
  SITE 252: note = Tnp_P5
MSALSVTVGIDVAKAHVDVCVLDSNGAVQRFANDADGHSALAAALQPLGVGLVAMEATGGYEAALACALQASGLPVAVLNPRQARDFAKSMGRLAKTDAVDARMLAEMAAVLVRREDLARFVRPLADECQQWLSALVTRRRQLLAMLGSERQRLQITPRKLHPSIQAIVAAIKAQLDDLEAQMVGHVGEHFGELDRLLQSASGIGPVASATLIAQLPELGRLNRREIAALVGVAPMSNDSGNRKGRRRVQGGRFEIRRVLYMATLTAARYNPAIRAFYERLKGAGKLPKVALVACMRKLLTMLNAMVRTGKPWDASLHRA

SEQ ID NO: 15697 - protein, 339 aa, unidentified
  source 1..339: note = protein_3ec8eb0
  REGION 6..147: note = RuvC_domain
  SITE 9: note = RuvC_P1
  SITE 52: note = RuvC_P2
  SITE 87: note = RuvC_P3
  SITE 89: note = RuvC_P4
  SITE 92: note = RuvC_P5
  REGION 210..294: note = Tnp_domain
  SITE 218: note = Tnp_P1
  SITE 248: note = Tnp_P2
  SITE 256: note = Tnp_P3
  SITE 257: note = Tnp_P4
  SITE 269: note = Tnp_P5
MKLTPVGVDIAKNVFQIHYVNAETGEIVNRQIKRARFLEYFANLAPCLIGMEACGGSQHWARRLLEMGHQVKLMPAKFVKAFNIGNKNDPADARAIWLAVQQPGKAVAVKTEAQQAVLALHRMRQQLVKFRTMQINSLRGLLAEYGEVMGKGRSRLDKAIAGVLEKLTERLPTVLIETLREQWNGLEMLDRQIAEIERRLQEWMKQDKACKSIAAVPGVGLLTATAAVATMGDPKSFRSGREFAAWLGLVPRQTGSGGKVLLLGISKRGDTYLRTLLIHGARSVLYNAKDPGTWVERIGKRRPPNVVLVALANKMARTIWAILAHDRPYEKGFISAKPA

SEQ ID NO: 15698 - protein, 285 aa, unidentified
  source 1..285: note = protein_08c7f5e
  REGION 6..155: note = RuvC_domain
  SITE 9: note = RuvC_P1
  SITE 52: note = RuvC_P2
  SITE 87: note = RuvC_P3
  SITE 89: note = RuvC_P4
  SITE 92: note = RuvC_P5
  REGION 159..247: note = Tnp_domain
  SITE 167: note = Tnp_P1
  SITE 197: note = Tnp_P2
  SITE 205: note = Tnp_P3
  SITE 206: note = Tnp_P4
  SITE 218: note = Tnp_P5
MNLTRIGLDLAKQVFQVHGVDRHEHVVCRRQLKRAQVRDFFRQLPPCLVAMEACGSAHYWARELRELGHTVRLIAPQFVKPYVKGDKHDAHDAEAICEAASRPATMALLETVMATEPASLPAPMGELLRELKDELQTLEARIARLERQIQAHVRGDARIQRLLAVEGIGPISASAVAASAGDARQFRTGRQFAAWLGLVPRQHSTGGQQRLGNISKRGDTYLRTLLIHGARAVVRCCANKTDARSRWLQGLLQRRPANVVAVALANKNARILWALLSRETCYRPG

SEQ ID NO: 15699 - protein, 341 aa, unidentified
  source 1..341: note = protein_f750e16
  REGION 7..148: note = RuvC_domain
  SITE 10: note = RuvC_P1
  SITE 53: note = RuvC_P2
  SITE 88: note = RuvC_P3
  SITE 90: note = RuvC_P4
  SITE 93: note = RuvC_P5
  REGION 210..296: note = Tnp_domain
  SITE 218: note = Tnp_P1
  SITE 248: note = Tnp_P2
  SITE 256: note = Tnp_P3
  SITE 257: note = Tnp_P4
  SITE 269: note = Tnp_P5
MREFIRIGVDLAKNVFQLHGVERVGGSPFQRKLTRAKFRAFFAQLRPCRVGMEACGSAHYWARVLRAMGHEVVLIAPAYAKPYVKRGKNDAADAAAICEAMSRPEMRFVPIKSVDQQAVLMLHKTRDLLVKQRTMTVNALRGHLQEFGLIAAKGIHRVQELVALALADEGLPEEAKQAAALLAWQSEQLNMKIDGLEKTIAAASAKHPMSRLLQEIPAIGPLIASAMAASLPDPSVFKSGRDFAASLGLTPSQHSSGGKEKLGAITKRGNRYLRKMLVVGCTSVLRVAHKRKGALAEWIVALKAKKPERVAAVALANKLARICWAVLSTGEAFREELYARA

SEQ ID NO: 15700 - protein, 331 aa, unidentified
  source 1..331: note = protein_c6df2c4
  REGION 5..151: note = RuvC_domain
  SITE 8: note = RuvC_P1
  SITE 55: note = RuvC_P2
  SITE 95: note = RuvC_P3
  SITE 97: note = RuvC_P4
  SITE 100: note = RuvC_P5
  REGION 196..283: note = Tnp_domain
  SITE 204: note = Tnp_P1
  SITE 234: note = Tnp_P2
  SITE 242: note = Tnp_P3
  SITE 243: note = Tnp_P4
  SITE 256: note = Tnp_P5
MSTFVGIDVAAESFDLVCRSNSKHSKAQTFPQTAQGHARAIRKLQALQPTCIVLEATGIYYLDLALALHEAGLPVCVINPRSFRHFAEITLRGSKTDPLDAALLAEYAERMTPRRWTPPPTTYRELRDLGRHLNRLLHARTQAKNQLHALKSRQGAPKLLIEDTEEGIAQLNQRIERLQQAAQARIQKAPELDQQQTHLCAATGIATASSLALLAELCTLPKDLKANQVVRHAGLDVRLHESGSSVHRPGRLAKTGNAYLRSALYMPAMVAIVHDPYAKAFYNALVARGKKKIQALCAVMRKYLTGIWACMQSGQPFDSSKLFSDQHQQPA

SEQ ID NO: 15701 - protein, 349 aa, unidentified
  source 1..349: note = protein_f314d84
  REGION 6..148: note = RuvC_domain
  SITE 9: note = RuvC_P1
  SITE 52: note = RuvC_P2
  SITE 87: note = RuvC_P3
  SITE 89: note = RuvC_P4
  SITE 92: note = RuvC_P5
  REGION 211..296: note = Tnp_domain
  SITE 219: note = Tnp_P1
  SITE 249: note = Tnp_P2
  SITE 257: note = Tnp_P3
  SITE 258: note = Tnp_P4
  SITE 270: note = Tnp_P5
MEIDTIGIDLGKTVFHLVGLNRAGEVVVRRKFSRLQLLRFTANLGVRLIGMEACGGSHFLGRSLREQGHEVRLMPAQYVKPYVKTNKNDYIDAEAIAEAVGRANMRFVPIKSDEQLDMQSLHRVRDRWVARRTSVINQMRGLLLEHGITFRKGRRHAEACLPGVLEDADNLLSGLLRMLLAQLQGELRHLQSQIDEADTLIARAAGDHEACRRLMAIPGIGPLTATAVVASIGSGAEFRKGRSFAAWLGLVPKQESTGGRQKLLSISKRGNHYLRRLLVSGAGAVLQCRDKQSPGLSAWLGQLASRVHTNVAAVALANKMARVAWAVLAKSEAYRPPLSVISTEALVCN

SEQ ID NO: 15702 - protein, 316 aa, unidentified
  source 1..316: note = protein_c1afab2
  REGION 7..152: note = RuvC_domain
  SITE 10: note = RuvC_P1
  SITE 54: note = RuvC_P2
  SITE 94: note = RuvC_P3
  SITE 96: note = RuvC_P4
  SITE 99: note = RuvC_P5
  REGION 190..274: note = Tnp_domain
  SITE 198: note = Tnp_P1
  SITE 227: note = Tnp_P2
  SITE 235: note = Tnp_P3
  SITE 236: note = Tnp_P4
  SITE 247: note = Tnp_P5
MSELVYVGIDVAKDSFEVAVTGESQTLKLDNDEAGHAELSQLLMPLAPRLVLLEATGGYEQDLALALAAAGLRVSVVNPRQARDFARCTGKLAKTDRIDAQALRGFALMLDVQGHEPRALADDQRRELTALVVRRRQLVAMLVAERQRLGVAHQKAKPSILAIMDAIAAQLKDVDGGLKAHIQAHHADLAKLLTSVKGVGPTTASTLLAQLPELGHLNRKQITALVGLAPMNRDSGTLRGQRHIFGARADVRRVLYVAALVGTRFNPVLKAFYAKLLAAGKPKKVALVACMHKLLVILNAIARTKSPWRNDFAQAL

SEQ ID NO: 15703 - protein, 405 aa, unidentified
  source 1..405: note = protein_18c38ed
  REGION 9..163: note = RuvC_domain
  SITE 12: note = RuvC_P1
  SITE 60: note = RuvC_P2
  SITE 100: note = RuvC_P3
  SITE 102: note = RuvC_P4
  SITE 105: note = RuvC_P5
  REGION 270..355: note = Tnp_domain
  SITE 278: note = Tnp_P1
  SITE 308: note = Tnp_P2
  SITE 316: note = Tnp_P3
  SITE 317: note = Tnp_P4
  SITE 329: note = Tnp_P5
MTSSYGVFLGLDVGKGDHHAVGLDPAGKRLHNGPLPNSEPKLRAVFDKLAAHGPLLVVVDQPATIGALPVAVARACGHQVAYLPGLAMRRIADLYPGRAKTDARDAFIIADAARSLPHTLRQVGVGDDALAELDVLVGFDDDLAGEATRLSNRIRGLLTGIHPALERALGPKVTHLAVLEILCRFGGPAGIRAAGRGELASIVTAHAPRMGEKLVTTILAALDEQTVTVPGTAAADTVLPRLAENLKTVLQQRKTVAAEVEGILDAHPLAGVLTSMPGIGVRTAARILLEIGDASAFASSAHLAAYAGIAPVTRTSGSSIKGEHPARTGNRKLKRAFFLAAFAALSDPVSRAYYQRKRDEGKKHNAALICLARRRCDVLFAMLRDKTCYQAPAPPQRDPAESQAA

SEQ ID NO: 15704 - protein, 382 aa, unidentified
  source 1..382: note = protein_fe6fb1a
  REGION 63..188: note = RuvC_domain
  SITE 93: note = RuvC_P2
  SITE 128: note = RuvC_P3
  SITE 130: note = RuvC_P4
  SITE 133: note = RuvC_P5
  REGION 251..335: note = Tnp_domain
  SITE 259: note = Tnp_P1
  SITE 289: note = Tnp_P2
  SITE 297: note = Tnp_P3
  SITE 298: note = Tnp_P4
  SITE 310: note = Tnp_P5
MNAPTYEVGDAEEANPNGPPASKCPNGRSLRSSQANRKLQYEVYDGRGGHREERLFQLHWVDAGTGEIVNKQLKRAAFLEHFANREPCLIGMEARGGAQHWARRLIEMGHPVKLMPAKFVKAFHIGNKNDSADARAIWMATQMPSKPVAVKTEAQQAVLTLHRLRQQKIKIRTMQMNSLRGLLTEYGEVMAKSRAALDRAIPGVLAKLAERLPAMLIDSLRELWNDLDRLDKQIADIERRLQTWMKEDKACKAIAAIPGVGLLTATATVATMGDAKAFRSGREFAAWLGLVPKQIGTGGKVQLLGISRRGDTYVRTLLIHGARSVLFHAKHAGGWVEQIRTRRPSNVVAVALANKMARTIWAVLAHDIPYSSDHVSLRGVRN

SEQ ID NO: 15705 - protein, 311 aa, unidentified
  source 1..311: note = protein_da675e0
  REGION 6..154: note = RuvC_domain
  SITE 9: note = RuvC_P1
  SITE 53: note = RuvC_P2
  SITE 92: note = RuvC_P3
  SITE 94: note = RuvC_P4
  SITE 97: note = RuvC_P5
  REGION 188..272: note = Tnp_domain
  SITE 196: note = Tnp_P1
  SITE 225: note = Tnp_P2
  SITE 233: note = Tnp_P3
  SITE 234: note = Tnp_P4
  SITE 245: note = Tnp_P5
MNKDTIGIDISKDTLDTHRLSTGAAARFANSAAGLRALRRWIGAQMPDLVVYEATGAYHAALERSFAGVLPLVKVNPLQARRFAQARGTRAKTDAVDARVLAVLGSALDLAPDVPAGKNQHDLKELQIARMALIKERTRLLNRSKTQSLALLKRQSKARLEQIKRQLTELEAALLDLTRQCPKRARAFDILCSIPGLGPVTAVAILVECPEIGTLTRKQIASLAGLAPMTRQSGQWRGTAFIQGGRKFLRDALYMPALVAARYNPDLRQRYQTMIQAGKPAKVALTALMRKMIELANALVQQNRKWTPKTA

SEQ ID NO: 15706 - protein, 367 aa, unidentified
  source 1..367: note = protein_8b3f498
  REGION 22..165: note = RuvC_domain
  SITE 25: note = RuvC_P1
  SITE 70: note = RuvC_P2
  SITE 105: note = RuvC_P3
  SITE 107: note = RuvC_P4
  SITE 110: note = RuvC_P5
  REGION 229..319: note = Tnp_domain
  SITE 237: note = Tnp_P1
  SITE 267: note = Tnp_P2
  SITE 275: note = Tnp_P3
  SITE 276: note = Tnp_P4
  SITE 288: note = Tnp_P5
MQKRTTKPQAAHPETLSLCTTVAVDLAKQVFQIAGEEAHGELVYEKRLQSREAFTSFLCQIAKGATVLLETGPGAQAWARQVQALGCQVRLLPAQRVAEHRSGAKNDRNDAQAILRAGRDTTIHAVPVKTVEALAMQAAHRVRQGYIRRRTTLGNQIRGLLLEHGLAIPQGAAALSDRVSRILEDATLPLPDLLRELIADMQAEWLALEGRLLLLTKRLEQCARADKTASRLMSVRGVGPIIATALVAKQVEPARFPNARQFAAYFGLVPDQHSSGQKVRLGKMSKRGDGYLRSLMVEGAHAVLRTLKADSEEVDDRRLNRWMQRHGRKGAAIRLANRNLRIVWVLLQSDARYCRNPSVQPGATIAE

SEQ ID NO: 15707 - protein, 403 aa, unidentified
  source 1..403: note = protein_188a338
  REGION 4..160: note = RuvC_domain
  SITE 7: note = RuvC_P1
  SITE 57: note = RuvC_P2
  SITE 97: note = RuvC_P3
  SITE 99: note = RuvC_P4
  SITE 102: note = RuvC_P5
  REGION 274..361: note = Tnp_domain
  SITE 282: note = Tnp_P1
  SITE 312: note = Tnp_P2
  SITE 320: note = Tnp_P3
  SITE 321: note = Tnp_P4
  SITE 334: note = Tnp_P5
MNSVGIDISKGRSTIAVMRPFGEVVISTFEVCHTDSELSALARRLKSLNGETRVVMEATGNYHAPVAKLLHDAGLYVSVVNAKLVHGYGNNDLRRVKTDRKDAVKLANYGLDRWLTLPRYVPEEDTRLLLKNCYRQYRQYSKVQTVLKNNLISLLDTVFPNANRLFSSPIRGDGSEKWVDFVAEFWHCRCVSEKSEKAFTNKYQRWCKKHGYNFSEAKAHAIYEEASRHIGVMPKSETTRLLVEQAVSQLRATSAALAALKQEMQSLASTLPEYPVVMDMFGVGPSLGPQLIAEIGDVRRFYSKKALVAFAGIDAPPNDSGDVTGRHKSMSKVGASSLRRTLFLVMSVYLQRAPLDEPVYQFMDKKRAEGKPYRVYMMASANKFLRIYYATVKAYLESLEHTA

SEQ ID NO: 15708 - protein, 343 aa, unidentified
  source 1..343: note = protein_114ad43
  REGION 6..148: note = RuvC_domain
  SITE 9: note = RuvC_P1
  SITE 52: note = RuvC_P2
  SITE 87: note = RuvC_P3
  SITE 89: note = RuvC_P4
  SITE 92: note = RuvC_P5
  REGION 211..300: note = Tnp_domain
  SITE 219: note = Tnp_P1
  SITE 249: note = Tnp_P2
  SITE 257: note = Tnp_P3
  SITE 258: note = Tnp_P4
  SITE 270: note = Tnp_P5
MKVSTLGLDLAKNVFQVHGVDDEGNVTVRRQLRRQQMFSFFSELPPCLIGLEACGTSHYWARELAARGHDVRIIPPSYVKPYVRRGKNDAADAEAICEAVGRPNMRFVPVKSEDQQAALMQHKARELLIRQQNMLVNALRSHMAEMGMVAAQGRERLDRIVDVIMEEEDESLPALARASLRPLVAMLQANEAAIDDIDRAIKAAHKENEVSQRLASIPGVGVLTASAIAATVPDPSFFKSGREFAAWLGLVPRQNSSGGKERLGRISKQGNRYLRKLLVIGATSMLSVVRRKSSRQADWAKRLLERKPTRLVTIAMANKAARIAWALMTKKETYRTTAIATAA

SEQ ID NO: 15709 - protein, 398 aa, unidentified
  source 1..398: note = protein_d09f01d
  REGION 4..163: note = RuvC_domain
  SITE 7: note = RuvC_P1
  SITE 61: note = RuvC_P2
  SITE 102: note = RuvC_P3
  SITE 104: note = RuvC_P4
  SITE 107: note = RuvC_P5
  REGION 269..356: note = Tnp_domain
  SITE 277: note = Tnp_P1
  SITE 307: note = Tnp_P2
  SITE 315: note = Tnp_P3
  SITE 316: note = Tnp_P4
  SITE 329: note = Tnp_P5
MLYVGIDVAKHKHDLAVIDTEGTIFVRHLQIENNREGFTKLQMTLANLKKSTGEDIQIALEDTGHYCFNILRFLRTQGYPTYSYNPYLIKEYAKNQSLRKTKTDKKDAMTIARKLRTDLDKQSFSANPSMIELKYLTRHTARLKEDCTRKKVSYTRILDILFPELAPSLGSSSAKHQSYVYAILKEYPSAKKVGNAHLTKLTNLISAHSKGRFGKEHAVKLKALAQASIGQESPALEFELLQTIDTIQYLTTMRDKAEKEVARLMSEIDSPILTIPGIGYKLGSVLLAEIRDIKNFRSPNQLLAYAGAEPSVSTSGMNQTETGRMVKRGSSQLRWALHESARLMSIWSPSMRVYFQKKLAEGKHYNVAISHVVRKLVRIIYQLLKDNKPYEEQKMIVN

SEQ ID NO: 15710 - protein, 326 aa, unidentified
  source 1..326: note = protein_c80d686
  REGION 5..161: note = RuvC_domain
  SITE 8: note = RuvC_P1
  SITE 60: note = RuvC_P2
  SITE 100: note = RuvC_P3
  SITE 102: note = RuvC_P4
  SITE 105: note = RuvC_P5
  REGION 195..282: note = Tnp_domain
  SITE 203: note = Tnp_P1
  SITE 233: note = Tnp_P2
  SITE 241: note = Tnp_P3
  SITE 242: note = Tnp_P4
  SITE 255: note = Tnp_P5
MTCKVGVDISKAKLDVAWLRADGKYRSKVFPNNATGFVDLLGWLDSHLPGGKATAHVCMEATGAYHEGLALFLHDHAVAVSVVNPLQVKRFMELERVRNKTDDGDAKALARFCDKTGPALWEAPSASVRSLQALVARLDTLLELRQGELNRLEVAHDSVKPSLTAVIASLDDSIEDVRMQIRKTIDDDPDLQQRSELLASIPGLGDRTIPQLLAYIGRPERFTSVKALIAYASLTPMIRQSGTSVDKRRGTHPQGHRELRKALYFPAMVAGRYNPLVAEFWQRLKAQNKPGKLIVVACMHKLLAIAYGVLRSGKPFDVNHCKKACA

SEQ ID NO: 15711 - protein, 339 aa, unidentified
  source 1..339: note = protein_c3f83de
  REGION 6..147: note = RuvC_domain
  SITE 9: note = RuvC_P1
  SITE 52: note = RuvC_P2
  SITE 87: note = RuvC_P3
  SITE 89: note = RuvC_P4
  SITE 92: note = RuvC_P5
  REGION 210..294: note = Tnp_domain
  SITE 218: note = Tnp_P1
  SITE 248: note = Tnp_P2
  SITE 256: note = Tnp_P3
  SITE 257: note = Tnp_P4
  SITE 269: note = Tnp_P5
MKLTTVGIDIAKNVMQVHYIDIETGEIVNKPIKRAKFLEHFANRESCLIGMEACGGAQHWARQLILMGHQVKLMPAKFVKAFNVRNKNDAADARAIWLAVQQPGKAIAVKTEAQQAVLALHRMRQQLVKFRTMQINGLHGLLTEYGEVIGKGRAALDKAMPIVLERIADRLPSMLLDTLREQWNGLKQLDAQIAEIERRLREWMKEDKAAKALMEIPGVGVLTASAAVATIGDTKVFKSGREFAAWIGLVPKQTGSGGKVKLQGISKRGDVYLRTLLIHGARSVLAHAKQPSLWVEQMLKRRPLNVVVVALANKMARTIWALLAHNRLYQTDYVSVKPA

SEQ ID NO: 15712 - protein, 482 aa, unidentified
  source 1..482: note = protein_15f3fcc
  REGION 11..169: note = RuvC_domain
  SITE 14: note = RuvC_P1
  SITE 66: note = RuvC_P2
  SITE 106: note = RuvC_P3
  SITE 108: note = RuvC_P4
  SITE 111: note = RuvC_P5
  REGION 276..363: note = Tnp_domain
  SITE 284: note = Tnp_P1
  SITE 314: note = Tnp_P2
  SITE 322: note = Tnp_P3
  SITE 323: note = Tnp_P4
  SITE 336: note = Tnp_P5
MGKSIEKVMFVGVDVGKRKHDACFLESSGNVAKYILFENRINGFRKFFNTIEQFIKDGYSVSVTVEATGHYFLNLYSFLREHRIDVTVVNPIQTDSFRNVFIRKTKSDKRDSFVIAELTRLGRARKSVVNDTNSNISNLRMLTRFRADYVFKQVDMKKKLSSLIDRVFPEFFDVFNGLASKTALMILRNYPTPRKLLKEDREILYSLVSKWSKNRIKGEAVDKLIAVAKESVGSSIDIDAIEVEIPFIIDEIFFIEKQIEEIEKKIEWIAEGIEEVELLKTIPEISTISAASIIGEIADISRFSSVKKLRAYAGIDPSVKESGISVRGRSTISKGGSPYLRRTLYYAANASRRFSPIFKGYYKKKISQHPNMERYAIVSVANKLLTVIYYILKHKGPFNPYYEWKEEINESINAAINGSGKEGVGYNALHWPMPLTINMLLPTCLLFLCPSIYPALFILPPNTSTISKVSSIFSLQGIDLLY

SEQ ID NO: 15713 - protein, 336 aa, unidentified
  source 1..336: note = protein_b45b316
  REGION 4..157: note = RuvC_domain
  SITE 7: note = RuvC_P1
  SITE 60: note = RuvC_P2
  SITE 100: note = RuvC_P3
  SITE 102: note = RuvC_P4
  SITE 105: note = RuvC_P5
  REGION 200..286: note = Tnp_domain
  SITE 208: note = Tnp_P1
  SITE 237: note = Tnp_P2
  SITE 245: note = Tnp_P3
  SITE 246: note = Tnp_P4
  SITE 259: note = Tnp_P5
MFLLGIDVSKKTLDLSLLREGVKGKVKTRKLKNDFNAASVVINWLHKQHCTPEDVHIIMEATGVYHESLAYGLHNAGAKVSLANPHRSREFARGMDILTKNDKVDAYMLACYGALKEPEPWEPPPENVRYLSALLRRRDALVTDSSREKNRLEKCWATDTPPVVAESIENVLRNLSAELKHLDALILTHLDQYPELKKDFDLLTSIKSVGFQLGLNMLVILRSHHFDTAEQVAAFLGVVPVEKYSGTSVRGKPRLSKIGPPKIRAKLYLASLCGLRFNPAMKAMYERLCLRGKAKMCAIGALMRKLVHWCYGVLKTQKPFDAEYLSSDARSACKAA

SEQ ID NO: 15714 - protein, 341 aa, unidentified
  source 1..341: note = protein_bcce634
  REGION 7..149: note = RuvC_domain
  SITE 10: note = RuvC_P1
  SITE 53: note = RuvC_P2
  SITE 88: note = RuvC_P3
  SITE 90: note = RuvC_P4
  SITE 93: note = RuvC_P5
  REGION 211..296: note = Tnp_domain
  SITE 219: note = Tnp_P1
  SITE 249: note = Tnp_P2
  SITE 257: note = Tnp_P3
  SITE 258: note = Tnp_P4
  SITE 270: note = Tnp_P5
MSEVRTIGLDLAKNVFQVHGADETGAVVFRKQLRRGQVLKFFGGLPRCLVAMEACGSSHFWARELGLLGHEVRMIPPAYVKPFVKRQKNDMADAEAICEAAQRPTMRFVAVKSEETQAAAVVLRTRDLLIRQRTQTINALRGHLAEFGEVAPQGLSYGPKLIAIVEDPQTALPETARTALRFLTASLSQLNDQIRALDAQIVRRAREDETARRLMTIPGIGPLIATALVALAPSPETFKRGRDFAAWLGLVPRQHSTGGKQRLGSTTKMGERSLRRLLIIGANSELVWRTRKGAASGTWLAKMLAHKPPMLVRVALANKMARMVWAIMGKGGIYRAPVAAA

SEQ ID NO: 15715 - protein, 388 aa, unidentified
  source 1..388: note = protein_4dec58f
  REGION 5..163: note = RuvC_domain
  SITE 8: note = RuvC_P1
  SITE 62: note = RuvC_P2
  SITE 102: note = RuvC_P3
  SITE 104: note = RuvC_P4
  SITE 107: note = RuvC_P5
  REGION 263..352: note = Tnp_domain
  SITE 271: note = Tnp_P1
  SITE 301: note = Tnp_P2
  SITE 309: note = Tnp_P3
  SITE 310: note = Tnp_P4
  SITE 323: note = Tnp_P5
MGPVVGLDVSKGASVLQAFTERNKPYGRCKRIAHTPEGFEQLGELLKELEKSTGFEPAVVLEATGHYHRSLVAYLEREGYQHFIVNPLQSKRAKGTHLRKVKTDAMDAWHLAEMYYRGDLKPHRTWSEALTELQHLTRQHEFICSMLVQAKQNARALLDQVCPAYETVFDNLFCTTSLQVLRQMLSSTPVTAETIQAAAGSSHGQAWVQEKLERIQALPPLSQSSKAQQMALLGVLNMVLTGQEQLRQLEKAMEELAMMLPEVELLRTIPGVGDKLAAVLAAEIGDASQFETPKQLVAYAGLDPGVHSSGKFTASSSRISKRGSKRLRRALYLAAQCGIRNGVNERLKAYFEKKRKEGKPCKVAVIACANKLLHHVHAILVKGEPYKA

SEQ ID NO: 15716 - protein, 348 aa, unidentified
  source 1..348: note = protein_9d4ef75
  REGION 6..146: note = RuvC_domain
  SITE 9: note = RuvC_P1
  SITE 52: note = RuvC_P2
  SITE 87: note = RuvC_P3
  SITE 89: note = RuvC_P4
  SITE 92: note = RuvC_P5
  REGION 211..297: note = Tnp_domain
  SITE 219: note = Tnp_P1
  SITE 249: note = Tnp_P2
  SITE 257: note = Tnp_P3
  SITE 258: note = Tnp_P4
  SITE 270: note = Tnp_P5
MNIRVVGIDVGKTVFHVVGMDGHGKVILKNRLSRPQLLKRLVNLPPCLIGMEASCGAHYLARSLSKFGHDVRLIPAQFVRPFVKSQKNDYVDAEAIAEAVQRPTMRFVPVKTEDQLDLQALHRVRDRLMERRTSVINQIRAFLLERGLALRAGSNHLRTNLPAVLAAAEQNMSPRIYQLLCLVAEEWHSIEQQIERLDREIETIATSDEACRRLLTVPGIGPLIATAMVAAVGNGSAFGRGREFAAWLGLVPRQHSTGGKARLLGISKHGNEYLRRLFIHGGRSVQHRVSREKHRFGPWLAQLELRANSNIVGVAMANKLARIAWVVLNRQEVYRPYENQGRASSLCA

SEQ ID NO: 15717 - protein, 343 aa, unidentified
  source 1..343: note = protein_69b9b3e
  REGION 6..147: note = RuvC_domain
  SITE 9: note = RuvC_P1
  SITE 52: note = RuvC_P2
  SITE 87: note = RuvC_P3
  SITE 89: note = RuvC_P4
  SITE 92: note = RuvC_P5
  REGION 212..293: note = Tnp_domain
  SITE 220: note = Tnp_P1
  SITE 250: note = Tnp_P2
  SITE 258: note = Tnp_P3
  SITE 259: note = Tnp_P4
  SITE 271: note = Tnp_P5
MKIAILGIDLGKNSCSLVGLDHAGTVVKRRRMRPESIPAFTRTMPACTVAMEACCGAHHFGRLLRSQGHTVRLMSPEYVRPYVKAQKNDDRDAEAIAEAATRPTMRFVELKSEEQLDMQTLHRVRDRLVGERTALINQLRAILLDRGCAVPQGRRKLEQHLAAMPDPDNDTSLSPRVCRLIDDMRAEWLELDRRIATFDNEFAARARNDADARRLTTIPGIGVLNATALVAAIGNGETFARGRDLAAWLGLVPRQVTTGGKPRLVGITKRGNKYLRKLIIHGARSALPVLASGPTPLGEWLRALMKRVHKNVAVVALANKLARITWAVLRRGEEFAATARAAT

SEQ ID NO: 15718 - protein, 405 aa, unidentified
  source 1..405: note = protein_c41a67a
  REGION 12..166: note = RuvC_domain
  SITE 15: note = RuvC_P1
  SITE 63: note = RuvC_P2
  SITE 103: note = RuvC_P3
  SITE 105: note = RuvC_P4
  SITE 108: note = RuvC_P5
  REGION 273..359: note = Tnp_domain
  SITE 281: note = Tnp_P1
  SITE 311: note = Tnp_P2
  SITE 319: note = Tnp_P3
  SITE 320: note = Tnp_P4
  SITE 332: note = Tnp_P5
MKFDYRSIEVFVGVDMAKEHHYAQVVTTAGTEVFHRPVLNDQTAIGKLIVDASKHGRVALVIDMPSSPAQLLLAVAREHDVPVAYVTGLQMRRAAELYAGQAKTDPRDAWVLADFARRHADQLAWIEVTEDLLAKLRILNGRDVDLAEDANRASNRCRDALVSVSPALERVLGSQLSLGGVRDLLAACPTPTSLWRAGADAINQLVRARSPRVADRISTAVIKALEAQTVTLPGEDTWGEIIAGLVADLERIFEQRKQLRAQIEQVFLEHPLGQVLVTLCGFGPRTGARTLAEIGDPTRFKDGGRLAAYAGLAPVDRRSGKSINNAAASRRGNHRLKNAMFLAAFVATQHDPNAKAYYQRKRAEGKGHNAAVICVARRRCDLIHAMLTTGQAYDPHRSENQAKAA

SEQ ID NO: 15719 - protein, 391 aa, unidentified
  source 1..391: note = protein_c68cc86
  REGION 4..161: note = RuvC_domain
  SITE 7: note = RuvC_P1
  SITE 59: note = RuvC_P2
  SITE 99: note = RuvC_P3
  SITE 101: note = RuvC_P4
  SITE 104: note = RuvC_P5
  REGION 265..351: note = Tnp_domain
  SITE 272: note = Tnp_P1
  SITE 302: note = Tnp_P2
  SITE 310: note = Tnp_P3
  SITE 311: note = Tnp_P4
  SITE 324: note = Tnp_P5
MISIGIDVGKFKHCAAVLDDRTGEVLIKPFFFSNDQEGFELFYSKVKRYVHRKHAVGMEDTGHYMINLTNFLLEKKLSVKYINPRTTSMRRKELGRSAKNDRKDATLIAEMLSEKKFWRSISKTSIETSKLRELTRLYHQLQEQQNQDMNRLQRALDIVFPEVNELSWTRYSKAYMQFLAAYSSASSIASEDIRNLRKALKTEGRGRQCKVTVEDIKDLAKRSVGDDNFAVELEVKSVIAIINARNEQIHVLEKKIEEFSRQLNSPIISIPGISHITGMTILAEIGDIKDYLEAAKLISYAGMEPLVHQSGIYDAAHMPISKHGSRYLRKALYQAVFTVCKYDPTFQAYYTKKRNQGKSHRCAQGHCVRKLLRVIYKLLSNDLSFDASLIH

SEQ ID NO: 15720 - protein, 346 aa, unidentified
  source 1..346: note = protein_97ab92a
  REGION 7..149: note = RuvC_domain
  SITE 10: note = RuvC_P1
  SITE 53: note = RuvC_P2
  SITE 88: note = RuvC_P3
  SITE 90: note = RuvC_P4
  SITE 93: note = RuvC_P5
  REGION 212..297: note = Tnp_domain
  SITE 220: note = Tnp_P1
  SITE 250: note = Tnp_P2
  SITE 258: note = Tnp_P3
  SITE 259: note = Tnp_P4
  SITE 271: note = Tnp_P5
MNETTTIGLDIAKQVFQVHGVAVDGTVTVKRQLRRSEVIRFFDRLPRCRVGLEACGGAHFWARELTALGHDVRLIPASYVKPYVKRGKTDAIDAEAICEAVSRPTMRFVPIKTVDCQAGVMLLKTRYLLVKQRTQSINSLRGHLSELGIIAARGTGKVETLIAIIRDKTDERIPAVARRALEMLADQVEALVRRIATLENEIVSEVRRDDTMRRLATIPGVGPITAATIVALVPDPRAFNSGRHFAAWIGLTPKMHSTGGKERLGRISKMGNPVLRSLLVVGATAVSRHARRGATVSPWLTGLLARRPAKVAAIALANKMARVIWALLTKGGVFTRRPATAAQHAA

SEQ ID NO: 15721 - protein, 311 aa, unidentified
  source 1..311: note = protein_6f0a019
  REGION 6..148: note = RuvC_domain
  SITE 9: note = RuvC_P1
  SITE 53: note = RuvC_P2
  SITE 92: note = RuvC_P3
  SITE 94: note = RuvC_P4
  SITE 97: note = RuvC_P5
  REGION 188..272: note = Tnp_domain
  SITE 196: note = Tnp_P1
  SITE 225: note = Tnp_P2
  SITE 233: note = Tnp_P3
  SITE 234: note = Tnp_P4
  SITE 245: note = Tnp_P5
MTKHSIGVDISKSHFDAFDLETERAAQFKNGETGYRDFRKWLDGRNITRIVYEATGAYHRPFELALETNFPLVKVNPFQARRFAEARGTRAKTDRADARSLAEMGKAFDLEAPPPKSKSQRLLRDLHTARSRMMCERVRLLGRASQLDVPLLQRQTRELIAHVERQIAELDAEIAALIAEDQEETRKLEIIRSIPGIGMVTASAILAFLPEIGQLERKQVASLAGLAPFTRSSGTWVGKSFIKGGRTQLRQALYMPALIASRFNPDLKAKYTALRAAGKPAKVALVALMRKLIELANALVKSDRKWAPKAC

SEQ ID NO: 15722 - protein, 398 aa, unidentified
  source 1..398: note = protein_9fd0f4e
  REGION 4..160: note = RuvC_domain
  SITE 7: note = RuvC_P1
  SITE 57: note = RuvC_P2
  SITE 97: note = RuvC_P3
  SITE 99: note = RuvC_P4
  SITE 102: note = RuvC_P5
  REGION 271..358: note = Tnp_domain
  SITE 279: note = Tnp_P1
  SITE 309: note = Tnp_P2
  SITE 317: note = Tnp_P3
  SITE 318: note = Tnp_P4
  SITE 331: note = Tnp_P5
MICVGIDIAKGKSTVCFLKPGGEVLKTPYDMEHTAEEITKLIRDIRSYDEEVRVVLEATGHYHLPVVAQLLEANVFVCVVNALRMKKFCSQDIRKAKTDKIDAAKIAAFGLTYWQDLQAAKPTDEVYRELRLLSRQYFQLTSMLVKAKISLGNLLDNVMPGITDLLYDREPHHKLTDFVLRYLHFDKISAMGERKFTTDYCNRAKKQGYRMYERQAEEIFALVQNSIPALPMTASTTIVVKEAIKVVRELENSRASILAQMQTFAKSLPEYSLIREMACVGDTLTPLVIAEIGDVRNFHSKHALIAYAGIDAPPYQSGGFYGTERHISKRGNGYLRHVGFEIMQCKLRLKPEGDAVYDFIQKKRSEGKCGKEAMVAGINKFLRIYYGKVTELYRDLEA

SEQ ID NO: 15723 - protein, 359 aa, unidentified
  source 1..359: note = protein_55f3843
  REGION 12..157: note = RuvC_domain
  SITE 15: note = RuvC_P1
  SITE 59: note = RuvC_P2
  SITE 97: note = RuvC_P3
  SITE 99: note = RuvC_P4
  SITE 102: note = RuvC_P5
  REGION 221..307: note = Tnp_domain
  SITE 229: note = Tnp_P1
  SITE 259: note = Tnp_P2
  SITE 267: note = Tnp_P3
  SITE 268: note = Tnp_P4
  SITE 280: note = Tnp_P5
MSEITRGLIARVGVDLAKRVIQVHAVDTAGRVVVAKALQRDTFLPWCAQLPPGTLIAMEACSGAHHWTRKLRAMGLDARMMAAHFVAPYRMQGKGGKNDANDAAAVCEAASRPSMRFVPLKTPAQQAMLAIHRLREGYKEERTACINRIRGLLTEFGLVFARCPEVLRRELSDVIEDASNDLPAILRMGLREAHLHWIELECHIAWCDERIEAHVRTDEQAKVAAQLCGVGPVTASALVATVGDFKQFRSGNQFGAWLGLVPRQNSSGGKTSLGQITKRGDDYLRTLLIQGAKAAMIHAKKRTDRVSVWLAALVDRIGWQKAIVAMANKNARILWAVLTKGTAYDPNHVSINPGLQTTA

SEQ ID NO: 15724 - protein, 338 aa, unidentified
  source 1..338: note = protein_2ff2c9a
  REGION 7..152: note = RuvC_domain
  SITE 10: note = RuvC_P1
  SITE 53: note = RuvC_P2
  SITE 88: note = RuvC_P3
  SITE 90: note = RuvC_P4
  SITE 93: note = RuvC_P5
  REGION 211..297: note = Tnp_domain
  SITE 219: note = Tnp_P1
  SITE 249: note = Tnp_P2
  SITE 257: note = Tnp_P3
  SITE 258: note = Tnp_P4
  SITE 270: note = Tnp_P5
MSSITVIGIDLGKSTFHLIGHDQAGREQLRKKLNRTKLIEFLSNHEPIVIAMESCGGSHWLARKCQEFGHQTKLIPPQYVKPYVKTNKNDFLDADAIAEASTRPSMRFVSVKSEETQVLAVIQRIRSGYIKERTACMNRTGAILLEFGLSFPRGHTHMKKLFDWLSQQPDRVPKLLLQELIETHEYYELLNERIKQQEKKLLNIVEQDERAQLLKTIPGIGDLVASQCLSSISDVHDFKNGRHMAAWIGLVPHQHSTGGKTKLLGISKRGDKSLRTLFIHGARAMLSRLDRAEKYFGHWIIELRARKPFNVAVVALANKMARIAWSVLMYKRPFEVIK

SEQ ID NO: 15725 - protein, 333 aa, unidentified
  source 1..333: note = protein_bd619ad
  REGION 4..155: note = RuvC_domain
  SITE 7: note = RuvC_P1
  SITE 55: note = RuvC_P2
  SITE 96: note = RuvC_P3
  SITE 98: note = RuvC_P4
  SITE 101: note = RuvC_P5
  REGION 197..284: note = Tnp_domain
  SITE 205: note = Tnp_P1
  SITE 235: note = Tnp_P2
  SITE 243: note = Tnp_P3
  SITE 244: note = Tnp_P4
  SITE 257: note = Tnp_P5
MNTIGIDVGCKELVVVVMVNGKARQAKSFDNTPLGHQSIIQSLTKLKGESKVCTEATGVYHFDLAVALSRANDIEVMVINPKAAHNFAKALMTRSKTDAIDAENLAIYAERMPFEAWDRPADECIGLRATARRIAALSKQKTQTKNQLHALKSTVETPTLVIEQTEQLIDILDVQIKTLRDSAINIIHQNEGLEQAYTLITGIKGIAQATAIQILSELMILPKDMTARQWVAHAGLDPRIFDSGSSVSKKPRISKVGNKYIRQALYMPALVASRFEPNIKGYYHHLIDDNGLKKVQAVCAVMRKLLHAIHGMLRTNKEFDGTRFYTLPIITNS

SEQ ID NO: 15726 - protein, 340 aa, unidentified
  source 1..340: note = protein_bd98dba
  REGION 7..147: note = RuvC_domain
  SITE 10: note = RuvC_P1
  SITE 53: note = RuvC_P2
  SITE 88: note = RuvC_P3
  SITE 90: note = RuvC_P4
  SITE 93: note = RuvC_P5
  REGION 210..294: note = Tnp_domain
  SITE 218: note = Tnp_P1
  SITE 247: note = Tnp_P2
  SITE 255: note = Tnp_P3
  SITE 256: note = Tnp_P4
  SITE 268: note = Tnp_P5
MIEITRISIDTSKSVFTLHAVDATGCPVLRRNLRRQDVIPFFEKLPPVEVVMEACGGSHHWGRVLQKMGHRVRLIPAQYVKPFVKRSKNDRNDAEAISEAAARPGMREVAVKSAEMQAQAMLLSVQELLVRQRTQLINALRGHAAELGLVAPVGDKGFVALRAEVAADASLPAAAVETLRLLGSEVDRVEARLAEIDAKVMAQHKANTDSRRLSAIPGVGPKGALNFTLRVDAAQFKSGRHFAAWLGLVPQERSTGGKQRLGSISRAGNERLRQLLVLGATAVIQHAKPGRDGVSTWLLKLLERKPRKVVAVALANKMARIIWAMLTRGESYRPAAPVAA

SEQ ID NO: 15727 - protein, 397 aa, unidentified
  source 1..397: note = protein_8b4e06e
  REGION 4..160: note = RuvC_domain
  SITE 7: note = RuvC_P1
  SITE 57: note = RuvC_P2
  SITE 97: note = RuvC_P3
  SITE 99: note = RuvC_P4
  SITE 102: note = RuvC_P5
  REGION 274..361: note = Tnp_domain
  SITE 282: note = Tnp_P1
  SITE 312: note = Tnp_P2
  SITE 320: note = Tnp_P3
  SITE 321: note = Tnp_P4
  SITE 334: note = Tnp_P5
MLAVGIDVSKSKSTVAIIRSDGTVLSKPHDFSHTISDITQLTALIHSYQEETKVALESTGHYHYPILKALLEAGFTVFVINPFLVKKFMDNSIRKGKTDKKDAVRIAHFVLEKSYQLRPYSPTDQKYEDLKFLSRQYSQSVSMKVKARVQLSNLLDDIMPGIQNIIPISSRYLENTLFFDFVEKYQSYEKISQMGEKRFVNSYIAFAQKHRCRGSQKKALAIYQAASDGIITRSPDVTTSLALSQCLLMLKQASSSADLILRQMQSIAYTMPEYSIVRSMYGVGDRLAPILIAEIGDVRRFTSAKALNAYAGNDAPPYQSGQFEGTNRHISKRGSAYLRKACYEVMHSLKVHKPENDPVYQFIIKKESEGKHKTVAKMAGVNKFLRIYYARVMELYK

SEQ ID NO: 15728 - protein, 343 aa, unidentified
  source 1..343: note = protein_51a8460
  REGION 7..149: note = RuvC_domain
  SITE 10: note = RuvC_P1
  SITE 53: note = RuvC_P2
  SITE 88: note = RuvC_P3
  SITE 90: note = RuvC_P4
  SITE 93: note = RuvC_P5
  REGION 211..304: note = Tnp_domain
  SITE 219: note = Tnp_P1
  SITE 249: note = Tnp_P2
  SITE 257: note = Tnp_P3
  SITE 258: note = Tnp_P4
  SITE 270: note = Tnp_P5
MKRISIIGVDLAKNVFQLHGAAADGTVLFRKKLSRPQFQRYMAEHAQCLVVMEACGGAHHWARELERVGHEVRLIAPRYVKPFIKRQKNDAADAEAIVEAALRPTMRYVEPKTGDQQARSILFRTREQFVKQRTEAVNALRSHLYEFGFIAPEGIGYLPRLGAILEDRNSDLPPLAREICRELLDQIVHLTERINAMKKRIDAIAREGETSRRLQTMPGVGPISALAVETFAPPMEQFKRGRDFAAWLGLVPRQASTGGKQKLGKTSKMGQRDIRRLLITGAMAVIRWALRHGAPRNPWLARLLERKPPMLAASALANKMARGIWAMLTRGEDYRGPEIGSAA

SEQ ID NO: 15729 - protein, 344 aa, unidentified
  source 1..344: note = protein_3357e51
  REGION 8..150: note = RuvC_domain
  SITE 11: note = RuvC_P1
  SITE 54: note = RuvC_P2
  SITE 89: note = RuvC_P3
  SITE 91: note = RuvC_P4
  SITE 94: note = RuvC_P5
  REGION 213..299: note = Tnp_domain
  SITE 221: note = Tnp_P1
  SITE 251: note = Tnp_P2
  SITE 259: note = Tnp_P3
  SITE 260: note = Tnp_P4
  SITE 272: note = Tnp_P5
MTYPAFVLGIDLGKNWLHVVGMDRDGRVTLRKRLNRAQLGEFAGSVATCRVAMESCPGSQYWGRCFAAAGHEVRIIPAQFVKPYVKSNKNDYNDAEAIAEAGSRGTMRCVPLKNAEQLELQATHRVRQRVIVERSAVVNQMRALLLEHGIAIPIGRALLARRLPEILEDAENTLSVRLRALLQRLRSRWRSLDVEIAELTALLTEHAAESELCRRAITVPGVGPIVSTALVAAVNDAHAFARGRDMAAWLGLVPRQHSTGGKTTLGRISKRGNAYLRQLFIQGAQALYTHMKREKSRLGQWLRDLEARAHRHVVVVALANKIVRICWKVLTSGQDYRPFPAQPA

SEQ ID NO: 15730 - protein, 337 aa, unidentified
  source 1..337: note = protein_b526b70
  REGION 7..149: note = RuvC_domain
  SITE 10: note = RuvC_P1
  SITE 53: note = RuvC_P2
  SITE 88: note = RuvC_P3
  SITE 90: note = RuvC_P4
  SITE 93: note = RuvC_P5
  REGION 213..291: note = Tnp_domain
  SITE 221: note = Tnp_P1
  SITE 251: note = Tnp_P2
  SITE 265: note = Tnp_P5
MSEVTTIGLDIAKNVFHAHGADRTGRTVFSRKLTRGKLLNFFVSQPRCTVALEACGGAHHWARELRAMGHEVRLIPPAYVKPFVKRHKNDAVDAEAICEAAQRPTMRFVAVKSEEQQAAALVFRTRDLLVKQRTQLGNAIRGHLTEYGWVAPKGPSHLAMLADLLDDSEMAATLPEAARPMFAMMVDMLAELDKRVAALDKKITRRAREDEVARRLMTIPGIGPITATAIAAIAPPAETFAKGRDFAAWLGLVPKQKLGAISRMGERTLRRLLIIGSSAVVLQASRRGAPKGSWLEGMLARKPRMLVTVALANKTARIVWAVLTKQEDYRAPVVVAT

SEQ ID NO: 15731 - protein, 319 aa, unidentified
  source 1..319: note = protein_bb9b743
  REGION 44..148: note = RuvC_domain
  SITE 87: note = RuvC_P3
  SITE 89: note = RuvC_P4
  SITE 92: note = RuvC_P5
  REGION 208..278: note = Tnp_domain
  SITE 216: note = Tnp_P1
  SITE 246: note = Tnp_P2
  SITE 254: note = Tnp_P3
  SITE 255: note = Tnp_P4
  SITE 267: note = Tnp_P5
MENIALIGIDLGKNSFHIHCQDRRGKAVYRKIYPAKVDRIFGDMPRYNHRNGSLWRFSLYGTQVGRVGAFPKLISPQFVRPFVKSNKNDFVDAEAICEAASRPSMRFVQPRTESQQAMRALHRVRESPVQDKVKTTNQMHAFLLEFGISVPRGAAVISRLSTILEDNSLPLYLSQLLLKLQQHYHYLVEQIKDLESQLKRKLDEDEVGQRLLSIPCVGTLTASTISTEIGDGKQYASSRDFAAATGLVPRQYSTGGRTTLLGISKRGNKRSELCWFNVPGYSYKNWNTSLANWPIGSGIYCAGKATLSSLVLWQTSWPE

SEQ ID NO: 15732 - protein, 323 aa, unidentified
  source 1..323: note = protein_7e52d6f
  REGION 5..159: note = RuvC_domain
  SITE 8: note = RuvC_P1
  SITE 58: note = RuvC_P2
  SITE 98: note = RuvC_P3
  SITE 100: note = RuvC_P4
  SITE 103: note = RuvC_P5
  REGION 195..281: note = Tnp_domain
  SITE 203: note = Tnp_P1
  SITE 233: note = Tnp_P2
  SITE 241: note = Tnp_P3
  SITE 242: note = Tnp_P4
  SITE 254: note = Tnp_P5
MSVVVGVDVAKRSFDIATPLPNGKVRTKAKLANNPSGFEQFATWLEQHAEPRAWVIMEATGTYHEALAECFHAKGYRVCILNPAVIAKFAGADLRRVKTDKADAKVIAAYGQQKKDLLRQWKPEPPAQRRLRALVRRLDDLKEMQQMEQNRLDVSQIAVQESIRAVIGHISEEIAKTRKAIEQTIDDDPDLRQRRELITSIDGLGDTTAALILAELGDPLKYESPSAMVAFAGLNPMIHQSGEKIGQSTISRTGAPRLRAGLWMPGTVSIRYNPVVKALAERLSNRRKAYKQIVCAAMRKLLHLVYGVVKSGKPFDPQIALAG

SEQ ID NO: 15733 - protein, 364 aa, unidentified
  source 1..364: note = protein_3ff0b81
  REGION 8..156: note = RuvC_domain
  SITE 11: note = RuvC_P1
  SITE 61: note = RuvC_P2
  SITE 97: note = RuvC_P3
  SITE 99: note = RuvC_P4
  SITE 102: note = RuvC_P5
  REGION 223..309: note = Tnp_domain
  SITE 229: note = Tnp_P1
  SITE 259: note = Tnp_P2
  SITE 267: note = Tnp_P3
  SITE 268: note = Tnp_P4
  SITE 280: note = Tnp_P5
MENVTTYVGIDAHKKDLFIAMLIGTQEKPVTWTVPNETQAVRRLVRKLERSAPGPVRCYYEAGPCGYTLQREMATERVSCQVVAPALIPRKPGEKIKTNRRDAHKIAELARAELLTEVRPPTPAEEAVRDLGRARDDAREDLQRCRHRLGKLLLRRGLHYPGRNWTQAHRHWINGIEWGHASTGVVVNDYLLAIDQLEARLTELDAALTTIAEKGPYAEPVGWLRCFRGIDTLTAILLLAELHDFQRFHDPRALMAYVGLVPGENSSGEKHRRGRITRTGNALVRRLLVETAWHYQHRAGIGPALARRRTGQPSRVIAIADRAQQRLCRRFRRLMEQHKPAPKTAVAVARELAGFLWAALQPAQ

SEQ ID NO: 15734 - protein, 334 aa, unidentified
  source 1..334: note = protein_3fea323
  REGION 6..147: note = RuvC_domain
  SITE 9: note = RuvC_P1
  SITE 51: note = RuvC_P2
  SITE 86: note = RuvC_P3
  SITE 88: note = RuvC_P4
  SITE 91: note = RuvC_P5
  REGION 208..294: note = Tnp_domain
  SITE 216: note = Tnp_P1
  SITE 246: note = Tnp_P2
  SITE 254: note = Tnp_P3
  SITE 255: note = Tnp_P4
  SITE 267: note = Tnp_P5
MTLDLLAIDLGKRSFHLYGIDADGVILSRKVSRAKLAEVVGDLAPTAIAMEACASAHYWGRCWLAAGRVVRLINPRFVKPFVKGSKNDAIDAEAIFEAAMRPTMRFVPVKSRDQQDLQSLHRARDRLICQRTALINHTRGLLAEYGIVLPQGPWRFTAQAPAAVADADLSDLARAIFGELLDQLGDLDRRIKKLDATMVTLCRTNATCRRLAKLPGVGPVIATAIVAAVNNGRQFRSGREMAAWIGLVPRQYTTGGKPRLGGIGRRANHYLRRQLIHGARAVVSRPPKPDDRRSAWLNALVARRGFNRTIVALANKTARITWALLNRTEEYAVA

SEQ ID NO: 15735 - protein, 413 aa, unidentified
  source 1..413: note = protein_2c1d87c
  REGION 5..164: note = RuvC_domain
  SITE 8: note = RuvC_P1
  SITE 61: note = RuvC_P2
  SITE 101: note = RuvC_P3
  SITE 103: note = RuvC_P4
  SITE 106: note = RuvC_P5
  REGION 272..358: note = Tnp_domain
  SITE 280: note = Tnp_P1
  SITE 311: note = Tnp_P2
  SITE 319: note = Tnp_P3
  SITE 320: note = Tnp_P4
MRLFVGDDWAEDHHDIEVMDEAGKVLAKRRLPEGAAGMTQLHALIGRFLPEDADDAEVVTGIETDRGPWVAALIAAGYTVFPVNPLQASRYRERHGVSRAKRDGGDAHMLADMVRTDSHQLRPAAGDTPEAGAIKVVARAHKTMIWDRTRAVQRLRHQLREYFPAALEAFEDLDAPDVLELLGKAPDPARAAKLTRAQVAAALKRARRRDIAGKADAILAALRGEHLGQPPALTAAYAATARSLIAVITTLNAQVKILEEQVRDHFGRHPDAEIYQSQPGLAAILGARVLGEFGDDPCRYVTAKARKNYGGTSPITRASGKRKVVAARFIHNDRLVDALMSWAFSSLKASPGARAFYDQQRAKGLQHNDALRRLANRLVGILHGCLKTRTPTTRPPHGATGKTSLNLPLRLDI

SEQ ID NO: 15736 - protein, 304 aa, unidentified
  source 1..304: note = protein_0a8d23e
  REGION 6..147: note = RuvC_domain
  SITE 9: note = RuvC_P1
  SITE 52: note = RuvC_P2
  SITE 87: note = RuvC_P3
  SITE 89: note = RuvC_P4
  SITE 92: note = RuvC_P5
  REGION 171..257: note = Tnp_domain
  SITE 179: note = Tnp_P1
  SITE 209: note = Tnp_P2
  SITE 217: note = Tnp_P3
  SITE 218: note = Tnp_P4
  SITE 230: note = Tnp_P5
MDYKLISIDLAKTVFQVAAFNHDNTIAFNRKINRSALLNTLRQCELTLVVMEACYSANYWGRAIEKLGHTVKLIPARMVKAMLVGNKNDANDAVAIGETAGRPKVSLLRPKTVEQQDIQSLLRILEDADNELSTVARGFIQRLYEFQLYLNEQIDQVAQDILALAQAMPQYPLLLTIPGVGPIVASTLLASINEVNDFKNGRQLAAWLGLTPSQYSSGTTNRLGKITKRGNQTLRRLLIHGARTVVNWCDKKDDSLSLWLQRLKQRQHVCKVTVALANKMARMVFAVMSRGQVFDMNKACKMAA

SEQ ID NO: 15737 - protein, 345 aa, unidentified
  source 1..345: note = protein_6146fe6
  REGION 6..148: note = RuvC_domain
  SITE 52: note = RuvC_P2
  SITE 87: note = RuvC_P3
  SITE 89: note = RuvC_P4
  SITE 92: note = RuvC_P5
  REGION 213..300: note = Tnp_domain
  SITE 221: note = Tnp_P1
  SITE 251: note = Tnp_P2
  SITE 259: note = Tnp_P3
  SITE 260: note = Tnp_P4
  SITE 272: note = Tnp_P5
MEIVRIGLDLAKNVFQVHGGGPNDGAIVRKTLRREAVVPFFAELSPCLVGMEAGSGAHYWARVLSELGHEVRLISPQFVTPYVKSNKNDHNDAEAICEAVDRPSMCFVPPKSPEQLEIQAIHRIRQRLISDRTRLVNQIRGLLAEHGIVIARDISRLRRALGQIVEGCHADDGLTDMIRDLVREIREELAELDRRIASYNRRVRALFRTNEACQRIGQIEGIGPITATALVAAVGDRTCFRNGRQFAAWLGLVPRQRSSGGKSRLFGISKRGDRYLRTLMIHGARAVLGKAHGKDDPRSQWIGRMRERRHPNVVAVALANKNARIVWSVLTRDEAYRPARATAAG

SEQ ID NO: 15738 - protein, 384 aa, unidentified
  source 1..384: note = protein_89e850a
  REGION 38..183: note = RuvC_domain
  SITE 41: note = RuvC_P1
  SITE 87: note = RuvC_P2
  SITE 123: note = RuvC_P3
  SITE 125: note = RuvC_P4
  SITE 128: note = RuvC_P5
  REGION 248..334: note = Tnp_domain
  SITE 256: note = Tnp_P1
  SITE 286: note = Tnp_P2
  SITE 294: note = Tnp_P3
  SITE 295: note = Tnp_P4
  SITE 307: note = Tnp_P5
MLMAMEGQSHFLPFGVPYWGFEALNNGGSATVSYDYHIGVDYHKSYSHLVVQDGGGRTLRSGRVKNDRHSIAAFLDRYKDNSHAVVEATRNWTVIYDWLDDICDDVVLAHPLKVKAIADAKIKTDKIDATVLAHLLRADLVPEAWAPSERARELRVALRERMFYVRLRTMVKNRIVTIFDRYPEQTVQLRKLGDLFGKAGREQLSALTVSPIDRIQIDRSIAFIDDINARIKQSEATIRAMTRENANVKLLKTIPGIGEFFARLIDAEIDDIGRFRSPKKLTAYAGLVPSTYSSGGRTYHGRIIKQGNKWLRWAFVEAVAPAIATDPQLREQYERLKPHGTNKAKVAVARKLLTIAFQLLRDQRPYERRGASMEECASTISRLS

SEQ ID NO: 15739 - protein, 343 aa, unidentified
  source 1..343: note = protein_76af956
  REGION 7..148: note = RuvC_domain
  SITE 10: note = RuvC_P1
  SITE 53: note = RuvC_P2
  SITE 88: note = RuvC_P3
  SITE 90: note = RuvC_P4
  SITE 93: note = RuvC_P5
  REGION 212..296: note = Tnp_domain
  SITE 220: note = Tnp_P1
  SITE 250: note = Tnp_P2
  SITE 258: note = Tnp_P3
  SITE 259: note = Tnp_P4
  SITE 271: note = Tnp_P5
MAEVITIGLDIAKNVFQAHGADAGGHQVFSRRIARGKVLEFFAGQPKCLVALEACGGAHHWARELIRMGHEVRLIPPAYVKPFVKRQKNDAADAEAICEAVQRPSMRFVAVKSEEQQASALVFRTRDLLVRQRTQTINAIRGHMTEYGWVAPKGPSWVTVLGELIDDEGGASLPDAAREMFRIMLDLLEKLDDQIADLDKEITRRAREDEVARRLMTIPGIGPIAATAIAALAPAAQTFKRGRDFAAWLGLTPLQKSTGGKTKLGRTSKMGERTLRRLLIIGSSSVILHASRRGAPEGSWLDGMLARKPRMLVTVAQANKTARIVWALLMKNEDYRAPVAAAA

SEQ ID NO: 15740 - protein, 347 aa, unidentified
  source 1..347: note = protein_1e769b6
  REGION 7..147: note = RuvC_domain
  SITE 10: note = RuvC_P1
  SITE 53: note = RuvC_P2
  SITE 88: note = RuvC_P3
  SITE 90: note = RuvC_P4
  SITE 93: note = RuvC_P5
  REGION 210..300: note = Tnp_domain
  SITE 218: note = Tnp_P1
  SITE 248: note = Tnp_P2
  SITE 256: note = Tnp_P3
  SITE 257: note = Tnp_P4
  SITE 269: note = Tnp_P5
MEQITRIGVDTSKNVFQLHGVSAEEKPIVRMKLSRTKMIAFFKDLPPTVIAIEACGSAHHWARYLGSLGHEVKLIAPQLAKPYVKRGKNDAADAEALCEAMSRPTMRFVPVKTGDQQAALMLVGMRDRLVRNRTQLANAIRGYAAEFGLTAAKGICRIELLLKDIACDDKVPELARDLFAIHRREYELLQAQIERVEAKLMEWHRNDECSQRLSQIPGVGPIGASLLMMKTPDPKLFKSGRDFAAWMGLTPKDHSTAGKARPGGITRAGDELLRSVLVNGATAVLKQVRVGRGRPASPWLHKLLEHKKPKPVAVALANRTARIAWKMMVTGESYRITTAEPVLAKAA

SEQ ID NO: 15741 - protein, 385 aa, unidentified
  source 1..385: note = protein_b952d48
  REGION 1..142: note = RuvC_domain
  SITE 39: note = RuvC_P2
  SITE 79: note = RuvC_P3
  SITE 81: note = RuvC_P4
  SITE 84: note = RuvC_P5
  REGION 250..336: note = Tnp_domain
  SITE 258: note = Tnp_P1
  SITE 289: note = Tnp_P2
  SITE 297: note = Tnp_P3
  SITE 298: note = Tnp_P4
MSAAGKVVGQFMIEHTADGIATLIHRLAKHGDPELVQVGIERPNGRLVDLLLEAGHPVIPVSPNAIKTWREGEVVSGAKSDTGDAMVIAEYLRLRHHRLAPVQPYSSETKALRTVVRTRDDIVEMRVAATNQLSALLDDFWPGAKAVFADVESPISLAFLRRYPTAVAAAHLGQKRMAAFLTKHGYSGRRPASVLLARLRRAPAGSKDPVLTEAVHDAVLALVTVLEALNTAGKNLDRSVVAHLGEHPDAEIFTSLPRSGQINAAQVLAEWGDSRAAYDGPDAVAALAGVTPVTKASGKQHAVHFRWACNKRFRKAITTLADNSRHESPWAAHVYAQARARGHDHPHAVRILARAWIRVIYRCWHTSQPYDTTHHGGAQRMPIAA

SEQ ID NO: 15742 - protein, 340 aa, unidentified
  source 1..340: note = protein_4f38058
  REGION 7..149: note = RuvC_domain
  SITE 10: note = RuvC_P1
  SITE 53: note = RuvC_P2
  SITE 88: note = RuvC_P3
  SITE 90: note = RuvC_P4
  SITE 93: note = RuvC_P5
  REGION 209..292: note = Tnp_domain
  SITE 217: note = Tnp_P1
  SITE 247: note = Tnp_P2
  SITE 255: note = Tnp_P3
  SITE 256: note = Tnp_P4
  SITE 268: note = Tnp_P5
MDEVSIVGVDLAKQVFQVHGAAQDGRVLFRKKLSRLQFPKFMAALPPCVIAMEACGTAHYWGRELSGFGHDVRLIPPVHVKAFVKRQKNDAADAEAVAEAAMRPTMRTVAVKTSEQQARAMLFRTRDLLVGQRTQMVNALRGHLAEHGIIVGKGLDKVDRLAALITSDNLPELVQSMSRLYLSKIEQLHGEIDQIDRHIAAEARKSDVVRRLQKMPGIGPICAMAITGFAPSMQEFRCGRDFAAWLGLVPRQHSSGGKQKLGRTSKMGQRDIRRLLIIGAMSVVHWKGRGGGKPGSWLSNMLARKPRMLVAIAMANKMARTVWAMLARNEDYRDPTGSVC

SEQ ID NO: 15743 - protein, 432 aa, unidentified
  source 1..432: note = protein_e954b0d
  REGION 6..159: note = RuvC_domain
  SITE 9: note = RuvC_P1
  SITE 57: note = RuvC_P2
  SITE 98: note = RuvC_P3
  SITE 100: note = RuvC_P4
  SITE 103: note = RuvC_P5
  REGION 221..306: note = Tnp_domain
  SITE 229: note = Tnp_P1
  SITE 259: note = Tnp_P2
  SITE 267: note = Tnp_P3
  SITE 268: note = Tnp_P4
  SITE 279: note = Tnp_P5
MDRVVIGVDPHKKTVTFEARDSREILRATGCFPTDAGGYRLLVQYARQWPDRVWAVEGANGIGRPLAQRLLASGERVLDVPAKLAARARVFDTGQGRKTDAADAHSIVMVALRDKGLREVSNDPELTVLRLLCDRRDELSKARAQALNRMHRLFLELAPGGAPVKKSASQYNKLLASVRPRDLAGQTRRRMAAEELEDVTRLDAKLKTIKAELKAAVLATGSRLMDVHGIGPAGAARILADVGDVARFPSRDHFASWNGTAPIDASSGQHIRHRLSRAGNRRINHVLYMAGIVQLRNDTKGRRYYRRRLADGKTPMEAMRALRRQLSDVIYRQLAADAATKNAGPGGHSGAAIKSSAADLTRDIGSSDKPLPGPAHPTLPLPPSTGKAPGPGTAATPRRRAGGVNVQRPTGRTTLTPTSAVASSKASRTDTP

SEQ ID NO: 15744 - protein, 329 aa, unidentified
  source 1..329: note = protein_ff876d7
  REGION 5..160: note = RuvC_domain
  SITE 8: note = RuvC_P1
  SITE 60: note = RuvC_P2
  SITE 100: note = RuvC_P3
  SITE 102: note = RuvC_P4
  SITE 105: note = RuvC_P5
  REGION 200..286: note = Tnp_domain
  SITE 208: note = Tnp_P1
  SITE 237: note = Tnp_P2
  SITE 245: note = Tnp_P3
  SITE 246: note = Tnp_P4
  SITE 259: note = Tnp_P5
MRFYLGIDVSKAKLDCCLLDVASGKRKSKSVENSAAGAASLLAWCAKHQALPGDVHVVMEPTGVYHERAALALTDAGLTVSLVNPLHLRRFADSLGALRKTDAADAAVLARFGRERQPEPWQPPRPAVHQLQALLARRDALARDLRRERNRLEQAALGKAPQLVLDSIGNSIKHLDKQLRTLEQAISDHIDQDPDLRQRRELLLSIPGVGDRLAHRFTALLGDGRFDSAEQLAAYLGLIPVEWQSGTSVRAPARLSKKGPAHIRALLYLPAVVAKQHNAHVRALYERLLARGKSKMAAIGAAMRKLVHLCFGVVKSGQPYSPVWDPKNP

SEQ ID NO: 15745 - protein, 408 aa, unidentified
  source 1..408: note = protein_858a54c
  REGION 6..162: note = RuvC_domain
  SITE 9: note = RuvC_P1
  SITE 59: note = RuvC_P2
  SITE 99: note = RuvC_P3
  SITE 101: note = RuvC_P4
  SITE 104: note = RuvC_P5
  REGION 269..356: note = Tnp_domain
  SITE 277: note = Tnp_P1
  SITE 309: note = Tnp_P2
  SITE 317: note = Tnp_P3
  SITE 318: note = Tnp_P4
  SITE 329: note = Tnp_P5
MKRYYVGVDWADEFHQVWVSDAEGNKVAEMTVEQSPQGMGEFGRWLHERQAEQIELWAAIEKPQGRIVDFLLDHGVVVYPVNPKALDRARDRFRMSQSKSDSFDAYVLAQFLRTDHVHLRALEPDSEQAQELKMLTRDHHRLGRHKTRLLNQIEVTLKEYYPRPLEVFSDLEAKIALDFLEQYPTPRALSELTRRKWNRFAKREHHLGEQRCKELWEKLSQPQLKIPEHVVRAKAQLLLVLVAQLKALAQAVESYSEEVQRFFASMPAAKLVKTLPGGKSGTTVPMLWAELGDAKSRWESFRHLQAEAGAVPVTKASGKSRVVQFRFACNKLLRYASYWFSFNSLNRCEWANKYYRDQRAKGHRHPQALRALAAKWLKIIFIMWRDDKPYDENYHLANIARQTMRQAA

SEQ ID NO: 15746 - protein, 323 aa, unidentified
  source 1..323: note = protein_ccf5cd9
  REGION 9..155: note = RuvC_domain
  SITE 12: note = RuvC_P1
  SITE 56: note = RuvC_P2
  SITE 96: note = RuvC_P3
  SITE 98: note = RuvC_P4
  SITE 101: note = RuvC_P5
  REGION 191..276: note = Tnp_domain
  SITE 199: note = Tnp_P1
  SITE 228: note = Tnp_P2
  SITE 236: note = Tnp_P3
  SITE 237: note = Tnp_P4
  SITE 248: note = Tnp_P5
MAKRITICAGIDTGKRKLDVAIDGSSQELQVDNTVEGHKRLLDWLRRYRVKRIGIEASGGYEQAVVAELRRKRFVVVVFQPAQVRGYAQFHLQRAKNDKIDAALIASCTAAVRTIHAPPDPRLLPFAEHLTMIEQIGEDIARLKNRLETCRKPHFRQLWQEDIARLATRAKAELKALVATIRQHRDLAERLDLIESVDGIGLPTAVAILVRLPEIGKITREQAAALAGVAPYDDDSGEQIGVRHIDGGRQRLRRALYTAALPASFRWNPQLVALYRRLIVAGKQHKRALIACARKLLIFANTVVARGTPWQHQQPPITASAGA

SEQ ID NO: 15747 - protein, 343 aa, unidentified
  source 1..343: note = protein_2ba4e7f
  REGION 6..147: note = RuvC_domain
  SITE 9: note = RuvC_P1
  SITE 52: note = RuvC_P2
  SITE 87: note = RuvC_P3
  SITE 89: note = RuvC_P4
  SITE 92: note = RuvC_P5
  REGION 211..296: note = Tnp_domain
  SITE 219: note = Tnp_P1
  SITE 249: note = Tnp_P2
  SITE 257: note = Tnp_P3
  SITE 258: note = Tnp_P4
  SITE 270: note = Tnp_P5
MQIRSVGIDLGKTTFHLVALGDNGKVLLKKKFTQKQLITFTANLQTSLIGMEACSGAHFLGRALREQGHDVKLIPAQFVKPFVKSNKNDFIDAEAIAEAVDRHNMRFVPIKTDDQLDLQALHRVRDRLMARRTSVINQIRAFLLERGMVFAKSPIRLREAIPEVLENANENLTPRMRHLVAMLWCEWKDMEQQILEMNDEVERIASSDAACVRLRQIPGIGPLVATAIVASIGNGAAFRKGRQFAAWIGLVPKQHSTGGKAKLYGISKRGNLYPRKILIHGARAVVLRSKRDRIAMGPWMTALGRRAPRNVLIVAMANKLARIAWAVLSTGQDYRTVPNAISG

SEQ ID NO: 15748 - protein, 343 aa, unidentified
  source 1..343: note = protein_07f8cfc
  REGION 7..149: note = RuvC_domain
  SITE 10: note = RuvC_P1
  SITE 53: note = RuvC_P2
  SITE 88: note = RuvC_P3
  SITE 90: note = RuvC_P4
  SITE 93: note = RuvC_P5
  REGION 212..301: note = Tnp_domain
  SITE 220: note = Tnp_P1
  SITE 250: note = Tnp_P2
  SITE 258: note = Tnp_P3
  SITE 259: note = Tnp_P4
  SITE 271: note = Tnp_P5
MQTVTTIGLDIAKSVFQVHGVDAEGNVLIRRQLKRRYVLAFFEKLPPCLVGIEACATSHHWSRELKARGHNVRLMPPAYVKPYVKRQKNDAADAEAICEAVTRANMRFVETKTPEQQSCLMLHRTRQLFIRQQTSVINAIRAHMAEFGIVAPVGRKGVEQLLDVVADARDRRVPEVARACIAALGAQLRLLKAQILEFDRRILAWHRSNETSRRLDELPGVGPALATALVASVADAKAFRSGRNFSAWIGLVPKQHSSGGKDKLGSISKQGDRYLRSLFTAGALAVIRYAKIHDTQHRPWLTALLARRPTKVAAIALANKIARMAWAMMARGERYREPVALAA

SEQ ID NO: 15749 - protein, 316 aa, unidentified
  source 1..316: note = protein_6850723
  REGION 6..160: note = RuvC_domain
  SITE 9: note = RuvC_P1
  SITE 57: note = RuvC_P2
  SITE 97: note = RuvC_P3
  SITE 99: note = RuvC_P4
  SITE 102: note = RuvC_P5
  REGION 193..277: note = Tnp_domain
  SITE 201: note = Tnp_P1
  SITE 230: note = Tnp_P2
  SITE 238: note = Tnp_P3
  SITE 239: note = Tnp_P4
  SITE 250: note = Tnp_P5
MTNDTIGVDISKDHLDAHRLSDGASRRFANDSRGHKALMGWLSPSQLDPPSVRIVYEPTGPYHRAFERGLAAAGLALVKVNPRQARRFAEATGRLAKTDRLDAAMLARMGALLDLEARPLRGPLLNDLKDLQMARQALVKNRTAARNRAKALTLPILKRHNAEQLRQIDRQMAAVEKEIMALIQADPDLSRRFAILVSIPGVSAITACALLIDMPELGTLGQAQAASLAGLAPVARQSGQWTGRAFIRGGRAMVRQALYMPALVAMRFNPDLKAKYGKLKAAGKPSKVALTAIMRKLIILANTLLRDQRNWTPNRP

SEQ ID NO: 15750 - protein, 342 aa, unidentified
  source 1..342: note = protein_d2dc662
  REGION 5..152: note = RuvC_domain
  SITE 8: note = RuvC_P1
  SITE 55: note = RuvC_P2
  SITE 92: note = RuvC_P3
  SITE 94: note = RuvC_P4
  SITE 97: note = RuvC_P5
  REGION 212..299: note = Tnp_domain
  SITE 220: note = Tnp_P1
  SITE 250: note = Tnp_P2
  SITE 258: note = Tnp_P3
  SITE 259: note = Tnp_P4
  SITE 271: note = Tnp_P5
MEHYAGIDVSLECSSVCVVDGSGKIVREGKVASEPDALIGWLTSAGYELSRIGLEAGPLSQWLFAAMREAGLAVELLETRHVRKAFEAMPVKSDRNDARGIAQLMRLGWFRPVHCKSMGAQETRSLLTARKLVQSKLRDLENSLRGILRGFGLKVGNTTELGFAGRIEELVAGHPHLERIAEALLSIHAVLLREFKVFEKQVRSMARCDAKARLLMSTPAVGPIVALTYASAIDDPARFKSSKQVGAHFGLTPKRYQSGETDYTGRISKIGDSSVRTVLYEAAHIMLTKPVKGCSKLKSWAMRIARRAGMSKAKVALARRLAVIMHRMLADGTPFNAAATAA

SEQ ID NO: 15751 - protein, 399 aa, unidentified
  source 1..399: note = protein_d705a7a
  REGION 3..149: note = RuvC_domain
  SITE 45: note = RuvC_P2
  SITE 86: note = RuvC_P3
  SITE 88: note = RuvC_P4
  SITE 91: note = RuvC_P5
  REGION 258..345: note = Tnp_domain
  SITE 266: note = Tnp_P1
  SITE 296: note = Tnp_P2
  SITE 304: note = Tnp_P3
  SITE 305: note = Tnp_P4
  SITE 317: note = Tnp_P5
MTEVLIEAPGHKRRRRLLVLNTRVEHDHLIEVLQAYGRPVVCAFEATGNYHRPIAWRLAEAGFEVRLVSSLALARTREALHNSWDKNDPKDAQVMLHMLRIQATQVYHDPLRAGINDVQELSKTHEAIARAKTEIQHRILTHYLPLYFPEIDRFRGNSRSDWFFAFLHAFPTPASITALTKEEFVTAAWDVVGRKVSKTQILMDIYETARSSTGLPLPLDAPAIRMFRMVIDEARGLIRQRNEIEAQADELLRHSQDYQLLRQIPGIGPINALTIIAEAGDLRRFAHQRQFVKFCGLDLSTQQSGQYRGQTRLSKFGNARLRRTLWIAGQVAIRQRENGFRHKFERYIARDRDNPDLRRKAMTAITAKMARVVHAVVKGGSDYRPFVEGRVPGGRTSVS

SEQ ID NO: 15752 - protein, 318 aa, unidentified
  source 1..318: note = protein_ff3409a
  REGION 7..155: note = RuvC_domain
  SITE 10: note = RuvC_P1
  SITE 54: note = RuvC_P2
  SITE 94: note = RuvC_P3
  SITE 96: note = RuvC_P4
  SITE 99: note = RuvC_P5
  REGION 193..277: note = Tnp_domain
  SITE 201: note = Tnp_P1
  SITE 230: note = Tnp_P2
  SITE 238: note = Tnp_P3
  SITE 239: note = Tnp_P4
  SITE 250: note = Tnp_P5
MSDTVFVGIDVSSQTLEVAVSTQTATWQASNDTTGIEKLVSQLIALEPGLIVLEATGGYEFEAACALQAAGLAVAVVNPRMARDFARAMGALAKTDALDARMLAAFARVLHQHPERERFVKPLADAELQRLQALVLRRRQLVQMITGERQRLRLAHAAARPSLERVIDFLKKELDDSDTEVAEHVERHHAELARTLRSVPGIGSTSVAVLLAELPELGRLDRRRIAVLVGVAPLNRDSGLMRGQRCIWGGRADVRRTLYMATLTGVRYNPVLRDYYQRLVQAGKRKKVALVAAMRKLLTIINAIAKHRVDWNSSFHIA

SEQ ID NO: 15753 - protein, 391 aa, unidentified
  source 1..391: note = protein_501ff46
  REGION 6..159: note = RuvC_domain
  SITE 9: note = RuvC_P1
  SITE 57: note = RuvC_P2
  SITE 98: note = RuvC_P3
  SITE 100: note = RuvC_P4
  SITE 103: note = RuvC_P5
  REGION 221..306: note = Tnp_domain
  SITE 229: note = Tnp_P1
  SITE 259: note = Tnp_P2
  SITE 267: note = Tnp_P3
  SITE 268: note = Tnp_P4
  SITE 279: note = Tnp_P5
MAAVMIGVDPAKRSHAMAVLDGHEEQLAALEVGNDSAGYRAMLALAKRWPNRTWAVEGAGGVGVQLAQRLVADGETVIDVPPKLSTRARIFDRGHGRKNDPTDARTVAVVALRTKGLREVALDDELIALRLMSERRTDLVRSRTATINHLHQLLMELIPAGAERNLTATKAKALLATVRPRHIAGRTRRQLAADLIEDLTALDCRLKDLDKRLREAVEATGTDLMSIKGVGVATAAMVLGEVGDIRRFPSKHHFATYNGTAPREYSSGGVDTRRLSRAGNRKLNHALHVIAMAHKRYDQRGSAYYDRKLADGKGKKGALRCLKRRLSDVIFHTLSDERARREVAGPEGHSGATTKSCATDRTPMASTSEKPLAGPATPDATPHQLPRKVPA

SEQ ID NO: 15754 - protein, 404 aa, unidentified
  source 1..404: note = protein_2daea0f
  REGION 11..166: note = RuvC_domain
  SITE 14: note = RuvC_P1
  SITE 63: note = RuvC_P2
  SITE 103: note = RuvC_P3
  SITE 105: note = RuvC_P4
  SITE 108: note = RuvC_P5
  REGION 273..359: note = Tnp_domain
  SITE 281: note = Tnp_P1
  SITE 311: note = Tnp_P2
  SITE 319: note = Tnp_P3
  SITE 320: note = Tnp_P4
  SITE 332: note = Tnp_P5
MTDTDHIGVFLGLDVGKSAHHGHGLTPAGKKVFDKPLPNSEPKMMAVLDKLKAKFGTVLVVVDQPASIGALPLTVARQSGCEVAYLPGLAMRRIADLYPGQAKTDAKDAAVIAEAARTMAHTLRSLETKDEITAELTVLVGFDQDLAAEATRTSNRIRGLLSQFHPALERVLGPRLDHPAVTTLLERYGSPSALRKAGRSRLVEVLRPKAPRMAARLVEDVFTALDEQSVVVPGTDTLDLVVPSLARSLAAVHTQRRRLGEQINQLLEAHPLSQVLISMPGVGVRTAAVLLVTIGDGTAFPSAAHLASYAGLAPATRSSGTSISGEHAPRAGNRQLKRAMFLSAFACMNADTASRTYYDKQRSRGKTHTQALLRLARQRINVLFAMLRDGTFYQSRPPAVDLAA

SEQ ID NO: 15755 - protein, 388 aa, unidentified
  source 1..388: note = protein_b93129f
  REGION 5..160: note = RuvC_domain
  SITE 8: note = RuvC_P1
  SITE 59: note = RuvC_P2
  SITE 98: note = RuvC_P3
  SITE 100: note = RuvC_P4
  SITE 103: note = RuvC_P5
  REGION 261..348: note = Tnp_domain
  SITE 269: note = Tnp_P1
  SITE 299: note = Tnp_P2
  SITE 307: note = Tnp_P3
  SITE 308: note = Tnp_P4
  SITE 321: note = Tnp_P5
MRYFIGIDISKFKHTAAVIDQDGVVHIEPFDFDNDIIGFNSFFTSVSSFIQDDFIIGMEDTGHYADNLRKFLLSKNLKVAMFNPLATNHIRLAFNLAKNDRLDSLTIASALAMPRLYRIIEDEHFTYHEIRELSRYHQSLSKTMNRYKNRLQKFIDIAFPEFNKLFDTKYSKTYLKILKDFQSAQNIANTDIRTLRKALLSKGRCVSITAEELKSAARDSIGHSHIALDLEIQQTVEMIEKIDSNLNIVDKKIEEFSLQLNSPILAIPGISHISAMSILSELGDFTQYESAKKVIKLSGTNPYIYESGTYSMPRTRLEKKGSKYLRCTLYNIIQTVINNNPVFKDYYDRKISQGKSHRCAQGHCVRKLLRVIYHILTTGCEFDPSLLR

SEQ ID NO: 15756 - protein, 348 aa, unidentified
  source 1..348: note = protein_0c4e94c
  REGION 9..151: note = RuvC_domain
  SITE 12: note = RuvC_P1
  SITE 55: note = RuvC_P2
  SITE 90: note = RuvC_P3
  SITE 92: note = RuvC_P4
  SITE 95: note = RuvC_P5
  REGION 214..301: note = Tnp_domain
  SITE 222: note = Tnp_P1
  SITE 252: note = Tnp_P2
  SITE 260: note = Tnp_P3
  SITE 261: note = Tnp_P4
  SITE 273: note = Tnp_P5
MNATPKTVVGVDTAKSVFQLYTIDMETGEVTCKQLKRVQFLQWFSNRAPCVVGMEACGGSQHWARQLQAQGHQVRLMGGKMVKAFVCGNKNDAADARAIWLAAQQPGVKAVAVKSEAQQAVLAMHRIRQQLVKSRTAQRNELRGLLAEYGEVFGLGKAAFNAGMKGALARLAERLPAVLIDTLREQWHELVRLDERITAIEARLLAWFRQDRATQAIAAIPGVGLLTATAAVATMGQANAFRSGREFAAWIGLVPAQSGTGGKVRLLGISKRGDTYLRTLLIHGARAVQAHARTPGKWLQEIGQRRPPNVVTVALANKIARTIWAVLAHDRAYDKGYVSVRPQTTMPT

SEQ ID NO: 15757 - protein, 425 aa, unidentified
  source 1..425: note = protein_f99d297
  REGION 4..157: note = RuvC_domain
  SITE 7: note = RuvC_P1
  SITE 59: note = RuvC_P2
  SITE 94: note = RuvC_P3
  SITE 96: note = RuvC_P4
  SITE 99: note = RuvC_P5
  REGION 284..371: note = Tnp_domain
  SITE 292: note = Tnp_P1
  SITE 323: note = Tnp_P2
  SITE 331: note = Tnp_P3
  SITE 332: note = Tnp_P4
  SITE 344: note = Tnp_P5
MLGVGIDWSEEFHLVALGRPGEGVIDISRVEHSPTAVDTLVGRIAGLEPDPAEVRVVIETRHGPLVERLVDAGYVVVPVNPDLVARRRGPAKKKDDSEDARIACLIALDRHERLRPLIPHGQIAGELRSIARDDERAARDERRLGNRLRQDLIATFPAALQIGGDDLGAPTFLRLLERWPTANALAGASREELVAFACSCRHGWPERFADKVATSLAADHFRPKEYLVRAKADTIRLGATQLLAIARQRRAWERRMGELLLGAPRRGRDHQPRGDGLGNGFPDGEIYLSFPGLGDRLAARIAGEIGDHPEQFDSPSSLQCYAGKAPVTRRSGKSELVVACRLAHNRFLGAAVQQWAFCSLKRSGWAREFYDAQRARGKGHHAALRALGNRRLEILWHCVRRGVPYDETVHVANRNRALGRTAEAA

SEQ ID NO: 15758 - protein, 346 aa, unidentified
  source 1..346: note = protein_2fdf6df
  REGION 6..148: note = RuvC_domain
  SITE 9: note = RuvC_P1
  SITE 52: note = RuvC_P2
  SITE 87: note = RuvC_P3
  SITE 89: note = RuvC_P4
  SITE 92: note = RuvC_P5
  REGION 211..297: note = Tnp_domain
  SITE 219: note = Tnp_P1
  SITE 249: note = Tnp_P2
  SITE 257: note = Tnp_P3
  SITE 258: note = Tnp_P4
  SITE 270: note = Tnp_P5
MHVATVGLDLAKRVFQAHGADAEGRAVLRRKLGRGEVLAFFAKLPPCLVGMEACGGAHHWAREIAALGHEVRLMPGAYVRPYVKRGKTDAGDAEAICEAVTRPGMRFVAVKSPDQQAALMLHRTRDLLVRQRTALVNALRGHMAEFGIVAPVGIARVGELVTILLDEEAAAMPSLARRALLALAAELETLGVRIDEAEAAILAWHKGNEASRRLAAVPGIGPITASAIVATAGDASQFASGRHFAAWLGLVPRQNSSGGKQRQGGTSKAGDGYLRRLLVLGATSLVRQAQRRTKEPAFAWLRGLLERRPARLASVGQANKTARLAWALRARGEAYRRPAPAVAAAA

SEQ ID NO: 15759 - protein, 322 aa, unidentified
  source 1..322: note = protein_c448881
  REGION 9..157: note = RuvC_domain
  SITE 12: note = RuvC_P1
  SITE 56: note = RuvC_P2
  SITE 96: note = RuvC_P3
  SITE 98: note = RuvC_P4
  SITE 101: note = RuvC_P5
  REGION 195..279: note = Tnp_domain
  SITE 203: note = Tnp_P1
  SITE 232: note = Tnp_P2
  SITE 240: note = Tnp_P3
  SITE 241: note = Tnp_P4
  SITE 252: note = Tnp_P5
MSLPGPLCVGIDISKATLDIAASSAIAQFSVANDADGFDSIIAELRKHSVALVLMEATGGLEAAVACALQAEGFEVAVVNTRQARDFARAMGYLAKTDSIDARALAQMAEVINRHPERDRFIRALPDAERLVLNAIVVRRRQLISMLVAERNRLYPAHPQSRKSLNIIIKALEDELARIDDDMNNHIRSHFKALSERLSSIKGVGTMTVAALLAEVPELGRLSRREISALVGVAPVNRDSGTMRGRRTIFGGRAGVRTALYMSALVATRFNPVIKEFYTRLVAAGKPKKVALVACMRKLLTILNAMLRKNEEWNESYHHVVP

SEQ ID NO: 15760 - protein, 342 aa, unidentified
  source 1..342: note = protein_1a2abdf
  REGION 6..148: note = RuvC_domain
  SITE 9: note = RuvC_P1
  SITE 52: note = RuvC_P2
  SITE 87: note = RuvC_P3
  SITE 89: note = RuvC_P4
  SITE 92: note = RuvC_P5
  REGION 211..297: note = Tnp_domain
  SITE 219: note = Tnp_P1
  SITE 249: note = Tnp_P2
  SITE 257: note = Tnp_P3
  SITE 258: note = Tnp_P4
  SITE 270: note = Tnp_P5
MEITTVGLDLAKNVFQVHAISGSGEVVVRRALRRAQMMPFFGKLAPCLIGIEACGTSHHWARELVRLGHEVRLMPPAYVKPYVKRGKTDAGDAEAICEAVRRPTMRFVPIKSVEQQAALSLHRTRDLLVRQRTQLVNMIRGLLAEFGVDIPKGITHALAFVRRVVSGEAHEVPQLAAKVIGALAEQALEGQHRIRQLERDLLAWHRANPLSRRIATVPGVGLLGATALAATVTDPTQFRSGRQFAAWLGLTPLNNSSGGRERVGRISKMGDQYLRRLLVTGMTALVRRNLHHPEAADPRIAALLARKPVRLATVAMANRTARAIWAIMVRGEVYRAPESAAA

SEQ ID NO: 15761 - protein, 334 aa, unidentified
  source 1..334: note = protein_f192aab
  REGION 7..149: note = RuvC_domain
  SITE 10: note = RuvC_P1
  SITE 53: note = RuvC_P2
  SITE 88: note = RuvC_P3
  SITE 90: note = RuvC_P4
  SITE 93: note = RuvC_P5
  REGION 209..299: note = Tnp_domain
  SITE 217: note = Tnp_P1
  SITE 247: note = Tnp_P2
  SITE 255: note = Tnp_P3
  SITE 256: note = Tnp_P4
  SITE 268: note = Tnp_P5
MENIALIGIDLGKNSFHIHCQDRRGKAVYRKKFTRPKLIEFLATCPATTIAMEACGGSHFMARKLAELGHFPKLISPQFVRPFVKSNKNDFVDAEAICEAASRPSMRFVQPRTESQQAMRALHRVRESLVQDKVKTTNQMHAFLLEFGISVPRGAAVISRLSTLLEDSSLPLYLSQLLLKLQQHYHYLVEQIKDLESQLKRKLDEDEVGQRLLSIPCVGTLTASTISTEIGDGKQYASSRDFAAATGLVPRQYSTGGRTTLLGISKRGNKKIRTLLVQCARVFIQKLEHQSGKLADWVRELLCRKSNFVVTCALANKLARIAWALTARQQTYEA

SEQ ID NO: 15762 - protein, 409 aa, unidentified
  source 1..409: note = protein_0937032
  REGION 10..157: note = RuvC_domain
  SITE 13: note = RuvC_P1
  SITE 63: note = RuvC_P2
  SITE 97: note = RuvC_P3
  SITE 99: note = RuvC_P4
  SITE 102: note = RuvC_P5
  REGION 252..339: note = Tnp_domain
  SITE 260: note = Tnp_P1
  SITE 291: note = Tnp_P2
  SITE 299: note = Tnp_P3
  SITE 300: note = Tnp_P4
  SITE 311: note = Tnp_P5
MMEVLYARCAGLDVHKRTVVACVRLAASTTVQQEVRTFGTATRDLLALADWLTSHGCTHVAMESTGVYWKPIWHVLDGQFALILANALQVRSVPGRKTDVNDAMWIADLLAHGLIRGSFVPPAPIHELRDLTRTRKQMVREVAQHTLRIQKVLEDANLKLTSVLSDVLGMSGRAMIEAIIRGEADPERLADLSQGRLKASRPAVVDALHGRVTAHHRFLLRLHLTHIDTLETTVREVEARVGDALIPFQAAVDRLMTIPAVRHTVARVIVAEIGLDMTRFPTAGHLVSWAGLCPRLDESAGKRRSTRTRPGAPWLKTALVQAAWVAARTRNTYLRAQFLRLKSRRGPKKAILAVAGSMLTAAYYILKNETTYAELGADYFERRNKTQVARRLVKRLESLGLTVEIKPAA

SEQ ID NO: 15763 - protein, 344 aa, unidentified
  source 1..344: note = protein_dffda3c
  REGION 6..146: note = RuvC_domain
  SITE 9: note = RuvC_P1
  SITE 52: note = RuvC_P2
  SITE 87: note = RuvC_P3
  SITE 89: note = RuvC_P4
  SITE 92: note = RuvC_P5
  REGION 211..296: note = Tnp_domain
  SITE 219: note = Tnp_P1
  SITE 249: note = Tnp_P2
  SITE 257: note = Tnp_P3
  SITE 258: note = Tnp_P4
  SITE 270: note = Tnp_P5
MQISILGIDIGKNSCSVVGVDDRGAVVVRRTMRRHTLIEFVEKLPTCVIAMEACCGAHHLGRLFAARGHEVRLMSPEYVRPYVKAQKNDDRDAEGIAEAASRPTMRFVELKSQEQLDIQTLHRVRSRLVAERTTLINQLRAVLLERGVTFAAGRVKFESALDGLLAEADEVLSARIRSLVIELRDEWQLLDKKIGGLNAEFVVLARQNSAMRRLTSVPGIGVLNATALVAAIGDAGSFKHARDLGAWLGLVPRQFTTGGKARLLGITKRGNTYLRTLLVHGARAAMHTLSQSDTPIGQWLQTMLSRGIQRNVVIVALANKLARIAWAVLRKAQPYERAYGAAVI

SEQ ID NO: 15764 - protein, 347 aa, unidentified
  source 1..347: note = protein_122be24
  REGION 6..148: note = RuvC_domain
  SITE 9: note = RuvC_P1
  SITE 52: note = RuvC_P2
  SITE 87: note = RuvC_P3
  SITE 89: note = RuvC_P4
  SITE 92: note = RuvC_P5
  REGION 211..297: note = Tnp_domain
  SITE 219: note = Tnp_P1
  SITE 249: note = Tnp_P2
  SITE 257: note = Tnp_P3
  SITE 258: note = Tnp_P4
  SITE 270: note = Tnp_P5
MNITTVGVDLAKNVFQVHGVDKRGKPLARKQLKRGQVIGFFANMPPCLIGMEACASAHFWARKLIALGHDVKLMAPQFVKPYVKTNKNDASDAEAICEAVARPNMRFVPVKSVDQQAVLALHRARQGFVAARTAQANQLRGLLGEFGIALPLGISWVPRKIPEILEDAQNGLPVISRELFARLLSHFRELDRQVKEIERQIEAWHRDDAASQRLQAIPGIGPITASALVASIGNASTFKNGRQLAAWLGLVPRQCSSGGKNQLLGISKRGDTYLRTLLIHGTRSVMQHLKPGAGRTQGWLESLIKRRHHNIAAVALANKNARIVWAVLAHGRDYQPGYVSTRVAMSV

SEQ ID NO: 15765 - protein, 319 aa, unidentified
  source 1..319: note = protein_07ff35b
  REGION 10..154: note = RuvC_domain
  SITE 13: note = RuvC_P1
  SITE 56: note = RuvC_P2
  SITE 96: note = RuvC_P3
  SITE 98: note = RuvC_P4
  SITE 101: note = RuvC_P5
  REGION 196..280: note = Tnp_domain
  SITE 204: note = Tnp_P1
  SITE 233: note = Tnp_P2
  SITE 241: note = Tnp_P3
  SITE 242: note = Tnp_P4
  SITE 253: note = Tnp_P5
MEKVTHGRIMGIDVSRDWLDIHCLPDGQRHRIPNTDDGHVAVSDLAHDQRAVVCFEATGGQEWRLWFHLEDAGVETRQVPPAQVKAFARSLGTRAKTDRIDAELIARFLVFRPEAGRTLPAEHLRLLRALTTRRAQAVEMRKRLLAQIRAHQKSGTAELFEDIDVELKERLDVAIAELESRISELLGRDRHLADTARILRSVPGIGPVASSTLIAELPELGAITGEQAAALTGLAPVAQDSGTLRGRRAIAGGRRALRHVLFQAALVASHHNPMLKVFADRLRKAGKPHKVIVTAVARKLVIIANALCKKRRKWEPRHP

SEQ ID NO: 15766 - protein, 351 aa, unidentified
  source 1..351: note = protein_f810241
  REGION 13..154: note = RuvC_domain
  SITE 16: note = RuvC_P1
  SITE 59: note = RuvC_P2
  SITE 94: note = RuvC_P3
  SITE 96: note = RuvC_P4
  SITE 99: note = RuvC_P5
  REGION 218..303: note = Tnp_domain
  SITE 226: note = Tnp_P1
  SITE 256: note = Tnp_P2
  SITE 264: note = Tnp_P3
  SITE 265: note = Tnp_P4
  SITE 277: note = Tnp_P5
MSRSSFSAAIVTLGIDLGKNSFHLIGQDERGAIVLRIKLSRTQLPQRLANIPPCLIGMEACAGAHHIGRQLQALGHDVRLIPAQYVKPFLKGHKNDYRDAEAIAEAVQRPTMSFVAIKTPDQMDLLALHRVRSRLVGQRTGVTNQIRGLLLERGITVRQGFAPLRQALPGILGSSSDVLSPRLVRLIADLMEDWHRLDERIADVSTEIEALAAQDEHCQRLMSVPGVGPIISSAMVAAIGTGAGFKQGRDFGAWLGLVPKQTSTGDRTILGRLSKRGNTYLRTLFVQAAHIVLVSRPHAARLSLWPWIETAGRRLHRNMLVIALANKLARIAWAVLARGHAYQPRSISHAA

SEQ ID NO: 15767 - protein, 416 aa, unidentified
  source 1..416: note = protein_f56fa31
  REGION 4..160: note = RuvC_domain
  SITE 7: note = RuvC_P1
  SITE 57: note = RuvC_P2
  SITE 97: note = RuvC_P3
  SITE 99: note = RuvC_P4
  SITE 102: note = RuvC_P5
  REGION 274..361: note = Tnp_domain
  SITE 282: note = Tnp_P1
  SITE 312: note = Tnp_P2
  SITE 320: note = Tnp_P3
  SITE 321: note = Tnp_P4
  SITE 334: note = Tnp_P5
MNAAGIDVSSRKSTVSVLRPFGEVVRLPFDIVHSAEGFASLIRQLKSIEGETRIVMEHTGRYYEPVAQILHEAGFYVSTVNPLLIREYGGNSLRRVKTDKADAMKIARYALDNWSELRDYTPMDTIRYDLKTLNRQFQLASKQKTAASNNLIALLEQSFPGVRKCFDSPVRKDGTQKWVDFVYTFWHADCVRKNSLNAFTERYRKWCKRHGYFFKQSNAAEVYELARSVITLVPKGPVAKVLVQQAASQLTSISRSVETYRAEMNRLASMLPEYPVVMGLYGVGESFGPQLMAEIGDVRRFDRKQALVAFAGIDPMPNQSGEKNVRSNKSSKRGSPYLRKTLFSIMMCLLQSAPADEPVFQFLDRKRSEGKPYYVYMTAGANKFLRRYYAKVRDYLATLDNFPPVDMDSTGLNHLN

SEQ ID NO: 15768 - protein, 309 aa, unidentified
  source 1..309: note = protein_6e17e95
  REGION 13..167: note = RuvC_domain
  SITE 16: note = RuvC_P1
  SITE 64: note = RuvC_P2
  SITE 104: note = RuvC_P3
  SITE 106: note = RuvC_P4
  SITE 109: note = RuvC_P5
  REGION 274..309: note = Tnp_domain
  SITE 282: note = Tnp_P1
MNGLPDRTYAVYLGLDVGKEHHHACALDPAGKRLHDKTLPQDEQRIRDLLTDLSVHGDVLVVVDQPASIGALPVAVARSMNIQVAYLPGLAMRRIADLHPGNAKTDARDAYVIADAARTLPHALRRVDVGDDALADLEVIVGFDDDLAAETTRVTNRVHGLLTQIHPALERAIGGSLHHPAVLELLSRFGGPSGLRTAGRRRLLAVAKPRAPRKYQAFVDAIMTALDEQTVTVPGTRAADLVLPKLADQLAGLLAQRAEAATQVEEMLDAHPLAQVLTSMPGVGVRTGARILLEVGDASSFATPGHLAA

SEQ ID NO: 15769 - protein, 347 aa, unidentified
  source 1..347: note = protein_e1ee260
  REGION 6..150: note = RuvC_domain
  SITE 9: note = RuvC_P1
  SITE 54: note = RuvC_P2
  SITE 89: note = RuvC_P3
  SITE 91: note = RuvC_P4
  SITE 94: note = RuvC_P5
  REGION 213..298: note = Tnp_domain
  SITE 221: note = Tnp_P1
  SITE 251: note = Tnp_P2
  SITE 259: note = Tnp_P3
  SITE 260: note = Tnp_P4
  SITE 272: note = Tnp_P5
MNITRVGVDIAKSVFHVHGVDRHDKTQWQASLKRNRWLDALCERVAPGVVIGMEACASAHHWGRELQKRGYTVKLIAAQFVKPYVKSNKNDRVDAEAICEALGRPSMRFVAVKSVEQQDTQAAHRIREELVGQRTAKANQIRGLVGEYGIVAPVGINQLRLALPLWLEDAENGLTDEFRTLLSDLANDLRHLDRRIADLDDRIAQAVKVDPIARRLVELRGVGPLTASALSGALGDGRAFRKGRDFAASLGLTPHQHSTGGKDRLLGISKRGDSYLRKLLVHGARAVIRHAKDRDDGLSQWLNGLVACKHVNVVTVALANKTARIAWAIVHNETHYDPMLAASKTAG

SEQ ID NO: 15770 - protein, 400 aa, unidentified
  source 1..400: note = protein_58a2ba2
  REGION 11..168: note = RuvC_domain
  SITE 14: note = RuvC_P1
  SITE 66: note = RuvC_P2
  SITE 106: note = RuvC_P3
  SITE 108: note = RuvC_P4
  SITE 111: note = RuvC_P5
  REGION 274..361: note = Tnp_domain
  SITE 282: note = Tnp_P1
  SITE 313: note = Tnp_P2
  SITE 321: note = Tnp_P3
  SITE 322: note = Tnp_P4
  SITE 334: note = Tnp_P5
MDERQRFKWFLGIDVSKETFDASCINTKGERLFNLSASMDRKGFEELMKRFSTLSIPKESVLVGMESTACYHINLYSFLVSLGYTVMVINPLLISNFVKLQLRKTKTDKKDAYVIAQFLLLNRDSLSQTILSSDISDLRDLSRQRESLVDQMSSIKSEIKRLLTMTFPELEHISGIFTKSMLRLLCQYPSAASIKQAKRSKIAKVLIPGSYGKQTDVSVDRIVKAAQVSVGTSSATKEIILRQKVSLLIQLEEHLQELTDMLIELCQGKIQGDMDILTSMKGIGEKTAVNFLIEIGGDIKQFESHKKLIAMAGLDPALYQSGKIDRKGRISKRGNRHLRRVIWLMTTKVIQFNERFKQYYLKRRKDGLPYKKAVLATAHKLIRVMFAMLRNKTLFDARMN

SEQ ID NO: 15771 - protein, 357 aa, unidentified
  source 1..357: note = protein_449a8c8
  REGION 14..155: note = RuvC_domain
  SITE 17: note = RuvC_P1
  SITE 60: note = RuvC_P2
  SITE 95: note = RuvC_P3
  SITE 97: note = RuvC_P4
  SITE 100: note = RuvC_P5
  REGION 223..309: note = Tnp_domain
  SITE 231: note = Tnp_P1
  SITE 261: note = Tnp_P2
  SITE 269: note = Tnp_P3
  SITE 270: note = Tnp_P4
  SITE 282: note = Tnp_P5
MGKFIGNSGVVTRVGLDLGKNAFQVHAVGAKGEVVVARKLARGRLVAFFARLPPCLVAMEACGSAHHWGRQLAALGHEVRLIPPAHVKPYVRRNKSDAADAAAICEAAGRPGQRFVPLRSIDNQAALMRHRARELLAGQRTALLNALRGHMAEIGLIAPQGAQHAYELKRLAADGFDENGEIVVPDCVRAALSRLVAHIDALDEAILAIDQELAASVKADATAKRLTTIPGVGPVAASAIVATIQDMSAFASGRDFAAFLGLTPRQSSTGGKPRLGRITKMGDRYLRKLLVVGACAVLGRRKGHKDALRVWASALLDRKTVKYKFKLTAVALANKLARVVYVLMTRGGEYDGRPVAA

SEQ ID NO: 15772 - protein, 322 aa, unidentified
  source 1..322: note = protein_b8da3a4
  REGION 8..150: note = RuvC_domain
  SITE 11: note = RuvC_P1
  SITE 52: note = RuvC_P2
  SITE 92: note = RuvC_P3
  SITE 94: note = RuvC_P4
  SITE 97: note = RuvC_P5
  REGION 191..278: note = Tnp_domain
  SITE 199: note = Tnp_P1
  SITE 229: note = Tnp_P2
  SITE 237: note = Tnp_P3
  SITE 238: note = Tnp_P4
  SITE 251: note = Tnp_P5
MNKYKETYGVDISKDVFDVHGSSSGHNQYKNDATGFKKFLKDLPKESLVVMEATGYYHYRLAQFLYKNEVVVSVVNPLSVKRFIQMKLAKVKTDKSDAKMICEYGIINEVPLYNALTDVQSECLQLFRTLDNYIKHRTATKNKMHGEEVLGIPSKFTYQSLRRTKKYYDTEIKKIEAKILSLVKEEQQEQLTLLTSVPGIGQKTALFLIIVTDGFSKFETASQLCSYVGITPTTRVSGSSVRGRARISKVGNRKLRNLLFLCSFNACKYNKACRELYERIVNKGKSKKLALIAVANKLIKQCFAIAKSGRPYDETYVSVLPR

SEQ ID NO: 15773 - protein, 315 aa, unidentified
  source 1..315: note = protein_3944f6b
  REGION 12..181: note = RuvC_domain
  SITE 15: note = RuvC_P1
  SITE 57: note = RuvC_P2
  SITE 97: note = RuvC_P3
  SITE 99: note = RuvC_P4
  SITE 102: note = RuvC_P5
  REGION 192..276: note = Tnp_domain
  SITE 200: note = Tnp_P1
  SITE 229: note = Tnp_P2
  SITE 237: note = Tnp_P3
  SITE 238: note = Tnp_P4
  SITE 250: note = Tnp_P5
MAMPVATTQSIVGVDVAKDELVIYHVESDRLETISNTKTAIKKWLKTVAKPVAIAIEATNIYHQEFAELAHADGCRIYMVGGYELSHYRKGVNVRAKTDALDARLLARYLTNEGDHLRPWTPPSPLYCRLISLFRRRAALVQARVSLKQSWENEPLLKTAFKNQISAMQRLETLLEKTILTQIEEAGLGAQLKRCMKVEGIGTLTGARLLASFQRGDFRNADAFIAFLGMDLRIADSGKKKGRRCLTKRGDPEARRLLHNAAMAASRTSVWKGFYEAMRGRGLSTTQALVALARKLARVVFALLKNQSEYSPKGV

SEQ ID NO: 15774 - protein, 391 aa, unidentified
  source 1..391: note = protein_d52e48d
  REGION 4..163: note = RuvC_domain
  SITE 7: note = RuvC_P1
  SITE 60: note = RuvC_P2
  SITE 101: note = RuvC_P3
  SITE 103: note = RuvC_P4
  SITE 106: note = RuvC_P5
  REGION 266..353: note = Tnp_domain
  SITE 274: note = Tnp_P1
  SITE 304: note = Tnp_P2
  SITE 312: note = Tnp_P3
  SITE 313: note = Tnp_P4
  SITE 326: note = Tnp_P5
MICVGIDVSKDKHDCCIFSSDGQLLLKPFSVPNNRDGFDSLYSAIRSFENDPDKVKVGLEATGHYSFNILGHLLEKGIHCFVFNPLHTNLYRKSLTLRKTKTDKVDSKIIAKMLLSEVDLKPYSKTLYHNEQLKSLSRYRFSKIRERGNLKQQLARLVNILFPELENLVPSLHLSSVYALLEEFPGASYVAKAHITRLSNLLCASSKGHYKKDKAVEIRNAASSSVGSVMPAKSLELKHTIQLIRILSEEIDEIESQIQEIMEKIQSPITSIPGLGFRMAAMILSEIGDFSKFDSPDKILAFAGISPSTYQSGKLDNAYAHMEKRGSRYLRYALYNAAIYVCHWDKTFSVYLQKKRAEGKHYYVALSHAIKKLVRVIYRLQLTGEPYRPAV

SEQ ID NO: 15775 - protein, 389 aa, unidentified
  source 1..389: note = protein_5a584e0
  REGION 4..161: note = RuvC_domain
  SITE 7: note = RuvC_P1
  SITE 59: note = RuvC_P2
  SITE 100: note = RuvC_P3
  SITE 102: note = RuvC_P4
  SITE 105: note = RuvC_P5
  REGION 265..349: note = Tnp_domain
  SITE 271: note = Tnp_P1
  SITE 301: note = Tnp_P2
  SITE 309: note = Tnp_P3
  SITE 310: note = Tnp_P4
  SITE 322: note = Tnp_P5
MYFVGIDISKYKHDCFIMSETGDVISNSFTITNNQDGFHMLLTVLNSLDIQEEIRIGFEATGHYALNLKLFLEKAHYSFMEFNPVLLAKFNKSQTLRRTKTDAIDCASIARWLMTVDYKPYPVGFYHTYSLKSLTRLRDTLVKQRSFYIVKITNVLDHTFPEFKPFFGNRFTKTALYLLENYGSAEKMARMNSASYDNLRKISRGKFSIQKFLKLKELAANTVGEDNEIFSLQLQSLLNLYNQSAIEVGKLEEQIITLINDIQPKSMTIPGIGPLSAAVIYAEYGDINKFNSPSAMLSFAGLEPGYYQSGTSEHRGHMVKHGSAHLRFTLMNLCIPLIQYNMVFAEYYSKKRNEGKTHRVACSHVIKKLIRIIYHLEKENLDFDASQLR

SEQ ID NO: 15776 - protein, 331 aa, unidentified
  source 1..331: note = protein_d186469
  REGION 5..152: note = RuvC_domain
  SITE 8: note = RuvC_P1
  SITE 55: note = RuvC_P2
  SITE 92: note = RuvC_P3
  SITE 94: note = RuvC_P4
  SITE 97: note = RuvC_P5
  REGION 212..298: note = Tnp_domain
  SITE 220: note = Tnp_P1
  SITE 250: note = Tnp_P2
  SITE 258: note = Tnp_P3
  SITE 259: note = Tnp_P4
  SITE 271: note = Tnp_P5
MEHYAGLDVSLEQTSVCIVDARGTIISEAKVASEPEALVGFLRGQGLDIGRVGLEAGPLSQWLHAGLVAAGFEAVLLETRHVKAALSAMTVKTDRRDARGIAQLLRLGWYRPVHAKSASAQEVRSLLTARKLIQGKLLDIESGIRGVLRGFGLKVGPISRGRFEARIRELVEGQAMLATVLDSMLAARAALQAEFARLHRTLLVLARADPVCRQLMSVPGVGAVVAITFKSGVDDPTRFRRSRDVGPHFGLTPRKYQSGEIDVTGSISKVGDRMVRTALYEAASVMLTRTVRMSPLKSWAMGVAKRRGGKKARVARARKLGVVLHKLPLDQ

SEQ ID NO: 15777 - protein, 398 aa, unidentified
  source 1..398: note = protein_d498aaa
  REGION 4..160: note = RuvC_domain
  SITE 7: note = RuvC_P1
  SITE 57: note = RuvC_P2
  SITE 97: note = RuvC_P3
  SITE 99: note = RuvC_P4
  SITE 102: note = RuvC_P5
  REGION 275..362: note = Tnp_domain
  SITE 283: note = Tnp_P1
  SITE 313: note = Tnp_P2
  SITE 321: note = Tnp_P3
  SITE 322: note = Tnp_P4
  SITE 335: note = Tnp_P5
MNAVGIDVSKGKSMVAILRPFGEVVAVPYEVSHTDSELDQLAKVIKKLPGETRVVMEATGVYFEPIARRLHEHGIFVSVVNPMLISDFSENTLRKAKTDKKDAVKIANYALSSWLDLVEYKPEEDLRRSLKALNRQLKKVAKVNTILKNNLISLTDTTFPGVNKLFSSPERESDGHLKWVDFVAKFPHRDTVAKLTLSAFKKKYKSWCEKNGYYYREKEAEQIHSFARSCVAGMPAEDTFCLLITKAAEFVNAAIENANDLKNEMNRVASMLPQYDVVMNLYGVGKSVGPQLMAEIGDTRRFHNRRAITAYFGYDTVPNDSGQHISKSRPITKKGSSSLRRTLFIIMKVLLVTQPTDNPVYEFIDKKRSEGKNYYSYMTAASAKFLRKIPTCRWVINN

SEQ ID NO: 15778 - protein, 332 aa, unidentified
  source 1..332: note = protein_c157bf4
  REGION 7..149: note = RuvC_domain
  SITE 10: note = RuvC_P1
  SITE 53: note = RuvC_P2
  SITE 88: note = RuvC_P3
  SITE 90: note = RuvC_P4
  SITE 93: note = RuvC_P5
  REGION 208..294: note = Tnp_domain
  SITE 216: note = Tnp_P1
  SITE 246: note = Tnp_P2
  SITE 254: note = Tnp_P3
  SITE 255: note = Tnp_P4
  SITE 267: note = Tnp_P5
MNLVSTLGIDLAKSLFSVHGVNSNGEVVLRRSLSRAKLSELVAQLPACLIGMEACSGAHEWARRFLASGHTVKLMAPKFVTPYRKSGKNDGNDAEAICEAVARPNMRFVPVKSLEQQSDLSLHRVRVGFVEERTATLNRLRGLLAEFGHVLPLRAVEVHRRVPLLLEKLPARVAACARDLLEHAARLAAKTQQYEHEIRAHVRSNALAARTQTRTGIGPITASALVATVGNGRDFKNGRQFAAWLGLVPRQYSTGGKTRLGHITKRGDAYLRTLLVMGARAVLQRAASLTDPFSLWAMALRERRGYHRACVAIAAKNARVAWALLSKEPTAT

SEQ ID NO: 15779 - protein, 323 aa, unidentified
  source 1..323: note = protein_959fa88
  REGION 8..150: note = RuvC_domain
  SITE 11: note = RuvC_P1
  SITE 52: note = RuvC_P2
  SITE 92: note = RuvC_P3
  SITE 94: note = RuvC_P4
  SITE 97: note = RuvC_P5
  REGION 191..278: note = Tnp_domain
  SITE 199: note = Tnp_P1
  SITE 229: note = Tnp_P2
  SITE 237: note = Tnp_P3
  SITE 238: note = Tnp_P4
  SITE 251: note = Tnp_P5
MNKGIKYFGIDISYLVFDVTDSDGNYHQFKNKLSGFKKFAKLLSSNSHCVMEATGYYHYQLAYYLLENGINVSVENPLSVKRFIQMRLSKIKTDKSDSKLICDYAQEVDLKLWKGNSKEVQECLQIVRTLSVYTKQRTMIKNKLHGESVLGEPSKAVLRSLKRSLKQLDKEMKTLEAKLLVLVKETHQDLFTRIKTIPGIGRKTAITLIVLTGVFERFSSASELCSYAGLTPVIRQSGSSVKGRPRISKMGNQKLRNLLFMCSFTACKYNKACRDLYERIVAKGKSKKLALIAVCNKLLKQAFAIAKSGLIFDNEYKSTLVKN

SEQ ID NO: 15780 - protein, 408 aa, unidentified
  source 1..408: note = protein_73d086b
  REGION 6..162: note = RuvC_domain
  SITE 9: note = RuvC_P1
  SITE 59: note = RuvC_P2
  SITE 99: note = RuvC_P3
  SITE 101: note = RuvC_P4
  SITE 104: note = RuvC_P5
  REGION 269..356: note = Tnp_domain
  SITE 277: note = Tnp_P1
  SITE 309: note = Tnp_P2
  SITE 317: note = Tnp_P3
  SITE 318: note = Tnp_P4
  SITE 329: note = Tnp_P5
MKRYYMGVDWGDRLHQVYVGDEEGKKVREVKVPETVEGLAEMGRWLDEKRAEEIELWAAIEKPAGRIVDFLLDHGVVVYPVNPKAVDRVRDRYRMSGSKSDPFDAYVLAEFLRTDQVHLRALQPNSEKAQELKLLSRDQRRVGRQKTRLLNQLTITLKEYYPRVLEAFNDLETQIVLDFIKQYPTPAHLSVLKRKEFNRFATKQHHLGKARCEELWEELKKPQLAVPEHVVRAKAQLVEVLIEQLQASIKAVKIYHERVESFFASTPAAEIAKTLPGGKSGVVVAGIWAELGDARGRWKSSRHLQAEAGAVPVTKASGKSRVVQFRFACNKHLRHTMYWFSFGSLKHCEWARHYYRGQKAKGRTHPQTLRALAAKWLKIIFVMWRDHKPYDENYHLANIARQKIRQEA

SEQ ID NO: 15781 - protein, 338 aa, unidentified
  source 1..338: note = protein_ff8fdc5
  REGION 5..152: note = RuvC_domain
  SITE 8: note = RuvC_P1
  SITE 55: note = RuvC_P2
  SITE 92: note = RuvC_P3
  SITE 94: note = RuvC_P4
  SITE 97: note = RuvC_P5
  REGION 212..295: note = Tnp_domain
  SITE 220: note = Tnp_P1
  SITE 250: note = Tnp_P2
  SITE 258: note = Tnp_P3
  SITE 259: note = Tnp_P4
  SITE 271: note = Tnp_P5
MNYYAGIDVSLEALSVCVIDATGKIFRETKVASEPEALIGWLGSLGVSLMRIGLEAGPLSQWLYAAMRQAGLTVELLETRHVRNAFKIMPVKTDRKDARGIAELMRLGWFRPVHCKSMEAQETRAILTSRKLVQKMLHETEMSLRGVLRNFGLKVGKVAAGQFEFRIRELVEGHPTLTAIAASLLATRATLRREFNALEKRLRAIARTDTRARLLMSTPGVGMIVALTYASAIDDPSRFKSSKIVGAHFGMTPSRYQSGETDRSGRISKIGDSSVRAVLYEAAHVILTKPVKGCTTLKSWAMRIAKRAGMNKAKVALARKLAVIMHRMLADGTTFQPA

SEQ ID NO: 15782 - protein, 320 aa, unidentified
  source 1..320: note = protein_340d6c7
  REGION 4..150: note = RuvC_domain
  SITE 7: note = RuvC_P1
  SITE 51: note = RuvC_P2
  SITE 91: note = RuvC_P3
  SITE 93: note = RuvC_P4
  SITE 96: note = RuvC_P5
  REGION 190..278: note = Tnp_domain
  SITE 198: note = Tnp_P1
  SITE 228: note = Tnp_P2
  SITE 236: note = Tnp_P3
  SITE 237: note = Tnp_P4
  SITE 250: note = Tnp_P5
MTYIGIDVSKDSFVAAYPTKGDYKTQKFPNTTSGVRKFIQSLPAECHCVMEATGNYSMLLLYLLQQANITVSMENPQKIKHFARAMLSTTKTDEIDAKLIAMYGEKMEPAPYKIPSESIIQLKQKRTVLRQLKKQLTMMINLQHSLSVLPKQDPTAKVATEQTIKFLRKQISKLEDEITHLSNKEFKRQMELLTSIKGIGENIASALIMATGGFTYFSSAKQISRFLGLCPTYQQSGTSVNFKGHINRNGDTHLRSQLYIVAVASIKCNAACRDTFVRLRERGKSGKAAIIAVANKLIRIAFAVVTNNRPYIDGYVSTLA

SEQ ID NO: 15783 - protein, 409 aa, unidentified
  source 1..409: note = protein_6a03c46
  REGION 4..160: note = RuvC_domain
  SITE 7: note = RuvC_P1
  SITE 57: note = RuvC_P2
  SITE 97: note = RuvC_P3
  SITE 99: note = RuvC_P4
  SITE 102: note = RuvC_P5
  REGION 274..361: note = Tnp_domain
  SITE 282: note = Tnp_P1
  SITE 312: note = Tnp_P2
  SITE 320: note = Tnp_P3
  SITE 321: note = Tnp_P4
  SITE 334: note = Tnp_P5
MNAAGIDVSKGKSMVSVLRPLGEVVAKPFAVRHTGSELKELADYLKSLDGETRVIMEHTGRYYEPVAQFLHDAGLYVSAVNPKLIKDYGNNSLRKVKTDKADSKKIAKYGLDNWVELRQYASMDVIRYQLKTLNRQHALYSKMKTAMKNNLIALLDQTYPGVNTLFDSPVREDGTQKWVDFVVPFWHVDCVRGMSQASFTERYHKWCRRNGYNFSSDKAAEVYAGAKDQIAVMPKDDLTKRLIRQAIDSLNAVSKTVEQLKAEMLQLAAQLPEYPVVMEMHGVGDSLGPQLMAEIGDVTRFARRGSITSFAGVDPGANQSGTHEAQSVRTSKSGPPELRKALFLVMDSLLKTMPQDDPVYRFMDKKRAEGKPYLVYMTAGANKFLRIYYGKVKEYLAKPEDPSEPTADK

SEQ ID NO: 15784 - protein, 360 aa, unidentified
  source 1..360: note = protein_3766a2a
  REGION 14..156: note = RuvC_domain
  SITE 17: note = RuvC_P1
  SITE 60: note = RuvC_P2
  SITE 95: note = RuvC_P3
  SITE 97: note = RuvC_P4
  SITE 100: note = RuvC_P5
  REGION 223..314: note = Tnp_domain
  SITE 231: note = Tnp_P1
  SITE 261: note = Tnp_P2
  SITE 269: note = Tnp_P3
  SITE 270: note = Tnp_P4
  SITE 282: note = Tnp_P5
MAKSIENLAEVTRVGLDLAKNVFQVHGVDAQGEVVIVRKLRRAAVLPFFGRLKPCVVAMEACGSAHHWGREITALGHEVKLIPPAHVKPYIRRNKTDAADAAAICEAALRPQQRFVPLRTVENQAELMRHRVREQLVGQRTALLNALRGHLSEIGVIAPQGAQHAYRLKRLAAGEADDNGEIVGCKAVRAALTPLLKQVDALDEAIAAIDNELAAQAKGDEKARRLMTIPGIGPVTATAVAATMRDIEAFAGAREFAAFLGLTPRQASTGGKERSGGVSKMGDRYLRKLLVVGATAVLNHAAGHSDALRRWAKEMLKRKAAHKYAFKLTAVALANKLARIAYAILRSGGTYDDRPVAARA

SEQ ID NO: 15785 - protein, 380 aa, unidentified
  source 1..380: note = protein_dd9f202
  REGION 38..179: note = RuvC_domain
  SITE 41: note = RuvC_P1
  SITE 84: note = RuvC_P2
  SITE 119: note = RuvC_P3
  SITE 121: note = RuvC_P4
  SITE 124: note = RuvC_P5
  REGION 244..331: note = Tnp_domain
  SITE 252: note = Tnp_P1
  SITE 282: note = Tnp_P2
  SITE 290: note = Tnp_P3
  SITE 291: note = Tnp_P4
  SITE 303: note = Tnp_P5
MEEQRREDPPSVRHRCARVEMFSNHSRDRGSVMQVTTYGVDLAKRVFQVHWVEPDSGEVKRKMLARGEFAAFFARRSAGLVAMEACGSAHHWGRALQALGHQVRLIPTQFVRPFVKSNKTDAADAQAIWEAAQRPEMRFVALKSELQQAVLGLHRVRGQLVKMRTMQANQVRGLLYEFGVVVPRSWRALLAQAGPILAEDTRCEVPELIRGELQQQLEGLRELTRRIEQLERSIGTYRQQDEQCRRIEAIPGVGPLSSTAVLATIGDARTFRSGRQFAAFLGLVPRQSGTGGRVRLLGISKRGDPYLRTLLIHGARAVVNHSSRPGRTPPQWLRELLSRRPKNVAIVALANKIARTIWALLAHGRTFDHSWGQAQPVSVA

SEQ ID NO: 15786 - protein, 338 aa, unidentified
  source 1..338: note = protein_4206ccd
  REGION 6..147: note = RuvC_domain
  SITE 9: note = RuvC_P1
  SITE 52: note = RuvC_P2
  SITE 87: note = RuvC_P3
  SITE 89: note = RuvC_P4
  SITE 92: note = RuvC_P5
  REGION 209..294: note = Tnp_domain
  SITE 217: note = Tnp_P1
  SITE 246: note = Tnp_P2
  SITE 254: note = Tnp_P3
  SITE 255: note = Tnp_P4
  SITE 267: note = Tnp_P5
MELKRIGMDTSKHVFSLHGVDAAGQVVLRRDLRRGQVEAFFAGLAPCEVVMEACGGSHHWARRLGALGHQVRLIPAQYVKPFVKRGKNDRADAAAICTAAGQPDMPGVPVKSAAQQAALMLLKTRELLVRQRTQLVNALRGHAAEFGIVAARGTAQIEALLAAIAADPDIPPPALEALGLLSARIAQVSEQVGALDAALLAQHRANPMSRLLEGIPGVGPITALSLALTVEPGHFASGRHFAAWIGLTPRQNSTGGKTRLGRISKAGHRRLRSLLIVGATTVIQHVRPGRKATPPWLLDLVARKPRKLAAVALANKMARTAWAMMARGEAYRRTPVPA

SEQ ID NO: 15787 - protein, 278 aa, unidentified
  source 1..278: note = protein_f89bc9b
  REGION 6..150: note = RuvC_domain
  SITE 9: note = RuvC_P1
  SITE 54: note = RuvC_P2
  SITE 89: note = RuvC_P3
  SITE 91: note = RuvC_P4
  SITE 94: note = RuvC_P5
  REGION 213..257: note = Tnp_domain
  SITE 221: note = Tnp_P1
  SITE 251: note = Tnp_P2
MKLSRVGIDLAKNVYQLHGVDRSGKTVWKRRLKRHQWFRVLLDTAGPECEIGMEACAGAHHWGRELQSRGYTVKLIPPQFVKPYVKSNKSDAKDAEAICEAMSRPNMRFVTVKRVEQQDIQATHRIRAELITQRTAKANQIRGLVAEYGLVAPKHLSSLRAAIPCWLEDAENGLTGDFRALLQGVWTDLLLLDDRVGEMDQKIKQLADNNEVCVRLQQLRGVGPMTSTAMVATVGDARQYPKSRQMAAAIGITPNNTVPETETVCSASVNVAMFIFVR

SEQ ID NO: 15788 - protein, 406 aa, unidentified
  source 1..406: note = protein_07e2945
  REGION 4..162: note = RuvC_domain
  SITE 7: note = RuvC_P1
  SITE 57: note = RuvC_P2
  SITE 99: note = RuvC_P3
  SITE 101: note = RuvC_P4
  SITE 104: note = RuvC_P5
  REGION 277..363: note = Tnp_domain
  SITE 285: note = Tnp_P1
  SITE 315: note = Tnp_P2
  SITE 323: note = Tnp_P3
  SITE 324: note = Tnp_P4
  SITE 337: note = Tnp_P5
MNAVGIDVSKGKSTVAILRPGGEVIASPFEVSHDPRELSELVALIKSLDGDTKVVMEYTGNYYLPVALFLQKYGLFVSVVNPILVKDYSNKSLTVRKGKTDKKDSAKLAAFALDRWNELPLFSSQSDTRTLLKAFNRQYNQYIKLKVMLKNNLISILDQTFPGANTLFTTPARKADGHEKWIDFVLKFPHCKCVSKKSFSAFSKCYLSWCRKCGYNFSETKAREIYAFACNCTPSLADSEAAHTLVSTAILQLNTLNETFASLQREMDLLASSLPEYDTVMDLYGVGSVLGSQLIAEIGDVSRFSNKKALVGFAGIDAPPFQSGNFNPQSRSISKRGSAVLRKTLFQIMAVILQNAPANEPVFLFMDKKRSEGKHFYVYMMAGANKFLRIYYARVMEHLNSLQEAA

SEQ ID NO: 15789 - protein, 347 aa, unidentified
  source 1..347: note = protein_4a7884e
  REGION 7..147: note = RuvC_domain
  SITE 10: note = RuvC_P1
  SITE 53: note = RuvC_P2
  SITE 88: note = RuvC_P3
  SITE 90: note = RuvC_P4
  SITE 93: note = RuvC_P5
  REGION 210..297: note = Tnp_domain
  SITE 218: note = Tnp_P1
  SITE 248: note = Tnp_P2
  SITE 256: note = Tnp_P3
  SITE 257: note = Tnp_P4
  SITE 269: note = Tnp_P5
MNDIIRIGMDTSKHVFQLHGVDAAERPVLRKTFRRKEMIEFFSKLPPTQVAIEACGASHNWGRTLTGFGHSVKLIPPAYIKPYIKRGKNDAADAEAICEAMSRPTMRFVPIKSADNQAALMLVTMRDRLIRTRTQLCSAIRGHAAEFGLIAGSGTCRVEPLLDRIAADPEVPHLARDLFAMHAEELALLRARIKEVNGRLAEWHRSNARSRRVAQIPGVGTLGATLLALKTPAPEDFQSGRAFAAWIGLTPRDHSTGGRVKLGSITRAGDALLRRTLVVGATALLRHIRNDRSKHASPWILEMLKRKPPKLVAVALANKMARIAWKLMVTNQDYQAPAGATSLARAA

SEQ ID NO: 15790 - protein, 393 aa, unidentified
  source 1..393: note = protein_8ff3ea8
  REGION 4..163: note = RuvC_domain
  SITE 7: note = RuvC_P1
  SITE 60: note = RuvC_P2
  SITE 101: note = RuvC_P3
  SITE 103: note = RuvC_P4
  SITE 106: note = RuvC_P5
  REGION 266..355: note = Tnp_domain
  SITE 274: note = Tnp_P1
  SITE 304: note = Tnp_P2
  SITE 312: note = Tnp_P3
  SITE 313: note = Tnp_P4
  SITE 328: note = Tnp_P5
MICVGIDVAKDKHDCFILSSEGEVLADVFTIQNNAEGFDTLLQTIRRCTRPEDKIKVGLEATGHYSYNILGFLLDKGLPTYVINPLHTNLYRKSLSLRKTKTDRVDARTIAAMLMSDVDLKSYTDTVYHNEELKSLTRYRFDKVHERAKLKQSVSRLVTILFPELEKLVPSLHLASVYALLSEFPGARQVAGAHLTHLKAVLYDASKGRYGRDMAVTLRDAARCSVGSVMPAKSLELRHTIRLIRELDAEIEDIEAAIQSMMDEIQSPITTIPGIGVRMGAMILAEIGDFSHFDSPDKILAYAGMSPSTYQSGQLSLSGTYSHMEKRGSRYLRYALYNATKYVCLWDPTFAAYLAKKRAEGKHYNVALSHAAKKLVRLIYALEKSRQPYHIAA

SEQ ID NO: 15791 - protein, 393 aa, unidentified
  source 1..393: note = protein_89e9e06
  REGION 4..163: note = RuvC_domain
  SITE 7: note = RuvC_P1
  SITE 60: note = RuvC_P2
  SITE 101: note = RuvC_P3
  SITE 103: note = RuvC_P4
  SITE 106: note = RuvC_P5
  REGION 266..355: note = Tnp_domain
  SITE 274: note = Tnp_P1
  SITE 304: note = Tnp_P2
  SITE 312: note = Tnp_P3
  SITE 313: note = Tnp_P4
  SITE 328: note = Tnp_P5
MVCVGIDVAKDKHDCFIISSEGEILADVFTIPNNAEGFDTLLQAIRRSTRPEDKIKVGLEATGHYSYNILGFLLDKGLPTYVINPLHTNLYRKSLSLRKTKTDRVDARTIAAMLMSDVDLKSYTDTVYHNEELKSLTRYRFDKVRERAKLKQSVSRLVTILFPELEKLVSSLHSASVYALLSEFPGAKQISSTHMTHLKAVLKNASQGRYGQEMAETIRNAARSSVGSVMPAKSLELQHTIRLIRELDAEIEDIETAIQAIVDEMQSPITTIPGMGVRMGAVILAEIGDFSRFDSPDKILAYAGMSPSTYQSGQLSLSGAYSHMEKRGSRYLRYALYNATKHVCHWDPTFAAYLAKKRAEGKHYNVALSHAAKKLVRLIFAMEKSQRPYCAAP

SEQ ID NO: 15792 - protein, 346 aa, unidentified
  source 1..346: note = protein_36d567f
  REGION 24..170: note = RuvC_domain
  SITE 27: note = RuvC_P1
  SITE 74: note = RuvC_P2
  SITE 109: note = RuvC_P3
  SITE 111: note = RuvC_P4
  SITE 114: note = RuvC_P5
  REGION 303..346: note = Tnp_domain
  SITE 309: note = Tnp_P1
  SITE 341: note = Tnp_P2
MAKKAKKVKTAKGAELRIVNPDAAGIDIADGIMQVCVPADRSKDNNRAFGAYTSDLHAISAWLRECGIKTVAMESTGVYWIPLFCRLQEDGLDVVLTNARDVKNITERKTDESDAEWLMLLHQYGLLKASFQPHNDAKRMRTLTRHRDTLSREASSIVLRMQKAMQQMNIKLTLVLSDITGKSGIRIIEAILAGERDPKRLADLADIQCKTPKEEIAKALEGNWEEDLMFVLRQNYDTFKHYCTQLGECDAELEKLMENYRAEVAKVEDTSYSPAKKRRDYKKTRHTVGFDVERKAYEMWGVNVFEIPGISHLTALELMSELGHDFTRKFPSSKQFCCWCNISPNT

SEQ ID NO: 15793 - protein, 346 aa, unidentified
  source 1..346: note = protein_faa57f7
  REGION 7..147: note = RuvC_domain
  SITE 10: note = RuvC_P1
  SITE 53: note = RuvC_P2
  SITE 88: note = RuvC_P3
  SITE 90: note = RuvC_P4
  SITE 93: note = RuvC_P5
  REGION 210..302: note = Tnp_domain
  SITE 218: note = Tnp_P1
  SITE 248: note = Tnp_P2
  SITE 256: note = Tnp_P3
  SITE 257: note = Tnp_P4
  SITE 269: note = Tnp_P5
MDKLIRIGMDTSKSVFQLHGVNEAEQPVLRKKLRRNQVLAFFAKLPPLKVGMEACGAAHYWARELRALGHEVLLMPAQHVKPYVQRSKSDAADADATCEAMNRPRMRFVAVKSADQQAAQMLAKLRAQFIDRRTQLSNSIRGFAAEFGLTAPKGLSRLGDLLADIRADATIPDMAKDMFETLARDYAHISAEVAVLDEKLLALHRHNEVSRRLATIPAVGPVGATLLAIKVTDAHGFKSGRDFAAWLGLTPKNHSTAGKNRLGVITRAGDEMLRSVLVAGATALIQHMRRGSTRVWPWLQALIARKAPKLAAVALANKLARIAWKLMVSGEQYRPIGATYPAPVLP

SEQ ID NO: 15794 - protein, 341 aa, unidentified
  source 1..341: note = protein_4712f23
  REGION 7..149: note = RuvC_domain
  SITE 10: note = RuvC_P1
  SITE 53: note = RuvC_P2
  SITE 88: note = RuvC_P3
  SITE 90: note = RuvC_P4
  SITE 93: note = RuvC_P5
  REGION 211..294: note = Tnp_domain
  SITE 219: note = Tnp_P1
  SITE 249: note = Tnp_P2
  SITE 257: note = Tnp_P3
  SITE 258: note = Tnp_P4
  SITE 270: note = Tnp_P5
MAEVSTIGLDLAKNVFQVHGADGSGAVLFRKKLRRHQVLTFFAAQPSCTVAMEACASSHYWAREIGRLGHAVRLIPPTYVKPFVKRQKNDAADAEAICEAAQRPTMRFVAPKSEQAQASAVVFRARDLLVRQRTQIMNALRGHLAEFGIVVAKGPAHVPQLVQAVEDEAEPIPELARPILQLLIDTLHRLDEQIASLDREVAQRAKENETARRLMTIPGVGPVTAVALVALAPPAETFKCGRDFAAWVGLTPLQHSTGGKQKLGATSKMGERTLRRLLIIGANGVLLWVARNGAPAGSWIGRMLARKPPMLVRVALANKMARIVWALMARGEVYRAPAAVA

SEQ ID NO: 15795 - protein, 398 aa, unidentified
  source 1..398: note = protein_8648c50
  REGION 1..112: note = RuvC_domain
  SITE 16: note = RuvC_P2
  SITE 51: note = RuvC_P3
  SITE 53: note = RuvC_P4
  SITE 56: note = RuvC_P5
  REGION 241..328: note = Tnp_domain
  SITE 249: note = Tnp_P1
  SITE 280: note = Tnp_P2
  SITE 288: note = Tnp_P3
  SITE 289: note = Tnp_P4
MADWLKQCGMRTVAMQSTGVYWVAVYDILEQAGLEVYLVNARDTKNLPGRKSDVQESQWLMKLHTYGLLRNSFRPSQEIRTMRTYWRQRNDLVRSAGRHIQRMQKALTQMNIQLANVLSDLSGVTGQAIIKAILTGERNAHKLAEFRDPRVKASKEQIALSLEGNWQPDLLFVLKQEQDGYEFCQKQMAECDRQLHQYLEQREDRSHGAGLPKEKRKGRLTKKKGNKPQFDLRQGLFRLTGTDLTRIDCIDVMTATTVISEAGWDMSKWQTENHFVSWLRLCPDNRISGDKVIGKGRLPTNNPVSIALKMAASTLRLSKTYLGAQFRRFRTRLGAPIAIKAMAAKLARLVYRMLRYGIKYVDQGAAAYEAQHRQFQIKQLKYKAASLGYQVTPIPAAA

SEQ ID NO: 15796 - protein, 321 aa, unidentified
  source 1..321: note = protein_5b77bd9
  REGION 8..147: note = RuvC_domain
  SITE 11: note = RuvC_P1
  SITE 52: note = RuvC_P2
  SITE 92: note = RuvC_P3
  SITE 94: note = RuvC_P4
  SITE 97: note = RuvC_P5
  REGION 191..278: note = Tnp_domain
  SITE 199: note = Tnp_P1
  SITE 229: note = Tnp_P2
  SITE 237: note = Tnp_P3
  SITE 238: note = Tnp_P4
  SITE 251: note = Tnp_P5
MTKDRKIYGIDISKSVFDIYNQDTGHDQLKNDEQGFKKLLKSLSKDALVVMEATGYYHYRLAQFLYKNGVLVSVVNPLSVKRFIQMKLAKVKTDKSDAKSICEYGLFNDVPLYNALTDVQAECLQLFRLLDSYVKKSTATKNKLHGEDTLGIPSKTVYRSLKRDLNHLKNEILILEKRLLELVKQDQQEQLTLLQTIPGIGLKTALFLIVVKDGFKKFESAAQLCSYVGITPTIRESGSSVRGRSRISKVGNKKLRNLVFLAAFSAYKYNRACKALFDRIVAKGKSAKLALIAVANKLLKQAFAIAKSGLPYDENFVSKLA

SEQ ID NO: 15797 - protein, 343 aa, unidentified
  source 1..343: note = protein_23298da
  REGION 6..150: note = RuvC_domain
  SITE 9: note = RuvC_P1
  SITE 54: note = RuvC_P2
  SITE 89: note = RuvC_P3
  SITE 91: note = RuvC_P4
  SITE 94: note = RuvC_P5
  REGION 213..301: note = Tnp_domain
  SITE 221: note = Tnp_P1
  SITE 251: note = Tnp_P2
  SITE 259: note = Tnp_P3
  SITE 260: note = Tnp_P4
  SITE 272: note = Tnp_P5
MKLMRIGVDLAKNVFQIHGVDRHEKPIWRQRLSRDRWLQKVLEKIEPDCEIGMESCGGAHHWARQLQARGYRVKLIAPQFVKPYVKSNKNDANDAEAICEAMSRPSMRFVSVKTVEQQDIQATHRIRAGLIEQRTAKGNQIRGLVSEYGLVAPKELLALRRAIPCWLEDGDNGLTARFRRLLDGVRSDLRTLDARVAELDSEIAAIAPSEPAAVRLQQLRGVGPITATALVATVGDASQFANGRQLSASLGLTPRQHSSGGKNRLLGISKRGDSYLRTLLVHGARSTLRTAKSKEDRLSQWAARLAERSHYNVAAIALANKTARMAWAMLRHDTDYQPERAAA

SEQ ID NO: 15798 - protein, 343 aa, unidentified
  source 1..343: note = protein_9fa7ac7
  REGION 5..151: note = RuvC_domain
  SITE 8: note = RuvC_P1
  SITE 53: note = RuvC_P2
  SITE 91: note = RuvC_P3
  SITE 93: note = RuvC_P4
  SITE 96: note = RuvC_P5
  REGION 211..298: note = Tnp_domain
  SITE 219: note = Tnp_P1
  SITE 249: note = Tnp_P2
  SITE 257: note = Tnp_P3
  SITE 258: note = Tnp_P4
  SITE 270: note = Tnp_P5
MDQYIGLDVSLKDTAISIREDGKRIWRGKRASDPKLLAQVIRKHAPHAKRVVFETGPLSTWFYHALMAEGVPAICIEARHAQKILHETLNKTDANDADGLAQMAEAGFYKAVRVKSFDSMLTRTLVAARNQLLSISTQLSNQIRGLMKTFGLIVSNGKGRVFDGKVRELLAGNDALAAIILPLLDAWRGIRKRAADLDRQLLAVARQSQPTKLLMTIPGIGAVTAVSYVAAIEDPENFKTSRSVGAWLGLTTRRYQSGEVDYDGHISRRGDSHLRGLLYEAATVLLTRTRPGNESRLRSWGLKLRERLGFKRTAVAVARKLAVIMHSMLRTGEVFNASAGAAA

SEQ ID NO: 15799 - protein, 404 aa, unidentified
  source 1..404: note = protein_f4e09b6
  REGION 4..160: note = RuvC_domain
  SITE 7: note = RuvC_P1
  SITE 57: note = RuvC_P2
  SITE 97: note = RuvC_P3
  SITE 99: note = RuvC_P4
  SITE 102: note = RuvC_P5
  REGION 270..356: note = Tnp_domain
  SITE 278: note = Tnp_P1
  SITE 309: note = Tnp_P2
  SITE 317: note = Tnp_P3
  SITE 318: note = Tnp_P4
MIFVGIDWSEAHHDVCVLDVEGRVVAKGRVPEGVEGLARLHVLVGSHAEEPSDVVVGIELDRGLLVGALVAADYEVHAVNPLSVDRYRDRHRTSGAKSDPGDARVLADLVRTDRHLHRKVAGDTELAEGVKVLARAHQGLIWARQRHLNQLRNALREFYPAALQAFGTDLASADALAVLSVAPTPAEGRSISSARIAAALKRAGRRRRVSERAREIQAALRSPQLEAPEVLTRAYGEVVRSTVRIVAEMTEQVETLQRELEARFEEHPDAEILRSLPGLGSVLGARVLAEFGDDRTRYADPKARKNYAGTSPITKASGRSRVALARFARNRRLADALDMWAFCSLMSSDGGRRYYSAHRARGKTHRQALRSLANRWVGILHGCLRQRQLYREDVAWPTSAEVAA

SEQ ID NO: 15800 - protein, 344 aa, unidentified
  source 1..344: note = protein_3e4933d
  REGION 4..156: note = RuvC_domain
  SITE 7: note = RuvC_P1
  SITE 55: note = RuvC_P2
  SITE 96: note = RuvC_P3
  SITE 98: note = RuvC_P4
  SITE 101: note = RuvC_P5
  REGION 219..304: note = Tnp_domain
  SITE 227: note = Tnp_P1
  SITE 257: note = Tnp_P2
  SITE 265: note = Tnp_P3
  SITE 266: note = Tnp_P4
  SITE 277: note = Tnp_P5
MVIIGIDPHKASHTAAALDDSAQPLGQVRVQANSKTLQRLLEWAEPWPERSWAIEGANGLGRHLAQQLIGAGEVVVDVPATLAARARLLQTGHGRKTDSIDALSAATVALHRTDLNVVAADDHTTILRLLSDRRDELNEERRRTINRLHRILRDLIAGGASIELSADIAAALLGKVRAVTGANALRKAMARELVVDVRRLDKALAQNRARCAQAVAVSGTTLTEIFGIAEVVAAKVAGHTGDITRFASENHFASYTGTAPIEASSGDVKRHRLSRAGNRKLNNALHLAARTQTCHPGPGQDYYRRKIADGKSPTEALRSLKRQISKAVYRQLVTDQSKKLALTP

SEQ ID NO: 15801 - protein, 325 aa, unidentified
  source 1..325: note = protein_7374758
  REGION 6..156: note = RuvC_domain
  SITE 9: note = RuvC_P1
  SITE 55: note = RuvC_P2
  SITE 93: note = RuvC_P3
  SITE 95: note = RuvC_P4
  SITE 98: note = RuvC_P5
  REGION 198..284: note = Tnp_domain
  SITE 205: note = Tnp_P1
  SITE 235: note = Tnp_P2
  SITE 243: note = Tnp_P3
  SITE 244: note = Tnp_P4
  SITE 257: note = Tnp_P5
MEKVFIGIDVSKLTLDFYVKSNSSQQHYQIQNSVKAIKKLLKPFQNNENTIIAMENTGRYNFALYEFLADNNFSVFVVNPLHLKRSIGLLRGKNDKIDAQRICMFIEKNYMDLESWNPSSIDIQKISLLNTERRHRVKLKSGLLRQTQDLELLKNIADKEIIKLNQQLIKTIEKQIKVIEDKILELIFSNDELKEQFNRMISIPGVGKVLATLMIIKTKGFSEVKSARKMACFAGVVPFEHKSGSSIYYKPRISTMADKELKKVLHLAALSTIRLKNDMAAYFNRKVNEGKNKMSVLNAVRNKIIHRIYAVVKNKSVYKNCLAVS

SEQ ID NO: 15802 - protein, 343 aa, unidentified
  source 1..343: note = protein_516dd64
  REGION 6..149: note = RuvC_domain
  SITE 9: note = RuvC_P1
  SITE 54: note = RuvC_P2
  SITE 89: note = RuvC_P3
  SITE 91: note = RuvC_P4
  SITE 94: note = RuvC_P5
  REGION 213..299: note = Tnp_domain
  SITE 221: note = Tnp_P1
  SITE 251: note = Tnp_P2
  SITE 259: note = Tnp_P3
  SITE 260: note = Tnp_P4
  SITE 272: note = Tnp_P5
MKLTRVGVDLAKNVFQIHGVDEHDKLVWKRRLKRATWLQVLLDKAEPSCVIGMEACGGAHHWARELQSRGYTVKLIPAQFVKPYVKSQKNDARDAEAICEAMSRPGMRFVSVKTVEQQDIQSIHRVRSLLISERTAKANQIRGLVAEYGLITPQHAGPLRQAIPGWLEDAENGLTDQFRSWLHELWNELLRLDQRCKALDAEIERISNTHPDAKRLKQLRGVGPLVSTALVARFGDGRHFKRGRQAAASVGLTPRHHGTGGKNRLYGITKQGDRYLRSILIHGARAVVWRAKGRDDRLSLWLTELVARSHPNVAAVALANKTVRIAWVMLRHGTDFDPELAVA

SEQ ID NO: 15803 - protein, 400 aa, unidentified
  source 1..400: note = protein_deccc27
  REGION 10..164: note = RuvC_domain
  SITE 13: note = RuvC_P1
  SITE 62: note = RuvC_P2
  SITE 102: note = RuvC_P3
  SITE 104: note = RuvC_P4
  SITE 107: note = RuvC_P5
  REGION 270..356: note = Tnp_domain
  SITE 278: note = Tnp_P1
  SITE 308: note = Tnp_P2
  SITE 316: note = Tnp_P3
  SITE 317: note = Tnp_P4
  SITE 329: note = Tnp_P5
MSERRARIWAGIDAGKGHHWAAVVDETGATLWSKKIANDESAILTALGEILELGDEVHWAVDISGTSSALLLALLVAHGQQAVYVPGRTVNRMSGAYRGEAKTDARDAYVIAETARHRRDFATIGVPAQLAADLALLTAHRSDLVADRVRMINRLRDVLTGVFPALERAFDYSAHKGALVLLTGYQTPAAIRRRGRARLTAWLANRAVRGADVVATTALEAAQAQQTALPGEDVAAQIVADLAAQILALDDRLKRIDKQIRETFRSHPQAEIIESLPGMGPILGAEFVVAAGDLTAYADAGHLASAAGLVSVPRDSGRRTGNLHRPKRYSRRLRRVFYMSAQTSIIREGPNRDFYLKKRGEGCKHVQAVIALARRRASVLWALLRDGRVFTSAPPVTQAA

SEQ ID NO: 15804 - protein, 325 aa, unidentified
  source 1..325: note = protein_11f4746
  REGION 4..149: note = RuvC_domain
  SITE 7: note = RuvC_P1
  SITE 52: note = RuvC_P2
  SITE 92: note = RuvC_P3
  SITE 94: note = RuvC_P4
  SITE 97: note = RuvC_P5
  REGION 191..278: note = Tnp_domain
  SITE 199: note = Tnp_P1
  SITE 229: note = Tnp_P2
  SITE 237: note = Tnp_P3
  SITE 238: note = Tnp_P4
  SITE 251: note = Tnp_P5
MTYIGIDISKATFVAAFPVERGYRTETFQNDTKGIRRFISKLSSDTHHCVMEATGNYCFLLLYLLDKAGIRASLVNPKKIKNYARVMLSVTKTDAKDACLIADFGERFKPEPYKFPSEQIMLLKQKKTVIRQLQKQLTATKNLHTSLEPLPVKDKKCIQSLKQTTAFFEKQIKYMQQEMEEVVSEVFARQLKALTSIKGIGVTLASALIIATGGFTYFDNAKQLSRFAGICPTIERSGTSINIRGHINRNGDENLRSMLYIAAWSASRHNKACRECYQRLRSNGKSGKLAMIAVANKLIRQAFAVVTSNSSYIDGYISTKPNADI

SEQ ID NO: 15805 - protein, 412 aa, unidentified
  source 1..412: note = protein_fedfa1d
  REGION 4..170: note = RuvC_domain
  SITE 7: note = RuvC_P1
  SITE 67: note = RuvC_P2
  SITE 107: note = RuvC_P3
  SITE 109: note = RuvC_P4
  SITE 112: note = RuvC_P5
  REGION 278..364: note = Tnp_domain
  SITE 286: note = Tnp_P1
  SITE 317: note = Tnp_P2
  SITE 325: note = Tnp_P3
  SITE 326: note = Tnp_P4
MLFIGDDWAEDHHDVELVDDEGQVMARRRLPEGIEGIAGLHALVADHLPEDWAELEPEQVQGLVKVGIETDRGPWVAALVAAGYEVFAINPLSVARYRQRHSTSGAKSDAADAHLLAEIIRVDRAHHRPLAGDSEEAEAIKLVARTHQSLIWERSRHVLRLRSALREFFPAALEAFADLDAPDALELLALAPEPDRARQLTRRRITAALRRANRRNVDARVNEIQQILGAEQLHRSTPVQSAYAAIVAGQAAIVATLNAQIDQMAAVVDAHFGQHPDAEIYTSQPGLGVVLAARVLGEFGDDPHRYTDAKARKNYAGTAPITKASGKKKIVLARYARNRRLGDALQQWAFCSLRGSSGARVYYQQLRARGTGHQAALRQLANRLVGILHGCLKTHTTYDEHTAWSHHLTSAA

SEQ ID NO: 15806 - protein, 343 aa, unidentified
  source 1..343: note = protein_b2ef0d4
  REGION 6..147: note = RuvC_domain
  SITE 9: note = RuvC_P1
  SITE 51: note = RuvC_P2
  SITE 86: note = RuvC_P3
  SITE 88: note = RuvC_P4
  SITE 91: note = RuvC_P5
  REGION 210..300: note = Tnp_domain
  SITE 218: note = Tnp_P1
  SITE 250: note = Tnp_P2
  SITE 258: note = Tnp_P3
  SITE 259: note = Tnp_P4
  SITE 272: note = Tnp_P5
MGNTIVGVDLAKYVIQVCVFTNKKVRSNTEMTPSEFIDFLANAKLLTIVFEACGTSNYWKQKAISLGHDARLISAKLVSAVRQNQKTDRNDALAIVQAALLPDVTFITGKSIEQQQLQSIMRLRELCVKQKTATGNQITSLLLEFNIKVSSRNGGLKGAVESTLEDAENGLSFEFRTALDTAWNQYLSIVKSIQTYDDCLEKSMEIHSECKKLLKLEGVGTLNAINLYIALGCAELGVFEKGKDASACIGLTPIQYSSGGKTKLGSIGKYVKNSVLRSQLITGAMSAVNHATNRKARTTKDLWIQSMVERRGKKCTAVALANKTVRTAYAMLTKNTEYRAELI

SEQ ID NO: 15807 - protein, 346 aa, unidentified
  source 1..346: note = protein_cb3ac2d
  REGION 6..148: note = RuvC_domain
  SITE 9: note = RuvC_P1
  SITE 52: note = RuvC_P2
  SITE 87: note = RuvC_P3
  SITE 89: note = RuvC_P4
  SITE 92: note = RuvC_P5
  REGION 211..301: note = Tnp_domain
  SITE 219: note = Tnp_P1
  SITE 249: note = Tnp_P2
  SITE 257: note = Tnp_P3
  SITE 258: note = Tnp_P4
  SITE 270: note = Tnp_P5
MKITTIGIDLAKNVFQLHGVDARGHAVVRRAMKRDDMLPYFANLEPCLIGMEACGSAHHWARKLGAFGHTIKLMAPQFVKPYVKSNKNDARDAEAICEAVTRPNMRFVPIKNAEQQAVLSLHRARQGFVKSRTAQGNQIRGLLSEYGIIIPQGIASIRKRIPDILEDAENGLPGKMRTLIDRLTEHLKEIDNQVVALEQEIKQWHASSEASQKLSAIPGIGPLTASALVATIGDARNFANGRELAAWLGLVPKQHSSGGKSVLLGISKRGDTYLRTLLIHGARSVLQYVEGKQGKTNEWLQHLLARRNKNVAAVALANKNTRTVWALLARERTFRPDYVAVQPTAA

SEQ ID NO: 15808 - protein, 397 aa, unidentified
  source 1..397: note = protein_b666bc8
  REGION 4..160: note = RuvC_domain
  SITE 7: note = RuvC_P1
  SITE 57: note = RuvC_P2
  SITE 97: note = RuvC_P3
  SITE 99: note = RuvC_P4
  SITE 102: note = RuvC_P5
  REGION 274..361: note = Tnp_domain
  SITE 282: note = Tnp_P1
  SITE 312: note = Tnp_P2
  SITE 320: note = Tnp_P3
  SITE 321: note = Tnp_P4
  SITE 334: note = Tnp_P5
MIAVGIDVSKSKSTVAVIDSNGVVLASPYTIAHTQPELHALAKYLKELKEPVTILMEYTGHYHYPVLKQLQSEGFPVCLINPYQMKKYGDTEIHKAKTDKKDALRIATYALEKSYKLVPYSSMEQKYEDLKFLSRQYEQRISFVAKLKVQLLDLLDQTMPGITKQLSLTSRNPEKCALLLFIKRFKSFDEIQRMGKTRFLSSYETMTKKTSDRYAAQKGLAIYELAKDSITTRGDDPYIWLSQTQCVDLLSAAQNTADEIILKMQNIAQTIPEYAVLRAMHGVGDRLGPIILAEIGDIRRFHSGKALNSYAGNDAPPYQSGQFESRNRHISKRGSSALRKACYEVMQALKLTKPQDDPVYLFMLKKEQEGKPYNVAKMAGVNKFLRIYYAKAMELYR

SEQ ID NO: 15809 - protein, 343 aa, unidentified
  source 1..343: note = protein_62b1ef8
  REGION 7..148: note = RuvC_domain
  SITE 10: note = RuvC_P1
  SITE 53: note = RuvC_P2
  SITE 88: note = RuvC_P3
  SITE 90: note = RuvC_P4
  SITE 93: note = RuvC_P5
  REGION 212..298: note = Tnp_domain
  SITE 220: note = Tnp_P1
  SITE 250: note = Tnp_P2
  SITE 258: note = Tnp_P3
  SITE 259: note = Tnp_P4
  SITE 271: note = Tnp_P5
MGEVSTIGLDLAKHVFQVHGVDEEGNVIVRKQVRRSAVAKFFAELAPCTVGIEACSSAHYWARELSALGHTVRLMPPAYVKPYVKRGKNDAADAEAICEAVMRPTMRFVPVKSAEQQANAMVYKVRELLVRQRTQLINALRSHLAEMGVVAAKGVSHLDDLIAILRDPDDSRLPPPARPALEELAQQIAALEARIDPLEQEIASQVRGSEAGRRLATVPGIGPIIAGALLAIVPDPAGFRSARHFASWLGFAPRQNSSGGKQRLGSISKQGNRYLRSLLILGAANVLRRRKKASQSAWLVALRGRRPFRVVAVALAHKMARIVWALMIKGESYRAADPAAAQG

SEQ ID NO: 15810 - protein, 338 aa, unidentified
  source 1..338: note = protein_d2eb8fd
  REGION 6..145: note = RuvC_domain
  SITE 9: note = RuvC_P1
  SITE 49: note = RuvC_P2
  SITE 84: note = RuvC_P3
  SITE 86: note = RuvC_P4
  SITE 89: note = RuvC_P5
  REGION 208..299: note = Tnp_domain
  SITE 216: note = Tnp_P1
  SITE 246: note = Tnp_P2
  SITE 254: note = Tnp_P3
  SITE 255: note = Tnp_P4
  SITE 267: note = Tnp_P5
MKLTTIGIDLAKNVFQVHGADEKGKTVLKRQLKRSQVLPFFAQCKIGMEACGSAHYWARKLQALGHTVQLIAPQYVKPFVKRNKNDAADAEAICEAAMRPNMPAIPIKNANQQAILSIHRARQGFVKARTAVSNQIRGLLAEYGITMPQGISHIAKRVPEIIEDGENDLPGRFRLLIQRLVDHLKELDRQVSELEVQIQLWHRENEVSRKLAKVPGVGPMTASAMVASIGDARNFKNGRQLAAWLGIVPKQHSTGGKQVLLGISKRGDSYLRTLLIHGARAVIRIAEGKPDTDSWLKRLLARRNKNVAAVALANKNARTIWALLTHDREYKADFGVAI

SEQ ID NO: 15811 - protein, 357 aa, unidentified
  source 1..357: note = protein_7363ac2
  REGION 42..127: note = RuvC_domain
  SITE 66: note = RuvC_P3
  SITE 68: note = RuvC_P4
  SITE 71: note = RuvC_P5
  REGION 231..317: note = Tnp_domain
  SITE 238: note = Tnp_P1
  SITE 268: note = Tnp_P2
  SITE 276: note = Tnp_P3
  SITE 277: note = Tnp_P4
  SITE 290: note = Tnp_P5
MFYIGIDVGKFNHCACVISSEGEVLIEPFFFTNNLDGFDSFIKAEVALINPLTTDAKRKSKIRKTKNDKKDTFLICSVLFDRDYTRVTQHKLDMKQARELTRYHASIAEDINQKKNQLQKCIDIVIPEFNTWFKTKYSKAYMAVLKEFGSSYNLASANLTHLKKVLKPKSSGSQVDIDASSLRASAKKSIGENNEVIALEIKMLIENIELLTSQLKTVDKKIEELAVKLDSPIFSIPGIGIYTGMSILSEIGDINNFSSAVKVMGFAGVDPGTYQSGEYSAPRTALSKRGSRYLRKSLYQCILPVCTNNLTFNKYYKLKRLQGKSHRCAQGHSVRKLIRVIYKLLSENIQFDEKLLI

SEQ ID NO: 15812 - protein, 327 aa, unidentified
  source 1..327: note = protein_6dd72fa
  REGION 8..161: note = RuvC_domain
  SITE 11: note = RuvC_P1
  SITE 59: note = RuvC_P2
  SITE 99: note = RuvC_P3
  SITE 101: note = RuvC_P4
  SITE 104: note = RuvC_P5
  REGION 197..283: note = Tnp_domain
  SITE 205: note = Tnp_P1
  SITE 235: note = Tnp_P2
  SITE 243: note = Tnp_P3
  SITE 244: note = Tnp_P4
  SITE 257: note = Tnp_P5
MDDPLYYIGIDVAKHKFDVAVKLPNGKYKHKVFCNHHQGFDEFICWLNAFDGRFCAVMEATNIYHEALADCLVAQNIMVSIINPKCSASFAKSDNLRSKTDKIDAKLLADYACEKGHKLVCYQPMLPAQRQLLRKSRQLDHLKDKLAQEKVRLSMLIDEDCIAYTKAMIDFIKGQIKALQQSIRQCVASDDTLKKNVSLLLSIPAIGFDSAVKLICYLGDGSRFKNAKAAAAFAGLTPMIKSSGSSLHQVMGISKIGQADIRKALYCPAMNFAFGRYKDGAYRLFVDRLNSQGKAKKVVITALMRKLVSIAQAVLQTQTPFKLELHR

SEQ ID NO: 15813 - protein, 394 aa, unidentified
  source 1..394: note = protein_9e99dc4
  REGION 4..164: note = RuvC_domain
  SITE 7: note = RuvC_P1
  SITE 59: note = RuvC_P2
  SITE 99: note = RuvC_P3
  SITE 101: note = RuvC_P4
  SITE 104: note = RuvC_P5
  REGION 267..354: note = Tnp_domain
  SITE 275: note = Tnp_P1
  SITE 305: note = Tnp_P2
  SITE 313: note = Tnp_P3
  SITE 314: note = Tnp_P4
  SITE 327: note = Tnp_P5
MILVGIDVGKLSHMFCIMDSTNGEILVKPSSFQNNREGFELLLNKMKSYSKDKMLIGMEDTGHYHFNLLKFLLDCGYTVALINPITTDLARKMQLCNTKDDALDTLTICDVISSNLHKKGYRISKVNNFALYEQKRLTREHHDLKEELNSLANKLQKCIDIVFPEFNSLFKSKLGSLYMKLLKTFGSADAIAHANIRKIRKCFDSCKRGRPLSLTAEMLKETARNSIGFPSNAEVIEMRHLIDRINLIKKQISDVDKKIEEFSIQNNSPILSIPGISHFSGTSILAEFGDFSNYLKASQIIKFAGVSPSKYKSSQFEAQHMAITKKGSCYLRKTLYQVILPVIQFNPVFYNYYHLKLSQGKGHRCAQGHCVRKLLRVIFHLVTTNNFFDPSLLR

SEQ ID NO: 15814 - protein, 316 aa, unidentified
  source 1..316: note = protein_decfd27
  REGION 12..162: note = RuvC_domain
  SITE 15: note = RuvC_P1
  SITE 58: note = RuvC_P2
  SITE 98: note = RuvC_P3
  SITE 100: note = RuvC_P4
  SITE 103: note = RuvC_P5
  REGION 193..277: note = Tnp_domain
  SITE 201: note = Tnp_P1
  SITE 230: note = Tnp_P2
  SITE 238: note = Tnp_P3
  SITE 239: note = Tnp_P4
  SITE 251: note = Tnp_P5
MAMSVSVSKPIVGVDVAKNELMIYQPELDLLETLSNNNKPAIKKWLKALPAPVDVAIESTNIYHLEFADLAHDAGCTIYMVGGYELSHYRKGVKVRAKTDALDAKLLARYLKNEYEELHPWTPPSPLYRQLLSLFRRRAALVQARVGLVQSWANEPLLKAAFAEQIASMQRLEVLVEKMINDHLKEAGLLAHLRRCMKVEGIGFLTGARLIAAFQRGEFKNADAFIAFLGMDLRVSQSGQKDGRRSLTKRGDPEARRLLHNAAMSASRTATWKGFYEEQRAKGFSTTQALVILARKLARVVFALLKGQSEYQPKAG

SEQ ID NO: 15815 - protein, 282 aa, unidentified
  source 1..282: note = protein_d869ad1
  REGION 1..48: note = RuvC_domain
  REGION 155..240: note = Tnp_domain
  SITE 163: note = Tnp_P1
  SITE 193: note = Tnp_P2
  SITE 201: note = Tnp_P3
  SITE 202: note = Tnp_P4
  SITE 214: note = Tnp_P5
MPHTLRSVDLDEETIAELEMIVGFDDDLAGEATRISNRLRGLLTQIHPSLERVLGPQVQHPAVLRLLDQFGSPAQIRRAGRRRLVTLIRPKAPRMAERLVQDIFTALDEQTVVVPGTDAAALIVLSLASSLQAVPDPRKLLATRIEELLEDHPLSKVLTSMPGIGGRTGARILIDVGDGRSFPSAARLAAYAGLAPTTRSSGSSIRGEQPSRRGNKQLKRAFFLSAFAALADPASRAHYDKKISQGKHHTQALLCLARQRACVLLAMVRDGTFHKPQPAPSP

SEQ ID NO: 15816 - protein, 283 aa, unidentified
  source 1..283: note = protein_3f71793
  REGION 7..82: note = RuvC_domain
  SITE 22: note = RuvC_P3
  SITE 24: note = RuvC_P4
  SITE 27: note = RuvC_P5
  REGION 146..232: note = Tnp_domain
  SITE 154: note = Tnp_P1
  SITE 184: note = Tnp_P2
  SITE 192: note = Tnp_P3
  SITE 193: note = Tnp_P4
  SITE 205: note = Tnp_P5
MLGHDARLMPAKYVRPYSKGQKNDFRDAEAIAEAVQRPTMKFVATKTPEQLDLQALHRVRERLVSQRTGIINQIRAFLLERGIAIRQGLRFLRAELPQILAMRTDVLSARMMRVIEELAGDWRRLDERIEGLSTEIEALARQDTACQRLMTVPGIGPIISSAMVAAIGNGAVFSKGRDFGAWLGLVPRQISTGDRTILGKISRRGNRYLRVLFVQAAWVVLIRPKTWERHGLKPWIEAAKKRLHHNVLAIALANKLARIAWAVLNKERDFECVRTDETASRPA

SEQ ID NO: 15817 - protein, 311 aa, unidentified
  source 1..311: note = protein_1fa4817
  REGION 6..152: note = RuvC_domain
  SITE 9: note = RuvC_P1
  SITE 53: note = RuvC_P2
  SITE 92: note = RuvC_P3
  SITE 94: note = RuvC_P4
  SITE 97: note = RuvC_P5
  REGION 188..272: note = Tnp_domain
  SITE 196: note = Tnp_P1
  SITE 225: note = Tnp_P2
  SITE 233: note = Tnp_P3
  SITE 234: note = Tnp_P4
  SITE 245: note = Tnp_P5
MTDDTIGIDISKATLDIHRLSDGKMMSFSNCPAGFKALSKFCAKTAVTRVVYEATGAYHSGLERALGAHLPLVKVNPLQARRFAQAQGVRAKTDAVDAKMLAVMGNAFVLEPDEPVIKVQYDLKELRSFRSGLIKDRTGIMSRLKTQTLYITCRQSKTRLAQVDKQIAEINAEIDRLINSSGTLAHSMKILRSIPGIGAVCAATILIEMPEIGSMDRKQVASLTGVAPMTRQSGQWRGKSFIQGGRKVVRNALYMPALVAMRFNPDLRVKYQALIKAGKPPKVALTALMRKLIELANALIKADRYWVKKGA

SEQ ID NO: 15818 - protein, 387 aa, unidentified
  source 1..387: note = protein_e1e44c2
  REGION 5..162: note = RuvC_domain
  SITE 8: note = RuvC_P1
  SITE 61: note = RuvC_P2
  SITE 101: note = RuvC_P3
  SITE 103: note = RuvC_P4
  SITE 106: note = RuvC_P5
  REGION 262..351: note = Tnp_domain
  SITE 270: note = Tnp_P1
  SITE 300: note = Tnp_P2
  SITE 308: note = Tnp_P3
  SITE 309: note = Tnp_P4
  SITE 322: note = Tnp_P5
MEPVIGLDVAKGFSVLQAFTKRGEAYGKPETIRHAGGLERLDHIIRQLEEQTDIKPVVILEATGHYHRVVVAYLQQMNIEYFILNPLLSKRSKSAQLRKVKTDAADAWHLAEMYYRGDVKPHRSWEDRITEMQHLTRQHEFMTAQFVQSKLNARALLDQVCPAYEGVFHDLFSKTSLRVLLHMLQGAVVTEEVVRETAGSSHGKAWIQSKVGQIQNLRLPQKQSAAQRAALLFMVEILLAQQEQLTRLEMRIQEEAKEIPEVELLKTIPGIGDKLAASLIAEIGDAKQFEDPKQLVAYAGLDPSVHSSGQFVASSTRITKRGSKRLRRALYLAVQCGIRGSTNERLRAYYDKKRQEGKPYKVTVIACANKLLHHIYAILKKGTPYTA

SEQ ID NO: 15819 - protein, 313 aa, unidentified
  source 1..313: note = protein_be96d04
  REGION 5..118: note = RuvC_domain
  SITE 22: note = RuvC_P2
  SITE 57: note = RuvC_P3
  SITE 59: note = RuvC_P4
  SITE 62: note = RuvC_P5
  REGION 181..275: note = Tnp_domain
  SITE 189: note = Tnp_P1
  SITE 219: note = Tnp_P2
  SITE 227: note = Tnp_P3
  SITE 228: note = Tnp_P4
  SITE 240: note = Tnp_P5
MLKRHQMLPFFAQLPPLHIAMEACSGAHYWGRELKKMGHEVALIPPQYVKPYLRGNKNDFNDARAIAEAGTRPGIPTTAIKSSEEQDIQALHRIRSQCQKDRTALINSTRGLLSEYGIVIPKGSHKLRRRIPELLEDADKALSFSFRLLLARRYEQLVELDGHIAFYTDELEKYGRQNQACQRLQKVPGFGPIVSSAFHSAIGDGRHFSKGRDVSASLGLVPRQHSSGGKNVLLGISKRGDRYLRSLLVHGARAVVNRAVGKDDRLSRWVNRIREKRGWNKAVVAMANKMARMGWAILRYNTTYQPLSAESAY

SEQ ID NO: 15820 - protein, 393 aa, unidentified
  source 1..393: note = protein_27ad00a
  REGION 4..163: note = RuvC_domain
  SITE 7: note = RuvC_P1
  SITE 60: note = RuvC_P2
  SITE 101: note = RuvC_P3
  SITE 103: note = RuvC_P4
  SITE 106: note = RuvC_P5
  REGION 266..355: note = Tnp_domain
  SITE 274: note = Tnp_P1
  SITE 304: note = Tnp_P2
  SITE 312: note = Tnp_P3
  SITE 313: note = Tnp_P4
  SITE 328: note = Tnp_P5
MICVGIDVAKDKYDCFILSSEGEVLADVFTIPNNAEGFDTLLQTIRRCARPEDKIKVGLEATGHYSYNILGFLLNEGLDTYVINPLHTNLYRKSLSLRKTKTDRVDERTIAAMLMSDVDLKSYTDTAYHNEELKSLTRYRFDKVRERAKLKQSVSRLVTILFPELEKLVSTLHMASVYALLSEFPGAKQVSEAHLTHLKAVLYDASKGRYGSDMATTLRDAARCSVGSVMSAKSLELRHTIRLIHELDAEIEDIEAAIQSMMGEIQSPITTIPGMGVRMGAMILAEIGDFSRFDSPDKILAYAGMSPSTYQSGQLSLSGAYSHMEKRGSRYLRYALYNATKYVCLWNPTFAAYLAKKRAEDKHYNVALSHAAKKLVRLIYALEKSKRPYSTAA

SEQ ID NO: 15821 - protein, 307 aa, unidentified
  source 1..307: note = protein_63c2b16
  REGION 2..45: note = RuvC_domain
  REGION 139..226: note = Tnp_domain
  SITE 147: note = Tnp_P1
  SITE 177: note = Tnp_P2
  SITE 185: note = Tnp_P3
  SITE 186: note = Tnp_P4
  SITE 198: note = Tnp_P5
MIEPSRIFPKDDRELRRLTRAREGYVKQMTQEKNKIHQSLDSACIKLASVISDIFGKSGMYLLNCVLEGRDIDEIIEGIPSGRLKKKADQIKESIKSRLEISQVILIRGSLSLMRSIQERIDELDGEISARIHYRKNDLAIAMSIPGTGFVSATAILAEIGNYIDFKKPEQLAAWCGLVPSLYQSAEKTILGGITKQGSKHIQRMLIQVAYAISRTKDSKLKKFFLRIQAKKGSKVAAVALARKVLCILHHLLMNQEMYLEDRDKKNMRQKPLTPHSHIEMSIQEMIDCIVRAGYVVTKSDSIGGFG

SEQ ID NO: 15822 - protein, 345 aa, unidentified
  source 1..345: note = protein_5771ff0
  REGION 14..160: note = RuvC_domain
  SITE 17: note = RuvC_P1
  SITE 65: note = RuvC_P2
  SITE 105: note = RuvC_P3
  SITE 107: note = RuvC_P4
  SITE 110: note = RuvC_P5
  REGION 206..293: note = Tnp_domain
  SITE 214: note = Tnp_P1
  SITE 244: note = Tnp_P2
  SITE 252: note = Tnp_P3
  SITE 253: note = Tnp_P4
  SITE 266: note = Tnp_P5
MNKQVFAPQATVFCGIDVSAASLAVALIAPDGSLARREFSNNASGHEALSVWLKKRDSPVRVSLEATGIYSLDLALALDAEACVELMVLNPKLVNRFQQTVCRSKTDAADAMVLAEYSQRMPFCRWQRPAASHLALRTVSRYIGSLVVEQAALKNRLCSAESTATTPRAVRVDLKRSLAAIERRVKRLRVEALKMVEAEAELRQRYQLLITVPGIGAINALAILSELILLAPAMTVRQWVASSGLDPVHRQSGTSLNKPSRISRAGNRRLRAALYMSALSASRYDRHLAAFYRALRARHKTGMQALMAVARKMLHAIYGIFKSGTPFDGQRLFPNIQTEVESSAG

SEQ ID NO: 15823 - protein, 407 aa, unidentified
  source 1..407: note = protein_01fb361
  REGION 20..177: note = RuvC_domain
  SITE 23: note = RuvC_P1
  SITE 76: note = RuvC_P2
  SITE 116: note = RuvC_P3
  SITE 118: note = RuvC_P4
  SITE 121: note = RuvC_P5
  REGION 282..369: note = Tnp_domain
  SITE 290: note = Tnp_P1
  SITE 320: note = Tnp_P2
  SITE 328: note = Tnp_P3
  SITE 329: note = Tnp_P4
  SITE 342: note = Tnp_P5
MRVLSLSKFILKLGDFIFYIGVDIAKNNHEASIIDSNGKLVSESFSFSNSIKGLEKFQKYISSFSIDSNNCIIGMEATGHYWLSVYSFLIELGFFCVVINPIQSDAFRKMYIRQTKNDSVDSFVIAQILRFGEFSVSHFSDEDTFALRNLSRFRFALVDEASDWKRKLVAILDQVFPEYSSLFSNVFGVASKELLSKYPLPEDMISIPADELAMLLSKCSKGHFGIDKAKEIQEKASNSFGVKFALKSFSFQIKQIIAQISFLEDQIADIEDEISSMINSLCPVITTITGIGDVLGAAIFSEIGDISRFERANQLVAYAGLDVAVKQSGNFNATDTKISKRGSPYLRRAIWLAASVAAFKDPALSVYYQKLRQRGKAHGTAIGAVARKLTNIIFAVLRDNKAYIPNI

SEQ ID NO: 15824 - protein, 399 aa, unidentified
  source 1..399: note = protein_55d0128
  REGION 4..160: note = RuvC_domain
  SITE 7: note = RuvC_P1
  SITE 57: note = RuvC_P2
  SITE 97: note = RuvC_P3
  SITE 99: note = RuvC_P4
  SITE 102: note = RuvC_P5
  REGION 274..362: note = Tnp_domain
  SITE 282: note = Tnp_P1
  SITE 312: note = Tnp_P2
  SITE 320: note = Tnp_P3
  SITE 321: note = Tnp_P4
  SITE 334: note = Tnp_P5
MISVGIDVSKGKSTTCAIKPYGEIVASPFEFQHTETDLKSLANMFKRMDDEVRFVMEATSIYHLPVATYLKEHGMFVSVVNPYEMKQYRTRGLRKVKTDRADSMMIAGYGIDNWHSLNEFQITQDVYAELKILSRQYRHHMQLRISALLGLTHLLDYTMPGIKRELKSWNEDNGKDKLGDFVSRYWHYDNITKMSEPKFVEHYCKWAEKKGYHQNQSKAAKIYSMAKEGIPTLPANQTTKMLVHEAVEVLKRVNETLNTILARMKELAKSLPEYPVVRAMGGVGDTLAPRLIADIGDVRRFHSSKALIAFAGIDAPPYQSGQFVGTERHISKRGSSAIRKTGYEVMRSLKSHQEPEDSAVYHFILKKEAEGKPKKVAKMAGLNKFLRIYYARVQEVYRG

SEQ ID NO: 15825 - protein, 338 aa, unidentified
  source 1..338: note = protein_6ccc6d1
  REGION 6..147: note = RuvC_domain
  SITE 9: note = RuvC_P1
  SITE 52: note = RuvC_P2
  SITE 87: note = RuvC_P3
  SITE 89: note = RuvC_P4
  SITE 92: note = RuvC_P5
  REGION 210..296: note = Tnp_domain
  SITE 218: note = Tnp_P1
  SITE 248: note = Tnp_P2
  SITE 256: note = Tnp_P3
  SITE 257: note = Tnp_P4
  SITE 269: note = Tnp_P5
MKTTTFGVDLAKRVFQVHWVDMDTGEINRKQFKREQLVSFFAKQAPALIAMEACGSAHYWARRFAGFGHQVRLIAPAFVRPFVKRNKTDVADAQAIWEAAQRPEMRFVAVKSEAQQAVLTLHRVRQQLKKMHRMQTNQIHGLLYEFGATVHRGWHSMDDATRQLTELADTLPAMVIDTLREQLQRVETLAQDIRTIERRLAAWQRQDEAATRLVAIPGVGLLTSTAAVATIGQASTFRSGREFSACIGLVPRQSGTGGRVKLLGISKRGDVYLRTLLIHGARSVLTHSKHLDDTLQRLLARRPFNVVVVALANRMARMIWALLAHGRMYQPGYAVHAA

SEQ ID NO: 15826 - protein, 312 aa, unidentified
  source 1..312: note = protein_f77ea40
  REGION 6..154: note = RuvC_domain
  SITE 9: note = RuvC_P1
  SITE 53: note = RuvC_P2
  SITE 93: note = RuvC_P3
  SITE 95: note = RuvC_P4
  SITE 98: note = RuvC_P5
  REGION 189..273: note = Tnp_domain
  SITE 197: note = Tnp_P1
  SITE 226: note = Tnp_P2
  SITE 234: note = Tnp_P3
  SITE 235: note = Tnp_P4
  SITE 246: note = Tnp_P5
MTQITIGVDVSKDTLDVHLHPDGLHRQFSNDTPGFRAILDWVEGQPVSRLVFEASGAYHRAFERAMGEAGIALCKVNPARARRFAEATGQSAKTDRIDAAMLARMGAVLEPDTHSAPSETACELKELHMMRAALVKDRTAAKNRAATLTLPLLKRQLRQRLAAIDRQVRQIEQAMRTLIETDPELIRKRDILISIPGIAERSAFALITGMPELGDLDSQAAGALSGTAPRTRQSGKWTGKAFVQGGRAHVRRALYMPALAAARFNPDLNQTYKSLTARGKPPKLALTAVMRKLIVLANALIRDNRNWTPKPH

SEQ ID NO: 15827 - protein, 412 aa, unidentified
  source 1..412: note = protein_8bea280
  REGION 4..170: note = RuvC_domain
  SITE 7: note = RuvC_P1
  SITE 69: note = RuvC_P2
  SITE 107: note = RuvC_P3
  SITE 109: note = RuvC_P4
  SITE 112: note = RuvC_P5
  REGION 278..364: note = Tnp_domain
  SITE 286: note = Tnp_P1
  SITE 317: note = Tnp_P2
  SITE 325: note = Tnp_P3
  SITE 326: note = Tnp_P4
MLFVGDDWAEGHHDIEIVDDGGKVLVRRRLPEGLEGITRLHALVAAQLPDDWVDRDPEEAAGLVKVGIETDRGSWVGSLVAAGYEVFAVNPLSVARYRERHSTSGAKSDAADAHLLAEMVRLDRAHHRPVAEDTDLGEAIKLTARTHQSLIWDRSRHVARLRSTLREYFPAALLAFEDLDAPDALELLGRAPEPDQAARLSKTAIGAALKRARRRRVEDRARRLQNILRAPELRQPPALQSAYAAVVASEVAIITALNVQVDRLGAVVGEHFGRHRDAEIYLSLPGLGVILGARILGEFGDDPDRYADAKSRKNYAGTSPVTKASGTKKVVLARYARNRRLGDALQQWAFCSLRGSPGAKAYYQRLRDRKIGHEAALRQLANRFVGILHGCLKTHTTYNEHTAWAHDSTTAA

SEQ ID NO: 15828 - protein, 399 aa, unidentified
  source 1..399: note = protein_7c87083
  REGION 12..166: note = RuvC_domain
  SITE 15: note = RuvC_P1
  SITE 63: note = RuvC_P2
  SITE 103: note = RuvC_P3
  SITE 105: note = RuvC_P4
  SITE 108: note = RuvC_P5
  REGION 273..357: note = Tnp_domain
  SITE 281: note = Tnp_P1
  SITE 310: note = Tnp_P2
  SITE 318: note = Tnp_P3
  SITE 319: note = Tnp_P4
  SITE 331: note = Tnp_P5
MITNHDAVEVFVGLDVGKGVHHAVAVNRAGRKLLDRALPNDEAKIREIMAELEDNGRILFVVDQPATIGALPVAVAQAAGVLVGYLPGLAMRRIADLHPGEAKTDARDAFIIAEAARTMPHALRSVQLVDEQLAELSMLCGFDDDLAKQATATSNRLRGLLTQIHPALERVLGPYMDHPAVLDLLRTWPTPEALRHAGRRRIGNRLTKLAPRMGERLADEIIEALGRQTVTVVGTNAATIVLPQLAAMLSGLHESRATVLTQVEALVEAHPLHPVLMSLPAVGIRTAARILTEIAGKDFPTAGHLASYAGLAPVTWRSGSSVRGDHSSRKGNKVLKRTLFLSAFAALHDPPSRAYYERKRAEGKRHNQALIALARRRCDTLYAMLRDGTLYQSPAPTTT

SEQ ID NO: 15829 - protein, 386 aa, unidentified
  source 1..386: note = protein_29317ae
  REGION 42..184: note = RuvC_domain
  SITE 79: note = RuvC_P2
  SITE 118: note = RuvC_P3
  SITE 120: note = RuvC_P4
  SITE 123: note = RuvC_P5
  REGION 255..343: note = Tnp_domain
  SITE 263: note = Tnp_P1
  SITE 292: note = Tnp_P2
  SITE 300: note = Tnp_P3
  SITE 301: note = Tnp_P4
  SITE 313: note = Tnp_P5
MQYPNDSRRCLTVLDQDSTLIAVIEMSLSSWLVAGIVPGIERQPLKKLEADKHALLKLLHRWRDEAVKAGRKITRIAVAFEAGRDGFWLARWLRAHDIEAHVIHASSVAVPREHRRAKTDRLDTEMLKRAFLGWLRGERDHCKVVAIPTLAEEDAKRPNRERESLVGECSRLVNRMKAAFVRLGIRGFNPKLKKAPERLGALRTPEGEPIPPNTVAALRRDMERLRLVREQIRQIELTRLERLQKAPEVGAHAMVRLLARVMGIGIETADMLVQEVLSRELRDRRAVARYSGLTGSPDESGRKHREKGLARAGNARVRRGMIQLAWRFLMFQKNSALAQWFRQRTENAPRTRKTMIVALARKLLIALWRFVREGVVPEGIVLRPAP

SEQ ID NO: 15830 - protein, 325 aa, unidentified
  source 1..325: note = protein_c97d1ef
  REGION 6..149: note = RuvC_domain
  SITE 9: note = RuvC_P1
  SITE 54: note = RuvC_P2
  SITE 92: note = RuvC_P3
  SITE 94: note = RuvC_P4
  SITE 97: note = RuvC_P5
  REGION 197..284: note = Tnp_domain
  SITE 205: note = Tnp_P1
  SITE 235: note = Tnp_P2
  SITE 243: note = Tnp_P3
  SITE 244: note = Tnp_P4
  SITE 257: note = Tnp_P5
MKNIIIGIDISCKTLDICIKNEGTLNYLAIENKIPAIKRFFKKYNYENVMVAMENTGRYNWNLLEVLESFDFKVYVISPLHLKKSMGLTRGKNDKIDSLRICNFIEKNHECTMPWKPCSDTIKKIKILLTERALRVKIKKQFTVVQNDYKLMKGIGLDKRLIALNLKAIRHIESQIAVIENDIEETIQKDQELANYQKLIKSVPGVGKVLSWILLSKTEGFTSITDPRKMACYSGVAPFDYQSGTSLKRRPAVSMFADKGIKAILHLAAMSAIRLDNDLRKYYRRKVEEGKNKMSVLNAVRNKIIHRVFAVIKNQIPYQKDLVLS

SEQ ID NO: 15831 - protein, 328 aa, unidentified
  source 1..328: note = protein_ecf82b3
  REGION 4..159: note = RuvC_domain
  SITE 7: note = RuvC_P1
  SITE 60: note = RuvC_P2
  SITE 100: note = RuvC_P3
  SITE 102: note = RuvC_P4
  SITE 105: note = RuvC_P5
  REGION 200..286: note = Tnp_domain
  SITE 208: note = Tnp_P1
  SITE 237: note = Tnp_P2
  SITE 245: note = Tnp_P3
  SITE 246: note = Tnp_P4
  SITE 259: note = Tnp_P5
MIMLGIDVSKTKIDCCIFPQGLTGKRKNKIFTNTKSGFGSLLKWLITLKIEPDQVTAIMEATSVYHENLGYYLYDAGVKVCVANPSRVRAFAKGMSMLNKTDKADSEALSRYGYTAKLIIWQPEPENVRLLKALLGRRDVYLGSLLQEKNRLEKAQSTHTSVVVIKLLEENIEYLNQQLEHIDKLINNHIDQDPTLKQDLKLLQTIPSIGERSGLLLLGLFHSHKFEKASQAAAYVGLVPVHQLSGSSVNKQSHLSKAGDSKIRSVLYMSALTAIKYNPHIEALYQRLLSQGKNKMCALGAAMRKLIHLCYGVLKHQTAYQRDYLLVE

SEQ ID NO: 15832 - protein, 341 aa, unidentified
  source 1..341: note = protein_ec660e5
  REGION 6..148: note = RuvC_domain
  SITE 9: note = RuvC_P1
  SITE 52: note = RuvC_P2
  SITE 87: note = RuvC_P3
  SITE 89: note = RuvC_P4
  SITE 92: note = RuvC_P5
  REGION 211..298: note = Tnp_domain
  SITE 219: note = Tnp_P1
  SITE 249: note = Tnp_P2
  SITE 257: note = Tnp_P3
  SITE 258: note = Tnp_P4
  SITE 270: note = Tnp_P5
MNHTLIGLDLAKSTFHAIKLDRHGKLRWRRKYSRAQLIRYFAARRATRIAMEACGTSNHWARQLTAMGHQVELLAPKHVKGYLRGQKNDYNDAQAIAEAAFHGSMRPVPVKSLAQQDAQVFHRIRRQLVGERIRLVNQIRGLLAEYGVTIPQGIKHVRQSVPGILESADNELTPRFRALLHRQYRRLVALDEEIDWYAEQLATQVKEDEVCQRLMEIPGFGPVVSSAMACWMGDGHQFRKGRDASAALGVVPRQFTSGDKERLGGITKRGDSYVRTQVINGARAVVAQARRKSDPLSRWINRLVDTRGYNRAVVALANKLIRIAWVVIARGERYQPREVLV

SEQ ID NO: 15833 - protein, 334 aa, unidentified
  source 1..334: note = protein_49ba79d
  REGION 7..149: note = RuvC_domain
  SITE 10: note = RuvC_P1
  SITE 53: note = RuvC_P2
  SITE 88: note = RuvC_P3
  SITE 90: note = RuvC_P4
  SITE 93: note = RuvC_P5
  REGION 209..291: note = Tnp_domain
  SITE 217: note = Tnp_P1
  SITE 243: note = Tnp_P2
  SITE 251: note = Tnp_P3
  SITE 252: note = Tnp_P4
  SITE 264: note = Tnp_P5
MNTVSLLGIDIGKNTFHLHGQDARGNQILRKKLNRSQLLPYLAQLPNCKVAMESCGGSQWLARQIEGLGHRVQLIAAQHVKAYVTGNKNDYIDAEAICDAASRPRTRSVPVKTLEQQILSTEHKLRKSWMDNRTRIINQVHGFLLEFGIIFPVGHAALEQVPALMEHHELPIRLRNAIERMLLDIQRLTRDIKAIDVEIKQQLSEDAAGMRLLSIPGIGPLTVADVGDASTYKSSRDFAASLGLVPRQYSTGGKTNLLGISKRGDKYLRCLLVQGAHALMIRIDKRNDSLGAWVRNLLSRKPANKVACALANKMARIVWAVLARGGSYNVQQMV

SEQ ID NO: 15834 - protein, 288 aa, unidentified
  source 1..288: note = protein_b78c093
  REGION 8..151: note = RuvC_domain
  SITE 11: note = RuvC_P1
  SITE 52: note = RuvC_P2
  SITE 92: note = RuvC_P3
  SITE 94: note = RuvC_P4
  SITE 97: note = RuvC_P5
  REGION 191..278: note = Tnp_domain
  SITE 199: note = Tnp_P1
  SITE 229: note = Tnp_P2
  SITE 237: note = Tnp_P3
  SITE 238: note = Tnp_P4
  SITE 251: note = Tnp_P5
MNKDIKIYGIDISKDVFDVYYQTTGHLQLKNDEKGFKGLLKLLPKDALVVMEATGYYHYRLAQFLYNNDVAVSVVNPLSVKRFIQMKLGKVKTDKSDAKAICAYGTMNELPMYSALTDVQTECLQLFRLLDNYLKKRTQTKNKLHGEMALGVPSKYVYKSLQRDLKHLDKEVKGIESRLLELVKQDQQQQLTLLKSIPGMGVKTALFLIVVTDGFKKFENASQLCSYVGITPTIRESGSSVRGRSRISKVGNKKLRNLLFLCAFSACKHNKACRETYERMLPKGRAKN

SEQ ID NO: 15835 - protein, 355 aa, unidentified
  source 1..355: note = protein_48e44f8
  REGION 9..154: note = RuvC_domain
  SITE 12: note = RuvC_P1
  SITE 58: note = RuvC_P2
  SITE 94: note = RuvC_P3
  SITE 96: note = RuvC_P4
  SITE 99: note = RuvC_P5
  REGION 219..305: note = Tnp_domain
  SITE 227: note = Tnp_P1
  SITE 257: note = Tnp_P2
  SITE 265: note = Tnp_P3
  SITE 266: note = Tnp_P4
  SITE 278: note = Tnp_P5
MTASYDYHIGVDYHKSYSHLVVQDSCGKTLRSGRVKNDRQSLGGFLERYRENSHAVVEATRNWMVMYDWLDDICDDVVLAHPLKVKAIADAKIKTDKIDATVLAHLLRADLVPEAWAPTDKARELRVALRERMFYVRLRTMTKNRIVTVFDRYPEQTAQLKKLGDLFGKAGRIQLAQVNVSEIDRIQIDRGLDFIGDIDGRIKQSEATIRAMTKANANVKLLKTIPGVGEFFARLIDAEIDDIDRFRSPKKLAAYAGLVPSTYSSGGKTYHGKIIKQGNKWLRWAFVEAVAPAVASDPQLRAQYEHLKLRGTNKARVAIARKLLTIAFQILRDQRAYELRGASTTEGVSTISRLS

SEQ ID NO: 15836 - protein, 398 aa, unidentified
  source 1..398: note = protein_cf43523
  REGION 6..162: note = RuvC_domain
  SITE 9: note = RuvC_P1
  SITE 60: note = RuvC_P2
  SITE 100: note = RuvC_P3
  SITE 102: note = RuvC_P4
  SITE 105: note = RuvC_P5
  REGION 267..354: note = Tnp_domain
  SITE 275: note = Tnp_P1
  SITE 306: note = Tnp_P2
  SITE 314: note = Tnp_P3
  SITE 315: note = Tnp_P4
  SITE 327: note = Tnp_P5
MSRIWVGTDCGKTHHHCLVLDSEGKVLLSRRVANDEPELLQLIADVLGPAGDTPVTWALDMTGGEPNLLIALLAAHGQELVYIPGVAVNRATDGYRGAGKTDARDARVIADQARMRRDLLPIRLDDEAVVELRLLTDHRADLVAERTRATNRLRSLLNSMFPALERALDLGNTGPLRLLTGYQTPAAIRRAGARRLATWLRNRKVYSPDTLAAKAVEAAERQHTAVAGEKAIAKMVHTLAEEVMTLNEKIAETDKLIEDRFREHELAEVITSMPGIGPTLGAEFLAAVGGSLDAFPTADRLAAFAGVAPAPRDSGKVSGNLHRPQRYHRRMQRVFYTSALVSIRCDPNSRAFYDRKRAEGKRHVQAVLALARRRVNVLWALIRDGRCYQVTPPVTTAA

SEQ ID NO: 15837 - protein, 392 aa, unidentified
  source 1..392: note = protein_2249b85
  REGION 4..163: note = RuvC_domain
  SITE 7: note = RuvC_P1
  SITE 60: note = RuvC_P2
  SITE 101: note = RuvC_P3
  SITE 103: note = RuvC_P4
  SITE 106: note = RuvC_P5
  REGION 266..355: note = Tnp_domain
  SITE 274: note = Tnp_P1
  SITE 304: note = Tnp_P2
  SITE 312: note = Tnp_P3
  SITE 313: note = Tnp_P4
  SITE 328: note = Tnp_P5
MVCVGIDVAKDKHDCFILNSEGEVLADAFTIVNNREGFETLLQRIHTCTTPADKIRVGLEATGHYSYNILGFLLENGMPPFLINPLHTNLYRKSLSLRQTKTDRIDARTIASMLMSDVDLKSYTDTAYHNEELKSLTRYRFDKVRERAKPKQSVSRLVNILFPELEKLVPSLHMASVYAVLSEFPGAKQIANAHLTHLKTVLSDASKGRYDREKAVEIREAARCSIGSVMPAKSLELRHTIALIRELDAEIEEIEAEIRCLMDEIQSPITTIPGINFRMGAMILAEIGDFSRFDSPDKLLAYAGLSPSTYQSGKLNATGAYAHMEKRGSRYLRYALFNATKYVCHWEPTFAAYLARKRAEGKHYNVAISHAVKKLVRLIFALQQSGRAFQAA

SEQ ID NO: 15838 - protein, 397 aa, unidentified
  source 1..397: note = protein_b2c6095
  REGION 5..158: note = RuvC_domain
  SITE 8: note = RuvC_P1
  SITE 59: note = RuvC_P2
  SITE 99: note = RuvC_P3
  SITE 101: note = RuvC_P4
  SITE 104: note = RuvC_P5
  REGION 264..354: note = Tnp_domain
  SITE 272: note = Tnp_P1
  SITE 302: note = Tnp_P2
  SITE 310: note = Tnp_P3
  SITE 311: note = Tnp_P4
  SITE 327: note = Tnp_P5
MSAVVGIDVGAYKHAAAVCRSGEREAEKAVFRLAANRAGFEELDGWLERQGPVERVVLESSGHYYWPLASHLHRGGYQVAVVNPLQAKYFAKSRLQRSKSDPADARTLAALGMSEEPRVKDPLLGAEAKEAARFWSGLVKEQGQVRQKLLRLVEIGFPELKECFEDPLCETALAVLREAPTARAAARKRVSTLADATRPGGRRRLGENTARRLHELAKGTIAPPELDTQMGFEVGLLIQQFDLLEKQIEIAEQRVSEVLDSELAQRLQTIPGVGPALAATFIAEIGDIWRFDEFDQLAAYAGVHPKEQSSGTKGQNPETSWHMAKTGNAFIRSAAYRMAVVGIQHNPVIRAHYLRKRAQGKTAMNALGHCMSKSLAIVWGVWRSGRDFDPSLGGPRT

SEQ ID NO: 15839 - protein, 390 aa, unidentified
  source 1..390: note = protein_98bee5a
  REGION 4..162: note = RuvC_domain
  SITE 7: note = RuvC_P1
  SITE 60: note = RuvC_P2
  SITE 101: note = RuvC_P3
  SITE 103: note = RuvC_P4
  SITE 106: note = RuvC_P5
  REGION 266..352: note = Tnp_domain
  SITE 273: note = Tnp_P1
  SITE 303: note = Tnp_P2
  SITE 311: note = Tnp_P3
  SITE 312: note = Tnp_P4
  SITE 325: note = Tnp_P5
MIFVGIDVSKAKHDCCIIDSDGSVITNSLRIENSKLGFETLYSAILSNSDDLNNVKIGLESTGHYSTNITNYLYSKGFKVHILNPLATNLFRKAGTLRKTKTDKTDAKVIATMLFSDESKSYSPVSYHIQELKSLTRHRYRMIGYRSKLKISVTRLIDIIFPELPDLFWSIHQASSYALLLELPTPNDIKSCHLTKLINIITKSSNGRYGNDKAIALKELASNSIGSANRSVAFELQQTIRLILSIQNEIDILDKQIKIVVDEINSPIITITGIGYTLAAIILAEIGDIERFSTPAKLLAFAGMEPSTYQSGKFNASKTPMVKRGSTYLRWAVLQASRLVPMRDATFSAYLSKKRSEGKHYCVAQSHIGKKLLRIIFYLLKNNTAFVPQM

SEQ ID NO: 15840 - protein, 405 aa, unidentified
  source 1..405: note = protein_c0955b3
  REGION 11..160: note = RuvC_domain
  SITE 14: note = RuvC_P1
  SITE 63: note = RuvC_P2
  SITE 100: note = RuvC_P3
  SITE 102: note = RuvC_P4
  SITE 105: note = RuvC_P5
  REGION 223..309: note = Tnp_domain
  SITE 231: note = Tnp_P1
  SITE 262: note = Tnp_P2
  SITE 270: note = Tnp_P3
  SITE 271: note = Tnp_P4
  SITE 282: note = Tnp_P5
MAELENNLVFAGVDTHKDTHTLCLLDCMGRAIGTFKFDADAKGYDALAGKIGDPATCAGIGVEGTGSYGAGLTRRLVELGYCVYEVMVPGRARRNPGRPKSDPADAEVAARQVIARTNLSKPKDQFGWTEDLRQLMIARDRLVRATSAMINAAKSLIVTAPEDLRRSLAKLSRKDLRSALSALDPGADGVVLALGALGRAWDLQDREADAVEGKMKEILEANAPALLAIFGCGTVSAAALAVAGGGNLERLNSEAEFASLCGVAPLLASSGKTERHRLNRGGDRKANRALYQIAVTRMSYDQRTKDYVEKRKGDGKSKKETIRCLKRYIAREVFRALRHPFEVKGPSWKDLRPARQALGITLVEVGSALNVGFQKVSYAETGRLMNVQFLEKYDTWLKSQTKEAS

SEQ ID NO: 15841 - protein, 322 aa, unidentified
  source 1..322: note = protein_90edc63
  REGION 8..150: note = RuvC_domain
  SITE 11: note = RuvC_P1
  SITE 52: note = RuvC_P2
  SITE 92: note = RuvC_P3
  SITE 94: note = RuvC_P4
  SITE 97: note = RuvC_P5
  REGION 191..278: note = Tnp_domain
  SITE 199: note = Tnp_P1
  SITE 229: note = Tnp_P2
  SITE 237: note = Tnp_P3
  SITE 238: note = Tnp_P4
  SITE 251: note = Tnp_P5
MNKYKETFGVDISKDVFDVHGSKSGHNQFSNSPIGFKLFLKLLPESSLVVMEATGYYHYSLSQFLCKHKIVVSVVNPLSVKCFIQMKLSRIKTDKRDAQAICDYGIYNTVPLYNQISDMQSECRQLLSLKANYLKRRTSTKNKLHGEGVLGIPSKLVVQSLLLDKKHIDRELAKIEKRLLLLVKTTSQRELTLLKSSPGIGDKTAVFLIVATDSFNKFSNASQLCSYLGTTPMIKRSGSSVRGRSRISKMGNRNLRNLMFMCSMSAYKYNKSCKAIHDRIVSKGKSSKLALIAVCNKLIHQAFAIVRSGVEYNPHYISIRKN

SEQ ID NO: 15842 - protein, 282 aa, unidentified
  source 1..282: note = protein_e832431
  REGION 1..45: note = RuvC_domain
  REGION 152..236: note = Tnp_domain
  SITE 160: note = Tnp_P1
  SITE 189: note = Tnp_P2
  SITE 197: note = Tnp_P3
  SITE 198: note = Tnp_P4
  SITE 210: note = Tnp_P5
MLRSIRVADQQIAELSILFGFDDDLAAQITQVSNRVRGLLTQIHPMLEKVLGPRLDHPAILDLLQRYPSPDDLRQAGQKRVAARLLKRAPRKGWVWAADIFDALDQQTVTVAGTNAASIVLPRLVTQLIELRQQRTDIASEVEKIVVAHPLHPVLTSMPRVGVRTAARLLTEIVGKHFPTAGHLAAYAGLAPVTRRSGTSIRGESPSQRGNKVLKRAMFLSVFAALRDPEPRAYYGRMIAQGKRHNQALIALARRRCDVLNAMLRTESLYQPRAQHHTALAA

SEQ ID NO: 15843 - protein, 408 aa, unidentified
  source 1..408: note = protein_1695f6f
  REGION 5..165: note = RuvC_domain
  SITE 8: note = RuvC_P1
  SITE 62: note = RuvC_P2
  SITE 102: note = RuvC_P3
  SITE 104: note = RuvC_P4
  SITE 107: note = RuvC_P5
  REGION 273..359: note = Tnp_domain
  SITE 281: note = Tnp_P1
  SITE 312: note = Tnp_P2
  SITE 320: note = Tnp_P3
  SITE 321: note = Tnp_P4
MRLFVGDDWAEDHHDIELMDMAGRRLAKARLPEGVAGMARLHAMLGEQLGEADDEDVEVLVGIETDRGPWVAALVAAGYTVLAVNPLQAARFRDRLGVSGAKSDAGDAHVLADMVRTHAHELRPVAGDSTEAEAVKVVARTHKTLIWERTRHTQRLRHALRDYFPAALIAFEDLDAADSLELLAKAPTPAQAARLTTAQISGALKRARRKNVAEKAVAVQAALRAEHLGQPEILTSAYAASVQALIAVLTVLNTQVKALQRQVETHFGQHPAAEIILSQPGLGPVLGARVLAEFGDDSARYISAKARKNYAGTSPITRASGRKKVALARFVHNDRLIDALMTQAFAALKASPGARAYYDRQRARGAGHNAALRQLANRLVGILHGCLKTGTLYDETTAWSHHAENVAA

SEQ ID NO: 15844 - protein, 341 aa, unidentified
  source 1..341: note = protein_2f222e7
  REGION 6..146: note = RuvC_domain
  SITE 9: note = RuvC_P1
  SITE 52: note = RuvC_P2
  SITE 87: note = RuvC_P3
  SITE 89: note = RuvC_P4
  SITE 92: note = RuvC_P5
  REGION 211..300: note = Tnp_domain
  SITE 219: note = Tnp_P1
  SITE 249: note = Tnp_P2
  SITE 257: note = Tnp_P3
  SITE 258: note = Tnp_P4
  SITE 270: note = Tnp_P5
MEIDLLGIDLAKRVFQLHGADRRGHVLHRAKVSRAALVDTVRQLRPRVIAMEACSSAHHWARRFQELGAEVRLISPQYVTPFVKTNKNDRNDAEAIVEAACRPAMRFVTVKSVEQQDMQAAHRVRELLVQQRTALINQCRGLLGERGITIAQSPAAFKRAVPEILKECEGEITSFCQALMMELLEQVHAIEERIATSEAWIKAFLKRSALCKKIAAIDGIGPITATAIVAAVGDAKAFKNGRHLAAWLGLVPRQYSSGGKSRLQGISKRGDKYLRTLLIHGARSVLRYVANKTDARSRWLQELIARRGYNRAAVALANKNARVIQVLLSSEVAYHPRGISV

SEQ ID NO: 15845 - protein, 400 aa, unidentified
  source 1..400: note = protein_c606d54
  REGION 12..167: note = RuvC_domain
  SITE 15: note = RuvC_P1
  SITE 65: note = RuvC_P2
  SITE 105: note = RuvC_P3
  SITE 107: note = RuvC_P4
  SITE 110: note = RuvC_P5
  REGION 273..360: note = Tnp_domain
  SITE 281: note = Tnp_P1
  SITE 312: note = Tnp_P2
  SITE 320: note = Tnp_P3
  SITE 321: note = Tnp_P4
  SITE 333: note = Tnp_P5
MSGLKGGFSGFVGIDVSKDKFDVCGIAGDAVKLFQFSATMDRKGFEILKEHLADISIASGLIGMESTATYHVNLFSYLLSEGYNVIIINPLLISNYMKMQLRKTKTDKKDAVVIAQFLLANGETLVQRTEPSFIADLRDLSRQRESLVDEMTSLKIGIKRLLNMTFPELEHITDVFTKSMLKLIRQYPSAVALKDADLGKLSQTLIADSYGHKREAFAAELIKAACSSIGINSPAKETILKQKVTLLLHLEDALQEITSILIEMSRKQMEDDINILTSIKGIGDKTAVNFLIEMGGSINQFNRSGKIIAMAGLDPAVYQSGQHEGKGRITKRGNRHLRRIIWLMTTKVMHYNGIFSAYYLKRRKEGLPYKKAVLATAHKLIRVIYAMLTQRTTFCPQVNS

SEQ ID NO: 15846 - protein, 343 aa, unidentified
  source 1..343: note = protein_bb8bf3c
  REGION 6..146: note = RuvC_domain
  SITE 9: note = RuvC_P1
  SITE 52: note = RuvC_P2
  SITE 87: note = RuvC_P3
  SITE 89: note = RuvC_P4
  SITE 92: note = RuvC_P5
  REGION 211..296: note = Tnp_domain
  SITE 219: note = Tnp_P1
  SITE 249: note = Tnp_P2
  SITE 257: note = Tnp_P3
  SITE 258: note = Tnp_P4
  SITE 270: note = Tnp_P5
MKLHVLGIDLGKTVFHLVGLDSTSRVVIRKKCFRTQLLALTANLQADLIGMESCSGSHFLGRALREQGYPVRLMPAQYVKPYVQTNKSDFLDAEAIAEAVQRPRMRFVPIKTEEQLDLQALHRVRERWVMRRTAVVNQIRSLLLERGLTLPKGRSHVDALLPRILEDAELRLSGCFRVLLAQLKMELEQSTARIEQMDRVIHKTAKENEDCQRLTEIPGVGPVTATALVAAVGNGSTFGKGRNLAAWMGIVPGEYSTGGKQKLLGISKRGNRYLRTLFIQGARSVVQQRHKQAPGLSSWLAQLLARAHQNVVIVALANKLVRMAWAVLCKKESYRAPILAVAT

SEQ ID NO: 15847 - protein, 392 aa, unidentified
  source 1..392: note = protein_8a396d4
  REGION 4..162: note = RuvC_domain
  SITE 7: note = RuvC_P1
  SITE 60: note = RuvC_P2
  SITE 101: note = RuvC_P3
  SITE 103: note = RuvC_P4
  SITE 106: note = RuvC_P5
  REGION 267..354: note = Tnp_domain
  SITE 275: note = Tnp_P1
  SITE 305: note = Tnp_P2
  SITE 313: note = Tnp_P3
  SITE 314: note = Tnp_P4
  SITE 327: note = Tnp_P5
MFFVGIDIGKNNHVASMMDESGKIVFKAFSFSNTSDGGNALFSKLSSYSSNPSTFEIGMEATGHYWLSVYSFLFEKGFLLHVINPIQTDGWRRGIEIRKRKNDVIDSVLIADLIRYGQFVETRLADQDLFSLRTLTRFRSYLVESISDLKRKVVCVLDQVFPEYQTIFSNIFGKTSKEILLRFSSPIDFENVSSQTLAELLAQLSRQKVGATKAEKLKNAASSSFGITFAKNSFTFQLKALIEPISFIENQVKETESEISRLMDKLDSPVTTITGIGNVTGAAILSEIGDISKFDSPRKLVAFAGLDATVTKSGEFEASHNVMSKRGSPYLRKAIFQAALIASFHDPVLSVYYQKKKTEGKHHLTCVGAVARKMCNIIYAVLKNKQPYVPKA

SEQ ID NO: 15848 - protein, 395 aa, unidentified
  source 1..395: note = protein_4fb78b6
  REGION 4..160: note = RuvC_domain
  SITE 7: note = RuvC_P1
  SITE 57: note = RuvC_P2
  SITE 97: note = RuvC_P3
  SITE 99: note = RuvC_P4
  SITE 102: note = RuvC_P5
  REGION 271..358: note = Tnp_domain
  SITE 279: note = Tnp_P1
  SITE 309: note = Tnp_P2
  SITE 317: note = Tnp_P3
  SITE 318: note = Tnp_P4
  SITE 331: note = Tnp_P5
MISVGIDVSKGKSTVCILKPGGEVVKPPFEMIHNAEELDSFVSLINSFDEETRVVLEDTGHYHIPVASYLSSHGIFVCCVNALRMKKFCAQSIRRAKTDKIDAVRIASFGITYWSELTRAYDAPDTYDVLRFLARQYYQITSILVKAKVNLSNLLDQVMLGISNLLQNQKDNHKLTEFIDRYIHFQTILDMGEEKFTADYCKWAKKKGYRCNERKAAEIFALAQNGIPSLSNSQSVKIAVREAIKVIHSTEESRNTILAQMQKICKTLPEYSVVRDMNCIGDVLAPRIIAEIGDVRRFKNKHSLIAYAGIDAPPYQSGAFNASERKISKRGNSYLRKTGYEIMQSLIKHKPTDDSVYDFIQKKRSEGKCGKEAMIAGLNKFLRVYYGKVMELYSE

SEQ ID NO: 15849 - protein, 342 aa, unidentified
  source 1..342: note = protein_2e6f4e4
  REGION 6..151: note = RuvC_domain
  SITE 9: note = RuvC_P1
  SITE 52: note = RuvC_P2
  SITE 87: note = RuvC_P3
  SITE 89: note = RuvC_P4
  SITE 92: note = RuvC_P5
  REGION 210..296: note = Tnp_domain
  SITE 218: note = Tnp_P1
  SITE 248: note = Tnp_P2
  SITE 256: note = Tnp_P3
  SITE 257: note = Tnp_P4
  SITE 269: note = Tnp_P5
MIDTMIGVDLAKNVFQLHGASLTGEVKFRKKLSRAQFRKFMETQPASIVVFEACGGAHFWTREIQELGHAAKLIAPQYVKPFVKRQKNDAADAEAIVIAAQRPEMRFVAPKSNAQIARGVVFRSRDRLVRQRTEQINALRSVLYEQGQVFPTGVHQMKKIAAFLQQADNGLLALVREECEELLASIYDLTARIDAKTLKLKKLSQQSEISRRLQTIPGVGPLTAMAVEAFAPSMDIFRCGRDFAAWLGLVPKQHSSGGKERLGKVSKAGQVDIRRLLIIGAMTRIAWVGRKPVREGSWLDRMLKRKPKMLVAIALANKMARTIWAMLTKNEDYRDPATIVTA

SEQ ID NO: 15850 - protein, 318 aa, unidentified
  source 1..318: note = protein_67c4d68
  REGION 6..150: note = RuvC_domain
  SITE 9: note = RuvC_P1
  SITE 55: note = RuvC_P2
  SITE 95: note = RuvC_P3
  SITE 97: note = RuvC_P4
  SITE 100: note = RuvC_P5
  REGION 190..276: note = Tnp_domain
  SITE 198: note = Tnp_P1
  SITE 228: note = Tnp_P2
  SITE 236: note = Tnp_P3
  SITE 237: note = Tnp_P4
  SITE 249: note = Tnp_P5
MTFTPIGIDIAKAKFDAAALRNGKYKTKVFQNTPEGFKAFLAWLQAFPAPHVCLEATGRYGEGLALFLVDHGLAVSVVNPAQIHAFGQAELSRTKTDKTDAKLIARFCHSQRPLLWQPPPLAVRQLQALVRRLESLLEMRQMERNRLDGADPTVRPSIEAVLATLDAEIAATQKRIREHIDPDPDLRQRRDLLDTIPGLGNATIPVLLAALGDVHRFENARSVAAFAGLSPKEHQSGKWKGHTRLSKTGDALLRKALYMPAIVARRHNPLIRAFCERLKAQGKNGKLIVGAAMRKLLVLAYGVLKSGQPFNPNFALAS

SEQ ID NO: 15851 - protein, 402 aa, unidentified
  source 1..402: note = protein_6143a5a
  REGION 4..160: note = RuvC_domain
  SITE 7: note = RuvC_P1
  SITE 57: note = RuvC_P2
  SITE 97: note = RuvC_P3
  SITE 99: note = RuvC_P4
  SITE 102: note = RuvC_P5
  REGION 274..361: note = Tnp_domain
  SITE 282: note = Tnp_P1
  SITE 312: note = Tnp_P2
  SITE 320: note = Tnp_P3
  SITE 321: note = Tnp_P4
  SITE 334: note = Tnp_P5
MNAVGIDVSKEKSTVAIYQPGDQVILKPRDFHHTQSDISSLISIIKGLDGETKVCMEHTGRYYEPVATWLSDAGIFVSAVNPILIKNFGDDSLRAPKTDKADAKKIARYTLDRWTNLKQYSHMDETRNQLKTMNRQFGFYMDQKTAMKNNLIALLDQTYPGANTFFDSPARNDGSQKWVDFVYTYWHVDCVRRKSLEAFTEHYKNWCKRKGYNFSTAKAEKIYHKSADLIAVFPKDANTRMLLHQAVDMLNLASRTVETLRTEMDQKAATLLEYPVVMAMNGVGPTLGPQLMAEIGDVTRFEKRGSLTAFAGVDPGKNDSGKYSQKSVPTSKKGSPHLRKTLFQIMDGLIKRSPIDDPVYAFMDKKRAQGKPYHVYMTAGANKFLRIYYGRVNEYLSTLSNS

SEQ ID NO: 15852 - protein, 341 aa, unidentified
  source 1..341: note = protein_a6eead6
  REGION 6..147: note = RuvC_domain
  SITE 9: note = RuvC_P1
  SITE 52: note = RuvC_P2
  SITE 87: note = RuvC_P3
  SITE 89: note = RuvC_P4
  SITE 92: note = RuvC_P5
  REGION 211..299: note = Tnp_domain
  SITE 219: note = Tnp_P1
  SITE 249: note = Tnp_P2
  SITE 257: note = Tnp_P3
  SITE 258: note = Tnp_P4
  SITE 270: note = Tnp_P5
MNVDILGIDLAKRVFQLHGADRRGHALHRAKVSRPELMESIRQLQPRIIAMEACSSAHHWARQFQAIGIEVRLISPHYVKPFVKTNKNDRNDAEAIVEAACRPSMHFVPVKSVEQQDIQAIHRTRDLLVHQRTALINQVRGLLAERGFAVARSPAAFKKSVPEILEAAQGELTSRCQTLLRMVLDGFRAIEAQIAQTEDWLEAVMTQSALCQKIAAIPGVGTMTATAMVAAVGDAKAFKNGRHLAAWIGLVPQQHSSGGKSRLLGISKRGDAYLRTLLIHGARSVLIRVACRKDARSVWLQELIARRGYNRATVALANKNARIIQSVLSGPESYRPSMVVA

SEQ ID NO: 15853 - protein, 391 aa, unidentified
  source 1..391: note = protein_c2b20fe
  REGION 4..163: note = RuvC_domain
  SITE 7: note = RuvC_P1
  SITE 60: note = RuvC_P2
  SITE 101: note = RuvC_P3
  SITE 103: note = RuvC_P4
  SITE 106: note = RuvC_P5
  REGION 266..353: note = Tnp_domain
  SITE 274: note = Tnp_P1
  SITE 304: note = Tnp_P2
  SITE 312: note = Tnp_P3
  SITE 313: note = Tnp_P4
  SITE 326: note = Tnp_P5
MIFIGIDAAKDKHDCFIVSSDGEVLCDVFTISNTLDGFNDLLSKIKSFSKDLSKTKVGLEATGHYSYNLLGFLLDNGLPTYVLNPLHTNLYRKSLSLRKTKTDKVEARTIASMLMSCQSLKPYTRALYHNEELKSLTRYRFDKVSERAKLKTSVSRLITILFPELEKLVSQVHCVSVYALLSEFPSAKHIANANLTRLTNLLYSASKGHYNRDTAIRIREAARNSIGSVMPAKSLELKHTIKLIGELDDEIIEIEAAIKQIVDSLGTTILTIPGIGYATAASIIAEVGDFSNFETSDKILAFAGMSPSTYQSGQLTNCYAHMEKRGSKYLRFALYNATKYVCKWDSNFAAYLAKKRSEGKHYNVAISHAAKKLVRLIFALEKSRLPYMPVA

SEQ ID NO: 15854 - protein, 420 aa, unidentified
  source 1..420: note = protein_dd320ba
  REGION 14..170: note = RuvC_domain
  SITE 17: note = RuvC_P1
  SITE 66: note = RuvC_P2
  SITE 107: note = RuvC_P3
  SITE 109: note = RuvC_P4
  SITE 112: note = RuvC_P5
  REGION 279..366: note = Tnp_domain
  SITE 287: note = Tnp_P1
  SITE 317: note = Tnp_P2
  SITE 325: note = Tnp_P3
  SITE 326: note = Tnp_P4
  SITE 338: note = Tnp_P5
MTSQNSIPADAVLVAIDIAKVRNEVLIEAPGHKRRRRLSVLNTRAEHDHLIEILQSYDRPVVCAFEATGNYHRPIAWRLVEAGFETRLVSSLALARTREALHNSWDKNDPKDAQVILHMLRIHSTQVYHDPLRAGINDVQELSKTHEAIANAKTEIQHRILTHYLPLYFPEIERFRGNSRSDWFFAFLDAFPTPSSITILTKEKFVEAAWDVVGRKVSKSQILMDIYETARTSIGLPLPLDAPAIRMFRMVVAEARSLIRQRNEIEAQADELLRHSRDYQILRQIPGIGPINALTIIAEAGDLRRFHHHRQFLKFCGLDLSTQQSGQYRGQTRLSKFGNARLRRTLWIAGQVAIRQRENGFRHKFERYIARDRDNPDLRRKAMTAITAKMARVVHAVIKNGSDYRPFVEGRVPGGRTSVS

SEQ ID NO: 15855 - protein, 408 aa, unidentified
  source 1..408: note = protein_4b3f42e
  REGION 6..170: note = RuvC_domain
  SITE 9: note = RuvC_P1
  SITE 63: note = RuvC_P2
  SITE 109: note = RuvC_P3
  SITE 111: note = RuvC_P4
  SITE 114: note = RuvC_P5
  REGION 282..368: note = Tnp_domain
  SITE 289: note = Tnp_P1
  SITE 319: note = Tnp_P2
  SITE 327: note = Tnp_P3
  SITE 328: note = Tnp_P4
  SITE 341: note = Tnp_P5
MNPLYVGIDVSSKNNVIYLMLPNGDKHSSFSLANSHDGSTQLVKRIFAAMTSNNIDSVLIGLEATSVYGDNLVYFLKEDATLASFDRKIHVLNPKQVNKFKESYNDLPKNDYIDAFVIADCLRFGRINKEVYMDDYRYKALQNLTRARYFAVTNLTKEKQRFINVLFKKHSTMTQEKIFSDTFSTTALAVYEKFESAETLAKMDLQELTAFIMEKGKNRFPDPDAVAKALQKAARSSYRLPKTVNDSVNQVLAISITSIRALESQIKAFDKAITNQMELLPNVLISIPGIGPVLSAGIMAEIGDINRFQNQAALAKYAGLAWQQHQSGDFEAQTTRMIHSGNRFLKYYLCEAAFSLVRCDKEYSDFYHLKYKEVNRYQHKRALALTARKFVRLVFALLKDNRLYRPAE

SEQ ID NO: 15856 - protein, 406 aa, unidentified
  source 1..406: note = protein_0805652
  REGION 6..164: note = RuvC_domain
  SITE 9: note = RuvC_P1
  SITE 59: note = RuvC_P2
  SITE 101: note = RuvC_P3
  SITE 103: note = RuvC_P4
  SITE 106: note = RuvC_P5
  REGION 278..364: note = Tnp_domain
  SITE 286: note = Tnp_P1
  SITE 316: note = Tnp_P2
  SITE 324: note = Tnp_P3
  SITE 325: note = Tnp_P4
  SITE 338: note = Tnp_P5
MNMNAVGIDVSKRKSTVAILRPGGKVVVKPFDVPHLSTDFQSLKKLIRELNGETRIVMECTGRYYEPVVRELSQAGFFVSAVNPQIIRNFQGQNNPLRKVKTDKTDSIKIARYTLDSWANLKQYSLMDKLRSQLKTMNRQFDFYMKHKTAMKNNLISLIDQTFPGANTYFDSPAREDGSQKWVDFIDTYWHVDCVRKMSLTAFTDRYQKWCSRRKYNFSRSKAEEIYEKAKELIPVLPKDSFTKRIIKQAIDQLNAASQTVEQLRTLMNETASKLPEYPIVMAMKGVGPSLGPQLMAEIGDVTRFTHKGAITAFAGVDPGVNDSGDYSQKSVHVSKHGSPVLRKTLFQIMEVLIKTKPDDAVYRFMDKKRSEGKPYYVYMTAGANKFLRVYYGRVKEYLAALPTSD

SEQ ID NO: 15857 - protein, 315 aa, unidentified
  source 1..315: note = protein_ee89b09
  REGION 5..152: note = RuvC_domain
  SITE 8: note = RuvC_P1
  SITE 52: note = RuvC_P2
  SITE 92: note = RuvC_P3
  SITE 94: note = RuvC_P4
  SITE 97: note = RuvC_P5
  REGION 188..272: note = Tnp_domain
  SITE 196: note = Tnp_P1
  SITE 225: note = Tnp_P2
  SITE 233: note = Tnp_P3
  SITE 234: note = Tnp_P4
  SITE 245: note = Tnp_P5
MRNCIGVDISKRSFDVYVLETNKAFQMQNSSEGITRCAKLCHEILPELIVMEATGGYEMLLASHLQAEGFPVAIVNPRRIRDFAKALGQMAKTDKIDAKIIAKFAATLEPMPHEFIDDNSRKLKALISRRKQLLQMHTAEVNRREHALEKEIKQSIKAIITAIETQLQNVDKEIDDAIKEAPELKQKTEFLQSVPGIGKTTAHMLVAELPELGILNRRQIAALVGVAPINRDSGVFRGKRMTGGGRKQVRTKLYMPTLVATQFNPVIKKYYRNLVDERGKCKMVALTAAMRKLLCIMNTMLKNSQYWQPNLAENA

SEQ ID NO: 15858 - protein, 349 aa, unidentified
  source 1..349: note = protein_4cbfd44
  REGION 12..152: note = RuvC_domain
  SITE 15: note = RuvC_P1
  SITE 58: note = RuvC_P2
  SITE 93: note = RuvC_P3
  SITE 95: note = RuvC_P4
  SITE 98: note = RuvC_P5
  REGION 217..302: note = Tnp_domain
  SITE 225: note = Tnp_P1
  SITE 255: note = Tnp_P2
  SITE 263: note = Tnp_P3
  SITE 264: note = Tnp_P4
  SITE 276: note = Tnp_P5
MIRNKPRNAKVYGIDLGKNLFHVVGTDENGAIVQRVKFRRETLLAFFERAAPALVGMEACPGSQWLARKLQAIGHRVRLIPAQFVKPYVKSNKNDTIDAAAIAEAATRPTMRFVEVKRPEQSDLQALHRIRDRMVTSRTRLICQMRAFCLEHGVALRQGAGVFKIDILGVLADTGNDLTPTIRRLLGDLFEDLKRMELRIAQVTREIEAEAAKNETARRLMTVPGIGPLAATALLAAAGDGHQFRKARDMAAWLGLVPQQHSTGGKTTLLGISKRGNRYVRRLFVHGARSCVTHMDRTRDHLGAWLNGLQTRMHVNKVTVALAAKMARIAWVILTRSGAIYERRDPVLG

SEQ ID NO: 15859 - protein, 348 aa, unidentified
  source 1..348: note = protein_7527887
  REGION 5..152: note = RuvC_domain
  SITE 8: note = RuvC_P1
  SITE 55: note = RuvC_P2
  SITE 92: note = RuvC_P3
  SITE 94: note = RuvC_P4
  SITE 97: note = RuvC_P5
  REGION 212..300: note = Tnp_domain
  SITE 220: note = Tnp_P1
  SITE 250: note = Tnp_P2
  SITE 258: note = Tnp_P3
  SITE 259: note = Tnp_P4
  SITE 271: note = Tnp_P5
MEHYVGIDVSLELSSLCVLDVAGKVIREAKVASEPEALVAFLRGLDLPIARVGLEAGPLSQWLYDGLHEAGLGPVLLETRHVKAALSAMAVKTDRRDARGIAQLLHMGWYRPVHRKSVSSQEIRALLGARKQLQIKVIDLEQTVRGLLRGFGLKVGDVSRGKLPARIRELAAGHFMLEKIVEPLLAAREAMWREFARLHREVLVIVKEDQVCRRLMTVPGVGALVSLTYRAGVDDPGRFAKSKSVGAFFGLTPRRYQSGETDVTGSITKVGDAAVRTALHDAANALLTRATRFSTLKRWALDVAKRRGMRRAKVALARKLATVLHRMWADGTEFVWGKDPAAAAAPAA

SEQ ID NO: 15860 - protein, 339 aa, unidentified
  source 1..339: note = protein_9743418
  REGION 6..146: note = RuvC_domain
  SITE 9: note = RuvC_P1
  SITE 52: note = RuvC_P2
  SITE 87: note = RuvC_P3
  SITE 89: note = RuvC_P4
  SITE 92: note = RuvC_P5
  REGION 211..298: note = Tnp_domain
  SITE 219: note = Tnp_P1
  SITE 249: note = Tnp_P2
  SITE 257: note = Tnp_P3
  SITE 258: note = Tnp_P4
  SITE 270: note = Tnp_P5
MEITTIGLDLAKSVFQLHAVDTDGAIVWRKKVRRGALLETLAQVPACLVGMEACATAHHWAREISALGHEVRLMPPVYVKAYLRRQKNDAADAEAICEAVRRPTMRFVPIKGAERQAVLVLHRSRELLVRQRTMLINAVRGHCAEFGLVAAQGVIGSRDLVERIRQADNTVLPDMAKDAMMLLIEQLHALVRQIQALNRRLLVWHRQDQASQRLATIPGVGVISATALAASVTDPSQFRSGREFSASLGLVPRQNSSGGKDRLGHISKMGDRYLRKLLVVGSTSVVRRARTAGTAANWVRSLLERKPARLVTVAMANKTARIVWAVLARGETYRSPAAI

SEQ ID NO: 15861 - protein, 326 aa, unidentified
  source 1..326: note = protein_a345986
  REGION 8..155: note = RuvC_domain
  SITE 11: note = RuvC_P1
  SITE 60: note = RuvC_P2
  SITE 100: note = RuvC_P3
  SITE 102: note = RuvC_P4
  SITE 105: note = RuvC_P5
  REGION 195..282: note = Tnp_domain
  SITE 203: note = Tnp_P1
  SITE 233: note = Tnp_P2
  SITE 241: note = Tnp_P3
  SITE 242: note = Tnp_P4
  SITE 255: note = Tnp_P5
MEQELHFIGIDVSKAKLDVDVLRPDGRHRSKKFANTLKGHDELLRWLNSHQVAPAHICMEATSIYMEDVAAHLCDAGFTVSVINPALGKAFAQSEGLRSKTDAVDARMLAEFCRQKRPAAWEAPHPVERSLRALVLRHQSLTDMHTQELNRLETAREVQRPSIDAHLLWLGTEIKRIEKQIKELTDDDPDMKHRRKLLESIPGIGEKTSAVLLAYMGLKDRFGKARQFAAFAGLTPRQHESGSSVRGMSRMSKAGHASLRRALYMPAMVAVSKTEWGRAFRDRLSGNGKKGKVIIGAMMRKLAQVAYGVLKSGEPFDVSRHLTVTA

SEQ ID NO: 15862 - protein, 341 aa, unidentified
  source 1..341: note = protein_f92d773
  REGION 7..149: note = RuvC_domain
  SITE 10: note = RuvC_P1
  SITE 53: note = RuvC_P2
  SITE 88: note = RuvC_P3
  SITE 90: note = RuvC_P4
  SITE 93: note = RuvC_P5
  REGION 211..296: note = Tnp_domain
  SITE 219: note = Tnp_P1
  SITE 249: note = Tnp_P2
  SITE 257: note = Tnp_P3
  SITE 258: note = Tnp_P4
  SITE 270: note = Tnp_P5
MEQVHMIGIDLAKQSFQLHGARADGSIAFRKKIGRTRMLGFLASQPRCLVAMEACASAHYWGRQISKLGHEVKLMPPVYVKPFVKRHKNDEADAEAICEAASRPTMRFVAVKSEAQQARGMLFRTRDLLVRQRTQTINALRGHLAEYGVIAPQGCAHLARLSVAVRVPDSGLPEAVRELGGVLLDQIAGLKAKILELERQLRTSARQDEEARRLMSIPGIGPITASAILAFAPPLESFKCGRDFSAWLGLVPRQHSTGGKPRLGRMSKMGQRDIRRLLITGAMSVVRCAVRRGAPPGSWLARMLARKPRMLVAVALANRTARIVWALMTNMEVYQEPVPVA

SEQ ID NO: 15863 - protein, 393 aa, unidentified
  source 1..393: note = protein_9a9e9fc
  REGION 4..163: note = RuvC_domain
  SITE 7: note = RuvC_P1
  SITE 60: note = RuvC_P2
  SITE 101: note = RuvC_P3
  SITE 103: note = RuvC_P4
  SITE 106: note = RuvC_P5
  REGION 266..355: note = Tnp_domain
  SITE 274: note = Tnp_P1
  SITE 304: note = Tnp_P2
  SITE 312: note = Tnp_P3
  SITE 313: note = Tnp_P4
  SITE 328: note = Tnp_P5
MICVGIDVAKDKHDCFILNSESEVQADVFTIQNNAEGFDTLLQTIRRSTRPEDKIKVGLEATGHYCYNILGFLLNKGLPTYVINPLHTNLYRKSLSLRKTKTDRVDARTIAAMLMSDVDLKSYTDTAYHNEELKSLTRYRFNKVCERAKLRQSVSRLVTILFPELEKLVPTLHMVSVYALLSEFPGAKQVAKAHLTHLKAVLYDASKGRYGREMATTLRDAARCSVGSVMPAKSLELQHTIRLIRELDAEIEDIETAIQSMMDEIQSPITTIPGIGVRMGAMILAEIGDFSRFDSPDKILAYAGMSPSTYQSGQLSLAGTYSHMEKRGSRYSRYALYNATKYVCLWDPTFAAYLAKKRAEGKHYNVAISHATKKLVRLIYAMEKSQQPYNCAA

SEQ ID NO: 15864 - protein, 398 aa, unidentified
  source 1..398: note = protein_4eaa831
  REGION 4..163: note = RuvC_domain
  SITE 7: note = RuvC_P1
  SITE 61: note = RuvC_P2
  SITE 102: note = RuvC_P3
  SITE 104: note = RuvC_P4
  SITE 107: note = RuvC_P5
  REGION 269..356: note = Tnp_domain
  SITE 277: note = Tnp_P1
  SITE 307: note = Tnp_P2
  SITE 315: note = Tnp_P3
  SITE 316: note = Tnp_P4
  SITE 329: note = Tnp_P5
MLYAGIDVAKHKHDLAVIDSQGEVFIRHLKIQNNREGFTHLQMTFENLRVTTQQEIQIALEDTGHYSYNLIRFLRTHSYSTFSYNPFLIKEFAKKQTLRKTKTDKKDAVTIARKLREDVDKTLFETDTRILELKYATRNVSRLQQARAKQKTNYTRLLDLLFPELAPSLEGQNAHHNQAIYEMLKVFPSPQKIAQAHLTRLTNLLSQSSRGKYGKEQAIAFKQLAASTIGQASAILEFELLQTIDLIEYFTTLLKSAEKEVEKLMKTIDSPILTIPGIGVKLGAIILAEIRSIDHFQTPAQLLAFAGSEPSISTSGENQQENGHMVKRGSTSLRWALHEAARLSTVWAPPMKKYLNKKLEEGKHYTVAITHVVKKLVRIIFHILKTGEPYQENKVVVN

SEQ ID NO: 15865 - protein, 397 aa, unidentified
  source 1..397: note = protein_14afd79
  REGION 4..160: note = RuvC_domain
  SITE 7: note = RuvC_P1
  SITE 57: note = RuvC_P2
  SITE 97: note = RuvC_P3
  SITE 99: note = RuvC_P4
  SITE 102: note = RuvC_P5
  REGION 274..361: note = Tnp_domain
  SITE 282: note = Tnp_P1
  SITE 312: note = Tnp_P2
  SITE 320: note = Tnp_P3
  SITE 321: note = Tnp_P4
  SITE 334: note = Tnp_P5
MIAVGIDVSKSKSTVAILSSSGEILAKPFDIQHIESELNSFISYLTSLDEDVKIVMEATGHYHLPILKQLLAANLFVCVMNPYLMKKYGDNEIRKGKTDKKDAMRMAVYALEKSYALTPYSIVDQRYADLKFLSRQYNQRVATKVKCNVYLLNLLDEVMPGIDKILMSKSQNPENNILYCFIEKYKNFENIKTMGQKRFLNSYIKLAEKVGSRTYQAKGLQIYELAKNSITTRGTDPYTELALTQCVKMQKLAEKDAKDLMVQMQSIAILLPEYPIVRAMGGVGDRLAPRLIAEIGDVRRFKSGKALNAFAGNDAPPYQSGQFDSSNRHISKRGAPALRKACYEVMQCLKMHKPTDDPVYQFMIKKELEGKPLNVAKMAAINKFLRIYYARVMEIYK

SEQ ID NO: 15866 - protein, 341 aa, unidentified
  source 1..341: note = protein_5fce928
  REGION 6..146: note = RuvC_domain
  SITE 9: note = RuvC_P1
  SITE 52: note = RuvC_P2
  SITE 87: note = RuvC_P3
  SITE 89: note = RuvC_P4
  SITE 92: note = RuvC_P5
  REGION 211..297: note = Tnp_domain
  SITE 219: note = Tnp_P1
  SITE 249: note = Tnp_P2
  SITE 257: note = Tnp_P3
  SITE 258: note = Tnp_P4
  SITE 270: note = Tnp_P5
MEIDILGIDLAKQVFQLHGADRRGRAVHRAKVSRGSLFEAVRTLAPGVVVMEACGTAHHWARRFQSLGIEVRLISPQYVTPFVKTNKNDRNDAEAIVEAASRPTMRFVTVKSVEQQDILAAHRMRAILIRHRTALINQMRGLLGERGFTISRSPEAFKCAIPELLRTAGDELTAFCQTLLSELLQHLTAIEDRIHLIDTSIQTFMKHSTLCKKIAAVPGIGPITATAIVGAVGNATQFRNGRHLAAWLGLVPRQYSSGGKSRLQGISRRGDTYLRTLLIHGARAVLRYVKGKTDPHSVWLQQMIARRGHNCTAVALANKNARIIQALLSGEASYVAPGTTA

SEQ ID NO: 15867 - protein, 405 aa, unidentified
  source 1..405: note = protein_2f3d8c9
  REGION 4..163: note = RuvC_domain
  SITE 7: note = RuvC_P1
  SITE 59: note = RuvC_P2
  SITE 100: note = RuvC_P3
  SITE 102: note = RuvC_P4
  SITE 105: note = RuvC_P5
  REGION 277..363: note = Tnp_domain
  SITE 285: note = Tnp_P1
  SITE 315: note = Tnp_P2
  SITE 323: note = Tnp_P3
  SITE 324: note = Tnp_P4
  SITE 337: note = Tnp_P5
MYSVGIDVSKGKSTVCILAPLGEVIRSPYEITHTEPDLKELVKRVRSYGGKNDIRVVMEATGSYSLPVLHYLLDQGLFVCQVNPLAMKKYRSDINFRGVKTDRIDALSIAQYGIDKWQQLCEFQRADQTYEAMRLLSRQYLAYQRPHVLLTQNLDHVVDLVMPGIKDEFDGYDPATGIDRLSDFLEEFWHYGCITSLGPKKFEDRFRRWAKKKGYRSRADKPSRIYQIASEGIPSLACDQITKQMVQHTIEALRGLNHVLYEILAQIRELAEHRPEYQAVRAMSGVGEVMAPLLVAEVGDPRRYHSGKALVACVGIDVPPYESGQFKAKERRITRKGSKQLRKLGYLAVQGLDKIKPTKDTAVYDKLMKKRAEGKPYKLAIVAAMNKFYRIYYARAMEAYEAIGQ

SEQ ID NO: 15868 - protein, 346 aa, unidentified
  source 1..346: note = protein_28c714c
  REGION 16..171: note = RuvC_domain
  SITE 19: note = RuvC_P1
  SITE 74: note = RuvC_P2
  SITE 114: note = RuvC_P3
  SITE 116: note = RuvC_P4
  SITE 119: note = RuvC_P5
  REGION 242..329: note = Tnp_domain
  SITE 250: note = Tnp_P1
  SITE 280: note = Tnp_P2
  SITE 288: note = Tnp_P3
  SITE 289: note = Tnp_P4
  SITE 302: note = Tnp_P5
MSNKVIFNLDELFISVGIDVGADFSWMSIALPNQQFVGKPYKILHNSIDSLTTAVSKIKEAEELYSLESRIFLESTGIYHYPLFCYLRDKGFNCSVINPIITKNSTNINIRKVHNDRFDSKKAALVGLKPDLKVSLMPSDLALNCRNLCRASAFLKADKQEIIDIIKSTARFGLTYAQNKYNAIIQAATDANQFGYIIDSNIKRIRLYISFIRKYDEEINSILESLHELVDANEDSDFVKQIHLIETFKGAGFLSAVSIMGEIGDFSAFSKPKQLFAYFGLDPAVKQSGKFEGTKVQMSKRGSAIARRVIHTLTLQSINTINPMNQYLSKNDIFTKGKVRPFLVRK

SEQ ID NO: 15869 - protein, 405 aa, unidentified
  source 1..405: note = protein_921e079
  REGION 4..160: note = RuvC_domain
  SITE 7: note = RuvC_P1
  SITE 57: note = RuvC_P2
  SITE 97: note = RuvC_P3
  SITE 99: note = RuvC_P4
  SITE 102: note = RuvC_P5
  REGION 274..361: note = Tnp_domain
  SITE 282: note = Tnp_P1
  SITE 312: note = Tnp_P2
  SITE 320: note = Tnp_P3
  SITE 321: note = Tnp_P4
  SITE 334: note = Tnp_P5
MNAVGIDVSKGKSTVTIRRPGDIVIMSPRDIPHTQSAINALIELISGLDGETKVCMEHTGRYYEPVATWLSDAGIFVSAVNPMLIKDFGDDSLRTPKTDKADSQKIARYTLDRWAKLKQYGSMDKTRNQLKTMNRQFGFYMAQKTAMKNNLIALLDQTYPGVNGFFDSPARSDGSQKWVDFVHTYWHVDCVRSKSLDAFTEHYQNWCRRKRYNFSADKAAKIYQLSSDLIAVFPKNDSTKLLIRQAVAMLNTASETVESLRLKMDETASLLPEYPIVMAMNGVGPTLGPQLMAEIGDVTRFTHRGALTAFAGVDPGKDDSGQRVRKSMPTTKKGSPYLRKTLFQIMDGLIKRSPVGDPVYAFMDKKRAQGKPYYVYMTAGANKFLRIYYGRVKEYLSTLTESEET

SEQ ID NO: 15870 - protein, 346 aa, unidentified
  source 1..346: note = protein_d06a361
  REGION 5..152: note = RuvC_domain
  SITE 8: note = RuvC_P1
  SITE 55: note = RuvC_P2
  SITE 92: note = RuvC_P3
  SITE 94: note = RuvC_P4
  SITE 97: note = RuvC_P5
  REGION 212..317: note = Tnp_domain
  SITE 220: note = Tnp_P1
  SITE 250: note = Tnp_P2
  SITE 258: note = Tnp_P3
  SITE 259: note = Tnp_P4
  SITE 271: note = Tnp_P5
MEYYAGIDVSLECSTVCVVDGSGKIVREAIVGSEPEPLIGWFGSLGLGLTRVGLEAGPLSQWLYAAIKQAGLAVELLETRHVHDAFSAMPVKSDRNDARGIAQLMRLGWFRPVHCKSIGAQEVRAVLTARKLVQTKRQDVENSLRGILRGFGLKVGKTTDLSFAGRIQELVKGHPNLEMIAEALLSVRAVLLREFNVFEKRVRAMSRLDAKAKLLMSTPAVGPIVSLTYAAAVDDPARFKSSKRAGAHFGLTPKRYQSGETDYSGRISKIGDASVREALYQAAHVMLTKPVKGCPQLKSWAMRIARRAGMSKAKVALARKLAVIMHRMLKDGVPFNPVTKATTATV

SEQ ID NO: 15871 - protein, 340 aa, unidentified
  source 1..340: note = protein_e227609
  REGION 6..147: note = RuvC_domain
  SITE 9: note = RuvC_P1
  SITE 52: note = RuvC_P2
  SITE 87: note = RuvC_P3
  SITE 89: note = RuvC_P4
  SITE 92: note = RuvC_P5
  REGION 210..301: note = Tnp_domain
  SITE 218: note = Tnp_P1
  SITE 248: note = Tnp_P2
  SITE 256: note = Tnp_P3
  SITE 257: note = Tnp_P4
  SITE 270: note = Tnp_P5
MQAIRFGIDLAKNVFQVHGVDAAGRVVVQRQLRRAQVEKFFAAQPPALIGMEACGSAHHWARTLSALGHDVKLMPPAYVKPYVQRNKNDARDAHGCCEAVSRPDMRFVPIKSVEQQWARALHRTRDLLVRQRTQLANAMRGLLYEMGQTSAKGAAGIETLLRRVEAADEAIPAALLICLVPLAGQWRALDGEIGKLDKQILAQVRQQRAALRLTTIPSVGPIIAHATVAAIGDGRQFASARDFAAWLGLTRKTHDTGGKHRPTGHISRAGDKDLRRLLILGASSWLRQVRAKPDRGSPWIRGLLARRPVKVAVVAQAAKTARIIWAMLQSGQQYRAPAVA

SEQ ID NO: 15872 - protein, 392 aa, unidentified
  source 1..392: note = protein_9bf5724
  REGION 5..164: note = RuvC_domain
  SITE 8: note = RuvC_P1
  SITE 61: note = RuvC_P2
  SITE 102: note = RuvC_P3
  SITE 104: note = RuvC_P4
  SITE 107: note = RuvC_P5
  REGION 267..354: note = Tnp_domain
  SITE 275: note = Tnp_P1
  SITE 305: note = Tnp_P2
  SITE 313: note = Tnp_P3
  SITE 314: note = Tnp_P4
  SITE 327: note = Tnp_P5
MTVSVGIDVSKDKHDCFIQSAEGEVLMDVFMISNNMDGFRTLLEKIRVCVSHQDKIKVGLEATGHYSYNLLGFLLDNGLTTYVLNPLRTNLYRKSPSLRKTKTDRVDARTIASMLLSDVGLKPYTDTAYRNEELKSLTRYRFDKVKERAKLKSSIARLVCILFPELETLVSSLHIASVYSLLEEFPGANQVAAAHLTRLKALLETASKGRYKRNMALEIRDAARNSIGSWMPAKSLELQHTIRLIRELDNEIAEIEEQIQSLMIELDSPITTIPGLGFRMAAMILAEVGDFTRFASPDKLLAYAGMSPSTYQSGQLKNCYPHIEKRGSRYLRYALYNATKYVCHWDPTFAAYLAKKRAEGKHYNIALSHAAKKLVRLVFAMEKSRQPYCSAT

SEQ ID NO: 15873 - protein, 334 aa, unidentified
  source 1..334: note = protein_413f7d2
  REGION 7..149: note = RuvC_domain
  SITE 10: note = RuvC_P1
  SITE 53: note = RuvC_P2
  SITE 88: note = RuvC_P3
  SITE 90: note = RuvC_P4
  SITE 93: note = RuvC_P5
  REGION 209..299: note = Tnp_domain
  SITE 217: note = Tnp_P1
  SITE 247: note = Tnp_P2
  SITE 255: note = Tnp_P3
  SITE 256: note = Tnp_P4
  SITE 268: note = Tnp_P5
MENIARIGIDLGKNSFHIHCQDHRGKAVYRKKFTRPKLIEFLATCPATTIAMEACGGSHFMARKLAELGHFPKLISPQFVRPFVKSNKNDFVDAEAICEAASRPSMRFVQPRTESQQAMRALHRVRESLVQDKVKTTNQMHAFLLEFGISVPRGAAVISRLSTLLEDSSLPLYLSQLLLKLQQHYHYLVEQIKDLESQLKRKLDEDEVGQRLLSIPCVGTLTASTISTEIGDGKQYASSRDFAAATGLVPRQYSTGGRTTLLGISKRGNKKIRTLLVQCARVFIQKLEHQSGKLADWVRELLCRKSNFVVTCALANKLARIAWALTARQQTYEA

SEQ ID NO: 15874 - protein, 407 aa, unidentified
  source 1..407: note = protein_debe787
  REGION 9..154: note = RuvC_domain
  SITE 12: note = RuvC_P1
  SITE 58: note = RuvC_P2
  SITE 93: note = RuvC_P3
  SITE 95: note = RuvC_P4
  SITE 98: note = RuvC_P5
  REGION 249..336: note = Tnp_domain
  SITE 257: note = Tnp_P1
  SITE 288: note = Tnp_P2
  SITE 296: note = Tnp_P3
  SITE 297: note = Tnp_P4
  SITE 308: note = Tnp_P5
MEVVYRCCCGIDVHKKVIVACLVNGGEQELREFGTTTSEIKTLANWLTESGCEMIAMESTGVFWKPLYNLFELMDLDAMIVNAAHMKALPGRKTDVKDAEWIADLLRHGLLKASYIPNREQRELREITRYRKSLTEERCREVNRLQKILEGANIKLDSVVKDITGKSARKLLQRIIDDDIPDSDEVSKLVHGRMRPKLEQIVASIEGITTPLQRKLLAQIIDHIDDLNRRIGELDKLVQEYMAEYEAAIKAIDEIPGIARRSAEVILAEIGLDMGRFPSAAHLCSWAGVCPGNYQSAGRREHGKTTKGNKALKTILTQCAKSAKTVKSSYFFAQYQRISARRGKNRATLAVAHSMLIAIYHILKNKTAFHDLGSDYYDSFNRDRKINSYLKRLKALGWEPDAIPSSA

SEQ ID NO: 15875 - protein, 387 aa, unidentified
  source 1..387: note = protein_7653395
  REGION 5..158: note = RuvC_domain
  SITE 8: note = RuvC_P1
  SITE 56: note = RuvC_P2
  SITE 97: note = RuvC_P3
  SITE 99: note = RuvC_P4
  SITE 102: note = RuvC_P5
  REGION 220..305: note = Tnp_domain
  SITE 228: note = Tnp_P1
  SITE 258: note = Tnp_P2
  SITE 266: note = Tnp_P3
  SITE 267: note = Tnp_P4
  SITE 278: note = Tnp_P5
MTVIIGMDPHKRSATIEIIDPSATVVATGRYSTDNAGYQEMLIAAQQFPERVWAIEGCNGVGRHLAHRLIHDGETVVDVPAKLSAQVRVFATGNGRKTDPVDAHSVALAALRSPNLRRVQADPELVALGLLVDRRDELGRARTELLNRIHRLLLELVPGGAKRFLSAMQARALADTIAPADPAARVRLRLVLELIDDLEVVDRKTKAADKELKQLVLDRGSTLMDLYGIGPSSAARLLADADDIHRFASRDRFASWNGTAPLDASSGQQQRHRLSRAGNRRINRVLHVMAIVQLRYQTAGRVYYDGKRAAGKTSMESMRALKRRLSNVVYNRMLADQRRRDTAGPGGHSGTTIESSATGLTPHTDPSDKPQPGPTSIQPNAQLTTAP

SEQ ID NO: 15876 - protein, 344 aa, unidentified
  source 1..344: note = protein_7fd4688
  REGION 6..147: note = RuvC_domain
  SITE 9: note = RuvC_P1
  SITE 52: note = RuvC_P2
  SITE 87: note = RuvC_P3
  SITE 89: note = RuvC_P4
  SITE 92: note = RuvC_P5
  REGION 211..297: note = Tnp_domain
  SITE 219: note = Tnp_P1
  SITE 249: note = Tnp_P2
  SITE 257: note = Tnp_P3
  SITE 258: note = Tnp_P4
  SITE 270: note = Tnp_P5
MKIKTVGIDLAKNVFQVHGVDERGKTVLRKQIKRDQMASFFINLPTCLIGMEACGSAHYWARKLQAMGHTVHLMAPQFVKPYVKSNKNDAADAEAICEAVGRPSMRFVPIKNIEQQSVLSLHRVRQGFVKARTAQANQIRGLLGEFGLVVPQGIAYVTQRVPELIEDALIELPGSFRILITRLLEHLQLLHRQIDEIEAQIKAWHRSNEASQRLTQVPGVGPITATALVATIGDAKNFDNGRQLAAWLGLVPRQHSSGGKRNLLGMSKRGDAYLRTLLIHGARSVIYRAMQKADPSNWVFNVASRRNKNIAAVALANKTARTIWALLIHDRQFRLDYRAANAAA

SEQ ID NO: 15877 - protein, 343 aa, unidentified
  source 1..343: note = protein_7ad63db
  REGION 9..150: note = RuvC_domain
  SITE 12: note = RuvC_P1
  SITE 55: note = RuvC_P2
  SITE 90: note = RuvC_P3
  SITE 92: note = RuvC_P4
  SITE 95: note = RuvC_P5
  REGION 213..303: note = Tnp_domain
  SITE 221: note = Tnp_P1
  SITE 251: note = Tnp_P2
  SITE 259: note = Tnp_P3
  SITE 260: note = Tnp_P4
  SITE 272: note = Tnp_P5
MANPAISILGVDLGKNSCSIAGLDAAGAVVMRRRMTREGLVKFVSKLPQCVVAMEACCGAHFLSRIFVTHGHTVRLMPPEYVQPYVKAQKTDDRDAEAIAEAATRPTMRLVTPKSEAQLDLQILHRARARLVAERTRLTNQLRAMLLERGIILPKRRSPLIKRLDELMANNPPISARMLRLLNDLREEWADLDRRISAYDEELIAMTREDDLARRLVTVPGIGVINATALVAAVGDASAFAKARDLAAWLGLTPRQHSTGGKTKMLGISKRGNRYLRTQLIHGARAAMRHFAERPTALGAWIRNLLARAHPNVVVVALAAKLARIAWAVLRRGDAYRTQGSLV

SEQ ID NO: 15878 - protein, 343 aa, unidentified
  source 1..343: note = protein_c99173f
  REGION 6..146: note = RuvC_domain
  SITE 9: note = RuvC_P1
  SITE 52: note = RuvC_P2
  SITE 87: note = RuvC_P3
  SITE 89: note = RuvC_P4
  SITE 92: note = RuvC_P5
  REGION 211..296: note = Tnp_domain
  SITE 219: note = Tnp_P1
  SITE 249: note = Tnp_P2
  SITE 257: note = Tnp_P3
  SITE 258: note = Tnp_P4
  SITE 270: note = Tnp_P5
MQIHSVGIDLGKTTFHLVALGAAGKVIVRKKFNQKQLLAYTANVPASLIGLEACSGAHFLGRALRQQGHDVRLIPAQFVKPFVKSNKNDFVDAEAIAEAVERKNMRFVPIKTDDQLDLQAIHRVRDRLISRRTAVINQVRAFLLERGLVFAKTPAKLRAALPDILENADLDLTPQMRSLIDLLSKEWKTVEDQIEGLSLELERISAADPGCTRIRQIPGIGPIVATAIVAAIGNGAAFRKGRDFAAWLGVVPRQYSTGGKARLLGISKRGNVYLRKILIHGARAAVLRIKRDRAPIGAWLEALDARAPKNVVVVAMANKLARIAWAVLSSGEDYRPMGNMVAA

SEQ ID NO: 15879 - protein, 405 aa, unidentified
  source 1..405: note = protein_6bcc68d
  REGION 6..162: note = RuvC_domain
  SITE 9: note = RuvC_P1
  SITE 58: note = RuvC_P2
  SITE 99: note = RuvC_P3
  SITE 101: note = RuvC_P4
  SITE 104: note = RuvC_P5
  REGION 271..357: note = Tnp_domain
  SITE 279: note = Tnp_P1
  SITE 310: note = Tnp_P2
  SITE 318: note = Tnp_P3
  SITE 319: note = Tnp_P4
MGKVFVGHDWAEDHHDVFVEDDTGRRLGGGRLADGVEGIARFHEVVGGHVDDPGDVVIATETDRGLLVNALVAAGHTVLAVNPMSTSRYRERFTTSGAKSDPGDARVLAELARSDAHLHRPVAGDSDLATAIKVLARAHQSMIWTRQRQADQLRSTLREFYPAALTAFDELAGRDAAAILAIASTPVAARQLSLSKIGAALRRAGRQRRVEQRAVEIQTALRSEQLHAPDPVADAMGATVTALVAVITELNTQIANLETQLAASFEQHPDAKIIRPLPGLGMTLGARVLAEFGDDPNRYVDAKSRKNYSGMSPITKASGKPRAVLARYARNRRLADACYLWAFATLTASPGARAFYDQHRARGDTHNRALRALANRLVGILHGCLNHGTLYDEHTAWAHRQQQAA

SEQ ID NO: 15880 - protein, 344 aa, unidentified
  source 1..344: note = protein_2ca25ad
  REGION 6..148: note = RuvC_domain
  SITE 9: note = RuvC_P1
  SITE 52: note = RuvC_P2
  SITE 87: note = RuvC_P3
  SITE 89: note = RuvC_P4
  SITE 92: note = RuvC_P5
  REGION 211..297: note = Tnp_domain
  SITE 219: note = Tnp_P1
  SITE 249: note = Tnp_P2
  SITE 257: note = Tnp_P3
  SITE 258: note = Tnp_P4
  SITE 270: note = Tnp_P5
MEIRTSGIDLAKSVFQLHGVDEHGKTVLRKQLRRDQVTKFIANVPACLVGMEACGSAHHWARVLQRFGHSVGLMSPQLVKPYVKTNKNDAADAEAICEAVARPNMRFVPIKSVEQQAVLSLHRVRQGFDTARTGQANQIRGLLAEFGIVLPKGICSLRNQLWGVVEKAGDQLPEVFRQLMRRLYAHLMELDRQVNELEAQIKQWHRSCGLSQRLEETPGIGPLTATALVTSIADARSFKNGRQLAAWLGLVPRQHSSGGKPTLLGISKHGDVYLRTLLIHGARSAILAAKRHATSNIWLSNLLGRRNPNVAAVALANKNARTIWALLAYDREFQVDYVPRLTGA

SEQ ID NO: 15881 - protein, 378 aa, unidentified
  source 1..378: note = protein_9b5abad
  REGION 6..160: note = RuvC_domain
  SITE 9: note = RuvC_P1
  SITE 58: note = RuvC_P2
  SITE 98: note = RuvC_P3
  SITE 100: note = RuvC_P4
  SITE 103: note = RuvC_P5
  REGION 265..360: note = Tnp_domain
  SITE 273: note = Tnp_P1
  SITE 304: note = Tnp_P2
  SITE 312: note = Tnp_P3
  SITE 313: note = Tnp_P4
  SITE 325: note = Tnp_P5
MPEIWAGVDIGKEHHHCVVINADGERLLSRRVLNDETELLQLIGDVLEISTDVLWAVDLNHGAAALLIGLLLGHGQPMAYLTGLAVHRASVTYKGEGKTDAKDAFVIADQARVRRDLGLLRPGDEIAVDLRTLTARRLDVVFDRTRQINRLRAQLLEVFPALERSLDLVNKGPVMLLTGYQTPAAIRRAGVKRIETWLKNRKVRGAAALAKTAVEAAQAQMTALPGEKLAAAMVVRLAKGVMALDEEIVELDALIEATFREHPHAEVIRSLPGMGPKLGAEFIAATGGDMDAFGSADRLAGFAGLAPRPRDSGRVSGNLRRPRRYHRGLLRSMYLSAMVSITTCPRPRRTTSGREARGRATSRPCSRSPAAGSTSCGR

SEQ ID NO: 15882 - protein, 339 aa, unidentified
  source 1..339: note = protein_a7dd2b5
  REGION 6..147: note = RuvC_domain
  SITE 9: note = RuvC_P1
  SITE 52: note = RuvC_P2
  SITE 87: note = RuvC_P3
  SITE 89: note = RuvC_P4
  SITE 92: note = RuvC_P5
  REGION 210..298: note = Tnp_domain
  SITE 218: note = Tnp_P1
  SITE 248: note = Tnp_P2
  SITE 256: note = Tnp_P3
  SITE 257: note = Tnp_P4
  SITE 269: note = Tnp_P5
MNWTAVGVDIAKNVFQVHYVDQVTGEIVNKPIKRAQFLEHFANRAPCLIGMEACSGAHHWARQLVKMGHEVRLIPAEFAKAFNIRNKNDAADARAIWLAVQQPGKPVAVKTETQQAMLALHRMRQQLIKFRTMQINNLRGLLTEYGEVMGKTRAALDKAIPEVLGRVAERLPAVVIDTLREQWNGLAKLDEQVAQIERRMREWKKEDEAVKAISKIPGVGLLTATAAVAMMGDARAFKSGREFATWAGLVPKQTGSGGKVTLHGISKRGDTYLRTLLIHGARAVLRHAKEPGPWVEQMIKRRPMNVVIVALANKMARTILAVLAHDRPYQKNFVSVKPA

SEQ ID NO: 15883 - protein, 353 aa, unidentified
  source 1..353: note = protein_a1c56c7
  REGION 28..174: note = RuvC_domain
  SITE 31: note = RuvC_P1
  SITE 79: note = RuvC_P2
  SITE 119: note = RuvC_P3
  SITE 121: note = RuvC_P4
  SITE 124: note = RuvC_P5
  REGION 221..307: note = Tnp_domain
  SITE 228: note = Tnp_P1
  SITE 258: note = Tnp_P2
  SITE 266: note = Tnp_P3
  SITE 267: note = Tnp_P4
  SITE 280: note = Tnp_P5
MSKQVISTGKPAISDNKLTDPGQASVFCGIDVSRETLAVAVIALDQSIEQREFFNTIGGHKALLVWLGKRKALVRVSLEATGIYSLDLALALDAADGIEVAVLNPKMVNRFAQTLRRSKTDRADAQVLTEYSRRMPFQPWQRPRLMALQLRAVTRQIESLTVQHTREQNRLHASEGSEATPRCVIHDLRQSMAGLKRRIEKLRREAIKLLQGDDEMRLRFGLLIAMPGIGEVSALHLLGELATLAPEMKVRQWVAHSGLDPAHRESGSSVHKAARISRAGNRHLRRALYMPALTAVRWNPHLKAFYEALLARHKRKLQALMAVARKLLHAIYGIFKTRTPYDGKKLFPQLDIA

SEQ ID NO: 15884 - protein, 353 aa, unidentified
  source 1..353: note = protein_45c5e6b
  REGION 4..158: note = RuvC_domain
  SITE 7: note = RuvC_P1
  SITE 56: note = RuvC_P2
  SITE 97: note = RuvC_P3
  SITE 99: note = RuvC_P4
  SITE 102: note = RuvC_P5
  REGION 220..306: note = Tnp_domain
  SITE 228: note = Tnp_P1
  SITE 258: note = Tnp_P2
  SITE 266: note = Tnp_P3
  SITE 267: note = Tnp_P4
  SITE 278: note = Tnp_P5
MIVIGIDPHKSTHTATAVDPATNTDLGSIRIDATITGYKTLTAWAKAWPTRKWAIENAEGLGHHLAQWLLVLGELVLDVPTTSTARIRQLSRGSRRKNDRIDAAAAACVAALQGDARPVDPEGPTDILALLDERRTNLSGSRTRLVNQLHALLRQLLAGGAPTSLTAAAATALLRGYRARSEVDRVRVGLCRNLVADIHRLDGQLAENEKQMTRALDEHGTRLREVDGIGPVTAACLIGRTGRVSRFPTAAAYANYNGSAPVQVASADADRHRLSRYGDRQLNSALYTVAMVQIRMPASAGRTYYDKKIAEGKSPRAATRSLKRHLSDHVWRIMLADEKRSYRQHEKESERAA

SEQ ID NO: 15885 - protein, 331 aa, unidentified
  source 1..331: note = protein_af26ff3
  REGION 5..153: note = RuvC_domain
  SITE 8: note = RuvC_P1
  SITE 55: note = RuvC_P2
  SITE 95: note = RuvC_P3
  SITE 97: note = RuvC_P4
  SITE 100: note = RuvC_P5
  REGION 196..283: note = Tnp_domain
  SITE 204: note = Tnp_P1
  SITE 234: note = Tnp_P2
  SITE 242: note = Tnp_P3
  SITE 243: note = Tnp_P4
  SITE 256: note = Tnp_P5
MSVCIGLDIGSRTSIAGVRKDGQPAGQWDIAQTAAGRKAAVKKLQALKPKAIVMEATGIYYLDLAIELHAADLPVSVINPKSFHNFAKLMLVNSKTDAIDAQLLSEYGERMTPRLWTPPSPVQLELRALGRHINRLVGHRTRAKNELHALQATATTPSMLIEDQEDAVAALDNRIERFRKAGRELIAQCSRLTRQYKQLLAGPGIGEVSALAALAELTTLPETLKSSQVARHAGLDVRQTQSGTSIDKPGRLGKSGNAYLRAAMYMPALTAVRCDPYAKAFYESLVSRGKKKMQAIAAVMRKYLTGIWACMRGDEPFDTAKLFSPEHLRKA

SEQ ID NO: 15886 - protein, 338 aa, unidentified
  source 1..338: note = protein_61eec1b
  REGION 6..148: note = RuvC_domain
  SITE 9: note = RuvC_P1
  SITE 52: note = RuvC_P2
  SITE 87: note = RuvC_P3
  SITE 89: note = RuvC_P4
  SITE 92: note = RuvC_P5
  REGION 211..298: note = Tnp_domain
  SITE 219: note = Tnp_P1
  SITE 249: note = Tnp_P2
  SITE 257: note = Tnp_P3
  SITE 258: note = Tnp_P4
  SITE 270: note = Tnp_P5
MHITTLGIDLAKQVFQLHGVDDRGHAVLSRRVRRQKLMEVITSLPPCVIGMEACASAHHWGRAFEQCGHTVKLMHPKYVKPYVKTNKNDCRDAEAICEAVSRPTMRFVAIKTVDQADLQAVHRSRSLLIKTRTALINQIRGLLGEYGLVIARSPEHVRPALVALLNDEQAGLTPFAHDTFSELYEQLVELEQRIVRVNQRLDRIFNAHPVCRKLAAVPGIGPLTATALLAAVNSAQAFQNGRHLAAWLGLVPRQFSSGGHSRLGKLSKRGNRYVRTLLIHGARAVVQRAAHKTDARGRWIWDLKCRKGTNVAAVAVANKNARVIWALLAHDDVYRQPA

SEQ ID NO: 15887 - protein, 349 aa, unidentified
  source 1..349: note = protein_30d22a8
  REGION 7..149: note = RuvC_domain
  SITE 10: note = RuvC_P1
  SITE 53: note = RuvC_P2
  SITE 88: note = RuvC_P3
  SITE 90: note = RuvC_P4
  SITE 93: note = RuvC_P5
  REGION 212..297: note = Tnp_domain
  SITE 220: note = Tnp_P1
  SITE 250: note = Tnp_P2
  SITE 258: note = Tnp_P3
  SITE 259: note = Tnp_P4
  SITE 271: note = Tnp_P5
METITTLGLDIAKNVFQVHGIGENGEVVLRKTLRRSQMMTFFSTLSPCLIGMEACATAHHWARTLKASGHDVRLIPPAYVKPYLRRQKNDAADAAAICEAVTRPSMRFVPVKSEEQQATLMLHSARELLVSHRTALINAVRGHFAEFGMVVSQGARNGHLLITIILDKDNDDLSASARSALLPLAITLLDLDAQINTLSKAILTAHLSSDVSVRLATIPGIGPIVASSLSASIPDASLFKCGREFAAYLGLVPRQHSTGGKPRLGRITKMGNRRLRKLLVIGAHAALYSIKSGKTDTPLAIWARSLLEKKPFKLVAVALANKMARIAWAIMTQNTIYQPIPKGGALKTA

SEQ ID NO: 15888 - protein, 340 aa, unidentified
  source 1..340: note = protein_3ef6b89
  REGION 7..148: note = RuvC_domain
  SITE 10: note = RuvC_P1
  SITE 53: note = RuvC_P2
  SITE 88: note = RuvC_P3
  SITE 90: note = RuvC_P4
  SITE 93: note = RuvC_P5
  REGION 212..298: note = Tnp_domain
  SITE 220: note = Tnp_P1
  SITE 250: note = Tnp_P2
  SITE 258: note = Tnp_P3
  SITE 259: note = Tnp_P4
  SITE 271: note = Tnp_P5
MEKITTIGLDLAKHVFQVHGVDDSDGVVVRKQLRRGQMLMFFAGLPPCLIGMEACATAHYWARELTALGHDVRLMPPQYVKAYVKRNKNDAADAEAICEAVRRPSMRFVPVKTVEQQATLMLHRGRELMVRQRTMTVNALRGHLAELGVIAPQGLNKVAELIAIVRDSSDKRVPEEARPVLLTLAAQIEGLKVQIDGLELRIKAWHKSNPVSQRLASIPGVGPIIASAIATTVADPGVFRSGREFAAWLGLVPRQNSTGGKARLGAISKRGDGYLRHLLVTGAHAVLLRYKPARLDPWLISLLRRRPRMVVAVAVANKMARIAWAIMSRNESYRSATVAA

SEQ ID NO: 15889 - protein, 321 aa, unidentified
  source 1..321: note = protein_2425265
  REGION 1..80: note = RuvC_domain
  SITE 21: note = RuvC_P3
  SITE 23: note = RuvC_P4
  SITE 26: note = RuvC_P5
  REGION 187..277: note = Tnp_domain
  SITE 195: note = Tnp_P1
  SITE 225: note = Tnp_P2
  SITE 233: note = Tnp_P3
  SITE 234: note = Tnp_P4
  SITE 250: note = Tnp_P5
MSVVNPLESKYFGKRRLQRSKSDKADARTLAALGMHDQPRAQTPLAQSELREAARFSMRLVREQAEVCQRIQRLIDLGFPELREVWDDPTCVSALAVLRKAPTAAAVGRLRLDTLAALKRPGERGRAIGSAKAEQLHALAKASVAAPEMEAQVRFEMQLLIEQHDFLDRQIAVADARLATLLDGDTARRLLTIPGVGPATAGTLLAEIGDIWRFTDVDQLLAYAGVHPKEQSSGKKGERPETSWTMAKTGNAHLRAAAYRMAVVGITHNPVIRSHYARKRAAGKSPMNAVGHCMSKALALVWGVWRSGQDFDPRHGERRSA

SEQ ID NO: 15890 - protein, 392 aa, unidentified
  source 1..392: note = protein_acedaab
  REGION 5..163: note = RuvC_domain
  SITE 8: note = RuvC_P1
  SITE 62: note = RuvC_P2
  SITE 102: note = RuvC_P3
  SITE 104: note = RuvC_P4
  SITE 107: note = RuvC_P5
  REGION 267..356: note = Tnp_domain
  SITE 275: note = Tnp_P1
  SITE 305: note = Tnp_P2
  SITE 313: note = Tnp_P3
  SITE 314: note = Tnp_P4
  SITE 327: note = Tnp_P5
MEPVVGVDVAKGCSVMQAFTKRNEPYGKLESISHDENGFERLGEVLAGGHVATGITPVVVLEATGHYHKPLVAYLKRSGWTHFIVNPLQSKRAKGTQLRKVKTDATDTWHLADMYYRGDVEPHRTWDKAFTELQHVTRQHEFVTDMFVQAKLNTRALLDQVFPDYEKIFSNLFSITSLSVLKRCLEDDSENLMEVIQEGVGKSHSKRWVEEKAERIEVLLSIWRDYPISRAQTVMLSSMVTLLLTFIEQLGDLERQMNRIASTLPEVEWLKSIPGIGDKLAAAIVAEIGDIHQFEDAKQLVAYAGLDPTIYSSGKFTATSSRITKRGSKRLRRSLYLAVQCGVRKSANRRIWSYYDKKRKEGKPYKVVVIACANKLLHHIYAILSKSQPYKA

SEQ ID NO: 15891 - protein, 299 aa, unidentified
  source 1..299: note = protein_0349c53
  REGION 7..149: note = RuvC_domain
  SITE 10: note = RuvC_P1
  SITE 53: note = RuvC_P2
  SITE 88: note = RuvC_P3
  SITE 90: note = RuvC_P4
  SITE 93: note = RuvC_P5
  REGION 212..298: note = Tnp_domain
  SITE 220: note = Tnp_P1
  SITE 250: note = Tnp_P2
  SITE 258: note = Tnp_P3
  SITE 259: note = Tnp_P4
  SITE 271: note = Tnp_P5
MQAVTTIGFDIAKSVFQVHGVDTVGQVIIRRQLKRRQVIGFFQKLPACLVGIEACASSHYWSRELQALGHNVRLMPPAYVRPYVKRQKNDMADAEAICEAVTRANMRFVPTKTAEQQSGLMLHRTRHLFMRQQTSVINAIRAHLAEFGIVAPVGRRGVEELLRVVADPSDKRLPEIVRACLAALGSQLLSLKKQILDFDRMITAWHRSNQTSKRLNCIPGVGPLLSTALVASVADPKTFRSGRNFSAWIGLVPKQNSSGGRDKLGSISKQGDRYLRGLFVAGAFAVIRYAKIHGTKHRP

SEQ ID NO: 15892 - protein, 345 aa, unidentified
  source 1..345: note = protein_efbe2e2
  REGION 6..147: note = RuvC_domain
  SITE 9: note = RuvC_P1
  SITE 52: note = RuvC_P2
  SITE 87: note = RuvC_P3
  SITE 89: note = RuvC_P4
  SITE 92: note = RuvC_P5
  REGION 211..297: note = Tnp_domain
  SITE 219: note = Tnp_P1
  SITE 249: note = Tnp_P2
  SITE 257: note = Tnp_P3
  SITE 258: note = Tnp_P4
  SITE 270: note = Tnp_P5
MELSTVGIDLAKTVFHLVGLNLLGEVVVRKKVSRAQLLRFTANLSVKLIGMEACGGAHFLGRALRDQGHEVRLMPAQYVKPYVKTNKNDYIDAEAIAEAVSRPRMRFVPIKTDDQLDMQSLHRVRERWVVRRTAIVNQVRGLLLERGITLQKGRSHVDALLPRILEDADLKLSGALRNLLAQLKLELDQMAMRINEADMMLNRTARENASCRRLVAIPGIGPVTATALIAAIGNGAAFRKGREFAAWMGVVPGEYSTGGKQKLLGISKRGNSYLRRLFIQGARAVLQQSTKQTSGLSAWLANLKARTHTNVAAVALANKLARMAWAVLAKDEPYRPPMLANLVTV

SEQ ID NO: 15893 - protein, 424 aa, unidentified
  source 1..424: note = protein_1df236d
  REGION 9..157: note = RuvC_domain
  SITE 12: note = RuvC_P1
  SITE 63: note = RuvC_P2
  SITE 97: note = RuvC_P3
  SITE 99: note = RuvC_P4
  SITE 102: note = RuvC_P5
  REGION 259..347: note = Tnp_domain
  SITE 267: note = Tnp_P1
  SITE 298: note = Tnp_P2
  SITE 306: note = Tnp_P3
  SITE 307: note = Tnp_P4
  SITE 318: note = Tnp_P5
MKVTYQTCCGVDVHKSFLVATIIKTTAGIEPSYQKKRFSTFNNSILDFKSWLLENECHDVCMESTGKYWVPVFNLLEDQINVTIANPKWVKAVKGNKDDTKDSKWIGDLFRLGLVKSSYIPCRLIRILREYTRYRYKLVSCRSSEKNRYQNALTVCNIALDSVVSDIFGKSSSSIIDYLLEQSGTTINHEEIASKLLKSLKSKEDAVIESIEGYQMTDAQKYRMRLIRAHMDYITAEINDIDKQIESLISSDPDYDKAIRLLTTIPGVKRDSAITIISEIGIDMSQFCNSKRLCCWAGLTPSNNESAGKKKSVRITRAGVYLKPALVQCAHAAVKSDKSPYYKTKYESLVKRRGKKRAVIAIARMILTAIYRMLSTGEVWNPSDLYKIDMPAPLAEKQKAKAIKQAKKLLQKEGLLPPDEPLAS

SEQ ID NO: 15894 - protein, 316 aa, unidentified
  source 1..316: note = protein_e61afa0
  REGION 10..153: note = RuvC_domain
  SITE 13: note = RuvC_P1
  SITE 57: note = RuvC_P2
  SITE 97: note = RuvC_P3
  SITE 99: note = RuvC_P4
  SITE 102: note = RuvC_P5
  REGION 193..277: note = Tnp_domain
  SITE 201: note = Tnp_P1
  SITE 230: note = Tnp_P2
  SITE 238: note = Tnp_P3
  SITE 239: note = Tnp_P4
  SITE 250: note = Tnp_P5
MNETIVEKFVGIDVSKSTLDVCIEPLGQTLHVAYDEAGARQVVSRLKELGPALIVMEATGGLEVRIATELSIKGLPVAIINPRQARDFAKATGQLAKTDRVDAAVLAAFAKAIRPQVRPLKDADTRALDDMVSRRRQLINMRVQETLRLGTAASKPLEKSLNKHIAWLDKQIAGIDTDLTKRLRRSDAWRTKDDLLRGIPGVGAVTTLTMLAKCPELGTLNRREIAALTGVAPLANDSGKHRGKRFIWGGRADARAVLYMATVSAIRCNDTIRAFAERLKNAGKPPKVVIVACMRKLLIIMNSMLKNNTPWNPKIA

SEQ ID NO: 15895 - protein, 387 aa, unidentified
  source 1..387: note = protein_9353d98
  REGION 5..159: note = RuvC_domain
  SITE 8: note = RuvC_P1
  SITE 58: note = RuvC_P2
  SITE 98: note = RuvC_P3
  SITE 100: note = RuvC_P4
  SITE 103: note = RuvC_P5
  REGION 263..350: note = Tnp_domain
  SITE 271: note = Tnp_P1
  SITE 301: note = Tnp_P2
  SITE 309: note = Tnp_P3
  SITE 310: note = Tnp_P4
  SITE 323: note = Tnp_P5
MTVYVGVDIAKELHYAAIMNDDGVVSNPFSFENNDKGFQSFLSHLAPFEKESVLVGYESTAHYQENLAYFLKREGYRTAELNPLQTSALRKANIRNTKTDRVDAKLICLTLAQHNAALSGRDVSRLDDLYSLCRMRMDLITKRTQCKIQFVAIMDRIFPELATFFKGNLHIHTVYRLIEKYPLPSQIKKTRIDVLTSLFQKASKGHYGRDKATALKKLASVSVGIPSDTFAFQAQQLIHQIEFYSDQIAAVDQKIDSDPVVTSSLLMTIPGISSYACACILSVIKNINDFHGPCKILAYAGLDPVIRQSGKFNARSTRMSKRGNSLLRYSLIWTAGNVVLNNATFAAYYAKKISEGKSHYQALGHCAKKLVKSIFHVLKYNEAFNLA

SEQ ID NO: 15896 - protein, 388 aa, unidentified
  source 1..388: note = protein_a7b9159
  REGION 4..160: note = RuvC_domain
  SITE 7: note = RuvC_P1
  SITE 58: note = RuvC_P2
  SITE 99: note = RuvC_P3
  SITE 101: note = RuvC_P4
  SITE 104: note = RuvC_P5
  REGION 264..348: note = Tnp_domain
  SITE 270: note = Tnp_P1
  SITE 300: note = Tnp_P2
  SITE 308: note = Tnp_P3
  SITE 309: note = Tnp_P4
  SITE 321: note = Tnp_P5
MYLVGIDIAKYSHQCFMATTHGEIINEFSFDNNSNGFKLLLKHLSALYQSLEIKIGLEATGHYGNTLKQSLSTNGYTFLEFNPYLAKHFFKSTTIRKTKTDKVDARLLSSMLASVDYKTLHTKYYHINELKSLTRARNSLIESRSNALVQITNALDIIFPEFKSHFNNRLGLTALYILKKYKTPERISKLTKTHFETISNKSMGKFTYPKFLKLKELASDTIGIKSNSIVTVMLVHIDLFYSINSNIEMLETEIKSIMNLTNCKMITIPGISLMSAATILGEVTDFNNFSNSSKLIAFSGFDIAIHQSGESMSYGRLVKRGSSLLRKTIWNLVIGSIRLIPEITEYYHKKRAEGKHRNIIFSAISRKLIRIIYHLESNNINYDKNKIR

SEQ ID NO: 15897 - protein, 290 aa, unidentified
  source 1..290: note = protein_70bbf27
  REGION 8..150: note = RuvC_domain
  SITE 11: note = RuvC_P1
  SITE 52: note = RuvC_P2
  SITE 92: note = RuvC_P3
  SITE 94: note = RuvC_P4
  SITE 97: note = RuvC_P5
  REGION 191..278: note = Tnp_domain
  SITE 199: note = Tnp_P1
  SITE 229: note = Tnp_P2
  SITE 237: note = Tnp_P3
  SITE 238: note = Tnp_P4
  SITE 251: note = Tnp_P5
MNKDIKYFGIDISHLVFDVTDSDGNYYQFKNTISGFKKFTKLLDLDSHCVMEATGYYHYQLAYYLLESGVQVSVENPLAVKRFIQMKLSKVKTDKSDSKLICEYAKQVELKLWEGQSKHQTECLQMTRLLAVYTKQSTMLKNKLHGEAVLGNPSKAVVSSIKRSLKHVQKEIEILENKLLVLVKEVHQDVLTRLKSIPGIGNKTALMLVVLTDGFERFTSGSELCSYAGLTPVVRKSGSSVNGRSRISKIGNQKLRNLLFMCSFNACKYNKACRDIYERIVAKGKSKNWL

SEQ ID NO: 15898 - protein, 390 aa, unidentified
  source 1..390: note = protein_0bb5c45
  REGION 4..162: note = RuvC_domain
  SITE 7: note = RuvC_P1
  SITE 60: note = RuvC_P2
  SITE 101: note = RuvC_P3
  SITE 103: note = RuvC_P4
  SITE 106: note = RuvC_P5
  REGION 265..352: note = Tnp_domain
  SITE 273: note = Tnp_P1
  SITE 303: note = Tnp_P2
  SITE 311: note = Tnp_P3
  SITE 312: note = Tnp_P4
  SITE 325: note = Tnp_P5
MIYVGIDIAKDKHDCYIVTSDGVLISDNLRITNTLEGFNTLYSVISSNCQVASDVRIGLESTGHYGINLENFLRTKGYQITVFNPLAVASFRKSQTLRKTKTDKVDAKFITTLLFNSDQTPTALVSDEIRELKSLTRHRYRLVGQCTKLKVSVSRLLTILFPELGTLIWSIHQKSSYAMLLEFPSAHDISNCHLTKLTNLLSKTSKGRYGKDKAIALKNLASKSVGINSSGTSFELQQTIRIINYYLDEISILDKKIKELLIQMKTPLISIPGISYTLASIILSEIGDITRFQTPAKLLAFAGLEPSVYQSGKFQATGTSMVKRGSRYLRWAIIQAARLVAMRDPTFKLYQEKKKNEGKHHYVAISHTSKKLLRVIFHLLKNNINFVPQN

SEQ ID NO: 15899 - protein, 395 aa, unidentified
  source 1..395: note = protein_1bfc2cf
  REGION 4..161: note = RuvC_domain
  SITE 7: note = RuvC_P1
  SITE 60: note = RuvC_P2
  SITE 100: note = RuvC_P3
  SITE 102: note = RuvC_P4
  SITE 105: note = RuvC_P5
  REGION 266..353: note = Tnp_domain
  SITE 274: note = Tnp_P1
  SITE 304: note = Tnp_P2
  SITE 312: note = Tnp_P3
  SITE 313: note = Tnp_P4
  SITE 326: note = Tnp_P5
MFYLGIDVGKNNHEAGFIREDGSHVGKSLRFPNSQDGFDALSAFIISRLPENESFCIGMEATGHYWLALYSFLHAQGMVVHVINPIQSDSLRNFHIRQQKTDAVDCFLVAEVIRFGKFTETHLADEDILILRNLARFRESLKDTCANFKRQVVTILDQVFPEYDNLFSNMFGQSSKAFLKTYGTPDQTIDLNTRSLATLLRKASRGRHSTDKAREIKAAAAKSVGLTLCSDAFAFQLRILIEQIEFTEKQLDEIEKKIAQQLKKINSVILTIPGVGPTTGAIILGEIGNISRFSNPKKLVAYAGIDPTMYQSGNFNGQHNRLSKKGSPYLRRAVWMSALIAYRFDPVFRAYYEKKRAEGKSHGTALGAVSRKLLYTIYAVLKENKPYVVQLDTIQ

SEQ ID NO: 15900 - protein, 344 aa, unidentified
  source 1..344: note = protein_3f44103
  REGION 7..148: note = RuvC_domain
  SITE 10: note = RuvC_P1
  SITE 53: note = RuvC_P2
  SITE 88: note = RuvC_P3
  SITE 90: note = RuvC_P4
  SITE 93: note = RuvC_P5
  REGION 211..301: note = Tnp_domain
  SITE 219: note = Tnp_P1
  SITE 249: note = Tnp_P2
  SITE 257: note = Tnp_P3
  SITE 258: note = Tnp_P4
  SITE 270: note = Tnp_P5
MSTIKVLGIDLGKSSFHLIGRNHRDQNILRKKFSRPKLIEFIAQLPKCMIAFEACGGAHWLAHQCLQYGHQVRLLPPQFVRPYVKGNKNDFIDADAIAEACGRPGMHFVPVKSEDAQMLAVCHRLREGFISERTKVMCRIGAILLEFGLALPKGHATMKGLFQWLSKQKGELPTALMLELQVAQDHYKLLNERIAAQDRKILNSVKQDERCQLLKTIPGVGDMIASQLVMTVGSGQAFRQGRDMAAWLGLVPRQYSTGGKPKLLGISKRGNKRLRCLMIHGARAVLSRLGDGNRPFDAWLRTLRSSKPFNVAVVALANKLTRIAWAVLSKGQAFDGKALQPGLQ

SEQ ID NO: 15901 - protein, 404 aa, unidentified
  source 1..404: note = protein_dbb2771
  REGION 4..160: note = RuvC_domain
  SITE 7: note = RuvC_P1
  SITE 57: note = RuvC_P2
  SITE 97: note = RuvC_P3
  SITE 99: note = RuvC_P4
  SITE 102: note = RuvC_P5
  REGION 275..362: note = Tnp_domain
  SITE 283: note = Tnp_P1
  SITE 313: note = Tnp_P2
  SITE 321: note = Tnp_P3
  SITE 322: note = Tnp_P4
  SITE 335: note = Tnp_P5
MNAVGIDVSKGKSTVAIIRPLGEIVASPFEVIHTDSELSKLANSLKNLNGETKVIMEYTGSYYQPIAYALHEAGLYVSTVHAKLIHDFGNNTIRRVKTDKADAIKIANYGLSNWLELPEYIPEEDVRRMLKAYSRQYAKYTKLKTMLKNNFIALTDQTFPGVNELFSSKARESDGHEKWMDFAAKFWHCECVCGLTPKAFAERYRKWCKRAGYYFSQDKAEDIYVSACGHWSVMPKNEITKLLITQAVAQLNAISETLATVLREMKRLAGMLPEYPVVSELYGAGNILGPQLMAEIGDITRFTHKGALVCFAGLEPPEYQSGKFESTNRSISKTGSPHLRRILFQVMDCYLKQSPADEPVYQFLDRKRSEGKHYYSYMTAGSAKFLRIYYARVMEYLNKLDPEA

SEQ ID NO: 15902 - protein, 324 aa, unidentified
  source 1..324: note = protein_c86d297
  REGION 8..147: note = RuvC_domain
  SITE 11: note = RuvC_P1
  SITE 52: note = RuvC_P2
  SITE 92: note = RuvC_P3
  SITE 94: note = RuvC_P4
  SITE 97: note = RuvC_P5
  REGION 191..278: note = Tnp_domain
  SITE 199: note = Tnp_P1
  SITE 229: note = Tnp_P2
  SITE 237: note = Tnp_P3
  SITE 238: note = Tnp_P4
  SITE 251: note = Tnp_P5
MNKGINYFGIDISKDVFDVVNSAGIYWQFENNFKGFRKFLKELDMTSHCVMESTGYYHQQLAYFLLEKEVKVSVENPISVKRFIQMKLSKIKTDKSDAKMICAYAESVELKLWSGQSKHQITCLQMIRLVSVYFKQTTALKNKIHGEKALGNPCMDVVKSLNRSLKNLQKEISMIEEKVLKLVKIEHQDLLTRIETIPGLGRKTSIMLLVLTDGFERFTSSGELCSYAGLTPTIRQSGSSVRGKSRISKMGNQKLRNLLFMCSFTACKHNKACKAIYDRIVAKGKSKKLALIAVCNKLLKQAYAIAKSGLTYDNEYRSVNPALN

SEQ ID NO: 15903 - protein, 392 aa, unidentified
  source 1..392: note = protein_43ab0e6
  REGION 4..164: note = RuvC_domain
  SITE 7: note = RuvC_P1
  SITE 62: note = RuvC_P2
  SITE 103: note = RuvC_P3
  SITE 105: note = RuvC_P4
  SITE 108: note = RuvC_P5
  REGION 268..354: note = Tnp_domain
  SITE 275: note = Tnp_P1
  SITE 305: note = Tnp_P2
  SITE 313: note = Tnp_P3
  SITE 314: note = Tnp_P4
  SITE 327: note = Tnp_P5
MLYVGIDVAKLKHDCCIIDSDGVIHTNSLTVPNSKEGLELLCSTIFKYLPDNDLKNVRIGLEATGHYSNNISHYLRSKGFQLTTLNPLATNLFRKAKTLRKTKTDKGDAKVIAYMLFTDESKSYPPVSYQINELKSLTRHRYRLIGYRSKLKISLTRLVDIIFPELPSLVWSVNQKSSYALLLECPSPHDICNCHLTKLTNLLSKASYGKYGRDKAIALKDLAHNSIGTCNRSLAYELKQTIRLVKSLQVEISELDKQIKIVVDELDSPIITIPGISYTLAAIILAEIGDINRFSSPGKLLAFAGLEPSTYQSGNFRASNTPMVKRGSTYLRWAIMHAARLISMRDATFHDYLSKKRSEGKHYYVALSHVSRKLLRVIHHLLLSDTTFVPQM

SEQ ID NO: 15904 - protein, 333 aa, unidentified
  source 1..333: note = protein_63b4cae
  REGION 7..159: note = RuvC_domain
  SITE 10: note = RuvC_P1
  SITE 65: note = RuvC_P2
  SITE 103: note = RuvC_P3
  SITE 105: note = RuvC_P4
  SITE 108: note = RuvC_P5
  REGION 204..291: note = Tnp_domain
  SITE 212: note = Tnp_P1
  SITE 242: note = Tnp_P2
  SITE 250: note = Tnp_P3
  SITE 251: note = Tnp_P4
  SITE 264: note = Tnp_P5
MEKKWFIGIDISKKTLDVVIYVPTKKHADETNYERFLNKEEGYKSLLCWLKKKNMAKKRLVISMENTGIYSFDLCLFLEAASIDYCSFNPLHLKRSLGLVRGKNDRVDAERIAYFAYLHRDELSYSKLSGSSIIRLRDFAAERKRFVKQQAEYKGFLTDRKDCEMTSTIERAAHMVKILDEEIASVEEEMLQIINSDPSILRNYELLNSIKDIGTINAMNTIIHTNNFQAFETARQYACYLGIAPFEHSSGTSIKGKTRVYPTGAKLLKADLSQAANSAIVWDKEMKEYYERKRKEGKAYGVVLNAVKFKLVGRMFAVVKRGTPFVELMTYKK

SEQ ID NO: 15905 - protein, 319 aa, unidentified
  source 1..319: note = protein_d368f10
  REGION 6..152: note = RuvC_domain
  SITE 9: note = RuvC_P1
  SITE 57: note = RuvC_P2
  SITE 97: note = RuvC_P3
  SITE 99: note = RuvC_P4
  SITE 102: note = RuvC_P5
  REGION 192..278: note = Tnp_domain
  SITE 200: note = Tnp_P1
  SITE 230: note = Tnp_P2
  SITE 238: note = Tnp_P3
  SITE 239: note = Tnp_P4
  SITE 251: note = Tnp_P5
MSKVTIGVDIAKHKFDVARLENGKYKHKKFDNNEQGFVDLLDWLTTFGDVKPAICMEATGAYSIPLAEFLAHSDYLVSVVNPAKIKGFAKSELSRVKTDKADAKLIARYAMEKKPPQWTPPPANIRELQALLRRIEDLLEMQQMEKNRLDTADATIIDSINTLLTLLETELDATRARVQLLINHDPDLKQRRDLLESIPGIGESSSAHLLVALSAHYGFTSAKQAVAFAGLNPALNESGTWKGRSRISKMGDPLLRAKLYMPAVVAGNHNPVIRQFRQRLEHNGKHGMAIVCASMRKLIHIAFAILKSNKPFDPHFALA

SEQ ID NO: 15906 - protein, 254 aa, unidentified
  source 1..254: note = protein_b315314
  REGION 1..105: note = RuvC_domain
  SITE 43: note = RuvC_P3
  SITE 45: note = RuvC_P4
  SITE 48: note = RuvC_P5
  REGION 208..254: note = Tnp_domain
  SITE 216: note = Tnp_P1
  SITE 246: note = Tnp_P2
  SITE 254: note = Tnp_P3
MTVYLERGYNLLGYLIDKGLPTYVINPLHTNLYRKSLSLRQTKTDKVDARTIASILMSDVNLKSYSDTFYHNEELKSLTRYRFDKVKERAKLKTSVSRLVCILFPELEKLVPTLHMASVYALLSEFPSAKHVATAHLTRLTNLLSESSKGRYGKDTAITFRDSARASIGSNMPAKSLELKHTIKLIQELDSEIDEIENEIKIIMDEINSPILSIPGINYRMGAMIIAEIGDFNRFDSPDKILAYAGFSPSTYQS

SEQ ID NO: 15907 - protein, 259 aa, unidentified
  source 1..259: note = protein_4ab670e
  REGION 1..66: note = RuvC_domain
  SITE 5: note = RuvC_P3
  SITE 7: note = RuvC_P4
  SITE 10: note = RuvC_P5
  REGION 126..212: note = Tnp_domain
  SITE 134: note = Tnp_P1
  SITE 164: note = Tnp_P2
  SITE 172: note = Tnp_P3
  SITE 173: note = Tnp_P4
  SITE 185: note = Tnp_P5
MKSNKNDFADAEAICEAATRPTMRFVPPKTQAQQALAMSNSLRESFIKDRTATVNRIHAALLEVGVSLAPGFKTIKELPALLEVSSFSERIKKNLMLLHGHFNYLDGQVKSLDKEVECQAAEDDLAARLMTMPCVGPITSSALAAELGDGKQFKCGRGYAASIGLVPKQHSTGDKTVLLGISKRGDRNQRRLLIQCARVYLMQLDRQKGALADWVRQLLASRHHSNLVVCALANKLARIAWAIAAHHTEFDAGPAAMNA

SEQ ID NO: 15908 - protein, 274 aa, unidentified
  source 1..274: note = protein_8543f06
  REGION 1..79: note = RuvC_domain
  SITE 19: note = RuvC_P3
  SITE 21: note = RuvC_P4
  SITE 24: note = RuvC_P5
  REGION 143..228: note = Tnp_domain
  SITE 151: note = Tnp_P1
  SITE 181: note = Tnp_P2
  SITE 189: note = Tnp_P3
  SITE 190: note = Tnp_P4
  SITE 202: note = Tnp_P5
MKFGLIPAQYVKPYVKTNKSDYIDAEAIAEAVGRPTMRFVPIKTDDQLDLQSLHRVRERWVMRRTAVVNQIRGLLLERGITLRKGRCHLDAALPGILEDGTSKLSGAVRLLLAQLKLELDQLDIRLEEADALVQKTAQQSEVCRRLDAIPGIGPLTATALVAAIGNGAAFRKGREFAAWVGLVPREHSTGGKQKLLGISKRGNSYLRRLFVQGARAVLQFREKQSPGLSAWLAQLTARTHYNVAGVALANKLARMAWAVLSTGEAYRPPVLACR

SEQ ID NO: 15909 - protein, 395 aa, unidentified
  source 1..395: note = protein_e4be37b
  REGION 5..156: note = RuvC_domain
  SITE 8: note = RuvC_P1
  SITE 57: note = RuvC_P2
  SITE 96: note = RuvC_P3
  SITE 98: note = RuvC_P4
  SITE 101: note = RuvC_P5
  REGION 266..351: note = Tnp_domain
  SITE 274: note = Tnp_P1
  SITE 304: note = Tnp_P2
  SITE 312: note = Tnp_P3
  SITE 313: note = Tnp_P4
  SITE 325: note = Tnp_P5
MKYILSFDIAKGKSVYCFIDELKNIIIEPTLIEHNKNDFDNLFNLIKDYPNLIVVMESTSIYHLPVENYFRSKAFDTVVMNPKLVKQFKDTLNKSKTDKLDCFKIARCYLSTIDNFYYKNDEYFMYNPLARQYWSLIEGQTRLKNRYKQLVEIIFPEFNLIFNDLYDDLALNFIHDFPHPVLFINRRIDYLMNYLKEKNGTTQAYRFKNKVLKMKELASNSLCFVCFDSYQVKNLVQIIEMIQYHKSEINKIKNQLISKMKDKKLFKIINSIPGFGEFSTALFLAEVGDITRFDDKYQFISFIGIDSVTSQSGVSAYHGPISKTGCKFGRTLLFNVITTTIQISAHSDKSNPIYLFFRKKQSEGKHHYKCIIACETKLCKIIYKLCSSNCLYENK

SEQ ID NO: 15910 - protein, 432 aa, unidentified
  source 1..432: note = protein_a353085
  REGION 34..190: note = RuvC_domain
  SITE 37: note = RuvC_P1
  SITE 87: note = RuvC_P2
  SITE 127: note = RuvC_P3
  SITE 129: note = RuvC_P4
  SITE 132: note = RuvC_P5
  REGION 301..388: note = Tnp_domain
  SITE 309: note = Tnp_P1
  SITE 339: note = Tnp_P2
  SITE 347: note = Tnp_P3
  SITE 348: note = Tnp_P4
  SITE 361: note = Tnp_P5
MKTAFVSLTKMNRNKLCAETLHILQKEGMSMISVGIDVSKGKSTVCIMKPYGEVLKPPFDMLHSMEDILNLIKLIKSYDEEVRVILEDTGHYHLPVVTLLVENGIFVCRVNALRMKKFCSQSIRRAKTDKIDSAHIAVFGLTYWEELSPVLPTDDVYLELKLLARQYYQTVSILVKAKVNLSNLLDQVMPDIQTVLQDNPCHHRLTDFVVRYYHYGHILEMGKSKFTSDYCKWAKKQGYRMCERSAEKIFALVQNGIPALPNSPVTKVVVVEAVRMLHQIEASRDTILARMQDFAKTLPEYSVVREMPCIGDTLAPRIIAEIGDVRRFKNKHSLIAYAGIDAPPYQSGAFNAVERHISKRGNSYLRKTGYEIMQSLIQHKPIGDSVYNFIQKKRLEGKCGKEAMIAGLNKFLRIYYGKVTELYNDIDKQLTA

SEQ ID NO: 15911 - protein, 346 aa, unidentified
  source 1..346: note = protein_df5153f
  REGION 7..148: note = RuvC_domain
  SITE 10: note = RuvC_P1
  SITE 53: note = RuvC_P2
  SITE 88: note = RuvC_P3
  SITE 90: note = RuvC_P4
  SITE 93: note = RuvC_P5
  REGION 212..299: note = Tnp_domain
  SITE 220: note = Tnp_P1
  SITE 250: note = Tnp_P2
  SITE 258: note = Tnp_P3
  SITE 259: note = Tnp_P4
  SITE 271: note = Tnp_P5
MKQISTIGLDLAKNVFQIHGADAEGAPVLNRKLRRAEVLRYFEKLPPCLVGLEACGGSHYWAREIAAFGHDVRLIPPIYVKPFVKRGKTDAADAEAISEAVTRKTMRFVPIKSADQQAASMVLKTRALLVRQQTQAINALRGHLSELGVIAAIGTAKVAALIEIVRDDEEFRLPKAAHFALAEIADQIEALTRQIDKLERAIVAEAKRDEDMRRLTTIPGVGAITAANIKALVPDPDGFKSGRHFAAWLGLTPKPHSSGGKERLGSISKMGNPTLRSLLVCGATSVLRHVKGNDKAPQWLIGLLARRPFKVVAVALANKMARIIWALLTKGGTYRNTGAASSAASA

SEQ ID NO: 15912 - protein, 347 aa, unidentified
  source 1..347: note = protein_92efcd1
  REGION 6..146: note = RuvC_domain
  SITE 9: note = RuvC_P1
  SITE 52: note = RuvC_P2
  SITE 87: note = RuvC_P3
  SITE 89: note = RuvC_P4
  SITE 92: note = RuvC_P5
  REGION 211..296: note = Tnp_domain
  SITE 219: note = Tnp_P1
  SITE 249: note = Tnp_P2
  SITE 257: note = Tnp_P3
  SITE 258: note = Tnp_P4
  SITE 270: note = Tnp_P5
MELHAIGIDLGKTLFHLVGVDGCGNVVVRKRCSRTQLLRYTANLRVQRIGMEACSGSHFLGRALREQGHDARLMPAQYVKPYVKTNKSDYIDAEAIAEAVQRPTMRFVPIKTAEQLDLQAVHRVRERWVMRRTAVINQIRGLLLERGVTLSKGRSHLEQALPQILEDANLQLSDSFRVLLAQLKLELEQLTARIEQMDSVIQHTVKENEACQRLTTIPGVGPVTATALVAAIGNGSGFRRGRDLAAWVGMVPREYSTGGKQKLLGISKRGNNYLRRLFVQGARTVMQHRDKQSPGLSNWLAQLLARTHQNVAIVALANKLVRMAWAVLCKNEVYRSPVLATSILNQA

SEQ ID NO: 15913 - protein, 274 aa, unidentified
  source 1..274: note = protein_ad893d4
  REGION 2..74: note = RuvC_domain
  SITE 14: note = RuvC_P3
  SITE 16: note = RuvC_P4
  SITE 19: note = RuvC_P5
  REGION 139..222: note = Tnp_domain
  SITE 146: note = Tnp_P1
  SITE 176: note = Tnp_P2
  SITE 184: note = Tnp_P3
  SITE 185: note = Tnp_P4
  SITE 197: note = Tnp_P5
MAPQFVKPYVKSNKNDAADAEAICEAVSRPNMRFVAIKSIEQQSLLALHRVRQSLVRARTAHSNQIRGLLAEFGLIIPQGIHNVPKRVPELIEDASNELTGAFRILIDDLLNHVKNLSQRLDDLDGQVLTGHRANEHSCKLDEVQGVGPITASAFVATLGDAKAFKNGREVSAWLGIVPRQHSSGGKENLLGISKRGDKYLRTLLIHGARSVIQANERKRGTPAEDLWISSLVNRRNKNVAAVAVANKNVRIMWALLAHDRDYRKDYKRDVAPV

SEQ ID NO: 15914 - protein, 420 aa, unidentified
  source 1..420: note = protein_78250cb
  REGION 33..192: note = RuvC_domain
  SITE 36: note = RuvC_P1
  SITE 89: note = RuvC_P2
  SITE 130: note = RuvC_P3
  SITE 132: note = RuvC_P4
  SITE 135: note = RuvC_P5
  REGION 295..382: note = Tnp_domain
  SITE 303: note = Tnp_P1
  SITE 333: note = Tnp_P2
  SITE 341: note = Tnp_P3
  SITE 342: note = Tnp_P4
  SITE 355: note = Tnp_P5
MTVYLERGYNRKESQWFQTVSNTFQRSIAMIYAGIDVAKDKHDCFITNSDGEVLFKAFTIPNNLDGFDELYQKIQSVTDDLTKVKVGLEATGHYSYNILGYLLDKGLTTFVINPLHTNLYRKSLSLRKTKTDKVDAHTIATMLMSDVNLKSYSDTSYHNEELKSLTRYRFDKVKERAKLKQSISRLVAILFPELEKLVPTLHMASVYDLLFELSSVSDIASVHLTRLTNLLNTSSKGHYGKDTAILFREAARTSIGSHMPAKSLELKHTIRLIRELDSEISEIESEIKSIMDKINSPILSIPGINYRMGSMIIAEIGDFRRFDSPDKILAYAGLSPSTYQSGQLESSYSHMEKRGSRYLRYALFNATKFVCHWDPTFAAYLEKKRSEGKHYNVAISHAAKKLVRVIYQLERSGQSYIKAA

SEQ ID NO: 15915 - protein, 279 aa, unidentified
  source 1..279: note = protein_5dc6386
  REGION 5..152: note = RuvC_domain
  SITE 8: note = RuvC_P1
  SITE 55: note = RuvC_P2
  SITE 92: note = RuvC_P3
  SITE 94: note = RuvC_P4
  SITE 97: note = RuvC_P5
  REGION 212..279: note = Tnp_domain
  SITE 220: note = Tnp_P1
  SITE 250: note = Tnp_P2
  SITE 258: note = Tnp_P3
  SITE 259: note = Tnp_P4
  SITE 271: note = Tnp_P5
MKYYAGLDVSVKETSVCIVDEKGKICRERKVVSHPDDLVSFLSDPQWHFERVGLEAGPLSQWLYEGLAKAGFPAICIETRHTKAFLKAQPNKTDRNDARGIAQMMRVHLFKPVHVKTLTSQKRRALLTARALLQGKAIAIENDIRGLLRNFGLKVGMVGAVKFEDRIRELIEGVPDLAEIVKPLLAARRKLREEFERLDHKVREEARIDPVCQRLMTVPGVGPIVSLAYAATIDIPARFRSSRAVGAVLGLTPILNQSGESNRIGHVSRCGDGMLRTLL

SEQ ID NO: 15916 - protein, 407 aa, unidentified
  source 1..407: note = protein_a28bcbd
  REGION 9..163: note = RuvC_domain
  SITE 12: note = RuvC_P1
  SITE 60: note = RuvC_P2
  SITE 100: note = RuvC_P3
  SITE 102: note = RuvC_P4
  SITE 105: note = RuvC_P5
  REGION 271..357: note = Tnp_domain
  SITE 279: note = Tnp_P1
  SITE 309: note = Tnp_P2
  SITE 317: note = Tnp_P3
  SITE 318: note = Tnp_P4
  SITE 330: note = Tnp_P5
MDPRFTVVIGLDVGKTGHHACALDPDGERLFDKPLPQDEAELREVFTGLQKHGEVLMVVDQPNTIGALPIAVAKDCGCAVAYLPGLAMRKAADLYPGRSKTDARDAFIIADTARTMPHTLRAVDRDNEVLSALKVLAGFDEDLAQETTRALNRIRSLLTQIHPALERVFTGGTLSTGIVLDLLEKFAGPTGLRTAGRGRVLRFARAHARRDPEALIDQVFAALDEQTVVVPATAAVELVIPRVAGQVKELKEQRATVAREVEAMLEDFPLAGVLMSMPGIGIKTAAQILLAIGDASTFESAGHLAAYAGIAPVTRRSGTSIRGEFPARSGNKRLKNALFYSSWVASHSDPVSKAYYDRKRAEGKRHNAAVICLARRRCNVIFAMLRNGTYYQPPINVPSPDPAALAA

SEQ ID NO: 15917 - protein, 400 aa, unidentified
  source 1..400: note = protein_8d38c32
  REGION 11..166: note = RuvC_domain
  SITE 14: note = RuvC_P1
  SITE 63: note = RuvC_P2
  SITE 103: note = RuvC_P3
  SITE 105: note = RuvC_P4
  SITE 108: note = RuvC_P5
  REGION 273..358: note = Tnp_domain
  SITE 281: note = Tnp_P1
  SITE 311: note = Tnp_P2
  SITE 319: note = Tnp_P3
  SITE 320: note = Tnp_P4
  SITE 332: note = Tnp_P5
MTDTSGIGVFCGLDVGKGEHHATAVTPAGKKVLDQRLPNSEAKLREIIDRLQSRHGTVLVVVDQPASIGALPLAVARDAGCKVAYLPGLAMRRIADLYPGEAKTDARDAFVIADAARTMPHTLRDLAPDDETIAELHMLVGFDDDLAQESTRLTNRLRGLLTQIHPPLERVLGPRLDHPAVRAILERFGSPAAIRKAGRRQLLRLTRPRAPRMAERLVDDIFTALDEQTVTVPGTDTATLILPSLAGSLGSVHDQRGLLATRIEELLEAHPLSKVLTSLPGVGVRTAARILIDVGDGSAFPTAGHLAAYAGLAPATRTSGSSIRGEHPSRRGNKLLKRAFHLSAFAALREPASRAYYDKKRAEGKHHVAALTCLARRRIDVLFAMLRDGTLYQPPATSAA

SEQ ID NO: 15918 - protein, 310 aa, unidentified
  source 1..310: note = protein_8434b11
  REGION 6..148: note = RuvC_domain
  SITE 9: note = RuvC_P1
  SITE 53: note = RuvC_P2
  SITE 93: note = RuvC_P3
  SITE 95: note = RuvC_P4
  SITE 98: note = RuvC_P5
  REGION 189..273: note = Tnp_domain
  SITE 197: note = Tnp_P1
  SITE 226: note = Tnp_P2
  SITE 234: note = Tnp_P3
  SITE 235: note = Tnp_P4
  SITE 246: note = Tnp_P5
MELSFVGIDVSKDRLDVHVRPSGEMFAVTRDGKGLESLVERLLELKPTLVAVEATGGFETIVAAAVAGASIPLAVVNPAQIRNFAQAAGKRAKTDPIDAAVIAHFADALRPEPRELPDQEARLLAEMVSRRRQIIEMKTAEGQREKRASNVRIRKGLQRHIAMLQKELDAIDRDIETMVRGSPVWRAKEDLLASVPGIGNIVARTLLAELPELGRLSRREIASLAGLAPYTRQSGRWRGKSMIGGGRASVRTVLHMAALVASRCNLALKTFYQRLLSAGKPKMVALVAVARKLLITLNAIIRDNRPWQNA

SEQ ID NO: 15919 - protein, 260 aa, unidentified
  source 1..260: note = protein_27a7f8c
  REGION 2..77: note = RuvC_domain
  SITE 17: note = RuvC_P3
  SITE 19: note = RuvC_P4
  SITE 22: note = RuvC_P5
  REGION 137..224: note = Tnp_domain
  SITE 145: note = Tnp_P1
  SITE 175: note = Tnp_P2
  SITE 183: note = Tnp_P3
  SITE 184: note = Tnp_P4
  SITE 196: note = Tnp_P5
MAPKFVSPYRMAGKTGKNDAADAIAICEAVQRPHMRFVPVKDESQQTMQCLHRTRQGFIQERTATYNRLRGLVSEFGVIAPQSTDALRHIVSDQRETLPVQVRLCIDDLLAHITNIEEKIAEYDRVLSRVAKTDHRSQQLIELKGIGPTTASALVASIGNAHDFKNGCQLAAWLGLTPSQYSSGGKSKLGRITKAGDSYLRTLLVQGARSVMIGAEKRTDSFSRWVCSLIGRRGYWRAVVAIAAKNARLCWASLHYGDDF

SEQ ID NO: 15920 - protein, 346 aa, unidentified
  source 1..346: note = protein_4f6a81e
  REGION 6..147: note = RuvC_domain
  SITE 9: note = RuvC_P1
  SITE 52: note = RuvC_P2
  SITE 87: note = RuvC_P3
  SITE 89: note = RuvC_P4
  SITE 92: note = RuvC_P5
  REGION 211..298: note = Tnp_domain
  SITE 219: note = Tnp_P1
  SITE 249: note = Tnp_P2
  SITE 257: note = Tnp_P3
  SITE 258: note = Tnp_P4
  SITE 270: note = Tnp_P5
MNITRVGVDLAKLLFQVHGVDEKGNAKLRKQLKRSKVAEFFAQLPPCLIGMEACGGAHYWARKLTDFGHTVKLIAPQFVKPYVKTNKNDAADAEAICEAVGRPSMRFVPIKSTEQQSVLGLHRARQGFVAARTAQANQIRGLLAEFGLVIPVGIGAIARKLPEFLEDAENGLSGVSRTLFARLLDHFRLLDRQVEELEQEINTWHREDAASKRLQAIPGIGPLTASALVATVGDAKAFHNGRQLAAWLGLVPGQSSTGGKTTLLGISKRGDTYLRTMLIHGARSVLFSLKRNPARADEWLARVANRRNPNIAAVALANKNARIVWALLAHGRDYTRDYRSVKPMAA

SEQ ID NO: 15921 - protein, 388 aa, unidentified
  source 1..388: note = protein_d9eced7
  REGION 4..160: note = RuvC_domain
  SITE 7: note = RuvC_P1
  SITE 58: note = RuvC_P2
  SITE 99: note = RuvC_P3
  SITE 101: note = RuvC_P4
  SITE 104: note = RuvC_P5
  REGION 263..350: note = Tnp_domain
  SITE 271: note = Tnp_P1
  SITE 301: note = Tnp_P2
  SITE 309: note = Tnp_P3
  SITE 310: note = Tnp_P4
  SITE 323: note = Tnp_P5
MIYIGIDVAKDKHDCFIVNSDGEVIKDVFTIPNTLNGFNTLLEAIPNVSKDKIKVGLEATGHYSLNLMRFIIDNQFPLIVLNPLQTNLFRKAHTLRKSKTDKIDAKLIALMLQSGNFKPHSDVSYHLRELKSLTRHKSRIKDNLAKYKISLHRILDIMFPELASVVYSLNQKSTYELLKAFPSKQAITSAHLTKLTNLLIKHSKGKYRKEKAILIKETAAKSIGTDSRAISFELSQTLSFIEVYSNEINKIDNEIKSIMDEIQSPILTIPGISYGLASVILAEIGDINRFDSPSKLLAFAGLEPSTYESGRFVATGMKMVKRGSSYLRWAILEAARLVAMRDPTFKEYYQKKKSEGKHHYVANSHVAKKLIRVIHHLLTNNLQFYPQK

SEQ ID NO: 15922 - protein, 383 aa, unidentified
  source 1..383: note = protein_9482010
  REGION 10..157: note = RuvC_domain
  SITE 13: note = RuvC_P1
  SITE 62: note = RuvC_P2
  SITE 97: note = RuvC_P3
  SITE 99: note = RuvC_P4
  SITE 102: note = RuvC_P5
  REGION 233..317: note = Tnp_domain
  SITE 241: note = Tnp_P1
  SITE 271: note = Tnp_P2
  SITE 279: note = Tnp_P3
  SITE 280: note = Tnp_P4
  SITE 291: note = Tnp_P5
MERKIKPKVFAIDVGESRLVATKMEINNNTVKEADTREFKYNEEGLKELIKFLEGYEEGIMEATGVYFYHVYNVLRDKGLKVNVINPVQTVEVLGKKTDKNDSIRLAIAYAAGTVKGSYIPTGEMQELREMTRHREGLVERKTQVKNEIRKVLETAGYKLPPFEKKTKEIVRKLATDEKLTDEEIKEYSKLLGRKLTRIEAFILKQLLDLLNIIEEQIKEVENEIMKFLPEEAVELTKIPGIGPISAATIYAELGDVSRFESSKQAASYAGVSPRTKQSGKTEFHNGLIKGNKHLSRVLFLVARSAKNTTQFNGFYQALLKRTSNSKKATLALANKICRIVYHVLKDGEYKGETKKTRYRGGGGEGPQVDPNQVVPSALQAIA

SEQ ID NO: 15923 - protein, 423 aa, unidentified
  source 1..423: note = protein_8bb7942
  REGION 19..166: note = RuvC_domain
  SITE 22: note = RuvC_P1
  SITE 73: note = RuvC_P2
  SITE 106: note = RuvC_P3
  SITE 108: note = RuvC_P4
  SITE 111: note = RuvC_P5
  REGION 233..319: note = Tnp_domain
  SITE 241: note = Tnp_P1
  SITE 271: note = Tnp_P2
  SITE 279: note = Tnp_P3
  SITE 280: note = Tnp_P4
  SITE 292: note = Tnp_P5
MLSTNLQNPIDFNGQKFYVGLDVHKKSWAVTIRSLGIELARFTQPPSADALSGYLQKNFPGGQYYSAYEAGFCGTSTHEQLCKLGIKNILVHAADIPSTDKQKKNKTDLHDSRSIADYLEKGSLHSIHVLTQEQQELRSLFRFREAKVIEVTRSNNRLKSFLMYYDIKIPETVSKKEYLSLKALAWLNFEMTTAAGTIALQELIEELKYQRKRLFEITKQLRKQIQVLHADSYKCLLSVPGIGAVTAMGLIAEIADFGRFDDPDEYCSFLGLCPWEDSSGETIKTKGMQPRCNQHLRPILIEASWTTIKKSRTLFAYYSKHAGKDSKKAIVKVARKLALIARGVVLKQQLYQENYLQQKKAEQSLQKETSKRRFSSGITEQHINKHALSGCNIPGRLLLSRACFRFLQHHKDKNNVKQFNMNR

SEQ ID NO: 15924 - protein, 343 aa, unidentified
  source 1..343: note = protein_5b31d6e
  REGION 7..149: note = RuvC_domain
  SITE 10: note = RuvC_P1
  SITE 53: note = RuvC_P2
  SITE 88: note = RuvC_P3
  SITE 90: note = RuvC_P4
  SITE 93: note = RuvC_P5
  REGION 212..304: note = Tnp_domain
  SITE 220: note = Tnp_P1
  SITE 250: note = Tnp_P2
  SITE 258: note = Tnp_P3
  SITE 259: note = Tnp_P4
  SITE 271: note = Tnp_P5
MQTISTIGLDIAKSVFQVHGVDAAGQVIVRRQLKRRQVLTFFRKLPPCLIGIEACASSHYWSRELQSLGHTVRLMPPAYVKPYVKRQKNDSTDAEAICEAVTRPNMRFVPTKTIEQQSCLVLHRTRQLFIRQQTATINSIRAHLAEFGIVAPVGRRGVEQLLEVIADSNDARVPEVARACVAALGVQLRQLKAQILELDRRITAWHRSSELSRRLNEIPGVGPALATALVASIADPKVFRSGRDFSAWIGLVPKQNSSGGQDKLGSISKQGDRYLRSLFTTGALAVIRYAKIHGTKHRPWLAALLARRPTKVAAIALANKIARIAWALMTRGERYKQPAALVV

SEQ ID NO: 15925 - protein, 347 aa, unidentified
  source 1..347: note = protein_b9b418a
  REGION 4..157: note = RuvC_domain
  SITE 7: note = RuvC_P1
  SITE 55: note = RuvC_P2
  SITE 96: note = RuvC_P3
  SITE 98: note = RuvC_P4
  SITE 101: note = RuvC_P5
  REGION 219..304: note = Tnp_domain
  SITE 227: note = Tnp_P1
  SITE 257: note = Tnp_P2
  SITE 265: note = Tnp_P3
  SITE 266: note = Tnp_P4
  SITE 277: note = Tnp_P5
MITIGIDPHKSSHTAVALDETGALLGEVRVPADSSTLARLQAWAASWPQRVWAIEGACGLGRLLAQRLVGSGETVLDVPAALAARTRVLQRGHGRKSDGIDARSVAVVAQHRDGLSRVAPDDHCAVLRLLSDRRDELTSERRRAVNRLHRLLRDLHPGGAPRQLSADRASRLLATIRPSGAVDIERKAMARQLIADTRRIDRALTENRRRCAQAIAASGSSLTEIFGISEVLAAKILGHTGDITRFANADHYASYAGTAPIEVSSGDQRRHRLSRAGNRSLNHALHMAARVQTMHPGPGRTHYMRKQTEHKTPAEALRSLKRQLAKVVYRHLQADHTHQTSPSPGLT

SEQ ID NO: 15926 - protein, 345 aa, unidentified
  source 1..345: note = protein_05bdcc1
  REGION 6..147: note = RuvC_domain
  SITE 9: note = RuvC_P1
  SITE 52: note = RuvC_P2
  SITE 87: note = RuvC_P3
  SITE 89: note = RuvC_P4
  SITE 92: note = RuvC_P5
  REGION 211..298: note = Tnp_domain
  SITE 219: note = Tnp_P1
  SITE 249: note = Tnp_P2
  SITE 257: note = Tnp_P3
  SITE 258: note = Tnp_P4
  SITE 270: note = Tnp_P5
MHIASIGIDLGKTTFHLVALGERNKILLRKKFSRSQLLAYTANLPSSLVGLEACAGSHFLGTVLREQGHQVRLIPAQFVKPYRKTNKNDFIDAEAIAEAVTKQNMRFVQVKTQDQLDIQAMHRVRDRLVQRRTALINEIRGFLLERGITFAAQPIHLRKNLPTVIEDAEQNLSPRLRWLLDRLWQEWKQIEIDVEVITEEIERISNEDARCRQLRQIPGFGPLVSTATVAAIGNGAAFRRGRDFAAWLGVVPRQYSTGGKQKLFGISKRGNIYLRRMLIHGARAVLFRVKYDTGGFGQWVQRLAQRAPRNKVVVAIANKLARIAWAVLSSGKDYRHQPLLQLAAA

SEQ ID NO: 15927 - protein, 327 aa, unidentified
  source 1..327: note = protein_eaf8e12
  REGION 6..154: note = RuvC_domain
  SITE 9: note = RuvC_P1
  SITE 56: note = RuvC_P2
  SITE 94: note = RuvC_P3
  SITE 96: note = RuvC_P4
  SITE 99: note = RuvC_P5
  REGION 199..286: note = Tnp_domain
  SITE 207: note = Tnp_P1
  SITE 237: note = Tnp_P2
  SITE 245: note = Tnp_P3
  SITE 246: note = Tnp_P4
  SITE 259: note = Tnp_P5
MKSIYLGIDISKKTLDICLVDQKSEAFFKIENKIKAIKKLFKQITTLDAEIFIAMENTGLYNYNLYEVLKDYSFNVYVIDPKHIKRSIGLVRGKNDKVDAKRIATFIERNYQDFDCWKPTSEAVQNIKILMSQRRHKVKTRQAIKQQNKELKTVKRTKIISSSMKINLKEIEQINKHIAAIEKLIKEEIANDSVLEKDIERIRTIPGIGSVTAWTLAVKTDGFVRLTNPRKLACFAGVVPFEQQSGTSLKTKPRVSKMADMQLKSVLQMAAMRAVRMDNDLKHFYLRKVEEGRNKMSVLNAVRNKLIHIAMALIKNKSFYENRLVLS

SEQ ID NO: 15928 - protein, 416 aa, unidentified
  source 1..416: note = protein_3eb48cf
  REGION 4..160: note = RuvC_domain
  SITE 7: note = RuvC_P1
  SITE 57: note = RuvC_P2
  SITE 97: note = RuvC_P3
  SITE 99: note = RuvC_P4
  SITE 102: note = RuvC_P5
  REGION 274..361: note = Tnp_domain
  SITE 282: note = Tnp_P1
  SITE 312: note = Tnp_P2
  SITE 320: note = Tnp_P3
  SITE 321: note = Tnp_P4
  SITE 334: note = Tnp_P5
MNAAGIDVSSRKSMVAILRPFGEVVKLPFEVCHSAEDLSALAQQLKSIEGETRVVMEHTGRYYESIAKVLHEAGLYVSVVNPLLIKEYGANSLRRVKTDKADAMKIARYALDNWADLRDYTPMDTIRYNLKTLNRQFQLASKQRTASSNNLIALLEQSFPGARKCFDSPVRSDGTQKWVDFAHAFWHVDCVRKQSLNAFSERYRKWCKRHGYFFKQANAEEVYTLAKNAVVLVPKSDVTKVLIQEAANQLTSISRSVETYRTEMERLASMLPEYPVVMQMYGVGKSFGPQLMAEIGDVRRFERKQALVAFAGIDPMPNQSGEKNIRSNKSSKRGSPYLRKTLFNIMSIYLKCAPQEEPIFQFLDRKRTEGKPYYVYMTAAGNKFLRRYYAQVRDYLATLENLPPVDMESTGLQHTT

SEQ ID NO: 15929 - protein, 345 aa, unidentified
  source 1..345: note = protein_0694b8f
  REGION 5..152: note = RuvC_domain
  SITE 8: note = RuvC_P1
  SITE 55: note = RuvC_P2
  SITE 92: note = RuvC_P3
  SITE 94: note = RuvC_P4
  SITE 97: note = RuvC_P5
  REGION 212..314: note = Tnp_domain
  SITE 220: note = Tnp_P1
  SITE 250: note = Tnp_P2
  SITE 258: note = Tnp_P3
  SITE 259: note = Tnp_P4
  SITE 271: note = Tnp_P5
MDYYAGIDVSLEYSSVCVVDAIGKIVREAKVESEPEALIAWFASLGVGLARIGLEAGPLSQWLYAAMREAGLSVELLETRHVRDAFKAMPVKSDRNDARGIAQLMRLGWFRPVHCKSLAAQEVRAVLTARKLVQSKLRDVENSLRGILRGFGLKVGKTTPLSFGARIRELVASHPNLKTVAAGLLSVHAVLLREFQAFEKKVRALVRQDARARRLMSTPGVGPVVALTYAAAIDDPGRFASSKRVGAHFGLTPKRYQSGETDYSGKISKIGDAAVRTALYEAAHVILTKPLRACTGLKSWAMRIARRGGMKKAKVALARKLAVILHRMLADETIFNPAVTPIAVA

SEQ ID NO: 15930 - protein, 403 aa, unidentified
  source 1..403: note = protein_7698b33
  REGION 4..160: note = RuvC_domain
  SITE 7: note = RuvC_P1
  SITE 57: note = RuvC_P2
  SITE 97: note = RuvC_P3
  SITE 99: note = RuvC_P4
  SITE 102: note = RuvC_P5
  REGION 274..361: note = Tnp_domain
  SITE 282: note = Tnp_P1
  SITE 312: note = Tnp_P2
  SITE 320: note = Tnp_P3
  SITE 321: note = Tnp_P4
  SITE 334: note = Tnp_P5
MNAVGIDVAKSKSVVSIIRPFGEVISSPFELCHTSRDIDEFIHSLSKLEGEVRIVMEYTGRYHEPVAHWLTDAGFYVSLVNPKLIKDFGNNSLRKVKSDKKDAVKIARYALDNWNDLRQYNLMDKTRDQLKIMNRQFDFYMKHKTALKNNLISLLDQTFPGANTFFTSPVRKDGSQKWVDFVTSFWHVDCVRKGSLAAFTERYQKFCTRKGYDFHPEKPVQIFEASKKLIALLPKDKRTKGLIMQAIEQLNTLSRTVEQLRLQMDHTAAQLPEYPIVMAMKGVGPSLGPQLMAEIGDIRRFSHRGALTAFAGVDPGVNQSSSYNQKSVRTSKRGSAQLRKSLFQVMDVLVKTSPETDPVYAFISKKRAEGKPYYVYMTAGANKFLRIYYGRVKEYLASLPGED

SEQ ID NO: 15931 - protein, 339 aa, unidentified
  source 1..339: note = protein_2c80cb2
  REGION 6..147: note = RuvC_domain
  SITE 9: note = RuvC_P1
  SITE 52: note = RuvC_P2
  SITE 87: note = RuvC_P3
  SITE 89: note = RuvC_P4
  SITE 92: note = RuvC_P5
  REGION 211..297: note = Tnp_domain
  SITE 219: note = Tnp_P1
  SITE 249: note = Tnp_P2
  SITE 257: note = Tnp_P3
  SITE 258: note = Tnp_P4
  SITE 270: note = Tnp_P5
MEIHSVGIDLGKTTFHLVALGAAGKVLLRKKFTQRQLITFTANMQTSLIGMEACSGSHFLGRVLRAQGHDVKLIPAQFVKPFVKSNKNDFLDAEAIAEAVDRQNMRFVPIKTDDQLDLQSIHRVRDRLVARRTSVINQLRAFLLERGMVFAKTPYKLKIAMPEILENPERNLTPRMRNLVGLLWSEWKELERQIVVMNEEVEQIACSDPACQRLRQIPGIGPLVATAIVAAIGNGAAFRKGREFSCWLGLVPRQHSTGGKARLFGISKRGNCYLRKLLIHGARSAVLRVKRERSPFGSWLDALERRAPVKVVITAAANKLARVAWAVLSSGNDYRPVSA

SEQ ID NO: 15932 - protein, 324 aa, unidentified
  source 1..324: note = protein_741de28
  REGION 5..173: note = RuvC_domain
  SITE 8: note = RuvC_P1
  SITE 58: note = RuvC_P2
  SITE 98: note = RuvC_P3
  SITE 100: note = RuvC_P4
  SITE 103: note = RuvC_P5
  REGION 196..282: note = Tnp_domain
  SITE 204: note = Tnp_P1
  SITE 234: note = Tnp_P2
  SITE 242: note = Tnp_P3
  SITE 243: note = Tnp_P4
  SITE 255: note = Tnp_P5
MAIVVGVDIAKHTFDIATLQSNGKYRTKGKLSNDSTGFEVLQQWLLKYAEPQAWIVMEATGIYHEALAEWLLARGYLVCVLNPAQVAYYARSQLQRVKTDKVDAKLISDYGSRHQAELRAWQPDPPSIRCLKALVHRLKDLQELEQMEQNRLDVTRETKVKESINSVLEHLRQQIAETLEVIKQHFDDNDDLRGQRDLLTSIDGIADRTAALLLAELGDVQRFDNSRAVTAFAGLNPKLQESGKLKGHVRISRMGSARLRAGLYMPAITSMSRNPAIRAMVERMKARGKAGKQIVCAAMRKLLCIAYGVLKSGEPFNPKLAIAK

SEQ ID NO: 15933 - protein, 314 aa, unidentified
  source 1..314: note = protein_530081e
  REGION 10..164: note = RuvC_domain
  SITE 13: note = RuvC_P1
  SITE 61: note = RuvC_P2
  SITE 101: note = RuvC_P3
  SITE 103: note = RuvC_P4
  SITE 106: note = RuvC_P5
  REGION 271..314: note = Tnp_domain
  SITE 279: note = Tnp_P1
  SITE 308: note = Tnp_P2
MITSDVDIFFGLDVGKTDHWACAVTKDGTKIWNKTLPNDEAKLVSVYQKLSAQGTVLVVVDQPATIGALAVAVAQHMGITVAYLPGLPMRRIADMYPGTAKTDEKDAFIIADAARTMPHTLRSIQLSDEDEATLGMLTGFDLDLARQITQTSNKIRGLFTQIHPPLERVLGPWLEHDAVLEVLASWPTPAQLKHAGQARIDAKLKKYGARRHTAWAGTIIDALEEQSVIVVGTDAAGLVIPHLARQLISLHAQRVDVATHLEAMVEAHPLYQVLTSMPGVAVRTAAIIIAETSGKTFTSAASLSSYAGLAPTTR

SEQ ID NO: 15934 - protein, 467 aa, unidentified
  source 1..467: note = protein_5f0a813
  REGION 6..160: note = RuvC_domain
  SITE 9: note = RuvC_P1
  SITE 58: note = RuvC_P2
  SITE 98: note = RuvC_P3
  SITE 100: note = RuvC_P4
  SITE 103: note = RuvC_P5
  REGION 265..327: note = Tnp_domain
  SITE 273: note = Tnp_P1
  SITE 304: note = Tnp_P2
  SITE 312: note = Tnp_P3
  SITE 313: note = Tnp_P4
MPQIWAGVDIGKEHHHCVVVNERGERLLSRRVFNDESALLELIADVLALSEDALWAVDINHGGAALLIGLLLSHNQPMVYITGLAVHQASAAYRGQGKTDEKDAFVIADQARMRQDLGPLRPGDEIAVDLRTLTARRLDLVNDRTRQTNRLRAQLLKFFPALERVLNLSKKGPVVLLSGYQVPAAIRRSGARRIGTWLKNRKVKNAVALAETAVEAARAQHAALPGESLAAAMVARIAKGVLALDEEIAELDALIGARFNDHRHATVIRSLPGMGTLLGAEFIAATGGDLEAFGTADRLASFAGLSPVPRDSGRVSGNMRRPRRWCPFSWCSRSRWRNPQVTDRIALPGGAVGAHRADTSGDRQEARSGRHRTAPKRSRQTVIGYTTTRDTAPAPLPPRPAPRLLPLRDGQPENLLRLPGLLRAQAERGKGHKQALLALARRRANVLWAMLRDGECYEALPTVTAAA

SEQ ID NO: 15935 - protein, 346 aa, unidentified
  source 1..346: note = protein_86f3d65
  REGION 7..149: note = RuvC_domain
  SITE 10: note = RuvC_P1
  SITE 53: note = RuvC_P2
  SITE 88: note = RuvC_P3
  SITE 90: note = RuvC_P4
  SITE 93: note = RuvC_P5
  REGION 212..300: note = Tnp_domain
  SITE 220: note = Tnp_P1
  SITE 250: note = Tnp_P2
  SITE 258: note = Tnp_P3
  SITE 259: note = Tnp_P4
  SITE 271: note = Tnp_P5
MKQITTIGLDLAKQVFQIHGADAEGSPIVNRKLRRAEVLRFFEKQPACLVGIEACGSSHYWAREIAALGHEVRLIPPAYVKPFVKRGKTDAADAEAISEAVTRKTMRFVPIKTAEQQAAAMVLKTRSLLVRQQTQAINALRAHLAELGIIAAIGTTRVAGLIEIVRDATDARLPKAARFALTAVADQIEALIRQIGDLDREIVAGAKRDEDMRRLATIPGVGPITAASIKVLVPDPGGFKSGRHFAAWLGLTPRSHSSGGKERLGGISKMGNPELRSLLVLGASAVLRYVRGNDKAPKWLSALLMRRPYKVVAVALANKMARVIWALLTKGGTYRGMTPVNGAANA

SEQ ID NO: 15936 - protein, 341 aa, unidentified
  source 1..341: note = protein_fd339d2
  REGION 6..152: note = RuvC_domain
  SITE 9: note = RuvC_P1
  SITE 53: note = RuvC_P2
  SITE 91: note = RuvC_P3
  SITE 93: note = RuvC_P4
  SITE 96: note = RuvC_P5
  REGION 211..298: note = Tnp_domain
  SITE 219: note = Tnp_P1
  SITE 249: note = Tnp_P2
  SITE 257: note = Tnp_P3
  SITE 258: note = Tnp_P4
  SITE 270: note = Tnp_P5
MSIVTVGIDLAKNIFALHGVDAAGTAVLIKPRVSRDQLVTLIAQLPPCLIGMEACTGAHHWARVFQQHGHVVKLMAPQLVAPYRMSGKRGKNDAADAAAICEAVTRPSMRFVPLKDEHQQATLCLHRTRQGFVTERTAIYNRIRGLLAEFGVVLPQSPDRLRREIAPHLDTIPGWARRCISDLLEHVGDIEVRLAEYDRAIGEIARADERSRRLMQLRGIGPTTASALLASLGTGHDFRNGRQVAAWMGLTPGQYSSGGKARLGSITKAGDAYLRGLLVIGARAVIGSLGEKQDRFSRWVRSLVERRGFWRAAIAIAAKNARMAWAILKYGDNFKHEPLAA

SEQ ID NO: 15937 - protein, 342 aa, unidentified
  source 1..342: note = protein_1829bde
  REGION 7..148: note = RuvC_domain
  SITE 10: note = RuvC_P1
  SITE 53: note = RuvC_P2
  SITE 88: note = RuvC_P3
  SITE 90: note = RuvC_P4
  SITE 93: note = RuvC_P5
  REGION 211..299: note = Tnp_domain
  SITE 219: note = Tnp_P1
  SITE 249: note = Tnp_P2
  SITE 257: note = Tnp_P3
  SITE 258: note = Tnp_P4
  SITE 270: note = Tnp_P5
MNEVSIVGLDLAKRVFQLHAASADGGLVFRRKLSRVHVLAFFSELPRCVVAMEACATAHYWAREIGKLGHEVRLLPPAYVKPFVKRQKNDAADAEAIVEAAFRPSMRFVVPKTEKQQASSMIFRTRDLFVRQRTQLINALRAHLAEHGVIAPQGLASLAALRVIVEDDDSGLDLLVVETARIYLEQIDLLTARISNLEKVLKSEAQQSDNTARLMSMPGIGPITAMAIEAFAPTMTTFQKGRDFAAWLGLVPKQHSSGGKQVLGRTSKMGQRDIRRLLIIGAMTVIRWACRKPPSESSWLGRMLTRKPRMLVAIALANKMARSVWAMMTKKENYKDSGLVTA

SEQ ID NO: 15938 - protein, 391 aa, unidentified
  source 1..391: note = protein_1af5af1
  REGION 4..163: note = RuvC_domain
  SITE 7: note = RuvC_P1
  SITE 60: note = RuvC_P2
  SITE 101: note = RuvC_P3
  SITE 103: note = RuvC_P4
  SITE 106: note = RuvC_P5
  REGION 266..353: note = Tnp_domain
  SITE 274: note = Tnp_P1
  SITE 304: note = Tnp_P2
  SITE 312: note = Tnp_P3
  SITE 313: note = Tnp_P4
  SITE 326: note = Tnp_P5
MIYAGIDVAKDKHDCFITNSVGEVLFKSFTIPNNREGFETLFQKIQSVSDDLTKVKVGLEATGHYSYNLLRFLLDKGLPTYVINPLHTNLYRKSLSLRKTKTDKVDAHTIASMIMSDVNLKSYSDTFYHNEELKSLTRYRFDKVKARAKLKSSVSRLVCILFPELEKLVPTLHMVSVYSLLSEFPSAHVIASAHLTRLTNLLSESSRGRYGKDTAICFRDAARSSIGSHIPAKSLELKHTIRLILELTSEIDEIEAEIKTIMDKINSPILTIPGISYKMGAMIIAEIGDFSRFDSPDKILAYAGMSPSIYQSGQLDNCYAHMEKRGSRYLRYALYNATKYVCHWDESFGTYLAKKRAEGKHYNVALSHATKKLVRTIYAMEKSGQAYTNAA

SEQ ID NO: 15939 - protein, 406 aa, unidentified
  source 1..406: note = protein_3a92762
  REGION 4..161: note = RuvC_domain
  SITE 7: note = RuvC_P1
  SITE 60: note = RuvC_P2
  SITE 100: note = RuvC_P3
  SITE 102: note = RuvC_P4
  SITE 105: note = RuvC_P5
  REGION 276..363: note = Tnp_domain
  SITE 284: note = Tnp_P1
  SITE 315: note = Tnp_P2
  SITE 323: note = Tnp_P3
  SITE 324: note = Tnp_P4
  SITE 336: note = Tnp_P5
MKYLGIDVSKSTSRYVILDNDGEKASKPFTLNNDQNAFTQLLERLKELHLRPENLLVGIEATGIWWENLYCFLTEQKINVIVLNPHQTNKFREALRLKAKTDDIDAYVIAGLLRSGEYAASYIPEETIQILREIVKLRHQLVTNRQGFERQTQALLGLLFPEYEKTAIKNPFSVASLAILKAYPTAKHLAEAKPKNIEKIVRHIKGNNFNITEIQTLIETAKNSIYSGRAKDARGMNLNILLTHVETLHHSIAQLDQRINDILSPQNPDDAQSFPGANLLTIPGVSPKTLAAILSVVGANGNAYPDGKNFIGYIGFFPKIYESGETKRDNVISKRGPNYIRRALYIAAVAGLKHNTEFKALYNRKISQGKPAKQALICVAKKLAHLCLSMLKSGESYNPSRVFMPV

SEQ ID NO: 15940 - protein, 344 aa, unidentified
  source 1..344: note = protein_595a5ac
  REGION 7..150: note = RuvC_domain
  SITE 10: note = RuvC_P1
  SITE 55: note = RuvC_P2
  SITE 90: note = RuvC_P3
  SITE 92: note = RuvC_P4
  SITE 95: note = RuvC_P5
  REGION 214..300: note = Tnp_domain
  SITE 222: note = Tnp_P1
  SITE 252: note = Tnp_P2
  SITE 260: note = Tnp_P3
  SITE 261: note = Tnp_P4
  SITE 273: note = Tnp_P5
MNELTRIGVDVAKQVFQVHGVDRHEQPVWRRRLSRERWLRAVMEAAPPGCEIGMEACGGAHHWARQLQARGFRVKLIAPQFVKPYVKSNKNDANDAEAICEAMSRPSMRFVSVKSVEQQDIQAAHRIRAGLVEQRTAKANQIRGLVAEYGLVSPKELSFLRRAIPCWLEDADNGLTDRFRHLLDGLWQDIRALDARVTELDVDIAAIAQSDPDAVRLQQLRGVGPITATALVAAVGDARQFAHGRQLSASLGLTPRQHSSGGKERLLGISKRGDAYLRTLLVHGARATLRTAKGKEDRLSRWVCRLAARSHPNVACVALANKTARMAWAMLRHGTDYQPELAAA

SEQ ID NO: 15941 - protein, 391 aa, unidentified
  source 1..391: note = protein_e06c9c4
  REGION 4..163: note = RuvC_domain
  SITE 7: note = RuvC_P1
  SITE 60: note = RuvC_P2
  SITE 101: note = RuvC_P3
  SITE 103: note = RuvC_P4
  SITE 106: note = RuvC_P5
  REGION 266..353: note = Tnp_domain
  SITE 274: note = Tnp_P1
  SITE 304: note = Tnp_P2
  SITE 312: note = Tnp_P3
  SITE 313: note = Tnp_P4
  SITE 326: note = Tnp_P5
MIYVGIDVAKDKHDCFITNSDGEVLFKVFTITNNLDGFNDLYQRIESVMEDITKVKVGLEATGHYSYNLLGYLIDKGLPAYVINPLHTNLYRKSLSLRQTKTDKVDARTIASMLMSDVNLKSYSDTSYHNEELKSLTRYRFDKVKERAKLKSSISRLVCILFPELEKLVPTLHMASIYAMLSEFPGAKHVANAHLTRLTNLLSESSKGRYGKETAITFRDVARNSIGSNMPAKSLELKHTIKLIQEISSEIDEIENEIKLIMDEINSPILSIPGINYRMGAMIIAEIGDFNRFDSPDKILAYAGFSPSTYQSGQLDGACAHMEKRGSRYLRYALYNAAKYVCHWDPTFAEYLAKKRSEGKHYNVALSHAVKKLVRVIYHLEKTNQQYIKAA

SEQ ID NO: 15942 - protein, 347 aa, unidentified
  source 1..347: note = protein_1c4f211
  REGION 6..148: note = RuvC_domain
  SITE 9: note = RuvC_P1
  SITE 52: note = RuvC_P2
  SITE 87: note = RuvC_P3
  SITE 89: note = RuvC_P4
  SITE 92: note = RuvC_P5
  REGION 211..298: note = Tnp_domain
  SITE 219: note = Tnp_P1
  SITE 249: note = Tnp_P2
  SITE 257: note = Tnp_P3
  SITE 258: note = Tnp_P4
  SITE 270: note = Tnp_P5
MNITTVGLDLAKAVFQVHGVDMRGKVKIRKQLKRSQVSAYFAQLPACLIGMEACGGAHFWARKLTELGHTVKLMAPQFVKPYVKTNKNDVADAEAICEAVGRPNMRFVPIKNIDQQALLSSHRVRQGFVRERTAQVNQIRGLLAEFGIVMPVGIRSIEGKLPGILEDAENGLSGASRSLFARLFEHFRALDRHVKEIEREINAWHRDNADSQRLEAIPGIGPLTASALVASVGNAHAFRNGRQFAAWLGLVPRQCSSGGKNTLLGISKRGDTYLRTLLIHGARAVMQTLHRQPNQADGWLARVTQRRHSNVAAVAFANKNARIVWALLAHGRKYQAEYRLTPSIAMA

SEQ ID NO: 15943 - protein, 391 aa, unidentified
  source 1..391: note = protein_d9ad4ed
  REGION 4..163: note = RuvC_domain
  SITE 7: note = RuvC_P1
  SITE 60: note = RuvC_P2
  SITE 101: note = RuvC_P3
  SITE 103: note = RuvC_P4
  SITE 106: note = RuvC_P5
  REGION 266..353: note = Tnp_domain
  SITE 274: note = Tnp_P1
  SITE 304: note = Tnp_P2
  SITE 312: note = Tnp_P3
  SITE 313: note = Tnp_P4
  SITE 326: note = Tnp_P5
MIYVGIDVAKDKHDCFITNSDGEALFKSFTIPNNREGFENSFQKIQSVSDDLNKVKVGLEATGHYSYNLLGFLLDKGLPTYVINPLHTNFYRKSLSLRKTKTDKVDAHTIASMMMSDVNLKSYSDTSYHNEELKSLTRYRFDKVKERAKLKSSVSRLVCILFPELEKLVPQLHMTSVYALLSEFPSAHAVASAHLTRLTNLLSESSRGRYGKETAIIFRDAARNSIGSNMPAKSLELKHTVRLIQELTSEIDEIENEIKIIMDEINSPILSIPGINYRMGAMILAEIGDFSRFDSADKILAYAGMSPSTYQSGQLDNCYSHMEKRGSRYLRYALYNATKYVCHWDESFGAYLTRKRAEGKHYNVALSHAAKKLVRTIYAMEKSRQAYKHVA

SEQ ID NO: 15944 - protein, 320 aa, unidentified
  source 1..320: note = protein_ea7fd1d
  REGION 4..154: note = RuvC_domain
  SITE 7: note = RuvC_P1
  SITE 51: note = RuvC_P2
  SITE 91: note = RuvC_P3
  SITE 93: note = RuvC_P4
  SITE 96: note = RuvC_P5
  REGION 190..277: note = Tnp_domain
  SITE 198: note = Tnp_P1
  SITE 228: note = Tnp_P2
  SITE 236: note = Tnp_P3
  SITE 237: note = Tnp_P4
  SITE 250: note = Tnp_P5
MTYIGIDVSKDSFVAAYPKKSGYTTKTFLNTTSGVRQFISSLPEDCHCVMEATGNYSMLLLYLLQQANIIVSMENPQKIKHFARAMLSTTKTDEIDAKLIALYGEKMEPAPYKIPSESIILLKQKRTVLRQLKKQLIAMTNMQHAMSVLPKQDPTAKVAIEQTIKFLRKQISKLEDEITHLSNKEFKRQMELLTSIKGIGENIASALILATGGFTYFSSAKQISRFLGLCPTYQQSGTSVNVKGHINRNGDTHLRSLMYVVAFSSIRSNTACKETYERLRSRGKSGRVAIIAIANKLIRQAFAVVTNNRPYIDGYVSSLA

SEQ ID NO: 15945 - protein, 341 aa, unidentified
  source 1..341: note = protein_7792eba
  REGION 8..149: note = RuvC_domain
  SITE 11: note = RuvC_P1
  SITE 54: note = RuvC_P2
  SITE 89: note = RuvC_P3
  SITE 91: note = RuvC_P4
  SITE 94: note = RuvC_P5
  REGION 213..300: note = Tnp_domain
  SITE 221: note = Tnp_P1
  SITE 251: note = Tnp_P2
  SITE 259: note = Tnp_P3
  SITE 260: note = Tnp_P4
  SITE 272: note = Tnp_P5
MSDYSYFGGIDLAKNHFSIHVVDVKGKVVLHKSVSRSKLLTTISNLPHMCIGLEACGGALYWARTLNKLGHDTRIMAAKYVDPYRTKGKNDLNDAVAICEAVQRPSTRFVPIKSPEQQAILSIHRMREHWVRERTAIMNRIRALLSEFGLVIPVARSSLMKQVPLMLEDANNELPQLARAVLHDAYLHLNALNQRIADTEQAFEAFAKVSDNVQRIMKVRGIGPQTATAILASIVNGAQFDKSRDFSAWLGLVPKQYTTGGKPRLGRITKHGDKYLRTLLVHGARTVIANLGDKQDRLSQWCRGVLERRGMNRAVVALAAKNARIIWSLLHNQTEYENYAA

SEQ ID NO: 15946 - protein, 388 aa, unidentified
  source 1..388: note = protein_da65e0c
  REGION 4..160: note = RuvC_domain
  SITE 7: note = RuvC_P1
  SITE 58: note = RuvC_P2
  SITE 98: note = RuvC_P3
  SITE 100: note = RuvC_P4
  SITE 103: note = RuvC_P5
  REGION 264..351: note = Tnp_domain
  SITE 272: note = Tnp_P1
  SITE 302: note = Tnp_P2
  SITE 310: note = Tnp_P3
  SITE 311: note = Tnp_P4
  SITE 324: note = Tnp_P5
MIYVGIDVAKQGHFASLISSDGEILVGPFQFSNDGDGFQYLVSAFEPFDDEEIIIGLESTAHYADNLIRYLVTEGYNVCVLNPISTSSMRKNNIRKTKTDKIDTYIIAQTLMMQKSYRFVTFEDLDLMNLKELGRFRQKTIKQRTRLKIQLTSYLDQIFPELQYFFKSGLHQKSVYALLKEAPTAKAIASMHLTHLAALLTKTSHGHFKKEQAAELRVLARKSVGQSDQTLSIQVTSVIAQIELLDEQIARVEAEMTEIMRFNDSVIMTIPGIGYLNGGMILGEIGDIHRFSTPKKLLAFAGLDPSVYQSGNFNARRTRMSKRGSRILRYALMNAAHNVVKNNATFKAYYDKKMAEGRTHYNALGHCAGILVRVIWKMLTDEVEFNLD

SEQ ID NO: 15947 - protein, 404 aa, unidentified
  source 1..404: note = protein_965aa3b
  REGION 4..160: note = RuvC_domain
  SITE 7: note = RuvC_P1
  SITE 57: note = RuvC_P2
  SITE 97: note = RuvC_P3
  SITE 99: note = RuvC_P4
  SITE 102: note = RuvC_P5
  REGION 274..361: note = Tnp_domain
  SITE 282: note = Tnp_P1
  SITE 312: note = Tnp_P2
  SITE 320: note = Tnp_P3
  SITE 321: note = Tnp_P4
  SITE 334: note = Tnp_P5
MNTVGIDVSKGKSMVAVARPFGQVVLKPFSVSHLSSELRKLAISLKSLEGETRVILEHTGRYYEPIALMLHTAGLFVSAVNPKLIKDYGNNSLRQAKTDKADALKIARYGLDNWAELRLYTPMDTIRYQLKTLNRQYALYTKNKTALKNNLISLLDQTYPGVNALFTSPVREDGHQKWVDFATTFWHVEGVRSLSLNAFTQRYHKWCKRHGYSFSSAKAAEIHAASKEQIAILPKDSLTKMLIQQAVQSLNALSKVASSLRLEMKDLAQQLPEYPVVMAMYGVGDSLGPQLMAEIGDVRRFHKRNALTAFAGVDPKANQSGTRESKSNPATKHGSPKLRKTLFLVMETLIKKSPLDDPVFQFMDKKRAEGKPYHVYMTAGANKFLRIYYGKVREYLATLVDTLE

SEQ ID NO: 15948 - protein, 352 aa, unidentified
  source 1..352: note = protein_ff247e7
  REGION 6..152: note = RuvC_domain
  SITE 9: note = RuvC_P1
  SITE 53: note = RuvC_P2
  SITE 91: note = RuvC_P3
  SITE 93: note = RuvC_P4
  SITE 96: note = RuvC_P5
  REGION 211..279: note = Tnp_domain
  SITE 219: note = Tnp_P1
  SITE 249: note = Tnp_P2
  SITE 257: note = Tnp_P3
  SITE 258: note = Tnp_P4
  SITE 270: note = Tnp_P5
MTIVTVGIDLAKNVFAVHGVDATGKPVLLKPSVPRAKLAALIASLPPCLIGMEACSGAHHWARLFATFGHTVRLMAPKFVAPYRLSGKRGKNDAADASAICEAVTRANMRFVPIKTLDQQGQLMVHRARQGFVEQRTATINRIRGLLSEFGVVLPLKAAVVRQQALQHLEDLPGWANTVVGDLLSEVSHFDERIAQYDHHIATLAKADPAARQLMQLPGVGPTTATALVSTIGHGHDFSNGRQLSAWLGLVPGQYSSGGKQRLGHITKAETPTCALCWCWAQGRYWLQQKTRLTRSAAGQPAWPSGGVTGAPLWRLRPKTLACAGQYCTGEMRSNFPCDSDLRKRSFVSTTA

SEQ ID NO: 15949 - protein, 366 aa, unidentified
  source 1..366: note = protein_93bfacf
  REGION 41..189: note = RuvC_domain
  SITE 44: note = RuvC_P1
  SITE 91: note = RuvC_P2
  SITE 131: note = RuvC_P3
  SITE 133: note = RuvC_P4
  SITE 136: note = RuvC_P5
  REGION 232..319: note = Tnp_domain
  SITE 240: note = Tnp_P1
  SITE 270: note = Tnp_P2
  SITE 278: note = Tnp_P3
  SITE 279: note = Tnp_P4
  SITE 292: note = Tnp_P5
MHVQGREPVNSLLSLIPLLQSNMPNIQFKDIDPESKPVLFAGIDVGAEELILVIRKNGKPFDPQKFANTPADRTRLVKKLVKLPGIIVCLEATGVYHFDLSLALHDAGVLLMVVNPKASHNFAKVLMKNSKTDAVDANTLAEYAARMDFVPWTRPSNEMIALRSFARRIDALTRQKAAAKNHLHALTATSETPKAVLKDVKLAIAQLEKRIDSLTAGALILIGKHPNLERILALLIGIKGIGNTSAIALMGELLLLPPDLSHREWVKFAGLDPRAFDSGKSVHKKTRISKAGNRHIRSALYMPALSAKQHDKHVKAYFQHLMDNGKTPLQGVCAVMRKLLHAIHGMLKKNEPFDNTRFYAIPESTG

SEQ ID NO: 15950 - protein, 279 aa, unidentified
  source 1..279: note = protein_5730e39
  REGION 2..74: note = RuvC_domain
  SITE 14: note = RuvC_P3
  SITE 16: note = RuvC_P4
  SITE 19: note = RuvC_P5
  REGION 138..224: note = Tnp_domain
  SITE 146: note = Tnp_P1
  SITE 176: note = Tnp_P2
  SITE 184: note = Tnp_P3
  SITE 185: note = Tnp_P4
  SITE 197: note = Tnp_P5
MPAQYVKPYVKTNKNDYIDAEAIAEAVGRPRMRFVPIKTDDQLDLQSLHRIRERWVVRRTAVINQIRGLLLERGITIRKGRLYIEASLPAILKDADNKLSGILRVLLTQLQLEMQYLGRQIDESDKLIGEIAKSMDSCRRLLAIPGIGPLTATATIAAIGNGAAFKKGRGFAAWLGVVPGEHSTGGKQKLTGTSKRGNKYLRKLFVQGAHTVLLQKTKQSSGLSIWLADLTARKRKQVATVAMANKMARMVWAVLTKGEAYRPPLLLQPAGNGLQMTPA

SEQ ID NO: 15951 - protein, 391 aa, unidentified
  source 1..391: note = protein_cfaacf2
  REGION 4..163: note = RuvC_domain
  SITE 7: note = RuvC_P1
  SITE 60: note = RuvC_P2
  SITE 101: note = RuvC_P3
  SITE 103: note = RuvC_P4
  SITE 106: note = RuvC_P5
  REGION 266..353: note = Tnp_domain
  SITE 274: note = Tnp_P1
  SITE 304: note = Tnp_P2
  SITE 312: note = Tnp_P3
  SITE 313: note = Tnp_P4
  SITE 326: note = Tnp_P5
MILVGIDVAKDKHDCYIMTSEGEVLFKSFTIANSMEGFNQLYEKILSVTDNLDKVKIGLEATGHYSYNILGYLLDKGLTPFVINPLHTNLYRKSLSLRKTKTDKVDSRTIASMLMSDVSLKPYSDTLYHNEELKSLTRYRFDKVQQRARLKTSISRLVTILFPELEKLIPTLHMKSIYSLLYEFPSAKAISKAHLTKLTNLLYANSRGHYGKEKAVSIREAAINSIGSYMPAKSLELKHTVKLLKELTSEIDEIEQEIKSIIDKLNSPILTIPGIGYSLGAQIIAEIGDFKNFDSPDKILAFAGMSPSTYQSGKLYSSNAKMEKRGSKYLRSTFFTAAVCVCRIEPTFALYLAKKRAEGKHYYVAISHVVKKLVRLIFHLEKTGEHYATLT

SEQ ID NO: 15952 - protein, 342 aa, unidentified
  source 1..342: note = protein_e025e14
  REGION 6..147: note = RuvC_domain
  SITE 9: note = RuvC_P1
  SITE 52: note = RuvC_P2
  SITE 87: note = RuvC_P3
  SITE 89: note = RuvC_P4
  SITE 92: note = RuvC_P5
  REGION 211..299: note = Tnp_domain
  SITE 219: note = Tnp_P1
  SITE 249: note = Tnp_P2
  SITE 257: note = Tnp_P3
  SITE 258: note = Tnp_P4
  SITE 270: note = Tnp_P5
MQITTIGLDLAKRVFQVHAVDSSGHTVLVKQLKRSQMHEFFANLTPCVIGMEACASAHYWGRELTRLGHDVRLMAAQFVKPYVKTNKNDAADAQAICEAVSRPSMRFVAIKSVDQQAVLSMHRARDGLVRARSALANQIRGLLAEFGLIMPIGVSALRRQTPTLLDEAGDRLPLPFVHLIEDLLTHMDEQQRHIQAFERQIVQWHRAHPVSMRLAQIPGIGPITASALVATVGDPHLFKNGRQMAAWLGLVPRQHSSGGKPMLLGISKRGDGYLRKLLLLGAHSALLRIRHQPGSGQSWADRLLRRRPVNVVATAVANKHARIAWALMTEQCDYDPALAQVG

SEQ ID NO: 15953 - protein, 344 aa, unidentified
  source 1..344: note = protein_2db412c
  REGION 8..150: note = RuvC_domain
  SITE 11: note = RuvC_P1
  SITE 54: note = RuvC_P2
  SITE 89: note = RuvC_P3
  SITE 91: note = RuvC_P4
  SITE 94: note = RuvC_P5
  REGION 213..304: note = Tnp_domain
  SITE 221: note = Tnp_P1
  SITE 251: note = Tnp_P2
  SITE 259: note = Tnp_P3
  SITE 260: note = Tnp_P4
  SITE 272: note = Tnp_P5
MQAVFKTIGLDIAKSVFQVHGVDADGQVVIRRKLKRRYVLAFFAKVPPCLVGMEACATSHHWSRELQALGHRVRLMPPAYVKPYVKRQKNDATDAEAICEAVSRANMRFVETKTVEQQSCLVLHRTRHLFIRQQTSVINAIRAHLAEFGIVAPVGRKGVEQLLDVVANTEDQRIPDVARACVAALGAQLRALKAQILEFDRQIMIWHRSHETSKRLDEVPGVGPALATALVASVADPKAFRSGRDFSAWIGLVPKQHSSGGKDKLGSISKQGDRYLRSLFVAGALAVIRYAKIYGTKHRPWLTALLARRPTKIAAIALANKLARMVWAMMTKGERYKEPVALAA

SEQ ID NO: 15954 - protein, 392 aa, unidentified
  source 1..392: note = protein_e81c0c5
  REGION 4..164: note = RuvC_domain
  SITE 7: note = RuvC_P1
  SITE 62: note = RuvC_P2
  SITE 103: note = RuvC_P3
  SITE 105: note = RuvC_P4
  SITE 108: note = RuvC_P5
  REGION 267..354: note = Tnp_domain
  SITE 275: note = Tnp_P1
  SITE 305: note = Tnp_P2
  SITE 313: note = Tnp_P3
  SITE 314: note = Tnp_P4
  SITE 327: note = Tnp_P5
MLFIGIDVAKSKHDCCIIDSSGVVHTDSLSINNSKEGFDTLYSIILSILDSDDLSNIKIGLESTGHYSTNITHYLHSKGFHVHIMNPLATNLFRKAHTLRKTKTDKTDAKVIATMLFTDESKSYSPLSYQIQELKSLTRHRYRMIGYRSKLKLSVTRLIDIIFPELPSFVWSIHQVSSYTLLLQLPTPSAISSCHLTKLTNLISKASRGQYGKEKAIALKELATNSIGSSNRSIAFELQQTIRLIQSVQQEIDALDRQIQLVVDELDTPLITIPGIGYTLAAIILAEIGDIHRFSTPSKLLAFAGMEPSTYQSGNYKAFKTPMVKRGSTYLRWAVMQASRLVAMRDTTFKAYMAKKSSEGKHFCVAQSHVGKKLIRVIFYLLKNNIAFVPQM

SEQ ID NO: 15955 - protein, 349 aa, unidentified
  source 1..349: note = protein_bc9dda3
  REGION 9..163: note = RuvC_domain
  SITE 12: note = RuvC_P1
  SITE 68: note = RuvC_P2
  SITE 108: note = RuvC_P3
  SITE 110: note = RuvC_P4
  SITE 113: note = RuvC_P5
  REGION 209..296: note = Tnp_domain
  SITE 217: note = Tnp_P1
  SITE 247: note = Tnp_P2
  SITE 255: note = Tnp_P3
  SITE 256: note = Tnp_P4
  SITE 269: note = Tnp_P5
MKKVLKQVLGVDVAQKELVVTLGRMFDDLTIDFYAYKVFKNNTTSFKSLLKWVDSLIEKRVEMQFVMEATGVYHQKFAYFLEEKGFNLSIVLPNKISNYMRTLDTKTVTDKTASQAICRFGLERKLDPWKRPKKIFKELQQLTRERSQVVDERVIVKNQLHAENSEAEPNKSSLRRLKSRIKFLSNQEKEIKVEIKKIVDSDNNLKKEVQNICTIPGVAILTAVIVLAETNGFELVRNKKQLTSYAGLDVKLKQSGTSVNKKARISKQGNRNLRKSLHLPSLSAVKYNKTHKELYVRLVAKSGIKMKGLIAVQRKLLELIYVIYKNKEGFIQNYEQQKRATLLEIETAL

SEQ ID NO: 15956 - protein, 277 aa, unidentified
  source 1..277: note = protein_be06605
  REGION 1..49: note = RuvC_domain
  REGION 153..240: note = Tnp_domain
  SITE 161: note = Tnp_P1
  SITE 191: note = Tnp_P2
  SITE 199: note = Tnp_P3
  SITE 200: note = Tnp_P4
  SITE 213: note = Tnp_P5
MMQDSPRFLTLENLDFIELKELGRFRQKTVKQRTRLKIQLTSYLDQVFPELQYFFKSGIHQNSVYTLLKEAPTPNAIASMHMTHLASLLTRTSHGHFNKETARNLRVLAQKSVGINDSALSIQITQTIAQIELLDSQLFHTELEIANLVTCLHSVIMNIPGIGSTNGGMILGEIGDIHRFSTPNKLLAFAGLDPSVHQSGNFQAQRTRMSKRGSRVLRFTLMNAAHNVVKNNLTFKTYYDKKRAEGRSHYNALGHCAGKLVRVIWKMLTDNVEFNLE

SEQ ID NO: 15957 - protein, 281 aa, unidentified
  source 1..281: note = protein_2f9196a
  REGION 1..72: note = RuvC_domain
  SITE 11: note = RuvC_P3
  SITE 13: note = RuvC_P4
  SITE 16: note = RuvC_P5
  REGION 136..222: note = Tnp_domain
  SITE 143: note = Tnp_P1
  SITE 173: note = Tnp_P2
  SITE 181: note = Tnp_P3
  SITE 182: note = Tnp_P4
  SITE 194: note = Tnp_P5
MHRSAKNKVVKNDRRDAKNIAANLANGTYKSVYVPTDEDVEIKEYIRMMHDFKIELKKVKQHINAFLLRFGHHYPGKSKWIPAHIKWLKELELSDMHREILDEYLSQLEILTEKIERFKYRLEELSQKETYNEKIGQLRCIKGIDTTAAMTIHAETSDFDRFPTANAFASYCGLTPGEDSSGDSYHRLGITKQGNSMIRTTLVEAAQTFVRGTIGKKGKKVKSKQKDQDVKVIDYADKGVIRLQKKYHRMIFRGVKRNIAITAVARELACFVWGIETGHIS

SEQ ID NO: 15958 - protein, 400 aa, unidentified
  source 1..400: note = protein_aca6be3
  REGION 4..161: note = RuvC_domain
  SITE 7: note = RuvC_P1
  SITE 57: note = RuvC_P2
  SITE 98: note = RuvC_P3
  SITE 100: note = RuvC_P4
  SITE 103: note = RuvC_P5
  REGION 276..364: note = Tnp_domain
  SITE 284: note = Tnp_P1
  SITE 314: note = Tnp_P2
  SITE 322: note = Tnp_P3
  SITE 323: note = Tnp_P4
  SITE 336: note = Tnp_P5
MISVGVDVSKGKSTVCILKPYGEVVSSPFEIHHVEKDMEDLDNLLSKLDGEIRIVMEATGIYHLPVVTFLHDKGYFVSVVNPFAMKKYAKDNSIRGAKTDRLDSIMIANYGIEKWFKLQRYEGTEETYAELKLLGRRYRYYMELHVKALQELTHVLDYVLPGIKKMFNSWNEANGKDKLSDFVERSWHFDLITSMSLEKFTEEYIAWAKEKKYHRSRSKAEAVYELASSGIPTLSSSTPSTKMLVQEAVSVLRAVDSSLSLILTRMQELAKSLPEYSVVREMGGVGNVLAVKLIAEIGDVRKLHNAKALIAWAGIDPPPYESGQFIGSKRRITKRGSSTLRKVGYEVMRVLKSHSAPKDDAVYNYILKKESEGKSKKHAKIAGLNKFLRIYYARVMEVYQ

SEQ ID NO: 15959 - protein, 340 aa, unidentified
  source 1..340: note = protein_1820274
  REGION 9..169: note = RuvC_domain
  SITE 12: note = RuvC_P1
  SITE 68: note = RuvC_P2
  SITE 108: note = RuvC_P3
  SITE 110: note = RuvC_P4
  SITE 113: note = RuvC_P5
  REGION 209..296: note = Tnp_domain
  SITE 217: note = Tnp_P1
  SITE 247: note = Tnp_P2
  SITE 255: note = Tnp_P3
  SITE 256: note = Tnp_P4
  SITE 269: note = Tnp_P5
MGKIVKQVAGIDVAQKELVVTLGHLLDDFSIELFAYKVFKNSDSGFKSLVEWANKLTDNQVDVLYVMEATGVYHQKFAYFLTDNNYKLSIVLPNKISNYMRTLELKTITDKSCSQAIAQFGLERKLDKWSKPKPTYKELQQLTRERDQIVQERSIIKNQIHAEITEAEPNQRSMERMQARIRFLNSQEKEIKEDIEWIVKENPDIRQIIDRITTIPGVGELTAVIVLAETNGFELIRNKSQLSSYAGMDVKEKQSGTSVKGKPRISKKGNRALRKSMHLPALTAVKWDDNFRETYARLVSKHGIKMKALVAIQRKILQLIYVLFKNETIYDKDYSIKKIA

SEQ ID NO: 15960 - protein, 408 aa, unidentified
  source 1..408: note = protein_d368059
  REGION 6..162: note = RuvC_domain
  SITE 9: note = RuvC_P1
  SITE 58: note = RuvC_P2
  SITE 99: note = RuvC_P3
  SITE 101: note = RuvC_P4
  SITE 104: note = RuvC_P5
  REGION 269..356: note = Tnp_domain
  SITE 277: note = Tnp_P1
  SITE 309: note = Tnp_P2
  SITE 317: note = Tnp_P3
  SITE 318: note = Tnp_P4
MERYYLGVDWADEFHQVWVSDPEGNKVIEKKVVENVEGLTEFGRWLDETRAKGIELWAAIEKPHGRIVDFLLDHGVVVYPVNPKALDRARDRFRMSQSKSDSFDAYVLAEFVRTDHGHLRALEPNSDPAQELKLLTRDQYRLVRQKTRLLNQLSRTLKEYYVRPLEVFSDLETNIALDFLQQYPTPQALAKLTRRQWNRFSKREHHLGEDHCKELWEKLNQPQLEVPEHVVRAKARLLAVLVVQLKTLRDAVESYNKRVKSFFACMPAAELVRMLPGAKTGTIVATLWAELGDAKSRWESFRHLQAEAGVVPVTKASGKSRVVQFRFSCNKIMRHAAYWLAFVSLNRSEWANQYYRDQRAKGHSHHQALRALGAKWLKIIFVMWRDHKPYDENIHLANITRQKMRQAA

SEQ ID NO: 15961 - protein, 337 aa, unidentified
  source 1..337: note = protein_6b5de75
  REGION 8..149: note = RuvC_domain
  SITE 11: note = RuvC_P1
  SITE 54: note = RuvC_P2
  SITE 89: note = RuvC_P3
  SITE 91: note = RuvC_P4
  SITE 94: note = RuvC_P5
  REGION 213..299: note = Tnp_domain
  SITE 221: note = Tnp_P1
  SITE 251: note = Tnp_P2
  SITE 259: note = Tnp_P3
  SITE 260: note = Tnp_P4
  SITE 272: note = Tnp_P5
MNTTVKVIGLDIAKNVFAVAGQDRHGKVILKRTLSRAAVLPAFANLPAAKIGIEACAGAHYWARQLGALGHEVKLIAAQHTRAYVSGNKNDHNDAAAIAEARSRAATKTVPINTEAQQDLQMLHRARQALMGERTAMICRIRAFAGEYGQVFAPGVAKFVQGFNAWLAAAENGLSGSALTTFAELKAQLDDKDARIDAYDRWLAQAAKDDARAGKLMAVPGVGKLTATAVLAAVDDAHHFASGRDFAANLGLAPREHSSGGKQRLYGITKRGDTYLRTLLIHGARSALRWALKLAARRGFKVAAVALANKMARVLWALLAHGRDYVPAGSASATRPV

SEQ ID NO: 15962 - protein, 331 aa, unidentified
  source 1..331: note = protein_28b60d1
  REGION 5..163: note = RuvC_domain
  SITE 8: note = RuvC_P1
  SITE 62: note = RuvC_P2
  SITE 102: note = RuvC_P3
  SITE 104: note = RuvC_P4
  SITE 107: note = RuvC_P5
  REGION 273..331: note = Tnp_domain
  SITE 281: note = Tnp_P1
  SITE 311: note = Tnp_P2
  SITE 319: note = Tnp_P3
  SITE 320: note = Tnp_P4
MNPVVGLDISKGESQVQAFLDKGKPFRKSFKVPHTVEGLSYLVSFLEDVKKESGKKPSIILEATGHYQTPVVHYLEERGYLLIIINPLISYKARGSSLRKVKTDAIDAYLLCELFYKEELEPYKKRGVQLLNLRNLTRQHENTTGVTIQTKLQFQAVLEQVFPEYKGVFGDLYSVVSLLTLSEFPSSEDIIKASEETITDKIHELCKSRSIRWTKESAIKLKAAAARNPFEKTVYQSHILSLGMYIKMILQYKEHLSKLESEIDALTKEIEEYNIIKSIPGIGEKIAATIISEIGEIDRFTDPKKLVAFAGVDPSVFESGKFTATKNRITK

SEQ ID NO: 15963 - protein, 323 aa, unidentified
  source 1..323: note = protein_f9c2f58
  REGION 5..158: note = RuvC_domain
  SITE 8: note = RuvC_P1
  SITE 58: note = RuvC_P2
  SITE 98: note = RuvC_P3
  SITE 100: note = RuvC_P4
  SITE 103: note = RuvC_P5
  REGION 195..281: note = Tnp_domain
  SITE 203: note = Tnp_P1
  SITE 233: note = Tnp_P2
  SITE 241: note = Tnp_P3
  SITE 242: note = Tnp_P4
  SITE 254: note = Tnp_P5
MSVFVGVDVAKKSFDIATPLPNGKTRTKAKLSNDPGGFKQFCDWLERHAEPGAWILMEATGTYHEALAEHCHNQGYRVCILNPAVIAKFADVELRRVKTDKADAKVIAAYGQQKAASLRQWEPEPPAQRRLRALVRRLDDLKEMRQMEQNRLDVAQDAVQQSIQDVIGHITEELEKTRKAIEQTIDDDPDLRKRRDLITSIDGLGDTTATLLLAELGDPLKYQSPSAIVAFSGLNPVVQQSGEFIGQSPISRTGASRLRAGLWMSGTVSIRHNPVVKALAERLNSRHKAYKQIVCAAMRKLLHLVYGVVKSGIPFDPKIALAG

SEQ ID NO: 15964 - protein, 307 aa, unidentified
  source 1..307: note = protein_2721143
  REGION 4..150: note = RuvC_domain
  SITE 7: note = RuvC_P1
  SITE 50: note = RuvC_P2
  SITE 90: note = RuvC_P3
  SITE 92: note = RuvC_P4
  SITE 95: note = RuvC_P5
  REGION 182..266: note = Tnp_domain
  SITE 190: note = Tnp_P1
  SITE 219: note = Tnp_P2
  SITE 227: note = Tnp_P3
  SITE 228: note = Tnp_P4
  SITE 239: note = Tnp_P5
MNGIGIDVSKAMLDVVVHCGPFARFHNTPAGHRKLLSWLATREACQIVLEASGGYEQRVLDALFDAGHQVVRADARRCHAFAAATGVSAKTDRLDAANLACMAATLELRPHQPMEPWRRKLREFVRARQQLVDLTISAENQLEHVTETILRRALQANINQMKKNCLRLEKHIAEQVRQQPQLEAMRAFKGVGATLQAVIASYLPELGTLDGKAIAKLVGVAPIAHDSGSMRGIRRIRDGRIEVRNVLYMACLSAIQHEPRIREFYRSLRARGKPGKVAVVAAMRKMLVILNARARDTLAGVAQAIPT

SEQ ID NO: 15965 - protein, 385 aa, unidentified
  source 1..385: note = protein_7ad8c85
  REGION 40..179: note = RuvC_domain
  SITE 43: note = RuvC_P1
  SITE 86: note = RuvC_P2
  SITE 121: note = RuvC_P3
  SITE 123: note = RuvC_P4
  SITE 126: note = RuvC_P5
  REGION 246..332: note = Tnp_domain
  SITE 254: note = Tnp_P1
  SITE 284: note = Tnp_P2
  SITE 292: note = Tnp_P3
  SITE 293: note = Tnp_P4
  SITE 305: note = Tnp_P5
MGRQSKQADPLEPERHQCARVEVSSNHSRDRGSTMNVTTYGLDLAKRVFQVHWVEPQTGELKRKALARADVSAFFARRAPGVVAMEACGSAHHWGRMLSGLGHQVRLIAAQFVRPFVKTNKTDAADAEAIWEAVQRPGMRFVALKTEEQQAVLSLHRMRAQLVKIRTMQGYQVRSLTYEFGVVAPKGWRALLTQVAPLLADPTRCPVPELARVELLNQLEGLRTLTARIDELERQIGGWQRREAECQRLAAIPGVGRLTATAVVATVSDARSFRSGREFAAFLGLVPRQSGTGGRVKLLGISKRGDPYLRTLLIHGARSVLLSQSRADRVMDPWLRGMLSRRPKNVAIVALANKMARTIWALMAHGRTFHRSWSHAVTPAAPALS

SEQ ID NO: 15966 - protein, 341 aa, unidentified
  source 1..341: note = protein_aff5f07
  REGION 7..149: note = RuvC_domain
  SITE 10: note = RuvC_P1
  SITE 53: note = RuvC_P2
  SITE 88: note = RuvC_P3
  SITE 90: note = RuvC_P4
  SITE 93: note = RuvC_P5
  REGION 211..296: note = Tnp_domain
  SITE 219: note = Tnp_P1
  SITE 249: note = Tnp_P2
  SITE 257: note = Tnp_P3
  SITE 258: note = Tnp_P4
  SITE 270: note = Tnp_P5
MAEVCTIGLDLAKHVFQAHGADASGAVLFRKRLRRAQVLSFFATQPPGTVAMEACGSALHWAREIGKLGHAVRLIPPAYVKPFVKRQKNDAADAQAICEAAQRPTMRFVAPKSEQAQAAALVFRARDLLVRQRTQIINALRGHLAEFGIVVAQGPAHVSSLVRAVEDPAEPVPEIARAILSVLIEMLHRLDGRISLLDREIAQRAKEDVTARRLMTIPGVGPITATALTALAPPAETFKRGRDFAAWIGLTPLQHSTGGKQKLGATSKMGERTLRRLLIIGASAVLRWAARHGAPAGSWLSRMLARKPPMLVRVALANKMARMVWALMAKGGDYRAPAVSV

SEQ ID NO: 15967 - protein, 343 aa, unidentified
  source 1..343: note = protein_f86d989
  REGION 6..149: note = RuvC_domain
  SITE 9: note = RuvC_P1
  SITE 54: note = RuvC_P2
  SITE 89: note = RuvC_P3
  SITE 91: note = RuvC_P4
  SITE 94: note = RuvC_P5
  REGION 213..300: note = Tnp_domain
  SITE 221: note = Tnp_P1
  SITE 251: note = Tnp_P2
  SITE 259: note = Tnp_P3
  SITE 260: note = Tnp_P4
  SITE 272: note = Tnp_P5
MKLSRVGVDLAKNVFQVHGVDRSEKAVWRRKLTRENWLSVLRQSVEPGCEIGMEACGGAHHWARRLQEHGFKVRLVAPQFVKPYVKSNKNDANDAEAICEAMSRPHMRFVSVKTVEQQDIQAVHRIRAELIKQRTAKANQLRGLVAEYGLVAPKELGQLRRALPCWLEDAENGLSGRFRRLLNGLWGDLQTLDERLNELDREITMIARSDPVAKRLQQLRGVGPIVATALVAAVGNGEQFAKGRQMSAALGLTPRQQSSGGKERLLGISKRGDAYLRALLIHGARAVIQNAKDKDDRLSQWVGRLAARSHPNVAAVALANKTVRMAWAMLRNGTDYRPGMVSS

SEQ ID NO: 15968 - protein, 424 aa, unidentified
  source 1..424: note = protein_8e22416
  REGION 11..177: note = RuvC_domain
  SITE 14: note = RuvC_P1
  SITE 74: note = RuvC_P2
  SITE 114: note = RuvC_P3
  SITE 116: note = RuvC_P4
  SITE 119: note = RuvC_P5
  REGION 285..371: note = Tnp_domain
  SITE 293: note = Tnp_P1
  SITE 324: note = Tnp_P2
  SITE 332: note = Tnp_P3
  SITE 333: note = Tnp_P4
MRREKALVLFVGDDWAEDHHDIEIEDEKGRRLARARLPEGLEGISRLHVLVAEHAPAEWADLPPEQVAARVVVGIETDRGPWVAALVAAGYKVYAINPQSAAQYRQRHSTSGAKSDAGDAHMLAEIVRLDRSHHRPIAGDSELAEAIKLLARAHQSAIWERTRQVLRLRSVLREFFPAAIEAFDDLAGADALALLGRAPDPARAAKLTRAQLAAILRSARRHHVEAKTEALLAVLRAPSLRQPKVLEGAYAAVVTGQVGLIAALNKQIAELQVVVGEHFRRHPAAEIYCSQPGLAEVLGARVLGEFGDDPGRFADARSRKNYSGQSPITRASGKKTVVLARYANNQRLGDALHKQAYAALSGSPGARAYYDSLRARKIGHHAALRQLANRLVGILHGCLKTGTHYDEKTAWQHHTKEADNPAAA

SEQ ID NO: 15969 - protein, 347 aa, unidentified
  source 1..347: note = protein_7e4fc72
  REGION 8..150: note = RuvC_domain
  SITE 11: note = RuvC_P1
  SITE 54: note = RuvC_P2
  SITE 89: note = RuvC_P3
  SITE 91: note = RuvC_P4
  SITE 94: note = RuvC_P5
  REGION 213..300: note = Tnp_domain
  SITE 221: note = Tnp_P1
  SITE 251: note = Tnp_P2
  SITE 259: note = Tnp_P3
  SITE 260: note = Tnp_P4
  SITE 272: note = Tnp_P5
MNCVATVIGLDISKNVFVAVGRDDQGREAFRKKFSRHQVLAFFAKAAPAKVGIEACASAHHWARALAGQGHEVRLIAGQHVKAYLTGNKNDANDAAAIAEARSRAMTKYVPVNTEAQQDLQMMHRVRQSLIERRTGVINQARGLLGEYGVVIATGARTLRRELVAILTSDARGLSATALDTFRDLSQQLDDLEARITRYDERILQAARADERAQRLMEVPGVGVLTATALLASLNDASHFGNGRHFAANLGLVPHEHSTGGRQRLFGISKRGDRYLRMLLIHGARSALQWAHKRTDNILRWAADLQQRKGTNVAAVALANKLARIVWALLAHGRRYEPMHITSTLVH

SEQ ID NO: 15970 - protein, 363 aa, unidentified
  source 1..363: note = protein_b920aa3
  REGION 33..170: note = RuvC_domain
  SITE 74: note = RuvC_P2
  SITE 109: note = RuvC_P3
  SITE 111: note = RuvC_P4
  SITE 114: note = RuvC_P5
  REGION 232..317: note = Tnp_domain
  SITE 240: note = Tnp_P1
  SITE 270: note = Tnp_P2
  SITE 278: note = Tnp_P3
  SITE 279: note = Tnp_P4
  SITE 291: note = Tnp_P5
MIHKGGRSCRRLSRSGSIRWLTGECVAIADRLAKNVFQLHGADGTGHAVLRKRLRRAQVLEFFSQLPSCVVAMEACGGAHFWGREIGKLGHEVRLIPPAYVKPFVKRQKNDAADAEAICEAALRPTMRFVPVMSEKTQGAAMVFRVRELLIRQRTQAINALRGHLSEFGQVVPQGAANASKLIAIVEDPTSGLPADAIPTLKTLIAALAHLEAEIKELDAEIARRAKENDLARRLMTVPGIGPLIATAIATLAPPPETFRKARDFAAWLGLTPRQHSTGGKQRLGATTKMSERSLRRLLIIGANSVIIKRHTHAAAQPGTWLGGMLSRKPPMLVRVALANKMARIVWALMARGGVYQSPAVAA

SEQ ID NO: 15971 - protein, 330 aa, unidentified
  source 1..330: note = protein_a23c9ad
  REGION 5..159: note = RuvC_domain
  SITE 8: note = RuvC_P1
  SITE 62: note = RuvC_P2
  SITE 102: note = RuvC_P3
  SITE 104: note = RuvC_P4
  SITE 107: note = RuvC_P5
  REGION 204..289: note = Tnp_domain
  SITE 212: note = Tnp_P1
  SITE 241: note = Tnp_P2
  SITE 249: note = Tnp_P3
  SITE 250: note = Tnp_P4
  SITE 262: note = Tnp_P5
MRLNVGIDVSKETLDLCLLLNQAKSGSKFKCFKNRKIDYLAINDWILKLSKCQPNDIVITMESTVVYHEAIALYLYSMGFQIFISNPGKAKKFSQALGLIHKTDKSDAYMLARYGDAQNEHIHLWKPDDTNIRNIKTLTRRLSALEKDRLRESNRLEASEISDAHDRVLLSITRIIRILEGEIQEIENEIDTIISACPTMKKNHDLLMSVIGIGKVMSRELVYLFSAKNFSTAKQAAAYVGLTPKLNESGSFKGRTTLSKIGPSRIRSKIFLAAVSAGTHNPDIKAQKNRLLAEGKTKMQALGAAMRKLIQICFGVIKNQTRYQSALALN

SEQ ID NO: 15972 - protein, 344 aa, unidentified
  source 1..344: note = protein_863b683
  REGION 7..148: note = RuvC_domain
  SITE 10: note = RuvC_P1
  SITE 53: note = RuvC_P2
  SITE 88: note = RuvC_P3
  SITE 90: note = RuvC_P4
  SITE 93: note = RuvC_P5
  REGION 212..294: note = Tnp_domain
  SITE 220: note = Tnp_P1
  SITE 245: note = Tnp_P2
  SITE 253: note = Tnp_P3
  SITE 254: note = Tnp_P4
  SITE 266: note = Tnp_P5
MSNATLIGIDLAKNVFHMHAVDNKGNQIKALKLSRLKLEEYLHRSEPVIVTMEACASSHFWGRLCISLGHEVRLISPQFVKPFVKSNKNDRNDARAICEAALRPDMHFVPVKTVEQQAVLSLHRIREVLTGQRTATINQLRGLLCEFGLPAPVGRSGLYKILPALLEELSEFSPGFLVTCISQQWEHLQQLEQHINDVTHQIETHARQSDVARRLQTIPGIGPITASALDARQFRAGRQLAAWLGLVPRQHSTGGKPVLLRTSKRGDCYLRQLFVHGARAVISAAQCNEGKRDKTITGWLSRKHINVAVVAMANRNARIAWAVIAYERTYDTQFREQLADRLLA

SEQ ID NO: 15973 - protein, 305 aa, unidentified
  source 1..305: note = protein_4ecbfcd
  REGION 1..112: note = RuvC_domain
  SITE 16: note = RuvC_P2
  SITE 51: note = RuvC_P3
  SITE 53: note = RuvC_P4
  SITE 56: note = RuvC_P5
  REGION 175..260: note = Tnp_domain
  SITE 183: note = Tnp_P1
  SITE 213: note = Tnp_P2
  SITE 221: note = Tnp_P3
  SITE 222: note = Tnp_P4
  SITE 234: note = Tnp_P5
MTKLTQLPENTLIAMEACASSHHWARQMKQHGFEVMLIPAQFVKPFVGHQKNDANDARAICEASQRPDVHPVQVKTIEQQDIKALRNVRQRLVDNRIALVNQSRAMAAEYGVIFPKHVTKFQELLPLAIEDASNQLSHIMRRLLIENYDELRQLNRDIQQVEHDLIELCKTNHRFKALQEVPGFGPIISSALISELGTGKQFTNGRQFSAWCGLVPKQHSSGGKSCLKGITKNGNKQLRTLILHGARAVVRYADKRQDKMGMWLRELIARRGKVKAVVALANKLCRIGWHLLSSGEQFNVNKAFA

SEQ ID NO: 15974 - protein, 410 aa, unidentified
  source 1..410: note = protein_48d09e2
  REGION 5..164: note = RuvC_domain
  SITE 8: note = RuvC_P1
  SITE 61: note = RuvC_P2
  SITE 101: note = RuvC_P3
  SITE 103: note = RuvC_P4
  SITE 106: note = RuvC_P5
  REGION 272..358: note = Tnp_domain
  SITE 280: note = Tnp_P1
  SITE 311: note = Tnp_P2
  SITE 319: note = Tnp_P3
  SITE 320: note = Tnp_P4
MVLFVGDDWAEDHHDVEVQDQTGRRLGKARLPEGVAGVARLHELIAGFTGEETSADQVLVGIETDRGPWVEALVAAGYRVFAVNPRQVARYRERHGTSGAKSDAGDAHALADMVRTDAHQLREIAGDSPLVEGIKVVARAHQTMIWERHRHMLRLRSSLREYFPAALEAFDDLTAPDTLELLGAAPDPRRAARLSRSRIGGALKRARRRDVEAKAERIQTLLRAEHLTQPAELVAAYAATTAAAVAVLIAFTTQIETLQGQVEACFGRHPDAEIYRSQPGLGEILGARVLGEFGDDSDRYQGARARKNYAGSAPITRASGKKTVVLARFVRNQRLAGPLQWQAFCALRASPGARAYYDQLRARGTGHQAALRQLSNRLVGILHGCLKTRTPYDEHTAWGHHQPKDQQAAA

SEQ ID NO: 15975 - protein, 411 aa, unidentified
  source 1..411: note = protein_1f999b9
  REGION 7..166: note = RuvC_domain
  SITE 10: note = RuvC_P1
  SITE 63: note = RuvC_P2
  SITE 103: note = RuvC_P3
  SITE 105: note = RuvC_P4
  SITE 108: note = RuvC_P5
  REGION 274..360: note = Tnp_domain
  SITE 282: note = Tnp_P1
  SITE 313: note = Tnp_P2
  SITE 321: note = Tnp_P3
  SITE 322: note = Tnp_P4
MAKLLYVGDDWAEDHHDVELMDSGGRRLARARLPEGAAGIARLHAMIGAELGADADMAEVAIGIETDRGPWVAALIAAGYTVYAVNPLSVARYRERHSVSGAKSDPADAHTLADMVRTDSHQLRPVAGDSAAAEAVKVVARSHKTMIWDRTRHTQRLRHALREYFPAALEAFDDLDAADALELLGRAPDPASAAKLNRSQIRAALKHAGRRDIDTKTSRIQDALGGEQIGRDPVITTAYAAATRSIVAVLTTLNEQIAILQEQVEEHFHRHPDAEIILSQPGLGPILGARVLAEFGDDPARYADAKARKNYAGTSPITRASGKKKVVLARFVHQDRLIDALMTQAFSALRASPGARAYYDKQRARGLGHNPALRQLANRLVGILHGCLKTRTLYDEATAWPSQNQDQQTAA

SEQ ID NO: 15976 - protein, 334 aa, unidentified
  source 1..334: note = protein_a9deed0
  REGION 7..149: note = RuvC_domain
  SITE 10: note = RuvC_P1
  SITE 53: note = RuvC_P2
  SITE 88: note = RuvC_P3
  SITE 90: note = RuvC_P4
  SITE 93: note = RuvC_P5
  REGION 208..295: note = Tnp_domain
  SITE 216: note = Tnp_P1
  SITE 246: note = Tnp_P2
  SITE 254: note = Tnp_P3
  SITE 255: note = Tnp_P4
  SITE 267: note = Tnp_P5
MEKVTTMGIDLAKRVFALHGVDAAGRVALRKTVRREQLVETVAALPPCLIGMEACSGAHEWARRFQELGHTVRLMAPVFVAPYRKSGKNDSNDAEAICEAVARPSMRFVPVKSAEQQAVLALHRVRQGWIEERTATINRLRAVLTEFGVVLPNRAQYVRRGAHAAAEALPALARRAVEDLRAHLGVLDERIAGYDRELQAQAGQSEAAQRLMQIRGIGPLTAVAIVATVGNARDFRSGRQFAAWLGLTPRQHSSGGKHRLGHISRRGDAYLRCLLVQGARSVLLTAMRHSDRMSRWTVSLQARCGYHKALVAVAAKNARIAWALLSKNQTLRAV

SEQ ID NO: 15977 - protein, 348 aa, unidentified
  source 1..348: note = protein_b6a84e5
  REGION 7..148: note = RuvC_domain
  SITE 10: note = RuvC_P1
  SITE 53: note = RuvC_P2
  SITE 88: note = RuvC_P3
  SITE 90: note = RuvC_P4
  SITE 93: note = RuvC_P5
  REGION 210..295: note = Tnp_domain
  SITE 218: note = Tnp_P1
  SITE 248: note = Tnp_P2
  SITE 256: note = Tnp_P3
  SITE 257: note = Tnp_P4
  SITE 269: note = Tnp_P5
MEQITRIGMDTSKHVFQLHGVSAGEEPILRRQLRRKEMVAFFQKLTPTVIAIEACGASHQWARLLSSFGHEVKLIAPQLVKPYVKRAKNDAADAEALCEAMSRPTMRFVPVKTAEQQAALMLVGVRDRLIRNRTQLSNSIRGFAAEFGFSAAKGMAHLIPLLERIREDEGVPPLARGLFASQAKEYAQLQARIAEVDAQLVAWHKADAQSQRLADIPGIGPIGASLLTMKTPAPEGFRSGRQFAAWIGLTPKDHSTAGRQRLGGITRAGDEALRCVLVAGATAIIQQVRTGKRRTGLAPWLVELLKRKPPKVAAVALANKLARIAWKMMVSGKAYTERSPDAAVVVAA

SEQ ID NO: 15978 - protein, 350 aa, unidentified
  source 1..350: note = protein_2aeb409
  REGION 13..155: note = RuvC_domain
  SITE 16: note = RuvC_P1
  SITE 59: note = RuvC_P2
  SITE 94: note = RuvC_P3
  SITE 96: note = RuvC_P4
  SITE 99: note = RuvC_P5
  REGION 218..303: note = Tnp_domain
  SITE 226: note = Tnp_P1
  SITE 256: note = Tnp_P2
  SITE 264: note = Tnp_P3
  SITE 265: note = Tnp_P4
  SITE 277: note = Tnp_P5
MPQRNVPRPAAVYGIDIGKNIFHVVGLGSDGVPVQKVRFRRDTLLQFFERAAPAIVGMESCAGSQWIARKIQALGHKVRLIPAQFVKPYVKSNKTDIIDAEAIAEAATRPTMRFAALKSEEQADLQALHRVRDQMIGTRTRLINQMRAFCLEYGIALRQGAGLFKLDLPLVLNDASNDLSPAMRKLLTDLFADLHQLEQRIQDVTREIAAIADREDVARRLMTIPGIGALGATALLAAVGNGRQFQKARDLAAWLGLVPREHSTGGKQKLLGISKRGNRYVRKLLVHGARSCFRHLDRTRDRLGSWLDGLQSRMHPNKAVVALAAKMARIVWVVLTKPGALYERRDPAFA

SEQ ID NO: 15979 - protein, 341 aa, unidentified
  source 1..341: note = protein_9f774cb
  REGION 7..153: note = RuvC_domain
  SITE 10: note = RuvC_P1
  SITE 56: note = RuvC_P2
  SITE 92: note = RuvC_P3
  SITE 94: note = RuvC_P4
  SITE 97: note = RuvC_P5
  REGION 213..299: note = Tnp_domain
  SITE 221: note = Tnp_P1
  SITE 251: note = Tnp_P2
  SITE 259: note = Tnp_P3
  SITE 260: note = Tnp_P4
  SITE 272: note = Tnp_P5
MKTVTHVGVDLHQRFCYLTAIDASGKKLRQAQVVNEAEALRAWLRQLPGERQVVVEASGFWPAFARAVKPEAERLVMVHPQRTRAIAAARLKNDRVDSETLAHLSRADLLPEAWMANERTQQTRLLTRLRITLGRQRAKAKNQMQVVLHQEGFLKPVADVFGKKGRVWLAGLALSPAGRVVVEVWLKVVDQMDAAILEQTKALERMAKEDVRARWLETVPGIGPYSAMVILGEVGEIERFASKRALASYAGLTPSVRESEGKRKRGGIGHHGSGTLRWLMLQVAQVACRHSPAAGAWYRRLKQRKPAQVALIALARKLLTAVWALLRHGACFDESVFAGQG

SEQ ID NO: 15980 - protein, 340 aa, unidentified
  source 1..340: note = protein_e2ea519
  REGION 6..148: note = RuvC_domain
  SITE 9: note = RuvC_P1
  SITE 52: note = RuvC_P2
  SITE 87: note = RuvC_P3
  SITE 89: note = RuvC_P4
  SITE 92: note = RuvC_P5
  REGION 211..296: note = Tnp_domain
  SITE 219: note = Tnp_P1
  SITE 249: note = Tnp_P2
  SITE 257: note = Tnp_P3
  SITE 258: note = Tnp_P4
  SITE 270: note = Tnp_P5
MKITTLGIDLAKSVFQLHGVGADGTIVLQRKLRRGAMLDVLGKLEPCLIGMEACATSHHWAREIAALGHEVRLIPPVYVKPYVKRQKNDAADAEAICEAVTRPNMRFVPVKTKGQQGVLVLHRSRDLLMRQRTMILNAIRAHFAEFGIVAAQGTRKVAELVMRLREDDSLGLPEIARSALLALAGQLANLAAEVRNIERQMMAWHRQNAASQRLETIPGVGLITATALAASVPDPTAFKSGRQFAAYLGLVPRQNSSGGKDRLGHISKMGNGYLRRLLVVGATSVTRRAPTTDTRTGVWVRSLLERKPTRVVTVAIANKTARTAWALLAKGESYRVAPTI

SEQ ID NO: 15981 - protein, 345 aa, unidentified
  source 1..345: note = protein_81197b4
  REGION 6..149: note = RuvC_domain
  SITE 9: note = RuvC_P1
  SITE 54: note = RuvC_P2
  SITE 89: note = RuvC_P3
  SITE 91: note = RuvC_P4
  SITE 94: note = RuvC_P5
  REGION 213..300: note = Tnp_domain
  SITE 221: note = Tnp_P1
  SITE 251: note = Tnp_P2
  SITE 259: note = Tnp_P3
  SITE 260: note = Tnp_P4
  SITE 272: note = Tnp_P5
MKISRVGIDLAKNVFQVHGVDEHGELVWKRSLKRATWIGVFFKTVEPGCEVAMEACTGAHHWARELQARGYKVKLIPPQFVKPFVKSQKNDANDAEAISEAMSRPAMHYVAIKTVEQQDIQAVHRVRSELMSHRNGKANQIRGLVAEYGLVAPQQLGPLRAAIPCWLEDAENGLTDRFRALLQGLWEDLVNLDQRVKALDTEVAAIAATHPDAKRLQQLRGVGPLVATALVAKFGDATHFKQGRQAAASVGLTPRHHGTGGKNRIFGITKHGDPYLRSILIHGARAVVSQAKQRDDRLSRWTTELAQRSHMNVAAVALANKTVRMAWAMLRNGTDYDPELAVAEV

SEQ ID NO: 15982 - protein, 344 aa, unidentified
  source 1..344: note = protein_56ea31a
  REGION 7..149: note = RuvC_domain
  SITE 10: note = RuvC_P1
  SITE 53: note = RuvC_P2
  SITE 88: note = RuvC_P3
  SITE 90: note = RuvC_P4
  SITE 93: note = RuvC_P5
  REGION 212..300: note = Tnp_domain
  SITE 220: note = Tnp_P1
  SITE 250: note = Tnp_P2
  SITE 258: note = Tnp_P3
  SITE 259: note = Tnp_P4
  SITE 271: note = Tnp_P5
MEEITTIGLDIAKSVFQVHAISATGTVVVRRQLKRRYVLQFFANLRPCLVGIEACATAHHWGLELEKLGHRVQLMPPRYVKPYLKRNKNDAADAEAICEAVTRPNMRFVPIKTLDQQSILMLHRTRMLFIRQRTMTINAVRAHLAEFGMVAGIGRNGLIELLHLIRKGEKPEIPAEACLCLAALADQVDLLKQRILELDRQIMKWHRAHDLSRKLEGIPGVGPLVATALAASVPDPGVFRSGRDLSAWIGLVPKQNSSGGKEKLRGISKAGNRYLRQLLVVGAMAVIKRAKLLGYTRHPWLVALMERRSTKVAAVALANKMARVAWAIMSRNEPYRILPVAAGN

SEQ ID NO: 15983 - protein, 337 aa, unidentified
  source 1..337: note = protein_18d1ec5
  REGION 7..152: note = RuvC_domain
  SITE 10: note = RuvC_P1
  SITE 53: note = RuvC_P2
  SITE 88: note = RuvC_P3
  SITE 90: note = RuvC_P4
  SITE 93: note = RuvC_P5
  REGION 211..297: note = Tnp_domain
  SITE 219: note = Tnp_P1
  SITE 249: note = Tnp_P2
  SITE 257: note = Tnp_P3
  SITE 258: note = Tnp_P4
  SITE 270: note = Tnp_P5
MSSIHILGIDLGKHCFHAIAHNRCGVEVLRRKFNRNQLLIFLSKIEPTTIAFEACGGAHWLARKCSEFGHQPRLIPPQYVKPYVKGNKNDFIDASAIAEAAGRPTMRFVAVKSEEAQVIAAIHRVRDSYIKERTATMSRIGAILLEFDLSFPKGHAKMKSLFQWLAEQTVSLPKSLLCELISIHEHYKYLNEQIKTQDNKLQTIVNNNESAQLLKTIPGIGDLTSTLCIADVSSPNNFTNGREMAAWLGLVPRQFSTGGKTKLLGMSKRGNKHLRTLFVHGARAVLSRLETTGKVFGEWLANLRATKPFNVVVVALANKLVRIAWAVLYHRQAFKAV

SEQ ID NO: 15984 - protein, 329 aa, unidentified
  source 1..329: note = protein_1f95b5b
  REGION 4..155: note = RuvC_domain
  SITE 7: note = RuvC_P1
  SITE 60: note = RuvC_P2
  SITE 100: note = RuvC_P3
  SITE 102: note = RuvC_P4
  SITE 105: note = RuvC_P5
  REGION 200..286: note = Tnp_domain
  SITE 208: note = Tnp_P1
  SITE 237: note = Tnp_P2
  SITE 245: note = Tnp_P3
  SITE 246: note = Tnp_P4
  SITE 259: note = Tnp_P5
MHYLGIDVAKAKLDCCLLLELSSCKRKTKSFSNNDSGFTELVHWLDKQRISASDTHAVMEGTGVYHERAAIALHDAGMQVSIINPAQARDFAKGLAIRSKTDGLDSLVLARYGALVQPTIWIPPTPQARALQALLSRVDAVHQDLLREKNRQEKADATDTPELIRQSLADSIMFLQTQLKKLRQDIDDHINRHPELRDDAALLITIPGVGIKTSQHLLSVIHLHHFHTAERLAAYLGVVPIQRQSGSSVLGRPKLSKTGPSHIRAVLYMAAVVASRHNPHVKALYERLIASGKSKMSALGAAMRKLVHLCFGVIKNRQPYNKNYSQESC

SEQ ID NO: 15985 - protein, 338 aa, unidentified
  source 1..338: note = protein_f80a6b6
  REGION 6..152: note = RuvC_domain
  SITE 9: note = RuvC_P1
  SITE 53: note = RuvC_P2
  SITE 91: note = RuvC_P3
  SITE 93: note = RuvC_P4
  SITE 96: note = RuvC_P5
  REGION 211..298: note = Tnp_domain
  SITE 219: note = Tnp_P1
  SITE 249: note = Tnp_P2
  SITE 257: note = Tnp_P3
  SITE 258: note = Tnp_P4
  SITE 270: note = Tnp_P5
MTILTVGIDLAKNVFAVHGVNEAGKAELVRPAVPRDKLHELIASLAPCVIGMEACSGAHHWARLFQASGHTVRLIAPKFVTPYRMTGKHGKNDAADAAAICEAIQRPHMRFVPIKSLPQQSVLMVHRARQGFVEQRTATFNRIRGLLSEFGIVLPLKAATVRRRACECLEDLPGYANTVIGDLLSEVTRLDERIAQYDVHIQAMSKDDARAQQLMQLGGVGPTTATCLLAMIGNGHDFDCGRQFAAWLGLAPGQYSSGGKTRLGRITKAGDAYLRSLLVLGAKALLAAAKHKSDSISRWAVALAERRGYWRAVVAIAAKNARMAWAVLRRGQAFALPA

SEQ ID NO: 15986 - protein, 411 aa, unidentified
  source 1..411: note = protein_d715f46
  REGION 9..154: note = RuvC_domain
  SITE 12: note = RuvC_P1
  SITE 58: note = RuvC_P2
  SITE 93: note = RuvC_P3
  SITE 95: note = RuvC_P4
  SITE 98: note = RuvC_P5
  REGION 255..341: note = Tnp_domain
  SITE 263: note = Tnp_P1
  SITE 294: note = Tnp_P2
  SITE 302: note = Tnp_P3
  SITE 303: note = Tnp_P4
  SITE 314: note = Tnp_P5
MDKIYDKCCGIDVHKKLIVACFRKGNKQEVREFGATTRELLVLADWLKDGGCEMVAMESTASYWKPLYNILESSDLNAMVVNARHMKAVPGRKTDVKDAEWIADLLQHGLLQASYIPDKDQRELRELVRYRKSLVGERTRELNRLQKMLEGANIKLSGTVADINGKSARSILEYMLTGEPIDSVKYDEMYEQKVIAHNLKASKDQIIDDLNGVMSPLQRRMMRELLDHLDELNVHIKNLDDEIDNFMKPEEKKASAAIQSITGIGNTSAQAIIVVIGTDMERFPDDAHMASWAGLCPGDNESAKKRKSGRTRKGNALLRTTLITCAHSAVKNKKSYFYAQFMRISAHRGKKRAYVAVAHSMLIAIYHILKDGVVFKDLGAEYYNQFNKERKINAYLKKLKALGWEAPAVAA

SEQ ID NO: 15987 - protein, 318 aa, unidentified
  source 1..318: note = protein_01ebc3d
  REGION 6..153: note = RuvC_domain
  SITE 9: note = RuvC_P1
  SITE 58: note = RuvC_P2
  SITE 98: note = RuvC_P3
  SITE 100: note = RuvC_P4
  SITE 103: note = RuvC_P5
  REGION 191..277: note = Tnp_domain
  SITE 199: note = Tnp_P1
  SITE 229: note = Tnp_P2
  SITE 237: note = Tnp_P3
  SITE 238: note = Tnp_P4
  SITE 250: note = Tnp_P5
MHTVAVGADIASAHFDAARLDAGGRYEHKRFSNDLAGSVAFLAWPAGFGGERPLARMEAAGAYSPPLAGFLFARGGPVAVANPARIAAFAKTELSRAKTDKADAKLVARFAREKQPPLWKPLPPALRALQSLLRRAEDLRGMLQTERNRLDAAEAARPIEAVTKALGAEMESVKARLRKRTDEDPDLRGRRDLLESIPGTGGAAAARLLAALHPHRGLASAKRAAAHAGLDVRIRDPGKRIGTRHLAKRGDPPLRKAPYMPALAAWRHNPAVKALCERLKAKGKNGKPVACAAMRKLLHLAFAILKSGKPFDPNYGLA

SEQ ID NO: 15988 - protein, 314 aa, unidentified
  source 1..314: note = protein_c94c352
  REGION 7..151: note = RuvC_domain
  SITE 10: note = RuvC_P1
  SITE 53: note = RuvC_P2
  SITE 93: note = RuvC_P3
  SITE 95: note = RuvC_P4
  SITE 98: note = RuvC_P5
  REGION 189..273: note = Tnp_domain
  SITE 197: note = Tnp_P1
  SITE 226: note = Tnp_P2
  SITE 234: note = Tnp_P3
  SITE 235: note = Tnp_P4
  SITE 246: note = Tnp_P5
MSQPNFVGIDVAKDTVEVACSDASTHSFTNNEAGHAKLVRWLTRKAVALVVLEATGGYEQACALALASAGLPVSVLNPRQARDFARAMGRLAKTDRIDASVLAEFAAVLHARGHQPRPLASTEQRELGALVARRRQLVTMLVSERQRLGVAHVRAKPSIEAVIALLLKQLADIDNDLQHALKERHADLSGLLQSVKGVGPTTASTLIAELPELGLLTRKQITSLVGLAPLNRDSGTFRGQRHIFGGRASVRRVLYVAALVATRFNPAIKTCYQRLVAAGKPKKVALVACMRKLLITLNAITRTKTPWRSDFGSA

SEQ ID NO: 15989 - protein, 358 aa, unidentified
  source 1..358: note = protein_3ad6ba0
  REGION 6..169: note = RuvC_domain
  SITE 9: note = RuvC_P1
  SITE 68: note = RuvC_P2
  SITE 106: note = RuvC_P3
  SITE 108: note = RuvC_P4
  SITE 111: note = RuvC_P5
  REGION 212..299: note = Tnp_domain
  SITE 220: note = Tnp_P1
  SITE 250: note = Tnp_P2
  SITE 258: note = Tnp_P3
  SITE 259: note = Tnp_P4
  SITE 272: note = Tnp_P5
MKKIVIGIDISKEKIDASAIDVRNAQQGIQKLGYETFENRPMGFRRMLVWARHLIKGVTLEEVLFCCETTGGYDRSLCDYIYAKDLDIWRESALQIKRSMGVRKGKDDKADSLMIAEYAMRHMDKAVIYETPSDNVRELKALLQYRHKLVQEKTEKKVRMSHLADTAAKSKSMSFILRDARKSIKALEKSIKECERQILELIKGDEELSRSYRHIISVSGIGIVNATALIAYSNNFRGITTANRMASYYGIAAFRDTSGTSVDKKAYVKCYSNSLLKAYLTQAAEWTIRENGIYHDYYLRLKEKGKPYGIIINNARNKLIHLVFSLVQNDMDYERNHEYIRMQRRVNADFTTGLKNIN

SEQ ID NO: 15990 - protein, 329 aa, unidentified
  source 1..329: note = protein_93bb9d8
  REGION 9..153: note = RuvC_domain
  SITE 12: note = RuvC_P1
  SITE 58: note = RuvC_P2
  SITE 98: note = RuvC_P3
  SITE 100: note = RuvC_P4
  SITE 103: note = RuvC_P5
  REGION 197..283: note = Tnp_domain
  SITE 205: note = Tnp_P1
  SITE 235: note = Tnp_P2
  SITE 243: note = Tnp_P3
  SITE 244: note = Tnp_P4
  SITE 256: note = Tnp_P5
MAKLSKKVIDVDVGAKFLTVSFNDQNNRDQVCNIENNQRSISSFLKKMSVDDYCFVIEATGNYSSRILHLSLEKGFESSLINCMSVKHFSRMKNIISKTDNEDAKLIRLYGEMFCPENYVPKNIEIEYLDQEIKLLNDLEEEKRRYTVKLKGLRFNPHLNPDTEKHYERRLKQLEKEIKEVELRLPKLQDEEFREIKDLLQSVSGIGEKTSLQLMTATSGFKNFNSAKSLVKYFGLAPRIYQSGKKSYSPGKCRTSKTHIRSLLYVCSWTAMKHNIHCKDLYLRLLAKGKPKKLALIAVCNKLLRICFGVVKNKIAYQQNYQKSFKILT

SEQ ID NO: 15991 - protein, 357 aa, unidentified
  source 1..357: note = protein_ae49e6d
  REGION 11..154: note = RuvC_domain
  SITE 14: note = RuvC_P1
  SITE 63: note = RuvC_P2
  SITE 99: note = RuvC_P3
  SITE 101: note = RuvC_P4
  SITE 104: note = RuvC_P5
  REGION 231..315: note = Tnp_domain
  SITE 237: note = Tnp_P1
  SITE 268: note = Tnp_P2
  SITE 276: note = Tnp_P3
  SITE 277: note = Tnp_P4
  SITE 288: note = Tnp_P5
MTSQPFITVVGGVDTHKDLHVAAVVDQHDRVLATEFFPTTRHGYKLLVHWLRSFGQIARIGVECTGTYGAGLLRYLHAQDIEVLEVTGPDQALRRRKGKDDTLDAENAAHAAYARVRAVTPKTRDGLVESLRVLKVSRKTAVAARRVALQMIRMNIVSAPDELRDQLRTLTRMKLIRTLAAWRPDLTKYRDVTGAYKIALKSLARRYLELTDEIADLDVMIKNIVDHLAPDLIKKPAVGYESAAQLLITAGDNPDRLTSEAAFAALCGASPIPASSGKTHRHRLNRGGDRQANSALHIIAIGRLRTDPRTQDYVAKKLSEGHSKMEALRCVKRYLAREMFYALKTRTQVINQTQIAA

SEQ ID NO: 15992 - protein, 405 aa, unidentified
  source 1..405: note = protein_925a90a
  REGION 18..176: note = RuvC_domain
  SITE 21: note = RuvC_P1
  SITE 75: note = RuvC_P2
  SITE 115: note = RuvC_P3
  SITE 117: note = RuvC_P4
  SITE 120: note = RuvC_P5
  REGION 280..369: note = Tnp_domain
  SITE 288: note = Tnp_P1
  SITE 318: note = Tnp_P2
  SITE 326: note = Tnp_P3
  SITE 327: note = Tnp_P4
  SITE 340: note = Tnp_P5
MGVPANTERVEEIMEPVIGLDVSKGSSVFQAFTGRNEAWGETEVMVHEAKGFGRLKACVEQLQEQTSQEPVVILEATGHYHRGLVNFLVQQGIRHCIVNPLQSKRARGTKLRKVKTDAADAWHLAEMYYRGEILPHRTPEDVYTELQHVTRQHEFVTGLYVQAKLNTRALLDQVFPAFEGIFYNLYSETALRVLECCLRGQEDRVYETMEKTAGQSHAKWWVEEKAQRVEEALSEWHQVKVSSSQVYILEGMLSLLHSLQEQLKRLEKQMQELSMGMPETELLRTIPGIGEKLAATLVAELGDIRQFESPKQLVAYAGLDPGVFNSGKFTASSNRITKRGSKRLRRALYLAVQCSLRRGDCSKLRPYYDKKKKEGKPYKVAVIACANKLLHHIYAILRKGQPYQV

SEQ ID NO: 15993 - protein, 391 aa, unidentified
  source 1..391: note = protein_94f2358
  REGION 4..163: note = RuvC_domain
  SITE 7: note = RuvC_P1
  SITE 60: note = RuvC_P2
  SITE 101: note = RuvC_P3
  SITE 103: note = RuvC_P4
  SITE 106: note = RuvC_P5
  REGION 267..353: note = Tnp_domain
  SITE 274: note = Tnp_P1
  SITE 304: note = Tnp_P2
  SITE 312: note = Tnp_P3
  SITE 313: note = Tnp_P4
  SITE 326: note = Tnp_P5
MVCVGIDVAKDKHDCCILDSEGTTLVDCFTIPNNMDGFKSLLQTIQDCSQKSDKIKVGLEATGHYSYNIRGFLLDNDLPVYVMNPLHTNLYRKSLSLRKTKTDRVDAKTIATMLLSDVDLKSYTDTAYHNEELKSLTRYRFDKVQERAKLKQSVSRLVTILFPELEQLVSSIHGTSIYALLSEYPGAKQISEAHLTRLANILVKTSRGHYRKDKATHIRDAARTSIGSVMPAKSLELKHTIKLIQELTSEINEIEDAIRKIMDELKPPILSIPGMGFHSAAMILAEVGDFSNFNSPDKVLAYAGCSPSTYQSGKLTNCYAHMEKRGSRYLRYALYTATKYVCYWNPVFTEYLTKKQAEGKHYNVALSHATKKLVRLIYALQKSGKAYLAVT

SEQ ID NO: 15994 - protein, 334 aa, unidentified
  source 1..334: note = protein_542ba5b
  REGION 7..149: note = RuvC_domain
  SITE 10: note = RuvC_P1
  SITE 53: note = RuvC_P2
  SITE 88: note = RuvC_P3
  SITE 90: note = RuvC_P4
  SITE 93: note = RuvC_P5
  REGION 208..295: note = Tnp_domain
  SITE 216: note = Tnp_P1
  SITE 246: note = Tnp_P2
  SITE 254: note = Tnp_P3
  SITE 255: note = Tnp_P4
  SITE 267: note = Tnp_P5
MEQITTVGIDLAKSVFSLHAVDGAGRMVFRRTVRRDQLLGVVAGLPPCLIGMEACSGAHEWGRRFQGFGHTVRLMAPKFVIPYRKSGKNDGNDAEAICEAVTRPNMRFVPVKSAEQQALLAMHRVRQGFIVERTAIINRLRGLMSEFGVVLPLRSVTVRRQAMEAAEALPALARRAISDLLDQLRVLDERIGGYDWEIEAQAKLSDAARRLMQIRGIGPTTALAIVATVGDAREFRNGRQFAAWIGLVPGQYSTGGKTRLGHISKRGDAYLRNLLVQGARSVLNSAGAHQDRMSRWALELQPRRGYYRTLVAIANKNARIAWALLARNEDLRTA

SEQ ID NO: 15995 - protein, 398 aa, unidentified
  source 1..398: note = protein_d68aacf
  REGION 6..162: note = RuvC_domain
  SITE 9: note = RuvC_P1
  SITE 60: note = RuvC_P2
  SITE 100: note = RuvC_P3
  SITE 102: note = RuvC_P4
  SITE 105: note = RuvC_P5
  REGION 267..354: note = Tnp_domain
  SITE 275: note = Tnp_P1
  SITE 306: note = Tnp_P2
  SITE 314: note = Tnp_P3
  SITE 315: note = Tnp_P4
  SITE 327: note = Tnp_P5
MFTIWAGVDIGKEHHHCVALDARGERRLSRRVGNDEPELLELIRDVLALAEPGEILWAMDTNRGSAALLIGLLLEHGQPMVYLTGLTVHRAAAGYRGQSKTDAKDAHVIADQARMRQDLGLLRPGDEVAVDLRILTSRRLDLVNDRTRQINRLREQLLGIFPALERALTRKGRGLVVLLTGYQTPGAIRRIGIRRLESWLKNRGVRNPSSLARTTLDAAEAQHTALPGETLAAGMVARIAKGVLALDTEIAELDALIEARFHDHPHAKVIETLPGMGPRLGAEFIAATGGDLTAFGTPDRLAGFAGLAPVPRDSGRIRGNLHRPRRYHRGLLRACYLAAMARLRCCPVSQHYYQRKRGEGKSHIQAVLALARRRLNVLWAMIRDNTSYELRPPIPATA

SEQ ID NO: 15996 - protein, 340 aa, unidentified
  source 1..340: note = protein_1243a01
  REGION 6..146: note = RuvC_domain
  SITE 9: note = RuvC_P1
  SITE 52: note = RuvC_P2
  SITE 87: note = RuvC_P3
  SITE 89: note = RuvC_P4
  SITE 92: note = RuvC_P5
  REGION 210..303: note = Tnp_domain
  SITE 218: note = Tnp_P1
  SITE 248: note = Tnp_P2
  SITE 256: note = Tnp_P3
  SITE 257: note = Tnp_P4
  SITE 269: note = Tnp_P5
MSIFVLGIDLGKNVCSLVGLDETGAVVLRRRLRRDGVADFVGRMEPCIVAMEACCGAHHLGRVLGARDHTIRLMSPEYVRPYVKANKNDDHDAEAIAEAATRPTMRFVPVKSEAQSDIQALHRARSRLAERTALINHLCALLLERGIVVAQGRRKLEDVLGVFADEDDSRLSSRMRLLIEDLRAEWRSLDERIAAFDAEFVRMARADEAARRLSTIPGIGVINATALTAAVGDAASFGRGRDLAAWLGLTPRQATTGGKPRLLGISKRGNRYLRANLIHGARAALPRIMAQDTSLGRWARRLSERAHKNIVVVALAAKLARIIWAVLRKDRGFDPAIAAA

SEQ ID NO: 15997 - protein, 344 aa, unidentified
  source 1..344: note = protein_8515010
  REGION 5..152: note = RuvC_domain
  SITE 8: note = RuvC_P1
  SITE 55: note = RuvC_P2
  SITE 92: note = RuvC_P3
  SITE 94: note = RuvC_P4
  SITE 97: note = RuvC_P5
  REGION 212..300: note = Tnp_domain
  SITE 220: note = Tnp_P1
  SITE 250: note = Tnp_P2
  SITE 258: note = Tnp_P3
  SITE 259: note = Tnp_P4
  SITE 271: note = Tnp_P5
MDYFAGLDVSVNETSICIVDDTGRIVREVKVVSEPEALLAVLKNGAYHFKRIGLEAGPLSQWLYSTLGEATLPVICVETRHMRAVLKAQINKTDRNDARGIAQMMRAGLYRPVHVKTLRSQKLRTLLTHRKLLQSKAIAIENDLRSTLRNFGLKVGMVGAAKFEGRIRGLVENLPDLTTLVEPLLVVRRVLREQIAVLHRRVLAVVRVDDVCRRLMTIPGVGPVVALTFRVTVDVPARFRNSKAVGAVLGLTPCKYQSGESDYTGAISKCGDGMMRVMLYEAAQILLVRSTKWSWLKAWAMQIARRRGMKKAIVALARRLAVTMHRIWVDGTDFRWTRQEVVRA

SEQ ID NO: 15998 - protein, 424 aa, unidentified
  source 1..424: note = protein_417e955
  REGION 23..183: note = RuvC_domain
  SITE 26: note = RuvC_P1
  SITE 81: note = RuvC_P2
  SITE 122: note = RuvC_P3
  SITE 124: note = RuvC_P4
  SITE 127: note = RuvC_P5
  REGION 290..376: note = Tnp_domain
  SITE 298: note = Tnp_P1
  SITE 328: note = Tnp_P2
  SITE 336: note = Tnp_P3
  SITE 337: note = Tnp_P4
  SITE 349: note = Tnp_P5
MNFKMQDKQNQLIERISDTHLIVGVDIAQQFHVARAVNFRGIVVGDPLTFVNNEEGFVKLQNWIEKLKRLKNLDSTIVGMEPTGHYWKNLSKWLVKQKIEVVTVNPHLVKRNKENRDNTQSKSDKKDALVIADMVKNGYYSFVHPSSESFEKLRVLISNRDVIVKRLVSSTNQIHRWVDIVFPELRQVFKDVTCKGAIATLRLFPTPIEIASLEPLDVMRGWKSLMQRQPGPKKAQLLINLAKSSIGTGQALDAYKFHLEQLLEEYDLAIKQLERFEQQVKEVLNKIPFASKLLMIKGISEISLAGILGEAGDLSGFSHGNSLLRHAGLHLAEASSGKWKGQIVLSKRGRSRLRRFLYLATMSLVMNNPEFKAIHAYNVKVKKMKKMKSIMKLVGKLARIFVGIAKRNESYCASKLQETIPLAA

SEQ ID NO: 15999 - protein, 411 aa, unidentified
  source 1..411: note = protein_da681fb
  REGION 5..163: note = RuvC_domain
  SITE 8: note = RuvC_P1
  SITE 62: note = RuvC_P2
  SITE 102: note = RuvC_P3
  SITE 104: note = RuvC_P4
  SITE 107: note = RuvC_P5
  REGION 273..373: note = Tnp_domain
  SITE 281: note = Tnp_P1
  SITE 311: note = Tnp_P2
  SITE 319: note = Tnp_P3
  SITE 320: note = Tnp_P4
  SITE 333: note = Tnp_P5
MNPVVGLDVSKGESEVQAFLDKGKPYHKSFSIKHDLDGLGSLLEYLEGLKAKTGIQPSVVLEATGHYHAPVVQFLEEHQYLLIIVNPLISHRAKSSSLRKVKTDAIDAYRLCELYYKEDLEPYKKRGIQLLNLRNLTRQHENITGLYVQTKLQFQAVLVQVFPEYTGVFGDLYSVVSLLVLKEYPASEDISAVTENALTNRIKELCKSRSIKWAEEKAQRLKQAAVRNPFQKTLYQSHLLSLSMYINMLLQYKKHLSELETEIDTLAKEIEEYKIIQSIPGIGEKIAATIISEIGEIDRFNHPKKLVAFAGVDPEVFESDKFKATLVRITKRGSSRLRHALYMAVRSGIRDCRKQKTTDEIIPRNKKLREFYDKKRNEGKLFKVAVIACVNKLLHWIYALLKNRTTFQDIA

SEQ ID NO: 16000 - protein, 343 aa, unidentified
  source 1..343: note = protein_5848edc
  REGION 6..153: note = RuvC_domain
  SITE 9: note = RuvC_P1
  SITE 63: note = RuvC_P2
  SITE 102: note = RuvC_P3
  SITE 104: note = RuvC_P4
  SITE 107: note = RuvC_P5
  REGION 208..296: note = Tnp_domain
  SITE 216: note = Tnp_P1
  SITE 247: note = Tnp_P2
  SITE 255: note = Tnp_P3
  SITE 256: note = Tnp_P4
  SITE 269: note = Tnp_P5
MKKIAIGIDFAKEKFDVTVKNVTNGTSIYGQFPNTPAGGRNMVRMVRKFAKGTTGEDWIFCGEDTGYYSQTIARYLTEKGYFVWLQNPYCIKHSEGSIKRGKNDKADSVSIAEYAHRYEDKARRYELPSKVSEELHMLLTRRDAYVRAKRVILSGAMEIPKRDKQGESITLIKSSAKRLLREIDEEIDLLEAQMEKLVEEQEDTKKNYEILRSFKGIGIVNAMCFIAYTDNFKKFDLKARKIATYWGVAPFGKDSGKTIHVDPHVSDFCNHWLKAILSNAANSAILCNPLIIPYHERLKKTGKCDGICKNNVKNKIIQIVTAMIRKGEKFDAEYKFTNKEADA

SEQ ID NO: 16001 - protein, 343 aa, unidentified
  source 1..343: note = protein_18832ec
  REGION 5..153: note = RuvC_domain
  SITE 8: note = RuvC_P1
  SITE 55: note = RuvC_P2
  SITE 92: note = RuvC_P3
  SITE 94: note = RuvC_P4
  SITE 97: note = RuvC_P5
  REGION 212..300: note = Tnp_domain
  SITE 220: note = Tnp_P1
  SITE 250: note = Tnp_P2
  SITE 258: note = Tnp_P3
  SITE 259: note = Tnp_P4
  SITE 271: note = Tnp_P5
MEYYAGIDVSLKDSSVCVVDGAGQLMREVKVASEPEALVRFFDELGLPVSRIGLEAGPLSLWLHAGLLGAGLDAVLLETRHVKAALSAMTVKTDRKDARGIAQLLRMGWYRPVHAKSAPCKDTRALLVGRKLLQGKLLDVELSIRGILRGYGLKVGEVSRGRFEARIRELITGHAILETVIGAMMTARTALWNEFTRLHREMLKIARADRICRRLMSAPGVGALVALTYRSAVDDPSRFGKSGTIGAYFGLTPKKYQSGETDHDGGVSKVGDAMVRTALFEAAHTMLTRAVSFSSLKRWALDVAKRRGMKRAKVALARKLGVVLHRMWVDATEFRWSNAVPAA

SEQ ID NO: 16002 - protein, 406 aa, unidentified
  source 1..406: note = protein_ce4e972
  REGION 5..161: note = RuvC_domain
  SITE 8: note = RuvC_P1
  SITE 58: note = RuvC_P2
  SITE 98: note = RuvC_P3
  SITE 100: note = RuvC_P4
  SITE 103: note = RuvC_P5
  REGION 275..361: note = Tnp_domain
  SITE 283: note = Tnp_P1
  SITE 313: note = Tnp_P2
  SITE 321: note = Tnp_P3
  SITE 322: note = Tnp_P4
  SITE 335: note = Tnp_P5
MLNAVGIDVSKGRSTVAVLQPGGIVIHKPFDVKHTSTELHQLTTYLGSLEGDTRVVMESTGRYHEPILKALTKAGLFVSAVNPHLIRNYGNNTIRKVKTDPADAKKIARYTLDNWAELREYTDMDTTRTQLKTLNSQFNFFMKQKVAAKSNLIALLDQTYPGVNKLFTSPTRSDGTEKWVDFAYSFWHVDCVRKSGIKAFTERYERFCQHHGYNYQPDMPQRIYDASRDLIAVLPKESVYKELIQDSIQELNLAARHVEELRSRMNELASMLPEYSTVMAMHGVGKTFGPQLIAEIGDVSRFTHQEALTAYAGVDPGRDDSGQHNSTSVNASKCGSPRLRKTLFLIMTVILQNGETDDPVSKFLFKKRSEGKPYLVYMTAGANKFLRVYYGKVKECLRNQEQTTTE

SEQ ID NO: 16003 - protein, 340 aa, unidentified
  source 1..340: note = protein_dc0bddf
  REGION 5..151: note = RuvC_domain
  SITE 8: note = RuvC_P1
  SITE 53: note = RuvC_P2
  SITE 91: note = RuvC_P3
  SITE 93: note = RuvC_P4
  SITE 96: note = RuvC_P5
  REGION 211..297: note = Tnp_domain
  SITE 219: note = Tnp_P1
  SITE 249: note = Tnp_P2
  SITE 257: note = Tnp_P3
  SITE 258: note = Tnp_P4
  SITE 270: note = Tnp_P5
MGEYVGLDVSLKETAVSIRRAGKRIWRGKCASDPQILAALIRKHAAVPERVVFETGPLSVWFFHALSAEGLPAICIDARHAKAALDMAANKTDANDADGLAHLAEVGFYKEVRVKSFDSMLSRTLVAARTRLVRIGTELSNQVRGLMKTFGLVVPPVSGSKFERQVEALLADNADLGCIIRPLLEAWHAVRLRAAELGRKLLADARRSDACQLLMSIPGVGVVTATSFITAIEDPTNFKRSRSVGAWVGLTTRRYQSGEIDYGGHISRRGDSHLRGLLYEAATVLLVRSRSECDLRKWGLELRERLGFKRAAVAVARKLAVIMHSMLITGEPFRETSVTA

SEQ ID NO: 16004 - protein, 392 aa, unidentified
  source 1..392: note = protein_6a1716c
  REGION 4..161: note = RuvC_domain
  SITE 7: note = RuvC_P1
  SITE 59: note = RuvC_P2
  SITE 99: note = RuvC_P3
  SITE 101: note = RuvC_P4
  SITE 104: note = RuvC_P5
  REGION 265..352: note = Tnp_domain
  SITE 273: note = Tnp_P1
  SITE 303: note = Tnp_P2
  SITE 311: note = Tnp_P3
  SITE 312: note = Tnp_P4
  SITE 325: note = Tnp_P5
MINIGIDVGKSRHCASVLDDRTGEWIYVPFFFTNDKAGFESLYERIKPYLNRKHAVGMECTGHYMYNLSNFLLEKKCTVMYINPRATHMRRIELGRAAKNDKLDSKMISEMLSEKHFWQHVTEHSLQLYELRELTRVYHQLKEQQNQDQNRLQRALDIVFPEYTGLSWKSYGTAYMNVLRRYPSAAIIASTDIRSLRSVLATKGRGRKSSVTAEILKSAAKDSIGDAHNVAVELEIQSVIAVIEARAEQIDILEKKIEEFSQQLNSPITSIPGIGSITGMSILAEIGDITRFSDASKLISFAGMAPGVYQSGSYDAARLPISKHGSRYLRKALYQAVFTVCNYSPIFNKYFSGKQSQGKQYRCAQGHAVRKLLRVIYKLLSTGTQYDPALCL

SEQ ID NO: 16005 - protein, 387 aa, unidentified
  source 1..387: note = protein_2619c6d
  REGION 5..161: note = RuvC_domain
  SITE 8: note = RuvC_P1
  SITE 59: note = RuvC_P2
  SITE 100: note = RuvC_P3
  SITE 102: note = RuvC_P4
  SITE 105: note = RuvC_P5
  REGION 261..347: note = Tnp_domain
  SITE 269: note = Tnp_P1
  SITE 299: note = Tnp_P2
  SITE 307: note = Tnp_P3
  SITE 308: note = Tnp_P4
  SITE 320: note = Tnp_P5
MIYYVGIDISKYKHDFCIISNTGEIIVENDSFENNKKGFQLLLDHLKPYNKSDVHICFEATGHYSLNLELFLTDQDYSFMKMNPLVIHQFLKARSLRRTKTDKADSITIANYLMSVPYKPNSDLLYHIYTLKSLCRSREQLIKERSKFQVLLTNVLDKVFPELKPFFNNKISETLLYILNKYKNPKHISLMKDYDSLRKISRGKFSYVKFVKLKELAKITVGHYDNNTDLLISTYVSLIQTFNDKIDPIDKQISTIIKELNPRMLSIPGMGEISAATILSEYEDIKNFSSPSKMLAFAGLEPSVIESGTLQSNGKMVKHGSGHLRYSIMNIAMIILRYSPTFYDYYLKKRSEGKCHRVALSHVCKKLIRVIYCLEKNDIAFDPSLLK

SEQ ID NO: 16006 - protein, 338 aa, unidentified
  source 1..338: note = protein_b61bd4e
  REGION 7..149: note = RuvC_domain
  SITE 10: note = RuvC_P1
  SITE 53: note = RuvC_P2
  SITE 88: note = RuvC_P3
  SITE 90: note = RuvC_P4
  SITE 93: note = RuvC_P5
  REGION 211..300: note = Tnp_domain
  SITE 219: note = Tnp_P1
  SITE 249: note = Tnp_P2
  SITE 257: note = Tnp_P3
  SITE 258: note = Tnp_P4
  SITE 270: note = Tnp_P5
MAQVSTIGLDLAKNVFQVHGLDPQGKVLVRRPLRRTEVLPFFAKLAPCLIGMEACGTAHHWARELTKLGHTVKLMPPAYVKPYVKRGKTDAADAEAIAEAVQRPTMRFVAIKTTDQQAVLMLHKVRDLLVRQRTMLINALRGHLAEFGIVAAQGAVGVRSAIAQFRADQASLPELARSAIRHLIGQIEAVAEDVKKAETEILAWCRADAASRRLLTIPGIGLITASAIAAAVPDPTLFRSGRQFAAWLGLTPRSQSSGGKERLGRISKQGDGTIRRLLVVGATAVIRVARQDNPGRAWAKRLLERKPARVVSVALANKTARIAWAVMMRGEVYRAPAV

SEQ ID NO: 16007 - protein, 351 aa, unidentified
  source 1..351: note = protein_ee80c4e
  REGION 17..159: note = RuvC_domain
  SITE 20: note = RuvC_P1
  SITE 63: note = RuvC_P2
  SITE 98: note = RuvC_P3
  SITE 100: note = RuvC_P4
  SITE 103: note = RuvC_P5
  REGION 222..307: note = Tnp_domain
  SITE 229: note = Tnp_P1
  SITE 259: note = Tnp_P2
  SITE 267: note = Tnp_P3
  SITE 268: note = Tnp_P4
  SITE 280: note = Tnp_P5
MKRTSMEEVSVEEVTVIGIDLAKSVFQLHGADASGRPVFRKKLSRAQFTRFVAEHPPCLVAMEACASSHYWEREFMKLGHEVRLIPPIYVKPFVKRQKNDANDAEAIAEAVVRPTMRFVPVKSAEQQARSMVFKTRDLLVRQRNALINALRGHLMEYGFIAPPGRTFVRKLEAQLDAPESMLPSGVTELCRLHLEQIGSLDVRIIRIEKRLKEEAKNDPETIRLQTAPGVGPVSAMAIQAFAPPMEGFRRGRDFAAWLGLVPVQKSTGGRQILGRTSKMGQRDIRRLLIIGAMTRVRWAVKNGPPKGSWLEQMLGRKPRMLVAIALANKTARAIWAMMTKQEDYRDPVLAA

SEQ ID NO: 16008 - protein, 274 aa, unidentified
  source 1..274: note = protein_3632cc2
  REGION 6..88: note = RuvC_domain
  SITE 28: note = RuvC_P3
  SITE 30: note = RuvC_P4
  SITE 33: note = RuvC_P5
  REGION 149..241: note = Tnp_domain
  SITE 157: note = Tnp_P1
  SITE 187: note = Tnp_P2
  SITE 195: note = Tnp_P3
  SITE 196: note = Tnp_P4
  SITE 208: note = Tnp_P5
MARQIADLGHEPKLISPQFVRPFVKSNKNDFVDAEAICEAASRPSMRFVKPRTQDPQAMAALHRVRDALIRQRVKTTNQMHAFLLEFGVSLPRGIAVIRRLSAVLEENDFPPYLARVLSRLHRHYVYLCGEIDEVDKELKTHLAEDENSQRLLTIPGVGPVTASLLATRLGDGKNYASSRDFAASTGLVPRQYSTGGKTTLMGISKRGDKNLRRLLVQCARVFIQRLEHNPGRLAEWVRKQLANHHSNVVACALANKLARIAWAVTAYQAAFSQ

SEQ ID NO: 16009 - protein, 341 aa, unidentified
  source 1..341: note = protein_6d6da48
  REGION 5..151: note = RuvC_domain
  SITE 8: note = RuvC_P1
  SITE 53: note = RuvC_P2
  SITE 91: note = RuvC_P3
  SITE 93: note = RuvC_P4
  SITE 96: note = RuvC_P5
  REGION 211..297: note = Tnp_domain
  SITE 219: note = Tnp_P1
  SITE 249: note = Tnp_P2
  SITE 257: note = Tnp_P3
  SITE 258: note = Tnp_P4
  SITE 270: note = Tnp_P5
MTEYIGLDVSMKETAISIRREGKRIWRGKCASDPAVIAELIRKRAPIVKRVVFETGPLSVWFFHALRAERLPAICIDARHAKAALDMAANKTDANDADGLAHLAEVGFFREVRVKGFDSMLARTLVAARTRLVRMTTELSNQIRGIMKTFGLVVPAGKGSTFEKNVRSLLINHKDLADIVLPMLDAWLGLRIRAAELGRQLLADARQSQACRILMSIPGVGAITATSFATAIEDPDNFRKSRAVGAWIGLTTRRYQSGEVDYDGHISRRGDRHLRGLLYEAASVILTRSSKESYLRTWGLQLRERIGFKRAAVAVARKLAVIMHTMLKTGEFFNPNAGAAT

SEQ ID NO: 16010 - protein, 407 aa, unidentified
  source 1..407: note = protein_f2b0945
  REGION 4..163: note = RuvC_domain
  SITE 7: note = RuvC_P1
  SITE 60: note = RuvC_P2
  SITE 100: note = RuvC_P3
  SITE 102: note = RuvC_P4
  SITE 105: note = RuvC_P5
  REGION 273..359: note = Tnp_domain
  SITE 281: note = Tnp_P1
  SITE 312: note = Tnp_P2
  SITE 320: note = Tnp_P3
  SITE 321: note = Tnp_P4
MIFVGVDWAEAHHDVCILDVDGNVLGRRRVGDSFAGVGELHALVAAHLGDDDEADQVVVGIEKDRGLIVTALVAANYQVYGINPMAAARYRERHHVSGSKSDPGDAKMLADLVRTDRQNHRQVAGDSALINGVQVLARAHQNAIWGRQRQVNALRSALKDYYPGALEAFGTDLSHMDAVAVLSVAPTPAIGRTLSRAKLVATLKRGGRQRQLDERAEKIQAALRKEQLHEPKVLEDAYGQVTSSIVRTIALMSSEIAELEKVMSESFEQHPSAKIVRSLPGMGTVLGARVLGEFGDDPNRYFDAKSRRNYAGTSPVTKASGKYRAVFARRSRNKRLADALDQLAFCSLISSPGARRYYDEMRAREKTHRKAVRQLANRWVGILHTCLERGCLYDEEIAWPTPEEIAA

SEQ ID NO: 16011 - protein, 319 aa, unidentified
  source 1..319: note = protein_74b03ba
  REGION 6..152: note = RuvC_domain
  SITE 9: note = RuvC_P1
  SITE 57: note = RuvC_P2
  SITE 97: note = RuvC_P3
  SITE 99: note = RuvC_P4
  SITE 102: note = RuvC_P5
  REGION 192..278: note = Tnp_domain
  SITE 200: note = Tnp_P1
  SITE 230: note = Tnp_P2
  SITE 238: note = Tnp_P3
  SITE 239: note = Tnp_P4
  SITE 251: note = Tnp_P5
MPQTIIGVDIAKRKFDVARLCEHKYRHKKFDHNAQGFVAFLDWLNSFGDPQPWVCMEATGAYSVPLAEFLVERGYRVSVVNPAKIHAFAKSELSRTKTDKVDAKLIARYCLSLQPDRWTPPPRAIRELQALLRRVEHLLEMQQMERNRLATADPAIVASLKTVLDMLDKELEETRQRIKSLIDNDPDLRQRRHLLESIPGIGPAASAYLLTALSPHYGFSSAKQAVAYAGLAPAIQKSGKWVGKTRLSKTGDPALRKALYLPALVAWQYNPIIRTFCQRLKDNGKNGKAIVCAAMRKLIHIAFAILQSGKPFDPKLSLA

SEQ ID NO: 16012 - protein, 344 aa, unidentified
  source 1..344: note = protein_a827bd7
  REGION 5..151: note = RuvC_domain
  SITE 8: note = RuvC_P1
  SITE 54: note = RuvC_P2
  SITE 91: note = RuvC_P3
  SITE 93: note = RuvC_P4
  SITE 96: note = RuvC_P5
  REGION 211..297: note = Tnp_domain
  SITE 219: note = Tnp_P1
  SITE 249: note = Tnp_P2
  SITE 257: note = Tnp_P3
  SITE 258: note = Tnp_P4
  SITE 270: note = Tnp_P5
MEEYIGLDVSLKETAVSIRRDGKRIWRGKCASDPKVIAEVIRKRAPAALRIVFETGPLSVWFYHALSAEGFPAICIDARHAKAALDMAANKTDANDADGLAHLAEVGFYREVRVKGFDSMLTRTLVAARTKLVHITTELSNQIRGLMKTFGLVVPPGKGSKFEEHVRELVIDRGDLATIVIPLLESWRSIRLHAAELGRQLVAGARQSQACQLLMSIPGIGAITATSFATAIEDPGNFRHSRSVGAWLGLTTRRYQSGEVDYNGHISRRGDSHLRTLLYEAATVILTRSSAESSLRTWGLQLRERVGFKRAAVAVARKLAVIMHAMLKSGEFFDRTAGAPAPAA

SEQ ID NO: 16013 - protein, 348 aa, unidentified
  source 1..348: note = protein_132ab26
  REGION 11..160: note = RuvC_domain
  SITE 14: note = RuvC_P1
  SITE 65: note = RuvC_P2
  SITE 101: note = RuvC_P3
  SITE 103: note = RuvC_P4
  SITE 106: note = RuvC_P5
  REGION 232..315: note = Tnp_domain
  SITE 238: note = Tnp_P1
  SITE 268: note = Tnp_P2
  SITE 276: note = Tnp_P3
  SITE 277: note = Tnp_P4
  SITE 288: note = Tnp_P5
MILAAEADMIIGVDTHLDTHTAAICDARGRVLWQLQVPATAAGYARLLAWARSVAGNSPVMWAVEGTRHYGLGLARYLTGAGEQVSEIDNSRHVGKRRAGKSDAIDAVRAARELLARPHPAQMRADGDREALRLLMIDRDNAVQSCKTARTALAAILVTAPAPLREQLRGLPRERRAKQCASLACPDDADRQTRVLHQTLTRLGQRIAGLADTAAELEAQITQIVEEMAPGLVAAEPGLGALSAAQLLLSWSHAGRIRSEAAFAMLSGTAPVPVSSGRTDRHRLNRLGDRQLNRALHTVAVTRMRCHPPTLAYVQRRRAEGKTDKDIRRCLKRYLARHLYRTLNSQFS

SEQ ID NO: 16014 - protein, 273 aa, unidentified
  source 1..273: note = protein_3ace4d4
  REGION 6..82: note = RuvC_domain
  SITE 21: note = RuvC_P3
  SITE 23: note = RuvC_P4
  SITE 26: note = RuvC_P5
  REGION 145..234: note = Tnp_domain
  SITE 153: note = Tnp_P1
  SITE 183: note = Tnp_P2
  SITE 191: note = Tnp_P3
  SITE 192: note = Tnp_P4
  SITE 204: note = Tnp_P5
MGMRLNSFPPQYVKPYVKTNKTDAADAEAICEAVARPNMRFVQIKTAEQQAILVLHTERNILIRERTACANSMRAILAEFGIIMPRTLSQLYKKVPEILEEYDNELSPFVRCSVARQLEHLQGVEDQITLIEQELSSWAKTQPACQRVLKVPGVGLMTATYLVASVGNGQQFHSAKQFAAWLGLVPREFSSGGKQRLGRISKRGDRYFRYLLVHGARAVAAVIERHKDNMPWLYRLLSKKAYNVAVVAQANKTARILWSMLVHHTEYRTLSVV

SEQ ID NO: 16015 - protein, 347 aa, unidentified
  source 1..347: note = protein_e157cbf
  REGION 12..154: note = RuvC_domain
  SITE 15: note = RuvC_P1
  SITE 58: note = RuvC_P2
  SITE 93: note = RuvC_P3
  SITE 95: note = RuvC_P4
  SITE 98: note = RuvC_P5
  REGION 217..303: note = Tnp_domain
  SITE 225: note = Tnp_P1
  SITE 255: note = Tnp_P2
  SITE 263: note = Tnp_P3
  SITE 264: note = Tnp_P4
  SITE 276: note = Tnp_P5
MRGAIHMQITTIGLDIAKNVFQVHGIGAAQKVIVRKQLRRGQVMAFFEALAPCLIGMEACATSHHWARELTKLGHMVRLMPAKDVRAYVKRNKNDAADAEAICEAVRRPNMRFVRIKSAEQQGQLMLHRARDLLMRQRTQVINALRAHLAEFGITAAQGREGIKELLAVVVQDEGSRLPVDAHASLTVLAAQLQSVQTMIGTLEKRIIAQHRSNEASKRLETIPGIGVIGATTIAAVVPDPRVFRSGRDFAAWIGIVPRQDSTGGKQKLGPISKQGDQYLRRILIVGAHAFLRRARQQPDKYPWLTQLLARRPFKVVAVALANKMARIAWALLAKGGTYRAPQLAAV

SEQ ID NO: 16016 - protein, 320 aa, unidentified
  source 1..320: note = protein_18f99ba
  REGION 9..159: note = RuvC_domain
  SITE 12: note = RuvC_P1
  SITE 58: note = RuvC_P2
  SITE 98: note = RuvC_P3
  SITE 100: note = RuvC_P4
  SITE 103: note = RuvC_P5
  REGION 193..277: note = Tnp_domain
  SITE 201: note = Tnp_P1
  SITE 230: note = Tnp_P2
  SITE 238: note = Tnp_P3
  SITE 239: note = Tnp_P4
  SITE 250: note = Tnp_P5
MASRESLFIGIDVSKQTLDVAFGADPHAPLETIPYTDEGVQLLVTRLQRLQPTLIVLEATGGLERMVFAQLLQAGLPTARVQPRRVRALAHAEGRQAKTDRLDARLLARFAERVRPPHHQATDEQRASLRDLLVRREQLIQMRTAEINRLTAAAPNLRPGIQKHIDWLDQEIRALEQELDNEAERTDELRRKRELLESVPGIGAITALNLLLRLPELGTINRKEAAAFVGVAPYANQSGAQHKPRHISGGRRDVRSVLYMATLAATRRRLVIRAFYQRLCQAGKPRKVAIVAAMRKLLTILGAILRQQKPWDPAVHTSAP

SEQ ID NO: 16017 - protein, 267 aa, unidentified
  source 1..267: note = protein_e1aaef5
  REGION 6..152: note = RuvC_domain
  SITE 9: note = RuvC_P1
  SITE 53: note = RuvC_P2
  SITE 91: note = RuvC_P3
  SITE 93: note = RuvC_P4
  SITE 96: note = RuvC_P5
  REGION 211..267: note = Tnp_domain
  SITE 219: note = Tnp_P1
  SITE 249: note = Tnp_P2
  SITE 257: note = Tnp_P3
  SITE 258: note = Tnp_P4
MPVVTVGIDLAKNVFAVHGVDEAGKAVLVKPRVSRDQLLALIAQLPPCLIGMEACSGAHQWARMFQQYGHTVKLMAPKLVAPYRMSGKRGKNEAADAAAICEAVTRPSMRFVPLKDEHQQATLCLHRTRQGFVEERTAIYNRIRGLLSEFGVVLPQSPERLRREITVHLDSLPSWANRCISDLLEHAGNIEARLAEYDRAIRQIARDDERSRRLMQLRGIGPTTASALLASLGAGHDFQNGRQVGAWLGLTPGQHSSGGKQRLGSIT

SEQ ID NO: 16018 - protein, 254 aa, unidentified
  source 1..254: note = protein_d4bc75f
  REGION 6..155: note = RuvC_domain
  SITE 9: note = RuvC_P1
  SITE 53: note = RuvC_P2
  SITE 93: note = RuvC_P3
  SITE 95: note = RuvC_P4
  SITE 98: note = RuvC_P5
  REGION 189..254: note = Tnp_domain
  SITE 197: note = Tnp_P1
  SITE 226: note = Tnp_P2
  SITE 234: note = Tnp_P3
  SITE 235: note = Tnp_P4
  SITE 246: note = Tnp_P5
MSDYTIGVDISKALLDVHRMPEGECAQFSNDKKGHKALIRWLNDLVVTRVIYEPTGAYHRGFEKRLAEVGLPLIKVNPLQARRFSQARGQRAKTDKVDAKMLAEMGLAFDLQADPVTPQIIHGLKELQVARMALVKDRTRTKNRMHRLTLALLETQHKARLRQIEKQLTALEAEMQRLIATEPQLARKSAILSSIKGISRITAAALIAEIPELGSLEAKQAASLAGLAPIARDSGTWKGKRFIQGGRKFLREAL

SEQ ID NO: 16019 - protein, 405 aa, unidentified
  source 1..405: note = protein_0434af8
  REGION 11..160: note = RuvC_domain
  SITE 14: note = RuvC_P1
  SITE 63: note = RuvC_P2
  SITE 100: note = RuvC_P3
  SITE 102: note = RuvC_P4
  SITE 105: note = RuvC_P5
  REGION 223..309: note = Tnp_domain
  SITE 231: note = Tnp_P1
  SITE 262: note = Tnp_P2
  SITE 270: note = Tnp_P3
  SITE 271: note = Tnp_P4
  SITE 282: note = Tnp_P5
MSELEKDLVFAGVDTHKDTHTLCLLDHMGRAIGTFRFAADAKGYDALAGKIGGPATCVGVGIEGTGSYGAGLTRRLLELGYCVYEVMVPGRARRKPGRPKSDPADAEVAARQVLARVNLSKPKDQSGWTEELRQLMIARDRLVQATSAMINAAKSLIVTAPEDLRRSLEGLSRKNLRSALSTLDPAAGGIILALGSLGKAWDLQDREADAIEERMKRVLEANAPALLTIYGCGTVSAAALAVAGGGNPERLKSEAEFASLCGVAPLLASSGKTERHRLNRGGDRRANRALYQIAVTRMSYDQRTKDYVGKRKRDGKSKKEAIRCLKRYIAREVFRALRNPLEIKGPSWKDLRPARQALGITLVEAGKALNVGFQRVSYAETGRLMNVRFLEEYDAWLKSQAKRES

SEQ ID NO: 16020 - protein, 355 aa, unidentified
  source 1..355: note = protein_deeafc8
  REGION 12..158: note = RuvC_domain
  SITE 15: note = RuvC_P1
  SITE 65: note = RuvC_P2
  SITE 101: note = RuvC_P3
  SITE 103: note = RuvC_P4
  SITE 106: note = RuvC_P5
  REGION 231..317: note = Tnp_domain
  SITE 237: note = Tnp_P1
  SITE 267: note = Tnp_P2
  SITE 275: note = Tnp_P3
  SITE 276: note = Tnp_P4
  SITE 290: note = Tnp_P5
MTSLQEFAEVVIGVDTHVATHSAAAVDARTGGVLAELTVPATPDGYQALVDFAGEHAGLRAWAIEGTGGHGAGLARLLAGRGELVVELDRPERTQRRHGAKSDPLDAIRAAREALSRAKLGTPRSAGDRQALSVLLAARRSAVDAGTDAQRQLFSLVIAAPECLRGRFRGHRLPAMLRLAAQIRISPRWDTETATTARVLHDLAQRAHALGAEAARHQKDILAIVRRWRPDLLAQFGVGPITAATILCAWSHPGRVRSEAAFAMLGGAAPIPADSGSGRTPVRFRLNRYGDRQLNRTLHTIALARLRYDPATQAYAQRRTAEGKTPREIKRCLKRYIARDLYRLLENPPRPLDNP

SEQ ID NO: 16021 - protein, 332 aa, unidentified
  source 1..332: note = protein_232ede8
  REGION 1..89: note = RuvC_domain
  SITE 26: note = RuvC_P3
  SITE 28: note = RuvC_P4
  SITE 31: note = RuvC_P5
  REGION 203..290: note = Tnp_domain
  SITE 211: note = Tnp_P1
  SITE 241: note = Tnp_P2
  SITE 249: note = Tnp_P3
  SITE 250: note = Tnp_P4
  SITE 263: note = Tnp_P5
MPGFFVTVVNPHLIKNFGNNTLRKVKSDPADAKKIARYTLDNWAELRQYSCMDNTRNQLKTLNSQFSFFMKQKVAAKANLIALLDNTYPGVNKLFNSPAREDGSEKWVDYAYSFWHVDCVRKTGLKAFTVRYEAFCRKHHYIYQPSKPEELFNASKELVAVFPKETSYKLLIQQSIQQLNLASAHIEQLRREMNALASTLPEYEVVMGMYGVGKTYGPQLIAEIGDVSRFTHREAITAFAGVDPGVEQSGQHNSKSNKASKCGTGRLRKTLFQVMTTLLQNAPENEPVYQFLNRKRSEGKPYYVYMTAGANKFLRIYYGKVKAHLRSLEQNE

SEQ ID NO: 16022 - protein, 408 aa, unidentified
  source 1..408: note = protein_ea5da4b
  REGION 6..170: note = RuvC_domain
  SITE 9: note = RuvC_P1
  SITE 63: note = RuvC_P2
  SITE 109: note = RuvC_P3
  SITE 111: note = RuvC_P4
  SITE 114: note = RuvC_P5
  REGION 282..368: note = Tnp_domain
  SITE 289: note = Tnp_P1
  SITE 319: note = Tnp_P2
  SITE 327: note = Tnp_P3
  SITE 328: note = Tnp_P4
  SITE 341: note = Tnp_P5
MNPLYVGIDVSSKSNVVYLMLPDGSKHSNFSVANSHDGSTQLVKRILSAIKSLSLDTVIIGLEATSVYGDNLVYFLREDATLVPYDKKIHVLNPKQVKNFKEAYNDLPKNDYVDSYVIADCLRFGRINKEVYQSDYRYKALQNLTRARFFAVQNLVKEKQRFINVLFKKYSTMTQEKVFGDTFSTTALAVYEEFESAEALASMDLQELTDFIMEKGKNRFPNPDAVAKAIQKAARSSYRLPKTVNDSVNQVLSISITSIKALDAQIKEFDKAIKAQMELLPNVLTSIPGIGPVYSAGIIAEIGDINRFPSQAQLGKYAGLAWTQNQSGDFEAENTKLIQSGNRFLKYYLCEGALSLVKCDTEYRNFYHSKYKEVNRHQHKRALALTARKFVRLVFRLLKDNRLYRAVE

SEQ ID NO: 16023 - protein, 350 aa, unidentified
  source 1..350: note = protein_63aa017
  REGION 13..155: note = RuvC_domain
  SITE 16: note = RuvC_P1
  SITE 59: note = RuvC_P2
  SITE 94: note = RuvC_P3
  SITE 96: note = RuvC_P4
  SITE 99: note = RuvC_P5
  REGION 218..303: note = Tnp_domain
  SITE 226: note = Tnp_P1
  SITE 256: note = Tnp_P2
  SITE 264: note = Tnp_P3
  SITE 265: note = Tnp_P4
  SITE 277: note = Tnp_P5
MSIRNKPRPAMVFGIDIGKNLFHTVGLDAAGNLVQKVAFRRETLLQFFERAKPTLVGMEACPGSQWLARKLSAMGHTVRIMPAQFVKPYVKSNKSDIIDAAAIAEAVTRPTMRFVEMRSTDQVDLQALHRVRDRLVAHRTRLISQMRAFCLEYGIAIHQGAGKFKADLPRVLSDEGNDLTPAMRRILVTVFDELRELELRLSALNREIDAIAARSDTARRLMTIPGIGPLAATALLAAAGSGRQFGKARDMAAWLGLVPREHSTGGKTTLLAISRRGNKYLRRMLCHGARSCVVHLDRSRDRIGAWLDRLGARMHTNKVTVAMAAKMARIAWVVLTHPGAMYERRDPALS

SEQ ID NO: 16024 - protein, 327 aa, unidentified
  source 1..327: note = protein_78ee40e
  REGION 4..160: note = RuvC_domain
  SITE 7: note = RuvC_P1
  SITE 59: note = RuvC_P2
  SITE 99: note = RuvC_P3
  SITE 101: note = RuvC_P4
  SITE 104: note = RuvC_P5
  REGION 199..285: note = Tnp_domain
  SITE 207: note = Tnp_P1
  SITE 236: note = Tnp_P2
  SITE 244: note = Tnp_P3
  SITE 245: note = Tnp_P4
  SITE 258: note = Tnp_P5
MVYLGIDVSKAKLDCSLFDPVTDKRKTKAVSNDAAGFAALSTWLAKQGVALGEVHGVMEATGVYHEQAALWLSEAGMRVSVVNPAQVRDFARGLAVRTKTDGTDSTVLARYGALTQPQLWEAPPLEIRELKALITRLEALETDARRELNRREKALAAKAPVLVQESLDNHLASLGKEIARLQQAIDDHINRHPGLNADRERLLSIPAVGTKTANRMLAVLHGRKFVSAGQVAAFLGLVPVEHQSGSSILKRPRLAKNGDAKTRAVLYMAAIVATRYNPHVRALYVRLRAKGKAKMAAVGAAMRKLVHLCFGVIKHQTTYQPNWVANR

SEQ ID NO: 16025 - protein, 357 aa, unidentified
  source 1..357: note = protein_f602b96
  REGION 14..156: note = RuvC_domain
  SITE 17: note = RuvC_P1
  SITE 60: note = RuvC_P2
  SITE 95: note = RuvC_P3
  SITE 97: note = RuvC_P4
  SITE 100: note = RuvC_P5
  REGION 223..310: note = Tnp_domain
  SITE 231: note = Tnp_P1
  SITE 261: note = Tnp_P2
  SITE 269: note = Tnp_P3
  SITE 270: note = Tnp_P4
  SITE 282: note = Tnp_P5
MGKSIIDNSSVTRVGLDLAKRVFRIHAVDAMGFVVIARSVNRRTLLKFFDALPRCVVAMEACSSAHHWGRQLLELGFAVRLIPPAHVKPYVRRNKNDAADAAAICEAAGRPGQRFVPVRSVENQAALMRHRARELMVGQRTAALNALRCHLGEIGVIAAQGVQNAYALKRLAGDGFDDSGEIVVPDCVRLALAPLVRQIDVLDEAIETIDRELEASARADETARRLMTIPGIGPITATALLATIQDFAAFSRGREFAAFLGLTPREHSSGGKPRLGRITKMGDRYLRKLLVQGACSALGHRKGHNDALRRWASGLLERKTVEYKFKLAAVALANKLARIVYALATKGGDYDDRPVAA

SEQ ID NO: 16026 - protein, 344 aa, unidentified
  source 1..344: note = protein_9f87473
  REGION 6..147: note = RuvC_domain
  SITE 9: note = RuvC_P1
  SITE 52: note = RuvC_P2
  SITE 87: note = RuvC_P3
  SITE 89: note = RuvC_P4
  SITE 92: note = RuvC_P5
  REGION 211..299: note = Tnp_domain
  SITE 219: note = Tnp_P1
  SITE 249: note = Tnp_P2
  SITE 257: note = Tnp_P3
  SITE 258: note = Tnp_P4
  SITE 270: note = Tnp_P5
MKITTVGIDLAKHVFQVHGVDEQGNTVLRKQLKRDQLSVFMATLPPCRVGMEACGGAHHWARKFEGFGHTVRLMSPQFVKPYVKSNKNDAADAEAICEAVSRPNMRFVPIKSVEQQAVLSLHRVRQGFVAARTAQANQIRGLLAEFGLVLPTGLCALRKQLLVLLDGVGDQVPEVFLRLVRRLHEHLVELDRQVGELEVQIRQWHRSCTQSQRLEKIPGVGPLTATALVTSIADARSFKNGRQLAAWLGLVPRQHSSGGKPTLLGISKRGDVYLRTLLIHGARAALSAAKRHAKSNPWLGKLLERRNPNVAAVALANKNARTVWALLAHDREFQVDYTPTLTTV

SEQ ID NO: 16027 - protein, 253 aa, unidentified
  source 1..253: note = protein_2a13ae7
  REGION 1..61: note = RuvC_domain
  SITE 2: note = RuvC_P4
  SITE 5: note = RuvC_P5
  REGION 124..212: note = Tnp_domain
  SITE 132: note = Tnp_P1
  SITE 162: note = Tnp_P2
  SITE 170: note = Tnp_P3
  SITE 171: note = Tnp_P4
  SITE 183: note = Tnp_P5
MDATDAEAICEAVTRPTMRFVPVKSEEQQSVLMLHRVRELLIRQRTMLVNALRGHLAEFGIVTRQGTVGVGMLIALVEDDDHDLIPPLSRSALLPLIGQLREVHEKVSELDRQIHAWHRSNELSRRLETIPGIGPITASAIAATVTDASLFKSGRQLAAWIGLVSRQNPSGGKDRVGRISEQGDPYLRRLLVVGAHAVLRFSRNGKTAATRWAAVLLAKKPYNIVTVALANKMARIVWALMATGRCFEAAGTV

SEQ ID NO: 16028 - protein, 272 aa, unidentified
  source 1..272: note = protein_4faade5
  REGION 2..75: note = RuvC_domain
  SITE 14: note = RuvC_P3
  SITE 16: note = RuvC_P4
  SITE 19: note = RuvC_P5
  REGION 138..229: note = Tnp_domain
  SITE 146: note = Tnp_P1
  SITE 176: note = Tnp_P2
  SITE 184: note = Tnp_P3
  SITE 185: note = Tnp_P4
  SITE 197: note = Tnp_P5
MPPAYVKAYVKRGKTDPGDAEAICEAVTRPSMRFVAIKSPEQQSLLAVHRGRDLLIRQRTQLVNMIRGQLAEFGIVVAKGIHHVLNLVARLLDGEALGIPALAAKVVTTLAEQLRDLQARIGGLEKDLVSWSQEDPVVKCLQTIPGIGIITASALAASVTDPQQFTSGRQFAAWLGLTPRANCSGGRERLGRISKMGDQYLRRLLVNGMTSRLRWVRRRPEAHPWAAKLLQRKPAKLVAVAMANKTARVAWAVMTRGEIYRAPQPSTRQVAA

SEQ ID NO: 16029 - protein, 339 aa, unidentified
  source 1..339: note = protein_cce1328
  REGION 6..147: note = RuvC_domain
  SITE 9: note = RuvC_P1
  SITE 52: note = RuvC_P2
  SITE 87: note = RuvC_P3
  SITE 89: note = RuvC_P4
  SITE 92: note = RuvC_P5
  REGION 210..297: note = Tnp_domain
  SITE 218: note = Tnp_P1
  SITE 248: note = Tnp_P2
  SITE 256: note = Tnp_P3
  SITE 257: note = Tnp_P4
  SITE 269: note = Tnp_P5
MKSMAVGVDIAKQVFQVHYVDQETGEIVNKQIKRVKFVEHFANRAKCLIGMEACGGAHHWARQLIQMGHEVRLMPAEFVKAFNIRNKSDAADARAIWLAVQQPSKPVAVKTEMQQAMLALHRMCEQLVKFRTMQMNGLRGLLTEYGDVMSKGRAKLDKEIPDALGRIAERLPAALIDTLREQWNGLSKLDEQIGEIERRMREWKKEDKSVKAISEIPGVGLLTATAAVAMIGDPKAFSSGREFAAWAGLVPKQTGSGGKVNLHEISKRGDTYLRTLLIHGARSVLTHAKEPGEWVEQMKRRRPPNVVIVALANKMARTIWAVLAHDRPYQKGYVSVKPC

SEQ ID NO: 16030 - protein, 341 aa, unidentified
  source 1..341: note = protein_7388778
  REGION 7..148: note = RuvC_domain
  SITE 10: note = RuvC_P1
  SITE 53: note = RuvC_P2
  SITE 88: note = RuvC_P3
  SITE 90: note = RuvC_P4
  SITE 93: note = RuvC_P5
  REGION 210..296: note = Tnp_domain
  SITE 218: note = Tnp_P1
  SITE 248: note = Tnp_P2
  SITE 256: note = Tnp_P3
  SITE 257: note = Tnp_P4
  SITE 269: note = Tnp_P5
MEKFIRIGVDLAKNYFQAHAVPAAGGPAVRRKLHRSRVRAFFANMAPCVIGMEACGSAHYWAREFAAMGHEVRLIPPAYVKPYVKRGKNDAVDAEAICEAMSRPGMRFVAIKSAERQATLMQHKARDLLIKQRTMTINALRGHLAEFGLVVAKGVGRIGELLALAREDATLPAAARTTAALLARLLEEIDAQIDALEQAIAEACRENPLGRLLDGVPGVGPLIASAVIAAAPEPQAFGSARDFSAWLGLTPRQNSSGGKPTLGRISKQGDKRLRKLLVLAATSLLRVVGRRKGALADWIRTLLSKKPSRLVTVAIANKLARILHAMMTTGEAFRGELFAKA

SEQ ID NO: 16031 - protein, 399 aa, unidentified
  source 1..399: note = protein_08a6c05
  REGION 4..161: note = RuvC_domain
  SITE 7: note = RuvC_P1
  SITE 60: note = RuvC_P2
  SITE 100: note = RuvC_P3
  SITE 102: note = RuvC_P4
  SITE 105: note = RuvC_P5
  REGION 266..353: note = Tnp_domain
  SITE 274: note = Tnp_P1
  SITE 304: note = Tnp_P2
  SITE 312: note = Tnp_P3
  SITE 313: note = Tnp_P4
  SITE 326: note = Tnp_P5
MFYCGIDIAKYKHEASVIDMSGKALSNSISFANDRQGCEKVLAIFEKSEITPDNVVIGMEATDHYWLSVYTFFLELGYTVKVINPIQSEAFRKMYIRQTKNDSKDSYIIAQIMRFGEYSATTLSEDNIIALRQLSRYRLALVDACGDCKRRVIALLDQIFPEYDKLFSDTFGKTSSELLLNCPTPEDMLAVSTRKLTNILNKASRGRFGKEKAEELKDAAKNTFGIAFAKDAFSFQIKQLIQQIIFTEKQLSELEEQIANLLHETNQYITTITGIGDVLGAIIVSEIGDINRFERPNQLVAFAGLDVTIKQSGEFSGTKNRISKRGSPYLRRAIWLAAQRAAFCDPILSEYYQSLKARGKHHLTAVGAVARKLCNIIFVILKENRPYFPTPPKKSQNLS

SEQ ID NO: 16032 - protein, 392 aa, unidentified
  source 1..392: note = protein_c26fb57
  REGION 10..163: note = RuvC_domain
  SITE 13: note = RuvC_P1
  SITE 61: note = RuvC_P2
  SITE 102: note = RuvC_P3
  SITE 104: note = RuvC_P4
  SITE 107: note = RuvC_P5
  REGION 225..310: note = Tnp_domain
  SITE 233: note = Tnp_P1
  SITE 263: note = Tnp_P2
  SITE 271: note = Tnp_P3
  SITE 272: note = Tnp_P4
  SITE 283: note = Tnp_P5
MEGTPARVVIGMDAHKRSVTIEVMTGGESIVGKGRLATDRDGLAAMRRYVQAWPEHVWATEGCQGIGRHVANRLLAEGEQVLDVPPKLSARARVFATGQGRKTDATDAHSVALVGTRMSGLRPVVNDEQLAVLRILVDRRRSLGEEHTRKMSQVHHLLLELIPGGAKKELSAAQAKALLATVRPRDAAGKTRRRVAAELVVDLERIYQRKKAANKELTALVAATGTTLMDLNGIGPSSAARLLVEVGDITRFPDNNHFGSWTGTAAIDASSGDNVRHRLSRGGNRQINRVLHIMATVQLRNPTEGRAYFDRCKARGKTSNESMRPLKRRLSDIVYRTMVNDAARHMATGPGGQRGNDSDSSAVGSQPHTNSSDKPLPGPATTHRRTRLAAAS

SEQ ID NO: 16033 - protein, 391 aa, unidentified
  source 1..391: note = protein_10fe246
  REGION 4..163: note = RuvC_domain
  SITE 7: note = RuvC_P1
  SITE 60: note = RuvC_P2
  SITE 101: note = RuvC_P3
  SITE 103: note = RuvC_P4
  SITE 106: note = RuvC_P5
  REGION 266..353: note = Tnp_domain
  SITE 274: note = Tnp_P1
  SITE 304: note = Tnp_P2
  SITE 312: note = Tnp_P3
  SITE 313: note = Tnp_P4
  SITE 326: note = Tnp_P5
MICVGIDVAKDKHDCFILSSEGEVLADVFTISNNAEGFGTLLQTIRRCTRPSDKIKVGLEATGHYSYNILGFLLDCGLPTYVINPLHTNLYRKSLSLRKTKTDRVDARTIATMLMSDVDLKSYTDTSYHNEELKSLTRYRFDKVRERAKLKTSISRLVCILFPELEKLVPSLHMASVYALLSEFPGAKQIASTHLTRLTNLLHETSKGRYGREKATQIRDAARNSIGSAMPAKSLELKHTIRLIGELDEEIEEIEKEINSIMEVVHSPITTIPGIGTRMGAMILAEVGDFSNFDSPDKILAYAGLSPSTYQSGQLTNCYSHMEKRGSRYLRYAIFNATKFVCNWDPNFAAYLAKKRAEGKHYNVAISHAAKKLVRLIYAMEKSRQPYRTAA

SEQ ID NO: 16034 - protein, 342 aa, unidentified
  source 1..342: note = protein_b267f9a
  REGION 6..148: note = RuvC_domain
  SITE 9: note = RuvC_P1
  SITE 52: note = RuvC_P2
  SITE 87: note = RuvC_P3
  SITE 89: note = RuvC_P4
  SITE 92: note = RuvC_P5
  REGION 210..296: note = Tnp_domain
  SITE 218: note = Tnp_P1
  SITE 248: note = Tnp_P2
  SITE 256: note = Tnp_P3
  SITE 257: note = Tnp_P4
  SITE 269: note = Tnp_P5
MKDTIIGVDLAKRVFQVHGATSSGDVLYRKKLSREQFRSFLASLPPCLVVFEACGSASYWAREAQSLGHEAKLIAPQYVRPFVKRQKNDAADAEAIAIAARQPEMRFVSPKSEDQQARAAVFRGRERLVRQRTELMNALRANFYEYGVVFPIGMNQTQKMASWLTEHGDDLPKIMVDECTDILALIGELSGRIAAKTKLLASLAAESDTARRLQTMPGVGPMTALAVEAFAPNLHEFKSGRDFAAWLGLVPRQHSSGGKERLGRVSKAGQTDIRRLLIIGAMSRVIGRGSRNVAASSWVGRLMHRKPKMLAAIALANKMARQLWAMLTKNKDYQDPATLAAA

SEQ ID NO: 16035 - protein, 338 aa, unidentified
  source 1..338: note = protein_215b3d9
  REGION 4..150: note = RuvC_domain
  SITE 7: note = RuvC_P1
  SITE 54: note = RuvC_P2
  SITE 90: note = RuvC_P3
  SITE 92: note = RuvC_P4
  SITE 95: note = RuvC_P5
  REGION 211..297: note = Tnp_domain
  SITE 219: note = Tnp_P1
  SITE 249: note = Tnp_P2
  SITE 257: note = Tnp_P3
  SITE 258: note = Tnp_P4
  SITE 270: note = Tnp_P5
MIHVGVDLHQRFCYMTALETRGKLLQSGAVNNERLALKRYFRQFRGQAVEVAVEACGFWPAFREVVEPEVKRLVLVHPQRVKAIASAKLKNDRVDSATLAHLLRCDLLPESWKADRDTQARRQQVRLRATLVRQRTRLKNQVHAVLHQQGQRSPVTDGFGKRGRQWLGQVKLPEKARQTLAVCLRMIDYYTQEIEEQNRQLSVEALKDARARWLMTIPGIGVYSAMLLLAEIGNIERFADKAGLCSYAGLVPRVRESAGKAARGGITRQGSPYLRWIMVEAAQVATRCSPAAKAYFERLRKKKHAHVARVALARKLLSAVHALLRDGVGFEESEFAAV

SEQ ID NO: 16036 - protein, 314 aa, unidentified
  source 1..314: note = protein_90c26f0
  REGION 10..159: note = RuvC_domain
  SITE 13: note = RuvC_P1
  SITE 55: note = RuvC_P2
  SITE 95: note = RuvC_P3
  SITE 97: note = RuvC_P4
  SITE 100: note = RuvC_P5
  REGION 190..274: note = Tnp_domain
  SITE 198: note = Tnp_P1
  SITE 227: note = Tnp_P2
  SITE 235: note = Tnp_P3
  SITE 236: note = Tnp_P4
  SITE 248: note = Tnp_P5
MAMHATRPVIGIDTAKEELVIQHDDEKRHLAVDNNPAAIRQWLAGLPKGCDIAIEATSTYHMEITERAHAKGHHVYVVDGYRLKNYREGVGGRAKTDLTDAQLLARYLRKEKDELRRWMPPPKAYRTLQSLLRRRAALVKARTALRQSLSAEPLLKTALATLLKQIDRIDHLIQKRLREAAHAAGLRDQVQRCQAIDGIGELTATALVMAFLRGDFRNSDAFVAFLGLDVRVRDSGKLKGKRRLTKQGDTEVRRLLHCSAMSGARHPTWKAFYQRYRDRGLKTTQALVILARKLARVAFALMKYQENYCAPRLS

SEQ ID NO: 16037 - protein, 342 aa, unidentified
  source 1..342: note = protein_21af8e6
  REGION 7..149: note = RuvC_domain
  SITE 10: note = RuvC_P1
  SITE 54: note = RuvC_P2
  SITE 89: note = RuvC_P3
  SITE 91: note = RuvC_P4
  SITE 94: note = RuvC_P5
  REGION 213..297: note = Tnp_domain
  SITE 221: note = Tnp_P1
  SITE 250: note = Tnp_P2
  SITE 258: note = Tnp_P3
  SITE 259: note = Tnp_P4
  SITE 271: note = Tnp_P5
MNTIKVVGIDLAKNVFQVCVWSTDNSVTWNKKISRQKLLDTLRAFPLNTLIAMEACQGAHYWGRTLQAMSYAVRLIPTQYVKALCKNQKNDANDVLAICETACRPGIHFVPVKTVEQQDIKALRSARQLVVEQRTALINQIRALLVEQRIVIPAGIQQLRQALSDILEDGNNALSFVLRRLLHSLQDDMRRFDARLHEMDKEIQAVSSQQSGYAHLLTIPGVGPLIAAAFVSDVNVDQFAQGRQLSAWCGLVPRQDSSGGKIHLSGMTKQGNRHLRTLIIHGAHAVMRCCQKREDVLGEWLRKLIARCGFMKATVALANKLVRIIWRILKDDVDFMMKKAVN

SEQ ID NO: 16038 - protein, 350 aa, unidentified
  source 1..350: note = protein_8a0a881
  REGION 7..149: note = RuvC_domain
  SITE 10: note = RuvC_P1
  SITE 53: note = RuvC_P2
  SITE 88: note = RuvC_P3
  SITE 90: note = RuvC_P4
  SITE 93: note = RuvC_P5
  REGION 212..299: note = Tnp_domain
  SITE 220: note = Tnp_P1
  SITE 250: note = Tnp_P2
  SITE 258: note = Tnp_P3
  SITE 259: note = Tnp_P4
  SITE 271: note = Tnp_P5
MNKVTTLGIDLAKTVFQLHGVDSAGKVVCRREVRRAQLMKVVAQLQPCLIGIEACGGANYWARRFAEFGHQVKMMSPQFVKPYRKSDKNDRNDAEAICEAVTRPSMRFVAVKTVEQQDMLTMHRVREGLMKERVALINRIRGSLCEYGIVMAKDVSNLRRQLPGILEDAANELTASARQLFSELYEDFVAREQRISQLEHSIRALGSQHDVVRRLLTVPGIGYLSATALYGAVGDATHYRNGRQLAAWMGLVPRQSSSGGKQRLLGITKRGDNYLRKLLVHGARSIVTRAERTARPADRWLNELRERRGKPRSYVAQANKTARIAWAIMAKGEVYRAPSAALDVSAAVAA

SEQ ID NO: 16039 - protein, 389 aa, unidentified
  source 1..389: note = protein_7423083
  REGION 1..146: note = RuvC_domain
  SITE 43: note = RuvC_P2
  SITE 83: note = RuvC_P3
  SITE 85: note = RuvC_P4
  SITE 88: note = RuvC_P5
  REGION 254..340: note = Tnp_domain
  SITE 262: note = Tnp_P1
  SITE 293: note = Tnp_P2
  SITE 301: note = Tnp_P3
  SITE 302: note = Tnp_P4
MDVSGRRLAKARLPEGVAGMARLHAIVGELAGDDADEVEVLVGIETDRGPWVAALVAAGYTVLVVNPLQAARFRDRLGVSGAKSDAGDAHVLADMARTHSHELRAVAGDTPQVQAVKVVARTHKTLIWERTRHTQRLRHALRDYFPAALEAFEDLDAADTLELLAKAPAPAQAARLTIGQISAALKRARRKNVADKAAAIQSVLRAEHLGQPEVVTGAYAASVQALIAVLNVLNAQVKTLQGQVEEHFGQHPAAEIVLSQPGLGQVLGARVLAEFGDDPTRYASAKARKNYAGTSPITRASGRKKAALARFVHNDRLIDALLTQAFSALGRSPGARAYYDRQRARGCGHNAALRQLANRLVGILHGCLKTGTLYDEATAWSHHAESLAA

SEQ ID NO: 16040 - protein, 341 aa, unidentified
  source 1..341: note = protein_b48a397
  REGION 4..148: note = RuvC_domain
  SITE 7: note = RuvC_P1
  SITE 51: note = RuvC_P2
  SITE 89: note = RuvC_P3
  SITE 91: note = RuvC_P4
  SITE 94: note = RuvC_P5
  REGION 208..293: note = Tnp_domain
  SITE 216: note = Tnp_P1
  SITE 246: note = Tnp_P2
  SITE 254: note = Tnp_P3
  SITE 255: note = Tnp_P4
  SITE 267: note = Tnp_P5
MDSIGIDLHKRESQLCIITEDGELIERRIVTSRERFTAVLGERPRARILLEASTESEWVARHLESLGHTVVVADPGFAAMYATRSKRVKTDKRDARTLCEALQLGAYREIHRASDAQRHLRAQLVVRDALVRTRTRYVAIFKAFVRREGLRILSGDAEHTVAKVLALPMPPHVFEELAPLVAMWAPLDAEIAAADARLLAVAKDHPVVTRLRTMPSIGPVTAIAFVASLDDVTRFHSAHQVQAYLGLVPSEYSSGDRRLQGRITKHGDARMRWLLVETAWRILRSPNPELAGLKGWAEQIAQRRGKRIAVVALARRVAGILYAMWRDDANYAATTGRAVAA

SEQ ID NO: 16041 - protein, 311 aa, unidentified
  source 1..311: note = protein_c062c2a
  REGION 5..148: note = RuvC_domain
  SITE 8: note = RuvC_P1
  SITE 52: note = RuvC_P2
  SITE 92: note = RuvC_P3
  SITE 94: note = RuvC_P4
  SITE 97: note = RuvC_P5
  REGION 188..272: note = Tnp_domain
  SITE 196: note = Tnp_P1
  SITE 225: note = Tnp_P2
  SITE 233: note = Tnp_P3
  SITE 234: note = Tnp_P4
  SITE 245: note = Tnp_P5
MQDIIGIDISKDRLDAFRLSDQQHYSFGNDKAGFKTLLKWIGNTEGLRIVYEPTGPYHRGMEEALAKAGHALVKVNPRQARCFAEATGTQAKTDRVDAMLLARMGLALDLAPRPVRGELMNELRELHVARLALIKDRTAAGNRAETAAISLIRRQAKARLAIIEKQLAEVDETISSLIAADPTLAERLDILTSIPGIGAVTACMLLIEMPELGTLEPKQAASLAGLAPFTRRSGKWKGKEMIRGGRASLRAAIFMPALVAIRFNTDLKRKYRQLLESGKAPKLAITAVMRKLVLLANALLRDGRKWTDRPA

SEQ ID NO: 16042 - protein, 312 aa, unidentified
  source 1..312: note = protein_437012f
  REGION 10..155: note = RuvC_domain
  SITE 13: note = RuvC_P1
  SITE 57: note = RuvC_P2
  SITE 97: note = RuvC_P3
  SITE 99: note = RuvC_P4
  SITE 102: note = RuvC_P5
  REGION 193..273: note = Tnp_domain
  SITE 201: note = Tnp_P1
  SITE 230: note = Tnp_P2
  SITE 238: note = Tnp_P3
  SITE 239: note = Tnp_P4
  SITE 246: note = Tnp_P5
MNETIVERFVGIDVSKSTLDVSIEPIGQTLHVTYDGAGISQIVGCLKEAVPTLVVMEATGGLEIRIATELASKGLPVAVINPRQARDFAKATGRLAKTDQVDAQMLAAFAKAIRPQARPLKDEDTCALNDMVSRRRQLIDMRVQETLRLGTAASKALQKNLNKHITWLDKQIAEFDHDLTKRLRDSDVWRTKDDLLRGIPGVGAVTTLTMLAKCPELGMLNRREIAALTGVAPLANDSGKRFIWGERADVRAVLYMAAVSAIRCNEPIKAFAERLKKAGKPPKVVIVACMRKLLTIMNSMLKNNAPWNPKFA

SEQ ID NO: 16043 - protein, 343 aa, unidentified
  source 1..343: note = protein_058f057
  REGION 6..148: note = RuvC_domain
  SITE 9: note = RuvC_P1
  SITE 52: note = RuvC_P2
  SITE 87: note = RuvC_P3
  SITE 89: note = RuvC_P4
  SITE 92: note = RuvC_P5
  REGION 211..297: note = Tnp_domain
  SITE 219: note = Tnp_P1
  SITE 249: note = Tnp_P2
  SITE 257: note = Tnp_P3
  SITE 258: note = Tnp_P4
  SITE 270: note = Tnp_P5
MSINVLGIDIAKNVFQLHGVDALGKAVLKKRLSRNQLAIYAANLPRCTIVMESCGGANYWARVFQRAGHSVKLISPQFVKPFVKTNKNDANDAEAIVEAASRPSMNFVPIKQLEQQDIQSIQRVRSRVVKNRTALINEIRGLILEYGIIVTPGATRVKRSLCGIIADRTNELTPLSRDCMQDLYDELVEVEARLKQLDKRVRQICQQNETCCRILKVPGVGELTATAMVAAVPNASEFSNGRHMSAWLGLVPRQSSSGNKQKLLGISKRGDRYLRTLLIHGARSALSHYKNTDNDYGRWLTCKRARLSFNKAAVALANKNARIIWSLLNTGEEFNCNAQMAAT

SEQ ID NO: 16044 - protein, 345 aa, unidentified
  source 1..345: note = protein_6eaee76
  REGION 6..147: note = RuvC_domain
  SITE 9: note = RuvC_P1
  SITE 52: note = RuvC_P2
  SITE 87: note = RuvC_P3
  SITE 89: note = RuvC_P4
  SITE 92: note = RuvC_P5
  REGION 211..298: note = Tnp_domain
  SITE 219: note = Tnp_P1
  SITE 249: note = Tnp_P2
  SITE 257: note = Tnp_P3
  SITE 258: note = Tnp_P4
  SITE 270: note = Tnp_P5
MELHTIGIDLGKTVFHLVGLDLRGEVVVRKKLSRKQLLHYTANLHVGLIGMEACGGAHFLGRALREQGHEVRLMPAQYVKPYVKTNKSDFIDAEAIAEAVARPSMRFVPIKTDDQLDMQSLHRVRERWVMRRTAIVNQIRGLLLERGITLRKGRKYVDAALPGILEDAAAKLSGALRILLAQLKLELDQMAVRIDEADAVLNQTARESAACQRLLAIPGIGPVTSTALIAAIGTGAAFHKGREFAAWMGIVPREHSTGGKQKLLGISKRGNTYLRTLFIHGARAVLQQRAKQTSGLRAWLAQLTARTHPNVAVVALANKLARIAWAVLAKNEVYRPLMLIGPAAA

SEQ ID NO: 16045 - protein, 412 aa, unidentified
  source 1..412: note = protein_5bc85ac
  REGION 24..184: note = RuvC_domain
  SITE 27: note = RuvC_P1
  SITE 82: note = RuvC_P2
  SITE 123: note = RuvC_P3
  SITE 125: note = RuvC_P4
  SITE 128: note = RuvC_P5
  REGION 287..374: note = Tnp_domain
  SITE 295: note = Tnp_P1
  SITE 325: note = Tnp_P2
  SITE 333: note = Tnp_P3
  SITE 334: note = Tnp_P4
  SITE 347: note = Tnp_P5
MAELICGEQAASKFCEGSFLMIYVGIDIAKNKHDCCILGMEGQILFDSFTFPNSKSGFQELTSSIQACLQKANEKEVRVGLEATGHYSTNLVAFLRNSGIEPVLFNPLSTNLFRKSQTLRKTKTDKVDARCIASMLRSANSAPHVSVSYHTDELKALTRSRYRLIGYRSKLKISLNRLLDIVFPELAGLVWSTTQKSVYALLLELPNTNAISHCRIDKLTRILHDSSKGKYGREKALLIRQAALDSIGSQSPALAFEIRQTIHLVQNVQVEVDQLDQEIENEVKRVNTPLLTIPGIGYTLASIILAEIGDIDRFDSPEQLLAFAGLEPSTHQSGNFSANNTPMVKRGSTYLRWAILQAARLVAMRDSTFKAYLKKKRHEGKHFLVALSHTGKKLVRVIFHMLKTNRVFVPQS

SEQ ID NO: 16046 - protein, 341 aa, unidentified
  source 1..341: note = protein_69e09a9
  REGION 7..149: note = RuvC_domain
  SITE 10: note = RuvC_P1
  SITE 53: note = RuvC_P2
  SITE 88: note = RuvC_P3
  SITE 90: note = RuvC_P4
  SITE 93: note = RuvC_P5
  REGION 211..296: note = Tnp_domain
  SITE 219: note = Tnp_P1
  SITE 249: note = Tnp_P2
  SITE 257: note = Tnp_P3
  SITE 258: note = Tnp_P4
  SITE 270: note = Tnp_P5
MANATLLGIDLGKHCFFLHAQDARGAQVWRKKMTRKQLYACLANCPVAVIAMESCAGAHWLARKCQSYGHQVRLIAPQFIKPFVKGNKTDFADAEAICEAASRPAMRFVAVKTAEQQTLLAFHRVREALVGERTATSNQIHAFLLEFGISLPVGTLAITRLPVLLDDPANALPPAIVTLLLRLHRRYAQLSQEILELETHIKQQTIEDEAGQRLLTIPGIGPITASSLLAMAGDARAFKCGRDFAASLGLVPRQHSTGGRATLLGISKRGNKQLRCLLVQGARAVMRYAERRTDALGCWLQALLRRRHSNVVACALANKMARIVWAILAKGGTYRAQRAIA

SEQ ID NO: 16047 - protein, 415 aa, unidentified
  source 1..415: note = protein_07342b9
  REGION 12..168: note = RuvC_domain
  SITE 15: note = RuvC_P1
  SITE 65: note = RuvC_P2
  SITE 105: note = RuvC_P3
  SITE 107: note = RuvC_P4
  SITE 110: note = RuvC_P5
  REGION 278..364: note = Tnp_domain
  SITE 286: note = Tnp_P1
  SITE 317: note = Tnp_P2
  SITE 325: note = Tnp_P3
  SITE 326: note = Tnp_P4
MASDWSEAVIFVGIDWAEEHHDVHVMNPDGQPLGRARVPEGIDGIARLHALVADHADDPGEVVVGIETDRGLLVTTLAAAGYQVYGINPRAVDRYRDRHAMSGAKSDGADAKVLADLVRTDRHNHRQVAGDSDLAEAIKVTARAHQNLVWARQRQVNQLRSALREYYPGVLATFGTDLAHRDVVAVLVKAPTPELGRRLSTAQIAAALRRAGRVRNVDARAAAIRDGLRAPQLAAPDVVADAYGTSAKALISVIATLTAQIDELESALADRFEQHPDADILRSLPGLAVILGARVLGEFGDDPNRYADAKARKNYAGSSPITKQSGSRKLALARYVRNRRLADAITLWAFSSLQSSPGARMLYDRRRAAGDTHHKALRALSNRWVGIMHGCLRHRTPYDERIAWGHLTDNLPTAA

SEQ ID NO: 16048 - protein, 259 aa, unidentified
  source 1..259: note = protein_f134eac
  REGION 6..147: note = RuvC_domain
  SITE 9: note = RuvC_P1
  SITE 52: note = RuvC_P2
  SITE 87: note = RuvC_P3
  SITE 89: note = RuvC_P4
  SITE 92: note = RuvC_P5
  REGION 210..253: note = Tnp_domain
  SITE 218: note = Tnp_P1
MNSMAVGIDIAKQVFQVHYVDRETGEIVNRAIKRTKFLEHFANRAACLIGMEACGGAHHWARQLMQMGHEVRLMPAEFVKAFNIRNKNDAADARAMWLAVQQPSKPVAVKTEIQQAMLALHRMREQLVKFRTMQMNGLRGLLAEYGEVMSKGRAKLDKEIPDALGRIAERLPAALIDTLREQWNGLAKLDEQIEEIERRMREWKKEDKAVKAISEIPGVGLLTATAAVAMMGDPKAFSSGREFAAWGAWCQSRPAQAAR

SEQ ID NO: 16049 - protein, 386 aa, unidentified
  source 1..386: note = protein_9ec9a8c
  REGION 5..158: note = RuvC_domain
  SITE 8: note = RuvC_P1
  SITE 56: note = RuvC_P2
  SITE 97: note = RuvC_P3
  SITE 99: note = RuvC_P4
  SITE 102: note = RuvC_P5
  REGION 220..305: note = Tnp_domain
  SITE 228: note = Tnp_P1
  SITE 258: note = Tnp_P2
  SITE 266: note = Tnp_P3
  SITE 267: note = Tnp_P4
  SITE 278: note = Tnp_P5
MGVIIGMDPHKRSATIEVIDSTGRVLETGRYSTDTAGYAEMLTAGRKFDTRIWAVEGCNGVGRHLAHRLVHDGETVIDVPSKLSAQVRVFSTGNGRKTDPVDAHSVALAALHAPNLRRVTADPELLALGMLADRRDGLGHARTDALNRIHRLLLELIPGGAKQFLSAPQARELIASLRPTDAATAVQLRLVTEQIEDLETIDRRIKTADKELRQLVTARGSTLMQLHGIGPSSAARLLADTGDIRRFRNRDRFASWNGTAPLDASSGQQQRHRLSRAGNRKINRVLHIMAVVQLRHRTAGRIYYDARKAGGKTSMEALRALKRRLSNVVYARMLADQRRREWAGPGGQSGTTTASSATELQPAPGPSDKPQPGPNTQANPRTPLRT

SEQ ID NO: 16050 - protein, 298 aa, unidentified
  source 1..298: note = protein_bc12890
  REGION 5..152: note = RuvC_domain
  SITE 8: note = RuvC_P1
  SITE 55: note = RuvC_P2
  SITE 92: note = RuvC_P3
  SITE 94: note = RuvC_P4
  SITE 97: note = RuvC_P5
  REGION 212..298: note = Tnp_domain
  SITE 220: note = Tnp_P1
  SITE 250: note = Tnp_P2
  SITE 258: note = Tnp_P3
  SITE 259: note = Tnp_P4
  SITE 271: note = Tnp_P5
MDYFAGLDVSVKETSICIVDDTGRIVREVKVASEPDALLPVLRNPAFHFKRIGLEAGPLSQWLFSTLAETGLPVICVETRHMRAVLQAQINKTDRNDARGIARMMRVGLYRPVHVKTLRSQKLRMLLTHRKLLQPKAIAIENDLRGTLRNFGLKVGMVGTVKFEARIKKLVENLPDLAVLVEPLLIVRRALREQLGILHGRLLAIVRDDEVCRRLMTIPGVGPVVALTYRATVDVPARFKNSKAVGAVFGLTPSKYQSGEINRTGAISRCGDEMMRVMLYEAAQIMLVRSTKWSWLKA

SEQ ID NO: 16051 - protein, 341 aa, unidentified
  source 1..341: note = protein_19103ba
  REGION 7..149: note = RuvC_domain
  SITE 10: note = RuvC_P1
  SITE 53: note = RuvC_P2
  SITE 88: note = RuvC_P3
  SITE 90: note = RuvC_P4
  SITE 93: note = RuvC_P5
  REGION 210..295: note = Tnp_domain
  SITE 218: note = Tnp_P1
  SITE 248: note = Tnp_P2
  SITE 256: note = Tnp_P3
  SITE 257: note = Tnp_P4
  SITE 269: note = Tnp_P5
MKKFIRIGIDLAKNYFQIHALVSEGGPAVTRKVRRSKMHEFFSQIEPCLIGMEACGSAHYWARELKAMGHEVLLMPPAYTKPYVKRGKNDAVDADACCEAMSRPGMRFVPIKSAEQQATLMLHKTRELLVKQRTMSVNALRSHLSEFGIIAAKGIGRVDELLELAESDATLPNAARTGVKVLSQAFEGLDKAIDDLEDEITSAHAQNEMTRLLYKVPGIGKIISSVIAASVPDPSVFKSGRDFAAWLGLTPRQNSSGGKRTLGAITKQGNRYIRKLLVLGATSLLNVMGKRKGALRDWIVGLLSKKPARLVTVALANKLARILWAMMKTGESFRTEMFAKA

SEQ ID NO: 16052 - protein, 319 aa, unidentified
  source 1..319: note = protein_8381b73
  REGION 3..148: note = RuvC_domain
  SITE 6: note = RuvC_P1
  SITE 50: note = RuvC_P2
  SITE 90: note = RuvC_P3
  SITE 92: note = RuvC_P4
  SITE 95: note = RuvC_P5
  REGION 189..273: note = Tnp_domain
  SITE 197: note = Tnp_P1
  SITE 226: note = Tnp_P2
  SITE 234: note = Tnp_P3
  SITE 235: note = Tnp_P4
  SITE 246: note = Tnp_P5
MFVGIDVAKAELVSGVRPTGTGWTAVNDDQRVRELVTQMQALGPTLIVLEATGGCELLCVAALAAAHLPVVVVNPRQERDVARATGQLAKTDRIDAEILARFADTVRPEIRTLPTVEAQELDALLTRRRQLLEMLGAERNRLGQVFGSGKKPVKKSLTTHLVFLEKALARADAERDAAIAQSAIWKAQDDLLRRVPGAGPILSRTLLADLPELGRLSRREIAKLAGVAPLSRDSGTMRGRRFVQGGRAPVRAVLFMAALVAARRNPVITAFSARLVTAGKPKKLALVACMRKLLTVFNVMVRTTTPWNPEFATMNVATA

SEQ ID NO: 16053 - protein, 406 aa, unidentified
  source 1..406: note = protein_48d148f
  REGION 5..163: note = RuvC_domain
  SITE 8: note = RuvC_P1
  SITE 58: note = RuvC_P2
  SITE 100: note = RuvC_P3
  SITE 102: note = RuvC_P4
  SITE 105: note = RuvC_P5
  REGION 277..364: note = Tnp_domain
  SITE 285: note = Tnp_P1
  SITE 315: note = Tnp_P2
  SITE 323: note = Tnp_P3
  SITE 324: note = Tnp_P4
  SITE 337: note = Tnp_P5
MLNAVGIDVSKGKSTVAVLRPAGEILRKPFNVTHSVKDLSNLVSYVQSLEGETRVVMETTAHYHEPVLKAFLDAGIFVSAVNPTLIKHHDSDKNPLRKVKSDSADAKKIAKYTLDKWEYLRQHSVMDNTRSQLKTLNTQFHFFMQQKVSLKNNLISLLDLTYPGANALFDSPVRSNGSEKWVDYVHSFWHADCVRKIGLKAFTERYQNFCKHHGYIFQPDKPEELFNASKELITVVPKDPVYKQLILSNIEQLNTVSRQIEKFRHLMNELASTLPEYATVMSMYGVGPTYGPQLMAEIGDVSRFERRSAITAFAGVDPGVDQSGQVNHDSNRASKHGAPRLRKTLFQIMTTLLQLAPKDDPVYRFMMKKKSEGKPYQVYMTAGANKFLRIYYGKVKQYLATQAAME

SEQ ID NO: 16054 - protein, 340 aa, unidentified
  source 1..340: note = protein_7e35cd3
  REGION 6..146: note = RuvC_domain
  SITE 9: note = RuvC_P1
  SITE 52: note = RuvC_P2
  SITE 87: note = RuvC_P3
  SITE 89: note = RuvC_P4
  SITE 92: note = RuvC_P5
  REGION 211..298: note = Tnp_domain
  SITE 219: note = Tnp_P1
  SITE 249: note = Tnp_P2
  SITE 257: note = Tnp_P3
  SITE 258: note = Tnp_P4
  SITE 270: note = Tnp_P5
MEITTIGLDLAKSVFQLHAVAADGTVVWRKKVRRGALLDTLAKVPACLIGMEACATAHHWAREISALGHEVRLMPPAYVKAYLRRQKNDAADAEAICEAVRRPSMRFVAAKGAERQAVLVLHRSRELLVRQRTMLINAIRGHCAEFGLVAAQGVRGSRDLVERIGQVDGAALPDLAKEAMMLLAEQLHALALRIQTLDRRLLAWHRQDQASQRLATIPGVGVISATALAASVTDPAAYRSGREFSASLGLVPRQNSSGGKDKLGRISKMGDRYLRKLLVVGATSVVRRARTADTAAANWVRSLLERKPARLVTVAMANKTARIVWAVLARGGTYRPATVV

SEQ ID NO: 16055 - protein, 417 aa, unidentified
  source 1..417: note = protein_7ae0d25
  REGION 17..173: note = RuvC_domain
  SITE 20: note = RuvC_P1
  SITE 70: note = RuvC_P2
  SITE 110: note = RuvC_P3
  SITE 112: note = RuvC_P4
  SITE 115: note = RuvC_P5
  REGION 288..375: note = Tnp_domain
  SITE 296: note = Tnp_P1
  SITE 326: note = Tnp_P2
  SITE 334: note = Tnp_P3
  SITE 335: note = Tnp_P4
  SITE 348: note = Tnp_P5
MPDYNFNSGDAFIMNAVGIDVSKGKSTVAVLRPFGEVVASPFDVAHTGSELKSLADFIKELRGETKVVMEATGNYYEPIARYLHEQNIFVSVVNPVLISDFGGNTLRKPKTDKKDSLKIASYALSYWVDLKEYIPQEDLRKSLKLLNRQYQQASKLKTMMNNNLISLLDLTFPGINKIFTSPSRESDGHEKWVDFVLAFPHCDMISKLTIKAFARKYKKWCDNNSYYFAEASCKKIHDFSKECISSVSSGEASAFAIIQAAKMLNSATENCHVIQLEMNRVAAQLPEYSTVMSMYGVGKAMGPQLMAEIGDPRRFHSRKAITAYFGYDSENNDSGQKVSPSNSMTKKGAGALRRTLFIIIQVLLKTKPVDNPVYDFLIKKQSEGKHYYSYMNAAANKFLRIYYARVKEVLSAPEASA

SEQ ID NO: 16056 - protein, 338 aa, unidentified
  source 1..338: note = protein_aa0ede2
  REGION 43..94: note = RuvC_domain
  REGION 204..290: note = Tnp_domain
  SITE 212: note = Tnp_P1
  SITE 243: note = Tnp_P2
  SITE 251: note = Tnp_P3
  SITE 252: note = Tnp_P4
MKQCWAPITASTPSTPCPPRATANVTSPRGRSPTPATPRCWRTWSTDRHNHREAAGDSQNAEAIKILARAHQSAIWARQREANALRNALKDYYPGALLVFGTDLDDRDAVAVMEIAPTPALGRQLSTSKIIAALKRAGRERNLERRASEIHNLLREEQLAQGPIVEAAYGRATKAHVAMIRAYNTEITELEEALTSGFEQHPDAGIVRSLPGMGTVLGARVLGEFGDDPNRYCNAKSRRNYAGTSPITRASGKSHVVLARHMRNRRLADALDQWAFCSITRSLGARAYYDELRGRGKTHRQAIRQLANRWVGILHACLEQRVNYDEDIAWKHRVDIAA

SEQ ID NO: 16057 - protein, 379 aa, unidentified
  source 1..379: note = protein_57c2b4f
  REGION 37..178: note = RuvC_domain
  SITE 40: note = RuvC_P1
  SITE 83: note = RuvC_P2
  SITE 118: note = RuvC_P3
  SITE 120: note = RuvC_P4
  SITE 123: note = RuvC_P5
  REGION 243..328: note = Tnp_domain
  SITE 251: note = Tnp_P1
  SITE 281: note = Tnp_P2
  SITE 289: note = Tnp_P3
  SITE 290: note = Tnp_P4
  SITE 302: note = Tnp_P5
MEVKKEDPPSLRHRCARVEMLRNHSQNRGSDMQVTTYGVDLAKQVFQVHWVEPDSGEVKRKMLTRGQFREFFARRSAGLVAMEACGSAHHWGRALGALGHRVRLISAQFVRPFVKSNKTDAADAQAIWEAAQRPEMRFVALKSEAQQAVLGLHRVRAQLVKMRTMQANQVRGLLYEFGVVLPKSWRALLKQAGPILTDSSRDEVPELIRGELQQQLQGLRELTQRIEQLERSIGSYRAQDEQCRRIEAIPGVGPLSSTAVLASVGDVRTFRSGREFAAFLGLVPRQSGTGGRIKLLGISKRGDPYLRTLLIHGARTVLNHASRPGRTLPLWLQGLLSRRPKNVAIVALANKIARTIWALLAHDRIFDPRWGQTMSVPVV

SEQ ID NO: 16058 - protein, 277 aa, unidentified
  source 1..277: note = protein_8de0d09
  REGION 10..161: note = RuvC_domain
  SITE 13: note = RuvC_P1
  SITE 66: note = RuvC_P2
  SITE 101: note = RuvC_P3
  SITE 103: note = RuvC_P4
  SITE 106: note = RuvC_P5
  REGION 227..273: note = Tnp_domain
  SITE 235: note = Tnp_P1
  SITE 265: note = Tnp_P2
MELKVINKAFAIDISQSKITAAKGELVVNQDKSTVYVKEVREFNYDNEGIEELIKFLGEYKEGIIEATGIYYFHLHERLTEKGYKVTVINPLHLTEILGKKTDKLDAQRLLVAHMTGVIKGSYIPTGEIKELRELTRYRETLVEKITQVKNEIRKILEFAGYKIQPFDKKGRQLLEKLAKGEELSKEEKEELKDRLGRNLNDAEKLALKQLVELLKSLENMVKEVEDMIISKIPGVGLISAATIYAEFGDVSRFSSSKAAYAGFALSRVVIVSPTLV

SEQ ID NO: 16059 - protein, 360 aa, unidentified
  source 1..360: note = protein_4cb376a
  REGION 7..153: note = RuvC_domain
  SITE 10: note = RuvC_P1
  SITE 54: note = RuvC_P2
  SITE 92: note = RuvC_P3
  SITE 94: note = RuvC_P4
  SITE 97: note = RuvC_P5
  REGION 216..302: note = Tnp_domain
  SITE 224: note = Tnp_P1
  SITE 254: note = Tnp_P2
  SITE 262: note = Tnp_P3
  SITE 263: note = Tnp_P4
  SITE 275: note = Tnp_P5
MQEITRVGVDLAKRVIQVLAVNAAGSRVTGRALAREKFLPWCAQLPAGCLVAMEASSSAHHWARKLIALGLDARIIAAHLVSPYRMQGKSGKNDANDAAAICEAASRPQMHFVPVKSVEQQSMLCIHRLREGFKTERIACINRIRGLLAEFGLVFPQKPEVLRQALPDVTEDATNELGGLARLALQRAWAQWQELDEHMDWCDERIAAHLKTNEQVRQAQQLKGVGPVTASAVVATVGDFRQFKNGAQFGAWLGLTPRQNSSGGKNNLGRITKRGDMYLRTLLIQGAKSIVLTAQKRDDPISKWALQIREKSGWQKAVVALANKNARILWAVFVRGKAFNANHVSVKPPAAMPQIGAVPA

SEQ ID NO: 16060 - protein, 347 aa, unidentified
  source 1..347: note = protein_f148aab
  REGION 7..147: note = RuvC_domain
  SITE 10: note = RuvC_P1
  SITE 53: note = RuvC_P2
  SITE 88: note = RuvC_P3
  SITE 90: note = RuvC_P4
  SITE 93: note = RuvC_P5
  REGION 210..296: note = Tnp_domain
  SITE 218: note = Tnp_P1
  SITE 248: note = Tnp_P2
  SITE 256: note = Tnp_P3
  SITE 257: note = Tnp_P4
  SITE 269: note = Tnp_P5
MNQIIRIGMDTSKHFFQLHGVDTAERPVLRRKLRRKEMAGFFAKLPPTEIGMEACGAAHYWGRVLRELGHTVKLIAPQHVKPYIKRNKNDGRDAEGICEAMSRPTMQFVPVKTEEQQAALMLVGMRERLVARRTQLSNAIRGYAAEFGLTAAKGLDKIEPLLAKIAADEALPVLARDLFAMHGREYVQLQAELKKIEARLMAWHRANTDSRRLAQIPGIGPVVATTLVMKAPDPRLFPSGRHFAAWIGLTPKDHSTAGKTRLGTITRAGDEMLRSVLVAGATAVIQQARRGRGRASPWLLALLARKSSPKLAAIALANKIARIAWKLLVTGESYHAGGKPIASAHAA

SEQ ID NO: 16061 - protein, 345 aa, unidentified
  source 1..345: note = protein_90dd4cf
  REGION 6..168: note = RuvC_domain
  SITE 9: note = RuvC_P1
  SITE 69: note = RuvC_P2
  SITE 107: note = RuvC_P3
  SITE 109: note = RuvC_P4
  SITE 112: note = RuvC_P5
  REGION 214..299: note = Tnp_domain
  SITE 221: note = Tnp_P1
  SITE 250: note = Tnp_P2
  SITE 258: note = Tnp_P3
  SITE 259: note = Tnp_P4
  SITE 272: note = Tnp_P5
MKYYFIGIDVSKEKLDATLIHYESESDSEQQLAYTTVENNPKGFKSLVSWSKKNAGRGVKTDAMLFCCETTGGYDRALCDWLYGNGLNIWRESALQIKRSMGLRKGKDDKADSEMIAYYALRFRSKATLYKPLDENMRNLRDLFLYRQSLVADRQAKLVSAKEKRHISSKSKADSFIYRDAQKAIDLLTKSIKECERRMLEIIKADEEMYRNYLHLISCKGVGLVTSVMLIIYTDNFKTWSAKKMASYCGIAPFYESSGSSVFHKANTGGYSNRRLKGILTQAARSAITHNPTLRQYYLRMKAQGKPYGVILNNVNNKLVHILFSLVLHDCDFELDHETKRAARA

SEQ ID NO: 16062 - protein, 348 aa, unidentified
  source 1..348: note = protein_0d6fd21
  REGION 7..148: note = RuvC_domain
  SITE 10: note = RuvC_P1
  SITE 53: note = RuvC_P2
  SITE 88: note = RuvC_P3
  SITE 90: note = RuvC_P4
  SITE 93: note = RuvC_P5
  REGION 210..294: note = Tnp_domain
  SITE 218: note = Tnp_P1
  SITE 248: note = Tnp_P2
  SITE 256: note = Tnp_P3
  SITE 257: note = Tnp_P4
  SITE 269: note = Tnp_P5
MSQIIRIGMDTSKHIFQLHGVDASEQVVLRKRLSRKAMLEFFTKLPATVIVIEACGAAHYLARELGKLVHTVKLIAPQLVKPYVPRNKNDGRDAEGLCEAASRPRMRYVPVKTAEQQAALMLLGVREQLVARRTQLSNTIRGHAAEFGLIAAKGLDKLAAFLATIKQDDRVPALARELFAMLARQYDQVQVELKAVEAKLVAWHRADAMSRRLAQIPGVGPVTAAALVMKAPDPHAFRSGRLFAAWLGLTPKDHSTAGKTRLGKITRAGDERLRQLLVVGATSVVKQAMAKDSGPHWLVELLKRKTPKLAAVALANKMARIAWKLMTTAQEYDSARLNARADQAPAAA

SEQ ID NO: 16063 - protein, 392 aa, unidentified
  source 1..392: note = protein_05bf0cc
  REGION 4..163: note = RuvC_domain
  SITE 7: note = RuvC_P1
  SITE 60: note = RuvC_P2
  SITE 101: note = RuvC_P3
  SITE 103: note = RuvC_P4
  SITE 106: note = RuvC_P5
  REGION 266..355: note = Tnp_domain
  SITE 274: note = Tnp_P1
  SITE 304: note = Tnp_P2
  SITE 312: note = Tnp_P3
  SITE 313: note = Tnp_P4
  SITE 328: note = Tnp_P5
MVCVGIDVAKDKHDCFILSSEGEVLADVFTIANNREGFETLLQQIHSCTRPSDKIKVGLEATGHYSYNILGFLLEKGLATFLINPLHTNLYRKSLSLRQTKTDRIDARTIAAMLMSDVDLKSYTDTAYHNEELKSLTRYRFDKVKERAKLKQSVSRLVNILFPELETLVPMLHMSSIYAILSEFPGAKQIAGAHLTHFKTVLSDASKGRYDRDKAVEIREAAKRSIGSAMPAKSLELQHTIRLIHELDKEIDEIEAAIKAIIDEMAPPILTIPGISYRMGAMILAEIGDFSRFDSPDKLLAYAGLSPSTYESGKLKATGAYAHMEKRGSRYLRYALFNATKFVCHWEPSFAAYLAKKRAEGKHYNVAISHAAKKLVRLIFALQTSGKAFQPA

SEQ ID NO: 16064 - protein, 340 aa, unidentified
  source 1..340: note = protein_5d9ba60
  REGION 7..149: note = RuvC_domain
  SITE 10: note = RuvC_P1
  SITE 53: note = RuvC_P2
  SITE 88: note = RuvC_P3
  SITE 90: note = RuvC_P4
  SITE 93: note = RuvC_P5
  REGION 212..299: note = Tnp_domain
  SITE 220: note = Tnp_P1
  SITE 250: note = Tnp_P2
  SITE 258: note = Tnp_P3
  SITE 259: note = Tnp_P4
  SITE 271: note = Tnp_P5
MKEIVTVGVDIAKNVFQVHGVDAQGVVVVRRKLRRSKVSGFFESLPPCLIGIEACATAHHWARHLMALGHEVKLMPAAYVKPYVKRQKNDAADAEGICEAVQRPTMRFVPVKSKEQQGVLMLHRARELLVRQRTMLINALRAHLAELGIATRLGPMGVKDAVAVIEGIDQHLIPEIVQHALSPLCDQLRHVHTKIEEMDRQILEWHRSSALSQRLATIPGIGPVTASAIAATITDVSSFRSGRQLAAWIGLVPRQSSSGGKERLGRITRQGDPYIRRLLVIGATAVLRFSRKSNAASTQWARQLLERKPGKVAAVALANKMARIAWALMTKDTSFRSAMS

SEQ ID NO: 16065 - protein, 423 aa, unidentified
  source 1..423: note = protein_9d6af57
  REGION 5..158: note = RuvC_domain
  SITE 8: note = RuvC_P1
  SITE 60: note = RuvC_P2
  SITE 95: note = RuvC_P3
  SITE 97: note = RuvC_P4
  SITE 100: note = RuvC_P5
  REGION 286..372: note = Tnp_domain
  SITE 293: note = Tnp_P1
  SITE 324: note = Tnp_P2
  SITE 332: note = Tnp_P3
  SITE 333: note = Tnp_P4
  SITE 345: note = Tnp_P5
MVLGVGIDWAEEFHLVALGRPGEGVIQVRRVEHTPAAVDAMLADIARLEPDPAEVRVVIETRHGLLVEHLVDAGYVVLPVNPDLVARRRGPARKKDDAADARICCLLALDRHAALRPLVPHGELAAELRAIARDDERAARDQRRLGNRLRADLLATFPAALAIAGDDLGAPTVLKLLERWPTRDQLAAASRQELVAFARAAHHGWPERLADKIEQALAGDHFTPRAWLVRAKADTIRLAAVQLLLLAAQRRAWERRMGELLLGAPRHGRAKQPREHELGQAVPGGKVYLSFPGLGDRLAARVAGEIGDHPEQFGSPNALACYAGKAPVTRRSGKHELVVACRLACNRHLAAAVQQWAFCSLRESAWARAFYDAQRGRGKTHHAALRALGNRWLEVLWHCLLRGQPYDEATHVANRNRAIGKAA

SEQ ID NO: 16066 - protein, 339 aa, unidentified
  source 1..339: note = protein_7e9c0db
  REGION 14..161: note = RuvC_domain
  SITE 17: note = RuvC_P1
  SITE 65: note = RuvC_P2
  SITE 105: note = RuvC_P3
  SITE 107: note = RuvC_P4
  SITE 110: note = RuvC_P5
  REGION 206..293: note = Tnp_domain
  SITE 214: note = Tnp_P1
  SITE 244: note = Tnp_P2
  SITE 252: note = Tnp_P3
  SITE 253: note = Tnp_P4
  SITE 266: note = Tnp_P5
MSKPIQSQQAMVFCGIDVSAATLAVAVQQEDQPFEERIFENTAGGHKTLIGWLQRRKALARVSLEATGIYSLDLALALDQAEGIEVAVLNPKLIHRFAQTLRRSKTDSADAQVLAEYSRRMPFAPWSAPELSGLQLRTISRHIQGLVVEHTRQNNRLHSAEQSASTPRCVVNDLKRSMASLKLRIVRLRREALELVRSDEEMRKRFELLILIPGIAAISALQLLGELAPLSAEMSVRQWVAHSGLDPAHQVSGTSVHKPSRISRAGNRHLRHALYMPALVAVRRDPHLKAFYESLLSRHKAKLQALIAVARKLLHAIYGILRTQTTYDGSKLFPRLVAA

SEQ ID NO: 16067 - protein, 320 aa, unidentified
  source 1..320: note = protein_f5ce319
  REGION 7..139: note = RuvC_domain
  SITE 10: note = RuvC_P1
  SITE 53: note = RuvC_P2
  SITE 86: note = RuvC_P3
  SITE 88: note = RuvC_P4
  SITE 91: note = RuvC_P5
  REGION 229..289: note = Tnp_domain
  SITE 248: note = Tnp_P2
  SITE 256: note = Tnp_P3
  SITE 257: note = Tnp_P4
  SITE 269: note = Tnp_P5
MNNVAIIGIDLAKRVFHAHGAHIDGSVAFRKRLIRAQMLPFLSTQPRCVVVMEACARLMNGAARSSSSDVRLIPPSYVKPYAKRQKNDTADTEAIAEAGSRPTMRFVAVKTEEQQPRSMVFRTRDLLVRQRDATDQRPARPPRRARSRCAARTGSPEVSGQSTGRDRCRNSAAGSRYRPDLPRADRTAERQSCRSRKNASSRSSIRRRNTPLADDAGHRPDHSHGWWRYSHHLCRRFKRGRDFAAWLGLVPVQHSTGGKQRLGRTSKTAMAVIRWASRRGARPGSWLSRMMDRKPLILVAEALANKMARGIRRGGHVRRS

SEQ ID NO: 16068 - protein, 356 aa, unidentified
  source 1..356: note = protein_cb99a1c
  REGION 15..156: note = RuvC_domain
  SITE 18: note = RuvC_P1
  SITE 61: note = RuvC_P2
  SITE 96: note = RuvC_P3
  SITE 98: note = RuvC_P4
  SITE 101: note = RuvC_P5
  REGION 219..304: note = Tnp_domain
  SITE 227: note = Tnp_P1
  SITE 257: note = Tnp_P2
  SITE 265: note = Tnp_P3
  SITE 266: note = Tnp_P4
  SITE 278: note = Tnp_P5
MKRIAKPKPAAVATLGVDIGKNTFHLVGLDKRGAIVLRERLSRAQVEVRLANTAPCLVGMEACVGAHHLGRRVAALGHDVRLMAAKYVRPFCCKQKNDFNDAQAIAEAVTRPTVRYVALKTPAQLDLQALHRVRERLMSQRTGVINQIRAFLLERGIAIRQGWRALRAELPRALTLTDRLTPRMVHLVEDLATDWRWLDQRIAAVSTEIEELAQADDGAVRLMSVPGIGPIISSATVAGIGKGDVFRKGRDFGAWLGLVPKQTFTGGRPILGRISKRGNRYLRQLFVQAARVVLLRPQSWERYGLNHWIAAAARRLHYNKLAIALANKLARIAWGVLHSGRKFETRTESDHVPQPA

SEQ ID NO: 16069 - protein, 256 aa, unidentified
  source 1..256: note = protein_f6f3487
  REGION 1..83: note = RuvC_domain
  SITE 28: note = RuvC_P3
  SITE 30: note = RuvC_P4
  SITE 33: note = RuvC_P5
  REGION 128..214: note = Tnp_domain
  SITE 136: note = Tnp_P1
  SITE 165: note = Tnp_P2
  SITE 173: note = Tnp_P3
  SITE 174: note = Tnp_P4
  SITE 187: note = Tnp_P5
MHDNGVAVSIANPANVRDFSRALAMRSKTDALDSLVLARYGVAMRPAAWQPPPPHVRELRALITQLEELSKDRLRTIHRQEKIEVSAVSELVERSISDTLDFYDREIAWPTKAIDDHIDRHPDLKDDTRLLSSIPGVGPKVARTILRVIRTYQFKCAEDRAAYLGLVPVQRQSESSLRGRSRTSKAGPADVRAIVYMAGIVASKHNPHVRALYQRLLAAGKTKMPAIGACMRKVVHLRFGVLKTRQVYRPDYAFST

SEQ ID NO: 16070 - protein, 320 aa, unidentified
  source 1..320: note = protein_3c72d27
  REGION 8..151: note = RuvC_domain
  SITE 11: note = RuvC_P1
  SITE 56: note = RuvC_P2
  SITE 96: note = RuvC_P3
  SITE 98: note = RuvC_P4
  SITE 101: note = RuvC_P5
  REGION 192..271: note = Tnp_domain
  SITE 199: note = Tnp_P1
  SITE 224: note = Tnp_P2
  SITE 232: note = Tnp_P3
  SITE 233: note = Tnp_P4
  SITE 244: note = Tnp_P5
MQVVEQWIGIDVCKQWLDVHLRPQSKSFRVANTEKGIGELLSQLIEPEQVGRIVLESTGRYERQAALVLSKLAYPVVVINARQARNFAKAAHQLAKTDRVGAAMLAWFGEAMKPPLRSFASEAQSELQDLVTRRRQLVDILTAEQNRLSGLRGTAQSDVEAHLDWLRKRIVQLDKQIESQIAQCQSWQTKPTRLRGVPGVGKVVAATLLALLPELGQLSTQKISVAPLNRDSGQMQGKRTIFGGRAAVRQMLYMATLVAVRHNPVPQAFYDQLLQRGKPTKVALVACMHKLLTILNAMIKNGTDWRLPAPVVLEVAPESA

SEQ ID NO: 16071 - protein, 344 aa, unidentified
  source 1..344: note = protein_e15e00d
  REGION 5..152: note = RuvC_domain
  SITE 8: note = RuvC_P1
  SITE 55: note = RuvC_P2
  SITE 92: note = RuvC_P3
  SITE 94: note = RuvC_P4
  SITE 97: note = RuvC_P5
  REGION 212..300: note = Tnp_domain
  SITE 220: note = Tnp_P1
  SITE 250: note = Tnp_P2
  SITE 258: note = Tnp_P3
  SITE 259: note = Tnp_P4
  SITE 271: note = Tnp_P5
MEHFAGLDVSVNETSVCIVDDTGRIIREVKVASEPEALLAVLGNPACQFKRIGLESGPLSQWLYSALAEANLPVICVETRHMRAVLKAQINKTDRNDARGIAQMMRAGLYRPVHVKTLRSQKLRMLLTHRKLLQSKAIAIENDLRGTLRTFGLKVGVVGMVKFETRIRELVEKLPDLRTLVEPLLVVRRVLREQIAVLHRRVLAIVRNDEVCRRLMSIPGVGPVVALTYRATVDVPARFRNSRAVGAVLGLTPCKYQSGESDYTGGISKCGDAMLRVMLYEAAQILLVRSTRWSWLKAWAMRIARRRGMKKAIVALARRLAVIMHRIWVDGTEFCWTRQQAAAA

SEQ ID NO: 16072 - protein, 406 aa, unidentified
  source 1..406: note = protein_2da463d
  REGION 4..160: note = RuvC_domain
  SITE 7: note = RuvC_P1
  SITE 56: note = RuvC_P2
  SITE 97: note = RuvC_P3
  SITE 99: note = RuvC_P4
  SITE 102: note = RuvC_P5
  REGION 276..362: note = Tnp_domain
  SITE 283: note = Tnp_P1
  SITE 313: note = Tnp_P2
  SITE 321: note = Tnp_P3
  SITE 322: note = Tnp_P4
  SITE 335: note = Tnp_P5
MISIGIDISKEKFTACALEQGNKVIWKSYDVMNSKSEIEKFLRRMADVTDVRIVMEATGKYHLPILYTLKANGYFVSVVTPLKMKQFCRSISFRKAKNDRLDAKQIAEYGLIYWNTLENYNLDNTNYQELKHLNRSYQHYMELRVCQINFIDHIIDQTFPGIKKLIPHGSQDFSKDKLLDFLEKWWHKDKVLELSKEEFVKKYQIWAKEKRYHPNTQKAKSIYSLAQEGISTQPSNSPYIEADVQESIKLVKGINQSLHHILSQMIELAEPLEEYQEAKKFSGISDKLAVQITAEFGDLSKFRNKKCLISFVGIDAPPYESGNFKATQRKISKRGNSILRKVGYQAMKCMMSAKNQDNEIYLYMIKKEKEGKPRKVCKFAGLNKFLRIYYAKVMQAKLRTEQRKAA

SEQ ID NO: 16073 - protein, 316 aa, unidentified
  source 1..316: note = protein_87f59c1
  REGION 8..150: note = RuvC_domain
  SITE 11: note = RuvC_P1
  SITE 55: note = RuvC_P2
  SITE 95: note = RuvC_P3
  SITE 97: note = RuvC_P4
  SITE 100: note = RuvC_P5
  REGION 190..274: note = Tnp_domain
  SITE 198: note = Tnp_P1
  SITE 227: note = Tnp_P2
  SITE 235: note = Tnp_P3
  SITE 236: note = Tnp_P4
  SITE 247: note = Tnp_P5
MKTSEVFVGIDVSKAGLDVGVLPLAQFWTAPNDEAGCRSLAERLKALSPTLIVLEATGGFEVSVVARIVAAGLPVVVVNPRQVRDFAKATGSLAKTDRLDARVLALFAQRVRPAVRPLKDTQSRELDALFNRRHQLVEMLTMEKNRLSLAAAPVRKDLKAHIVWLVKRLKDVDGELKTLIESSPVWREKDDLLQSAPGIGPVAAVALLAQLPELGTLNRRQIGALVGVAPLNNDSGKYKGQRHVWGGRAMVRAVLYMATLAAIRCNPSVKAFYQRLRATGKKPKVAIVACMRKLLTILNAMLKTKTPWCDKMAAGA

SEQ ID NO: 16074 - protein, 345 aa, unidentified
  source 1..345: note = protein_fea30b2
  REGION 11..153: note = RuvC_domain
  SITE 14: note = RuvC_P1
  SITE 57: note = RuvC_P2
  SITE 92: note = RuvC_P3
  SITE 94: note = RuvC_P4
  SITE 97: note = RuvC_P5
  REGION 216..302: note = Tnp_domain
  SITE 224: note = Tnp_P1
  SITE 254: note = Tnp_P2
  SITE 262: note = Tnp_P3
  SITE 263: note = Tnp_P4
  SITE 275: note = Tnp_P5
MKKRIEGVTTYGIDIGKNTFHVVGLDSSGKPVLHSKFRRDRLLVHFANTPAALIGMESCPGSQWLARKLQASGHSVKIIPAQFVKPYVKSNKNDMVDAAAIAEAVTRPTTRFTQIRHPEQCARQALHRVRDRYMSQRTGLINQIRGFLLEFGVPIRLGVGVFRLDVPRALGDEENELPPSMRSLLADLWNDFKLLEARIEELSRQIQRSVQYSDTARRLMTVPGIGPLAASALEASAGNGHQFANGRFFAAWLGLTPREYSTGGKTTLLSISKRGNTYLRRLLVHGARSCVQTCDRQRHQLGAWITKLEQRMHRNKVIVALANKIPRVAWKILTKPEEIYGWAEV

SEQ ID NO: 16075 - protein, 348 aa, unidentified
  source 1..348: note = protein_31b0891
  REGION 6..148: note = RuvC_domain
  SITE 9: note = RuvC_P1
  SITE 52: note = RuvC_P2
  SITE 87: note = RuvC_P3
  SITE 89: note = RuvC_P4
  SITE 92: note = RuvC_P5
  REGION 211..298: note = Tnp_domain
  SITE 219: note = Tnp_P1
  SITE 249: note = Tnp_P2
  SITE 257: note = Tnp_P3
  SITE 258: note = Tnp_P4
  SITE 270: note = Tnp_P5
MKITRIGLDLAKQVFQVHGVDEKGRKVVSRQLKRAQVEEFFRGLEPCLVGMEACGGSNHWARVLGALGHEVKLMAPQHVKPYVKGNKNDANDAEGICEAVGRPNMRFVALKTVEQQRLQALHRVRRTLMRNRTAAVNEIRGLLAEYGIVVSVGVGKLRARLPELLEETDNGLPMSFRPVLSGLKEDLEYLDRRIGEMDAAMLRVVQEDDRARELMRLRGVGPTTATALLAALGDGRQFTRGRQASAWVGIVPGQHSSGGKERLLGISKRGDAYLRTLLIHGARSVVNSCKGKTDPLSRWVQELCARRNKNVAAVALANKTMRIAWVLMSQGGRYDPDYGVNKQAEQTA

SEQ ID NO: 16076 - protein, 281 aa, unidentified
  source 1..281: note = protein_ee408aa
  REGION 4..156: note = RuvC_domain
  SITE 7: note = RuvC_P1
  SITE 50: note = RuvC_P2
  SITE 90: note = RuvC_P3
  SITE 92: note = RuvC_P4
  SITE 95: note = RuvC_P5
  REGION 182..266: note = Tnp_domain
  SITE 190: note = Tnp_P1
  SITE 219: note = Tnp_P2
  SITE 227: note = Tnp_P3
  SITE 228: note = Tnp_P4
  SITE 239: note = Tnp_P5
MNGIGIDVSKRQLDVGTTDGKTLQVSNSRSGFAELDLWLQGHPAVQIVLEATGGYEQPVLDFLHNAGHPVVRANALRARKLAQGLGHMAKTDRLDAYALAKMAALVKLRSYQPLEPWQREMRDFVRARRQAMHALTVARQQQEMVGNRKLRRLLQANITCLQRTVERLGKRISEQVSKQPQLAVLKSMKGVGPGLQAVLASYLPELGKISGKAVASLVGVAPMSHDSGTMRGKRSIHGGRAEIRQVLYMASMSAMRHEPRLRDFYQSLRARARKAKWPSWR

SEQ ID NO: 16077 - protein, 338 aa, unidentified
  source 1..338: note = protein_e96fc80
  REGION 6..161: note = RuvC_domain
  SITE 9: note = RuvC_P1
  SITE 61: note = RuvC_P2
  SITE 99: note = RuvC_P3
  SITE 101: note = RuvC_P4
  SITE 104: note = RuvC_P5
  REGION 204..293: note = Tnp_domain
  SITE 212: note = Tnp_P1
  SITE 242: note = Tnp_P2
  SITE 250: note = Tnp_P3
  SITE 251: note = Tnp_P4
  SITE 264: note = Tnp_P5
MKKTVIGIDISKKTLDWCVINGKDVVCVINTKNDMDSIVSSMEAILKDYRIDIRDVLVCAEYTGRYIYPLTLACLKCGADLWLESGYNIKCEARKERGKSDRADAFRIAEYGRKNQDDSRIYRMPAESISNLRYLFSEREIYNSQRAALKAQIHDMQGYMPMSAYSECAARELSVIRLLDSLIAEIDNKLEDIISSDPELRRQYKLLQTIPGVGALCAATLIAVTAGFTIFENGRELCCFAGLAPFSYSSGTSIRSRNRVSHRANHHLKALLHLCAISSATRAKDNPFADYYRRKVDEGKNKMSVLNAVRAKMVLTAFAMIRDNTPFDKNHKLDLHVS

SEQ ID NO: 16078 - protein, 308 aa, unidentified
  source 1..308: note = protein_607c7e6
  REGION 8..148: note = RuvC_domain
  SITE 11: note = RuvC_P1
  SITE 54: note = RuvC_P2
  SITE 94: note = RuvC_P3
  SITE 96: note = RuvC_P4
  SITE 99: note = RuvC_P5
  REGION 188..272: note = Tnp_domain
  SITE 196: note = Tnp_P1
  SITE 225: note = Tnp_P2
  SITE 233: note = Tnp_P3
  SITE 234: note = Tnp_P4
  SITE 245: note = Tnp_P5
MTIHPCFIGCDIAKSHLDLFDETSGTSLRIANTSEAIAAWLSSLDAQACFIAFEATGPYDRMLRQALEQAGCRFARINPGRARDFARATGRLAKTDTIDAEMLAAMARALALMPDPACDPARNALAQLHKRRDQLVEMRAAERVRHSEGQDPSGSLARHLAWLDAEIVTLERLVNEALQADETLARAQALLRSAPGVGPVTAATLIALMPELGHVSPKAVAALAGLAPFNNDSGRRRGQRMIKGGRRRVRKALYMAALAAIRTSSRFKTFYDAIRARSGAAKVAIIAVARKLLVTLNAMLKTRTAFQS

SEQ ID NO: 16079 - protein, 392 aa, unidentified
  source 1..392: note = protein_3bd99c9
  REGION 5..163: note = RuvC_domain
  SITE 8: note = RuvC_P1
  SITE 62: note = RuvC_P2
  SITE 102: note = RuvC_P3
  SITE 104: note = RuvC_P4
  SITE 107: note = RuvC_P5
  REGION 267..356: note = Tnp_domain
  SITE 275: note = Tnp_P1
  SITE 305: note = Tnp_P2
  SITE 313: note = Tnp_P3
  SITE 314: note = Tnp_P4
  SITE 327: note = Tnp_P5
MEPVVGLDVAKGASVVQAFLGRNEPYGILESITHEESGFERLGELLDELKVLSGREPVIILEATGHYHRGLVSYLIREEYKYFIINPLQSKRARNTQLRKVKTDAADAWHLADMYYRGDVTPHRTWDELYTELQHVTRQHEFITSMYVQAKLNSRALLDQVFPAFEKVFSNLFSATALRVLQSCLNDEFEKVESIIQEQTGKSHSKDWVGEKANQLRQALLEWANNKRSITQSMALVGMVSLLLEFQKQLSRLEETLEEISATLPEVELLKTIPGIGDKLASAIIAEIGDARQFRSAKQLVAYAGLDPSVYSSGKYTASRNRITKRGSKRLRRALYLAVQCGLRGGRNSRLKDYYDMKRKEGKPYKVVVIACANKLLHHVYAILNKDQPYHI

SEQ ID NO: 16080 - protein, 323 aa, unidentified
  source 1..323: note = protein_16c2f82
  REGION 8..149: note = RuvC_domain
  SITE 11: note = RuvC_P1
  SITE 52: note = RuvC_P2
  SITE 92: note = RuvC_P3
  SITE 94: note = RuvC_P4
  SITE 97: note = RuvC_P5
  REGION 191..278: note = Tnp_domain
  SITE 199: note = Tnp_P1
  SITE 229: note = Tnp_P2
  SITE 237: note = Tnp_P3
  SITE 238: note = Tnp_P4
  SITE 251: note = Tnp_P5
MNKYNETFGIDISKDVFDCYGSVQGHLQFNNSETGFKKFQELLSKDSLVVMEATGYYHYRFAQYLYKKKVAVSVVNPLSVKRFIQMKLAKVKTDKSDAKAICEYGLIQEVPLYNALTDTQSECLQLFRLMDSFLKKRTATKNEIHGEEVLGVPSSWVYRSLKRDKKHLDKELKGIEQKLLSLVKQDQQQQLTLLQSIPGIGMKTALFLIIVTDGFKKFETASQLCSYVGITPTIRESGSSVRGRARISKVGNKKLRNLLFLCSFTACKHNKGCSEIYDRIVNKGKSKKLALIAVSNKLLKQCFAIAKSGHPYDPTFVSVFVVK

SEQ ID NO: 16081 - protein, 343 aa, unidentified
  source 1..343: note = protein_1ca97e6
  REGION 7..149: note = RuvC_domain
  SITE 10: note = RuvC_P1
  SITE 53: note = RuvC_P2
  SITE 88: note = RuvC_P3
  SITE 90: note = RuvC_P4
  SITE 93: note = RuvC_P5
  REGION 211..296: note = Tnp_domain
  SITE 219: note = Tnp_P1
  SITE 249: note = Tnp_P2
  SITE 257: note = Tnp_P3
  SITE 258: note = Tnp_P4
  SITE 270: note = Tnp_P5
MTKDIMIGVDLAKSVFQIHAASMTGQLKFRKKLSRQNFPKFMADQPPAVVVMEACGSAHYWAREMVRLGHEVKLIAPHYVRPFVKRQKNDAADAEAIVIAAQRPEMRFVEPKSAEQQGRAILFRARERLVHQRTELVNALRAYLYEYGHVVPQGIHQIKRIETILEEPHSDLPGLMREECRDLLDQIAALTTRIEAKTVKVKALSTKREMTRRLQTMPGVGPLTALAIEAFAPPMENFRCGRDFAAWLGLVPRQFSSGGKERLGRMSKAGQADIRRLLIIGAMSRLNWRGRKSLPEKSWLARMIARKPRMLVAIALANKMARTIWAMLTKKEDYRVPVQAKAA

SEQ ID NO: 16082 - protein, 317 aa, unidentified
  source 1..317: note = protein_2ee5ce1
  REGION 4..157: note = RuvC_domain
  SITE 7: note = RuvC_P1
  SITE 60: note = RuvC_P2
  SITE 101: note = RuvC_P3
  SITE 103: note = RuvC_P4
  SITE 106: note = RuvC_P5
  REGION 218..305: note = Tnp_domain
  SITE 226: note = Tnp_P1
  SITE 256: note = Tnp_P2
  SITE 264: note = Tnp_P3
  SITE 265: note = Tnp_P4
  SITE 278: note = Tnp_P5
MIYVGIDVAKDKHDCFITNSDGEVLFKVFTITNNLDGFNDLYQRIESVMDDITKVKVGLEATGHYSYNLLGYLINKGLPTYVINPLHTNLYRKSLSLRQTKTDKVDARTIASMLMSNVNLKSYSDTFYHNEELKSLTRYHFDKIKERAKLTNLLSESSKGRYGKETAITFRDAARNSIGSNMPAKSLELKHTIKLIQEISCEIDEIENEIKIIMDKINSPILSIPGINYRMGAMIIAEIGDFNRFNSPDKILAYAGFSPSTYQSGQLDSAYAHMKKRGSRYLRYALYNAAKYVCHWDPTFAEYLAKKRSEGKHYNVV

SEQ ID NO: 16083 - protein, 412 aa, unidentified
  source 1..412: note = protein_2da82a9
  REGION 4..170: note = RuvC_domain
  SITE 7: note = RuvC_P1
  SITE 67: note = RuvC_P2
  SITE 107: note = RuvC_P3
  SITE 109: note = RuvC_P4
  SITE 112: note = RuvC_P5
  REGION 278..364: note = Tnp_domain
  SITE 286: note = Tnp_P1
  SITE 317: note = Tnp_P2
  SITE 325: note = Tnp_P3
  SITE 326: note = Tnp_P4
MLFVGNDWAEGHHDVEIVDEQGRRLARRRLPEGLEGITRLHALIAQFVPEQWAELDPAEAASLVKVGIETERGAWVAALIAAGYEVFAINPMSVARYRERHSTSGAKSDAADAHVLAEIVRLDRAHHRSVAGDSELVEAIKLVARSHQSLVWDRTRHVLRLRGVLREFFPAALEAFADLDAADTLELLAFAPDPDRAARLSKAKITAALRRANRRSVEDKAAQIQSVLRAPALRQSGQVQSAFAVIVTSQVRLISTLNGEIAQLGEVVADHFGRHRDAETYTSQPGLGVILAARVLAEFGDDDTRFADAKARRNYAGTSPITRASGTRKIVLARYARNSRLGDAVQQWAFGSLKGSPGARAYYDALRARNIGHQAALRQLANRLVGILHGCLKTGTLYDETTAWAHHHTAAA

SEQ ID NO: 16084 - protein, 398 aa, unidentified
  source 1..398: note = protein_505be13
  REGION 19..167: note = RuvC_domain
  SITE 22: note = RuvC_P1
  SITE 68: note = RuvC_P2
  SITE 106: note = RuvC_P3
  SITE 108: note = RuvC_P4
  SITE 111: note = RuvC_P5
  REGION 233..319: note = Tnp_domain
  SITE 241: note = Tnp_P1
  SITE 271: note = Tnp_P2
  SITE 279: note = Tnp_P3
  SITE 280: note = Tnp_P4
  SITE 292: note = Tnp_P5
MPTTNLQNSHDFNGQKFYVGLDVHKKSWAVTIRSLGMEVSHFTQPPGAEALSNYLKREFPGGTYHSAYETGFCGTGIHEQLCKLGIKNILVHAADVPSTDKQKKNKTDLHDSRAIAGHLERGNLEGIHILTQEQQELRSLFRLRESKVNDVTRVNNRLKSFLMYYSIKLPETVSKNEFLSNKALAWLNMELGCPSGTFALQQHIEELKYQRQQLFYITKSLRVQVQALHEKTYKSLLSVPGIGAITAMGLIAEVADFARFDDPDEYCSYLGLCPWEDSSGDTIKTKGVQPRCNSHLRPLLVEASWQAIRKSRTLFAYYSKHTGKSGKKAIIKVARKLALIAKGVATTGQLYQDDYLKKKQQEQQNKKNLRVERFSSGITEQHINKQPDDSMQIATMPG

SEQ ID NO: 16085 - protein, 344 aa, unidentified
  source 1..344: note = protein_b149a6a
  REGION 6..147: note = RuvC_domain
  SITE 9: note = RuvC_P1
  SITE 52: note = RuvC_P2
  SITE 87: note = RuvC_P3
  SITE 89: note = RuvC_P4
  SITE 92: note = RuvC_P5
  REGION 211..296: note = Tnp_domain
  SITE 219: note = Tnp_P1
  SITE 249: note = Tnp_P2
  SITE 257: note = Tnp_P3
  SITE 258: note = Tnp_P4
  SITE 270: note = Tnp_P5
MQITTIGIDLAKNVFQVHGANERGKTVLRKQLRREKFVEFFANLPTCLIGMEACGSSHHWARKLQALGHTVRLMAPQFVKPYVKSNKNDAADAQAICEAVTRPTMRFVPVKNVEQQSVLSLHRARQSFIKARTAQANQIRGLLGEFGLVVPQGIAHIAVRVPTLIEDATNELPGVFRQLIDRLLEHLKLLDRQVDEIETQIKAWHRDNEISRRLEQVPGIGPITASALAATVGDAKNFDNGRQLAAWLGLVPRQHSSGGKAKLLGMSKRGDAYLRTLLIRGARSVIYRVTQRNDPDSWLVKLTARRNANVAAVAQANKTARIVWALLVHDRQFRPGYTPALAVA

SEQ ID NO: 16086 - protein, 388 aa, unidentified
  source 1..388: note = protein_c8b717f
  REGION 42..187: note = RuvC_domain
  SITE 45: note = RuvC_P1
  SITE 91: note = RuvC_P2
  SITE 127: note = RuvC_P3
  SITE 129: note = RuvC_P4
  SITE 132: note = RuvC_P5
  REGION 252..338: note = Tnp_domain
  SITE 260: note = Tnp_P1
  SITE 290: note = Tnp_P2
  SITE 298: note = Tnp_P3
  SITE 299: note = Tnp_P4
  SITE 311: note = Tnp_P5
MTEMQVMIEGQSHFQPFGLPYWGSQDLNKGVGSMTASYEYHIGVDYHKSYSHLVVQDSAGKTLRSGRVKNDRQSLGGFLERYRENSHAVVEATRNWMMIYDWLDDICDDVVLAHPLKVKAIADAKIKTDKIDATVLAHLLRADLVPEAWAPSDKARELRVALRERMFYVRLRTMTKNRIVTVFDRYPEQTAQLKKLSDLFGKAGRQQLAALNVLEIDRIQIDRGLDFIGDIDGRIKQSEATIRALTKTNGNVKLLKTIPGIGEFFARLIDAEIDDIKRFRNPKKLAAYAGLVPSTYSSGGKTFHGKIIKQGNKWLRWAFVEAVAPAVASDAQLRGQYDHLKIRGVNKARVAIARKLLTIAFQILRDQRAYEPRSTTAMEATSTISRLS

SEQ ID NO: 16087 - protein, 391 aa, unidentified
  source 1..391: note = protein_bdb3887
  REGION 4..163: note = RuvC_domain
  SITE 7: note = RuvC_P1
  SITE 60: note = RuvC_P2
  SITE 101: note = RuvC_P3
  SITE 103: note = RuvC_P4
  SITE 106: note = RuvC_P5
  REGION 266..353: note = Tnp_domain
  SITE 274: note = Tnp_P1
  SITE 304: note = Tnp_P2
  SITE 312: note = Tnp_P3
  SITE 313: note = Tnp_P4
  SITE 326: note = Tnp_P5
MIFVGIDVAKDKHDCFITNSDGEVLFKSFTIPNNRKGFKTLFQRIQSASDDLTKVKVGLEATGHYSYNLLGFLIDKDLTTFVINPLHTNLYRKSLSLRKTKTDKVDAHTIASMIMSDVNLKSYSDTSYHNEELKSLTRYRFDKVKERAALKSSISRLVCILFPELEKLVPTLHMASVYALLSEFPSASTIASAHLTRLANLLSESSRGRYGKDTAIMVREAARNSIGSHMPAKSLELKHTIKLIRELDAEIEEIEMEIKLIMDEINSPILTIPGINYRMGAMIIAEIGDFSRFDSPDKILAYAGMSPSTFQSGQVDNCYAHMEKRGSRYLRYALYNATKYVCHWDKSFGSYLAKKRAEGKHYNVALSHATKKLVRLIYQLEKSGQTYIASA

SEQ ID NO: 16088 - protein, 295 aa, unidentified
  source 1..295: note = protein_ba316aa
  REGION 6..148: note = RuvC_domain
  SITE 9: note = RuvC_P1
  SITE 52: note = RuvC_P2
  SITE 87: note = RuvC_P3
  SITE 89: note = RuvC_P4
  SITE 92: note = RuvC_P5
  REGION 210..272: note = Tnp_domain
  SITE 218: note = Tnp_P1
  SITE 248: note = Tnp_P2
  SITE 256: note = Tnp_P3
  SITE 257: note = Tnp_P4
  SITE 269: note = Tnp_P5
MQVSTVGLDIAKNVFQVHGVDDRGRIVLRRKVRRDQLVALFSGFEPCRVGIEACATAHYWARELSALGHDVRLMPPAYVKAYVKRNKNDGADAEAICEAVTRPTMRFVPIKSAEAQSVLMLHRARHLLVRQRTAKVSAMRAHLAEYGFVAAKGISRLRDLLPLLEDDAGMLPELARQTLRLIAQLIEALTIQIRKIETELLHWHRNNAASQRLETIPGIGFITATALAATVHDAGAFRSGRQFAAWLGLVPRQNSSGGKERLGGISKMGDSLSMPPARGRRNRGYSLYAAQEHQH

SEQ ID NO: 16089 - protein, 321 aa, unidentified
  source 1..321: note = protein_2e4efb6
  REGION 4..148: note = RuvC_domain
  SITE 7: note = RuvC_P1
  SITE 52: note = RuvC_P2
  SITE 92: note = RuvC_P3
  SITE 94: note = RuvC_P4
  SITE 97: note = RuvC_P5
  REGION 191..278: note = Tnp_domain
  SITE 199: note = Tnp_P1
  SITE 229: note = Tnp_P2
  SITE 237: note = Tnp_P3
  SITE 238: note = Tnp_P4
  SITE 251: note = Tnp_P5
MTYVGIDVSKATFIVAYSSAKSSKTKTFKNTTKGVHEFIQTLSANEHHCVLEATGNYSSLLVYLLSRANITVSLENPLKIKNFARVMLSVTKTDETDARLIALYGERMQPAPYKLRSDAILTLKQKRTVIRQLKKQLIATRNLKGSMEALPFFDPKCKKAIEKTIVFLEKQTKGLEEELAALAQSEYKKQIDLLTSIKGIGVTLAAALIMATGGFTYFDNAKQLTRYLGLSPTYQQSGTSVNVKGHINRNGDSSLRGQLYIAAMASLRCNAECKACFDRLRSNGKPGKVAVVAVANKLVRQAFAVVTQEKPYVDGFKSKKP

SEQ ID NO: 16090 - protein, 323 aa, unidentified
  source 1..323: note = protein_302db97
  REGION 8..150: note = RuvC_domain
  SITE 11: note = RuvC_P1
  SITE 52: note = RuvC_P2
  SITE 92: note = RuvC_P3
  SITE 94: note = RuvC_P4
  SITE 97: note = RuvC_P5
  REGION 191..278: note = Tnp_domain
  SITE 199: note = Tnp_P1
  SITE 229: note = Tnp_P2
  SITE 237: note = Tnp_P3
  SITE 238: note = Tnp_P4
  SITE 251: note = Tnp_P5
MNKDIKYFGIDISHLVFDVTDSQGNYYQFKNTISGFKNFAKLLSANSHCVMEATGYYHYQLAYYLLESGTKVSVENPLAVKRFIQMGLSKVKTDKSDSRLICAYAQHVELKLWKGNSKNELECLQIVRTLSVYTKQSTMLKNKLHGEAVLGEPSKLVVRSLKRNLKQLEKEMKTLEDQLLLLVRQVHQDLLTRLETIPGIGRKTAIMLVVLTGGFDRFTSAGELCSYAGLTPVIRQSGSSINGRARISKIGNQKLRNLLFMCSFNACKYNKACRDLYERIVAKGKSKKLALIAVYNKLLKQAFAIAKSGLIYDDNYRSTLVKN

SEQ ID NO: 16091 - protein, 346 aa, unidentified
  source 1..346: note = protein_769f566
  REGION 6..147: note = RuvC_domain
  SITE 9: note = RuvC_P1
  SITE 51: note = RuvC_P2
  SITE 86: note = RuvC_P3
  SITE 88: note = RuvC_P4
  SITE 91: note = RuvC_P5
  REGION 210..303: note = Tnp_domain
  SITE 218: note = Tnp_P1
  SITE 250: note = Tnp_P2
  SITE 258: note = Tnp_P3
  SITE 259: note = Tnp_P4
  SITE 271: note = Tnp_P5
MKNTIVGVDLAKKVIQVCKTINRTVRSNEEMTPDEFILFLANSKPMTVVFEACGTSSYWKQQALLYGHDAKLISAKLVASVRQSQKTDKNDALAIVQAALLPDVNFISGKSIEQQQLQSTMRLRELCSKQKTALSNQLIALLAEFNINSSNRNGGLRGAIESTLEDASNGFSHEFRKALDEAWKLYLTVAETLVTYDECLEASIETHPECKKLLKLEGVGPINAINLYIALGCAELGCFTRGKDASACIGLTPLQYSSGGKSKLGSIGKHVKNTVIRSQLITGAAASVRHVIKREAKTCKEKWIQDLVDRRGIKCAAVALANKTVRTAFAMLTQGTEYKANMILTS

SEQ ID NO: 16092 - protein, 339 aa, unidentified
  source 1..339: note = protein_85e1258
  REGION 6..147: note = RuvC_domain
  SITE 9: note = RuvC_P1
  SITE 52: note = RuvC_P2
  SITE 87: note = RuvC_P3
  SITE 89: note = RuvC_P4
  SITE 92: note = RuvC_P5
  REGION 209..295: note = Tnp_domain
  SITE 217: note = Tnp_P1
  SITE 247: note = Tnp_P2
  SITE 255: note = Tnp_P3
  SITE 256: note = Tnp_P4
  SITE 268: note = Tnp_P5
MMIKTIGLDLAKSIFQAHGVDERGATVLVKKLHRKQMLPFFSKLPPCLIGVEACGTAHHWARTLSAMGHEVRLIPPSYVKAFVKRGKSDALDAQAICEAVQRPTMQFVPVKTVAQQGILMTHRARSLLVRQRTSAANALRAHLAELGLVANPGVANLAKLAEQALAEDALPSFARAALVIMHRQIVVLGQEISELDRQIAAWHAESEASRRLAAIPGLGVVTATAIAATVTDPDQFRSGRQFAAWLGLTPQQQSTGGKTRLGGISKQGDRYLRRLLVVGATAVIRHTKDKPTPMASWIRTLLEKKPFRLVSVALANKLARIAWVLLTRKETYRPQQLAA

SEQ ID NO: 16093 - protein, 326 aa, unidentified
  source 1..326: note = protein_fa0580a
  REGION 4..156: note = RuvC_domain
  SITE 7: note = RuvC_P1
  SITE 61: note = RuvC_P2
  SITE 101: note = RuvC_P3
  SITE 103: note = RuvC_P4
  SITE 106: note = RuvC_P5
  REGION 201..287: note = Tnp_domain
  SITE 209: note = Tnp_P1
  SITE 238: note = Tnp_P2
  SITE 246: note = Tnp_P3
  SITE 247: note = Tnp_P4
  SITE 260: note = Tnp_P5
MMIIGIDVSKNKLDCALIDHLNVDKLKFKVVSNSEVGFIALIDWLSKHVKTTVSDYHCVMEATGVYHEQLADCLFNMGAKVSIVNPAHIKYYGKSLGVRSNNDKKDSVVIARYGLTQKPMIWQPETHEIKVLKALASRLDAIEKDILREKNRYEKSSINPCSDTILESIQKMLAVLNEEKTSLERLIDTHINQHIYLKTNYALLQTIPGVGPVVSRYMLIVIGSRSFKSASQCAAYIGLVPIQNESGSSLRGRSRISKAGNPVIRAKLYMAAISALQHNPDIKIQNQRLLKNGKSKMSALCAAMRKLVHICFGVIKHQEPYQVQAN

SEQ ID NO: 16094 - protein, 401 aa, unidentified
  source 1..401: note = protein_1a183f2
  REGION 33..184: note = RuvC_domain
  SITE 36: note = RuvC_P1
  SITE 87: note = RuvC_P2
  SITE 124: note = RuvC_P3
  SITE 126: note = RuvC_P4
  SITE 129: note = RuvC_P5
  REGION 250..336: note = Tnp_domain
  SITE 258: note = Tnp_P1
  SITE 288: note = Tnp_P2
  SITE 296: note = Tnp_P3
  SITE 297: note = Tnp_P4
  SITE 309: note = Tnp_P5
MKEFNATDVRIETASALNVVRDGLQSDFYSFYVGLDVHKETIAIAVARPGRGEPEYRGEIANTPKAVEKLIQRLSEEADGGIVQFCYEAGPCGYGLYRQILATGHDCQVVAPSLIPRKPGERVKTDRRDALKLARLLRSGGLTSVWVPDQEQEAMRDLTRARDDMKAQERKARQQLNAFVLRHGHSWPKGKTRWTQTHYNWLESLKFEHAWQQVVLQEYVDAVKAATRRVDDLTAQMMQVLPQWSLAPVVSSLVALRGIDKLAAMVLLAELGDISRFDSPRQLMAYLGLVPSEHSSGSRRRQGAITLTGNGHARRMLVESAWSYRFPARQTAHLKRKATEASDEAKAIAWRAQKRLCGRYRTLTQAGKSTKLVCVAVARELAGFIWDIVRHEMPRLQHRAA

SEQ ID NO: 16095 - protein, 410 aa, unidentified
  source 1..410: note = protein_a7418c6
  REGION 4..163: note = RuvC_domain
  SITE 7: note = RuvC_P1
  SITE 60: note = RuvC_P2
  SITE 100: note = RuvC_P3
  SITE 102: note = RuvC_P4
  SITE 105: note = RuvC_P5
  REGION 273..359: note = Tnp_domain
  SITE 281: note = Tnp_P1
  SITE 312: note = Tnp_P2
  SITE 320: note = Tnp_P3
  SITE 321: note = Tnp_P4
MLFVGDDWAEAHHDIEIEDEVGHLLARRRLPEGLAGITALHELIAEHLGADVETGQVLVGIETERGPWVQALLASGYIVYPVNPMQVARYRERHSTSGAKSDAADAHLLAELVRLDRAHHRPIAGDSEIAEHVKVAARAHQTMIWSRVRQVNALRSLLRDYYPAALAAFGTDLADRDALAVLAAAPSPEQGRRLSQARIEALLRRAGRQRNITATAARIRAALSSEQLTARPGVVPAYAASASALIVVLAAIVEQTEVLAGQVEQGFGQHPDVEIYRSQPGLGTILGGRVLAEFGDDPDRYTDAKSRKNYSGMSPITKASGTKRVVLARYARNRRLGDALLLQAYSALRTSPGARAFYDHQRARGATHYQALRALANRLVGILHGCLRHHTLYDESQAWHLGDKKLSPAA

SEQ ID NO: 16096 - protein, 341 aa, unidentified
  source 1..341: note = protein_63dc172
  REGION 7..149: note = RuvC_domain
  SITE 10: note = RuvC_P1
  SITE 53: note = RuvC_P2
  SITE 88: note = RuvC_P3
  SITE 90: note = RuvC_P4
  SITE 93: note = RuvC_P5
  REGION 212..298: note = Tnp_domain
  SITE 220: note = Tnp_P1
  SITE 250: note = Tnp_P2
  SITE 258: note = Tnp_P3
  SITE 259: note = Tnp_P4
  SITE 271: note = Tnp_P5
MEKITTIGVDNAKHLFQVHGINAAGATVTRRKLRRDDVVGFFEALPPCLIGIEACATGHPWARVLIALGHEVRLMPASYVKPYVKRQKNDATDAEAICEAVTRPTMRFVPVKSEEQQSVLMLHGVRELLIRQRTMLVNALRGHLAGFGIVTRQGIAGVGMLIALIEDGDPDPVPPLARSALLPLIQQLREVHEKVREMDRQIHAWHRSNELSRRLETIPGIGPITASALTATVTDASLFKSGRQLAAWIGLVPRQNSSGGKDRLGRISKQGDPYLRRLLVVGAHAVLRFSRKAEVAPTRWAAELLVKKPYNVVAVRLANKMARIVWALMTTGRRFESTVAL

SEQ ID NO: 16097 - protein, 346 aa, unidentified
  source 1..346: note = protein_600a6e5
  REGION 9..149: note = RuvC_domain
  SITE 12: note = RuvC_P1
  SITE 55: note = RuvC_P2
  SITE 90: note = RuvC_P3
  SITE 92: note = RuvC_P4
  SITE 95: note = RuvC_P5
  REGION 214..301: note = Tnp_domain
  SITE 222: note = Tnp_P1
  SITE 252: note = Tnp_P2
  SITE 260: note = Tnp_P3
  SITE 261: note = Tnp_P4
  SITE 273: note = Tnp_P5
MNAAVIASIGIDLGKTTFHLVALDCHAGVTVRKKFSRSQLLTYTANLPWSLIGMEACSGAHFLAAKLREQGHEVKLIPAQFVKPYRKSNKNDFVDAEAIAEAVTRHNMRFVPIKTDDQLDLQALHRVRERLVRRRTALINQIRGFLLERGLVFAQRPANLRRQLPLVLEGADAKLTPRLRRLLADLWQEWKQVQVDIAALDEEMEQICMGDENCQRLREIPGVGPLVATAIVAAIGNGAAFGNGREFAAWLGLVPRQYSTGGRTRLFSISKRGNAYLRRMFIHGARAVLWRVKYDLGALREWTTQLQSRAAKNVVVVALANKLARIAWAVLSSGERYRLKPAAMAA

SEQ ID NO: 16098 - protein, 341 aa, unidentified
  source 1..341: note = protein_311b2e6
  REGION 7..149: note = RuvC_domain
  SITE 10: note = RuvC_P1
  SITE 53: note = RuvC_P2
  SITE 89: note = RuvC_P3
  SITE 91: note = RuvC_P4
  SITE 94: note = RuvC_P5
  REGION 211..294: note = Tnp_domain
  SITE 219: note = Tnp_P1
  SITE 249: note = Tnp_P2
  SITE 257: note = Tnp_P3
  SITE 258: note = Tnp_P4
  SITE 270: note = Tnp_P5
MVEIITMGLDIAKSVFQVHGVDSSGSVVVRRQLRRAELLKYFSSLPPCLVGMEACGSAHYWARQIGALGHRVRLLPPAHVKPYVKRGRKNDAADAAAICEAVSRPHMQFVPVKSETSQAVLLLHRARDLLVRQRTMLICAFRSHLAEFGLIAGQGKGNFAKLVAGLAQDETLPVLARQTLQLIAAQIDDGNEKIEALEQEIALQHRRDEASRRLASIPGIGPIIASALVASVPDASAFKSGRQFAAWLGLVPRQNSTGGKERLGGITKAGDRYLRRLLVIGATGLIRYKRKNVPGGLAWVTGLLAKKPVRLVTVALANKMARIAWAILCRGEIYREAAATS

SEQ ID NO: 16099 - protein, 330 aa, unidentified
  source 1..330: note = protein_4a51412
  REGION 5..165: note = RuvC_domain
  SITE 8: note = RuvC_P1
  SITE 62: note = RuvC_P2
  SITE 102: note = RuvC_P3
  SITE 104: note = RuvC_P4
  SITE 107: note = RuvC_P5
  REGION 274..330: note = Tnp_domain
  SITE 282: note = Tnp_P1
  SITE 313: note = Tnp_P2
  SITE 321: note = Tnp_P3
  SITE 322: note = Tnp_P4
MLLFVGDDWAEDHHDVELMDGSGRRLAKARLPEGVAGIARLHAMIGEHLGEADSESAQVKIGIETDRGLWVQALIAAGYTVFAVNPLQASRYRERLAVSGAKSDAADAHMLADMVRTDSHQLRAMAGDSPDAEAIKVVSRMHKTMIWERDRAVLRLRHALRDYFPAALAAFDDLDAADSLELLGKAPEPAAAARLSLTQISAALKRARRRGDLTAKATAIQTVLRTGHLGQPAVVATAYAATTRSLVALLLTLNEQIAVLQQEVEAHFGRHPDAEIILSQPGLGAVLGARVLAEFGDYHARYASAKARKNYAATSPLTRASGKKKIVMAR

SEQ ID NO: 16100 - protein, 354 aa, unidentified
  source 1..354: note = protein_94501ee
  REGION 12..160: note = RuvC_domain
  SITE 15: note = RuvC_P1
  SITE 65: note = RuvC_P2
  SITE 101: note = RuvC_P3
  SITE 103: note = RuvC_P4
  SITE 106: note = RuvC_P5
  REGION 231..315: note = Tnp_domain
  SITE 238: note = Tnp_P1
  SITE 268: note = Tnp_P2
  SITE 276: note = Tnp_P3
  SITE 277: note = Tnp_P4
  SITE 288: note = Tnp_P5
MPILAELVEVVIGVDTHKHTHTAAVVAANTGAVLAQATVTADPDGYGELVGLAARHAGARAWAMEGSGGYGAGLAAHLAEQQELVIELDRPARPARRAGAKSDPIDAVRAARDALARTHLAQPRTGPERAALQVLLTTRQAAVQAATDGQRQLHALVVTAPEQVRARFRGLSTRKMLGAALGLRPAHYASQVQVFTAMTALKAIARRVRVLEDEAAEHEKAIRAIVISWRPDLLTLTGVGPIVAATVLAAWSHAGRCRDEAAFAMLAGTAPIPASSGKTVRHRLNRSGDRQLNRAIYTVVITRLRRDQATHAYAERRRAQGKTDREIRRCLGRYVTRQLFRQLETGPPITLDAT

SEQ ID NO: 16101 - protein, 366 aa, unidentified
  source 1..366: note = protein_22d9e83
  REGION 31..171: note = RuvC_domain
  SITE 34: note = RuvC_P1
  SITE 77: note = RuvC_P2
  SITE 112: note = RuvC_P3
  SITE 114: note = RuvC_P4
  SITE 117: note = RuvC_P5
  REGION 236..320: note = Tnp_domain
  SITE 244: note = Tnp_P1
  SITE 274: note = Tnp_P2
  SITE 282: note = Tnp_P3
  SITE 283: note = Tnp_P4
  SITE 295: note = Tnp_P5
MDGPPLLAKQLIACFRNSKVKTERTMQLSIIGIDLGKTSCSLVGLDAGGKVVLRRRMRRDTVVSFCSKFSACIVAMEACCGAHHIGRPLAGQGHEIRLMSPEYVRPYVKAQKNDDRDAEAIAEAASRPTMRFVTLKSEEQLDMQTLHRVRDRLVGDRTSLMNQIRSLLLKRGHVVAQGRARLAAALTLLLDGEHRVLAPRIHELIVDMRRQWLALDERIKAFDAEFAAAAKAQDGARRLLSIPGIGALNATALVAAVGDAGTFTRGRDLAAWLGLVPRQVTTGGRPKLLGITKRGSKYLRKMLIQGARAALPTLKAGDTRVGAWLRGLLARVHLNTAVVALAAKMARTVWALLRHGSTYEAVAQAA

SEQ ID NO: 16102 - protein, 346 aa, unidentified
  source 1..346: note = protein_5259a5a
  REGION 7..147: note = RuvC_domain
  SITE 10: note = RuvC_P1
  SITE 53: note = RuvC_P2
  SITE 88: note = RuvC_P3
  SITE 90: note = RuvC_P4
  SITE 93: note = RuvC_P5
  REGION 210..296: note = Tnp_domain
  SITE 218: note = Tnp_P1
  SITE 248: note = Tnp_P2
  SITE 256: note = Tnp_P3
  SITE 257: note = Tnp_P4
  SITE 269: note = Tnp_P5
MNQIIRIGMDTSKHIFQLHGVDAAEQPVLRKRLRRKQVLAFFAKLPPTVIGMEACGASHYWARELGRLGHEVRLIAPQHVKPYVTRNKNDGRDAEGTCEAMSRPTMRFVPVKTAEQQAALMLAGIREQLIARRTQLSNTIRGYAAEFGVTAAKGLDKIEPLLAQIAQEEDLPALARELFATEGREYARLQAELKAIEARLMAWHRANACSRRLAQIPGVGPIGATALVMKTPDPRAFASGRHFAAWLGLTPKDHSTAGKTRLGKITRAGDEVLRRLLVAGATAVIQQVRNGRGRPSPWLLAVLKRKPPKLAAVALANKIARIAWKLMTTGESYDGARMPGASAVAA

SEQ ID NO: 16103 - protein, 391 aa, unidentified
  source 1..391: note = protein_be1d275
  REGION 8..166: note = RuvC_domain
  SITE 11: note = RuvC_P1
  SITE 65: note = RuvC_P2
  SITE 105: note = RuvC_P3
  SITE 107: note = RuvC_P4
  SITE 110: note = RuvC_P5
  REGION 266..355: note = Tnp_domain
  SITE 274: note = Tnp_P1
  SITE 304: note = Tnp_P2
  SITE 312: note = Tnp_P3
  SITE 313: note = Tnp_P4
  SITE 326: note = Tnp_P5
MTWKQAVIGLDVAKGASVFQAFVKRNEVYGKPEQISHTEDEFERLGDVIRRLEELTGERPVVVLEATGHYHRIIVAYLERMGIMHFIVNPLLSKRSKSTQLRKVKTDATDAWHLAEMYCRGDVQPHRRWADKITEIQHLTRQHEFMTSQFVQSKLNARALLDQACPAYEGVFRDMFSKTALQVLRLLLCETSVTEEVIRETAGSSHGKAWIRAKVERIQSMPTLSKSSASQRTALLCIVEVLLAQQEQLSQLEKKIQEEAMEIPEIELLKTIPGIGDRLAVALFAEIGDVSQFGEPKQLVAYAGLDPTVHSSGQFMATSTRITKRGSKRLRRALYLAVQCGIRGSTNEKLRTYYDKKRKEGKPYKVTVIACADKLLHHIYAILKKGTPYTV

SEQ ID NO: 16104 - protein, 335 aa, unidentified
  source 1..335: note = protein_eac3260
  REGION 1..138: note = RuvC_domain
  SITE 2: note = RuvC_P1
  SITE 45: note = RuvC_P2
  SITE 80: note = RuvC_P3
  SITE 82: note = RuvC_P4
  SITE 85: note = RuvC_P5
  REGION 202..294: note = Tnp_domain
  SITE 210: note = Tnp_P1
  SITE 240: note = Tnp_P2
  SITE 248: note = Tnp_P3
  SITE 249: note = Tnp_P4
  SITE 261: note = Tnp_P5
MDTSKHIFQLHGVNAAEKPVLRRKLRRKEMVSFFEKLPPVVIAIEACGGSHHWARLLQSFGHTVKLIAPQLVKPYIKRGKNDAADAEALCEAMSRPTMRFVPVKTAEQQAALMLVGARDRLIRNRTQLSNAIRGYAGEFGYTAAKGKAHLGPLLERIQADQSLPSLARELFATQAQEYAQLQAQIDEVDAKLLAWHRADECSRRLAKIPGVGPIGAVLLTMKTPEPGLFRSGRQFAAWIGLTPKDHSTAGKVRLGVITRAGDEGLRSVLVVGATAVIQHVRRGGRASPWLAALLKRKSPKLAAVALANKMARIAWKLMVTGENYAVKPAKTAGTA

SEQ ID NO: 16105 - protein, 359 aa, unidentified
  source 1..359: note = protein_833787e
  REGION 12..166: note = RuvC_domain
  SITE 15: note = RuvC_P1
  SITE 68: note = RuvC_P2
  SITE 104: note = RuvC_P3
  SITE 106: note = RuvC_P4
  SITE 109: note = RuvC_P5
  REGION 232..317: note = Tnp_domain
  SITE 240: note = Tnp_P1
  SITE 270: note = Tnp_P2
  SITE 278: note = Tnp_P3
  SITE 279: note = Tnp_P4
  SITE 290: note = Tnp_P5
MTIVAYSHPFVVGVDTHARSHTLAVVVAVTGELIATDQFPATDAGMDRAVAWAARRTGGDLATLWVIEGVATYGARLAAAVTRFGYEVVEAARMDTRAHHGTGKSDLLDAHRIAAAVLSLHPHQLRRPRSDGLRAALQILVTARDHMTTERTATINALIALVRVVGLGIDARKPLTAKQVADIARWRARVEDLATATARAEAVRLAKRVVELDQEIAANQAQITDLIHHSQVSSLLDKTGIGPVTVAVALAAWSHSGRVRSEAAFAALAGVSPIPASSGNIVRHRLNRGGDRRLNRALHMAVITRMTHDPDTRAYVARRRAEGRTTKEIRRCLKRYLARQLYRAFQTLHTTPEIEPSTA

SEQ ID NO: 16106 - protein, 413 aa, unidentified
  source 1..413: note = protein_b04be00
  REGION 5..164: note = RuvC_domain
  SITE 8: note = RuvC_P1
  SITE 63: note = RuvC_P2
  SITE 103: note = RuvC_P3
  SITE 105: note = RuvC_P4
  SITE 108: note = RuvC_P5
  REGION 274..374: note = Tnp_domain
  SITE 282: note = Tnp_P1
  SITE 312: note = Tnp_P2
  SITE 320: note = Tnp_P3
  SITE 321: note = Tnp_P4
  SITE 334: note = Tnp_P5
MNPVIGLDVAKGESQVQAFLDKRKPYRKSFSILHNVEEFNNIFLIFLKEIETLAGKKPTVVLESTGHYHTPIVQFLEEHQYVYIIVNPLIAYRAKSSSLRKVKTDAIDAFHLCELYYKEELEPYKKRGIQRLNLRNLTRLHESISGVSAQTKLQLHSVLDQIFPEYVGVFGDLYSKVSLKILLQFPTSKSVLCISESTLADEIASLCKSRSDKWAKERAQKLKDAAFRNPFQSNLFQSHIFNLEILVTLILQYQEHLSKLEAEIDALAKEIEEYKILQSIPGIGEKIAATIISEIGEIDRFNHPKKLVAFAGVDPSVYSSGRFTASVNRITKRGSSSLRHALYMAVRCGIRDARKKKTTDEIIPRNKRLREFYDKKRNEGKPFRVAITACVNKLLHWIYAVLKSKTDFQDSSQ

SEQ ID NO: 16107 - protein, 354 aa, unidentified
  source 1..354: note = protein_2338a53
  REGION 6..147: note = RuvC_domain
  SITE 9: note = RuvC_P1
  SITE 52: note = RuvC_P2
  SITE 87: note = RuvC_P3
  SITE 89: note = RuvC_P4
  SITE 92: note = RuvC_P5
  REGION 211..298: note = Tnp_domain
  SITE 219: note = Tnp_P1
  SITE 249: note = Tnp_P2
  SITE 257: note = Tnp_P3
  SITE 258: note = Tnp_P4
  SITE 270: note = Tnp_P5
MDIDTIGIDLGKTVFHLVGLNTKGDIVVRKKCSRKQLLHFTANLRARLIGMESCGGAHFLARVLREQGHDVRMMPAQYVKPYVKTNKNDYIDAEAIAEAVGRPKMRFVPIKSDDQLDMQSIHRVRDCWVGRRTALINQIRGLLLERGITIRQGRRHAEAALPGILEDPDARLSGPLRMLLAQLQRELRALQAQIEEVDGVIVRATDEHEACQRLVAIPGIGPLTATAVVAAIGNGAGFIKGRNFAAWLGLVPGQYSTGGKQKLLGISKRGNGYLRRLFVHGARAVLQRRDKQSSGLRAWLAQLAERAHHNVVAVALANKLARIAWAVLARGESYRPFLLSADVTISPTPELACN

SEQ ID NO: 16108 - protein, 424 aa, unidentified
  source 1..424: note = protein_0334600
  REGION 23..183: note = RuvC_domain
  SITE 26: note = RuvC_P1
  SITE 81: note = RuvC_P2
  SITE 122: note = RuvC_P3
  SITE 124: note = RuvC_P4
  SITE 127: note = RuvC_P5
  REGION 290..376: note = Tnp_domain
  SITE 298: note = Tnp_P1
  SITE 328: note = Tnp_P2
  SITE 336: note = Tnp_P3
  SITE 337: note = Tnp_P4
  SITE 349: note = Tnp_P5
MKFKMQDKQNQLIERISDKHLVVGVDIAQQVHVARAVNFRGIVVGDPLSFENNEEGFTRLLQWINELKETKNFNTSIVGMEPTGHYWLNLSKWLYEQNVDVVTVNPHLVKKNKENRDNTQSKSDKKDALVIADMVKNGYYAFIRPTPEAFEKLRVLMANRDVIVKRLVSSINQLNRWVDLIFPELRQVFKDIKGKGAIATLRLFPTPIELRSMEAQDIVEGWKTKMKRHAGLKKAQSLVELAKHSVGNQQAHDAYKLHLEQLLEEFDLATVQLERVEKEVTGVLEQITFANKLLAIKGISEISLAGILGEAGDLSGFSHGNSLLRYAGLHLAEASSGKWKGQIVISKRGRSRLRRFLYLATMSLVMNNPEFKELHSNNVKVKKMKKMKSIMKLLGKLARILVGISRKNESYCPNKVHALEPLAA

SEQ ID NO: 16109 - protein, 391 aa, unidentified
  source 1..391: note = protein_1d90911
  REGION 47..189: note = RuvC_domain
  SITE 84: note = RuvC_P2
  SITE 123: note = RuvC_P3
  SITE 125: note = RuvC_P4
  SITE 128: note = RuvC_P5
  REGION 260..347: note = Tnp_domain
  SITE 268: note = Tnp_P1
  SITE 297: note = Tnp_P2
  SITE 305: note = Tnp_P3
  SITE 306: note = Tnp_P4
  SITE 318: note = Tnp_P5
MTKRKIETVNDLSRCLDPLDMDATLIAVIEMSQSSWLVAGIVPGVERQPLKKLAIDEHTLLKLMSRWCAEAEKKGYRITRIAVAFEAGHDGFWLARWLAALGVEAHVIHASSVAVTREHRRAKTDRLDTELLKRGFLGWLRGERGHCKMVAVPTLAEEDAKRPSREREALVGEASRIITRLKAAFVRLGIRSFNPKLKAAAERLGSLRTPEGEPIPPNTLAALKRDLERHQIIKRQIREIEQTRLDGLAQAPANGPHAMVRLLARVVGIGVETADMLVQEVLSRKMRDRRAVARYAGLTGSPDESGAKRREKGLARSGNARVRRGMIQLAWRFLMFQKDSALAEWYRQRTQAAPATRKTLIVALARKLLIALWHLAHDGVVPQGVRLRPAA

SEQ ID NO: 16110 - protein, 345 aa, unidentified
  source 1..345: note = protein_88bd5fe
  REGION 7..147: note = RuvC_domain
  SITE 10: note = RuvC_P1
  SITE 53: note = RuvC_P2
  SITE 88: note = RuvC_P3
  SITE 90: note = RuvC_P4
  SITE 93: note = RuvC_P5
  REGION 210..301: note = Tnp_domain
  SITE 218: note = Tnp_P1
  SITE 248: note = Tnp_P2
  SITE 256: note = Tnp_P3
  SITE 257: note = Tnp_P4
  SITE 269: note = Tnp_P5
MEQITRIGMDTSKHIFQLHGVTAAEEPALRKKLRRKEMVRFFEKLAPTVIAIEACGASHHWARLLQSFGHSVKLIAPQLVKPYVKRGKNDMADAEALCEATSRPTMRFVPVKTAEQQAALMLVGVRDRLIRNRTQLANAIRGYAAEFGLTAARGKAHLDPLLERIQADESLPALARELFAAQAKEYAQLQAQIDEVNARLMSWHRADECSRRLAKIPGVGPIGAVLLKMKTPEPELFRSGRQFAAWIGLTPKDHSTAGKVRLGVITRAGDEGLRSVLVVGATAVIQHVRRGGRSSPWLTELLKRKSPKLAAVALANKMARIAWKLMVTGENYTAKSTPAALAGVA

SEQ ID NO: 16111 - protein, 334 aa, unidentified
  source 1..334: note = protein_6e3201d
  REGION 7..149: note = RuvC_domain
  SITE 10: note = RuvC_P1
  SITE 53: note = RuvC_P2
  SITE 88: note = RuvC_P3
  SITE 90: note = RuvC_P4
  SITE 93: note = RuvC_P5
  REGION 209..294: note = Tnp_domain
  SITE 217: note = Tnp_P1
  SITE 247: note = Tnp_P2
  SITE 255: note = Tnp_P3
  SITE 256: note = Tnp_P4
  SITE 268: note = Tnp_P5
MKEITTVGLDLAKNLFQVHAVDENGAVLVRRQVRRAQVLLFFSRLHPCLIGIEACAGARHWARELAKLGHDVRLIPPSYVNPFVKRGKTDAADAEAICEAVIRPNMRFVPLKTEKQQAVLMQHRTGDFLVRQLTQLANAIRAHLGEFGIVVPKGVHNMGRLIAEAETADLPPEARMPLDLLAGQFRDTKQRIDVMTAQIKADAEVDETARRLQTMPGIGPITASVLAATLPNVSSFRSARDLPAWLGLTPKPHSSGGKERLGSISKMGNRYIRRLLSLGAMGVISARRLSEPSADWLGRLVATKPLKVAAIALANRMARAIWAMPKTGEAWRPA

SEQ ID NO: 16112 - protein, 340 aa, unidentified
  source 1..340: note = protein_21df889
  REGION 7..149: note = RuvC_domain
  SITE 10: note = RuvC_P1
  SITE 53: note = RuvC_P2
  SITE 88: note = RuvC_P3
  SITE 90: note = RuvC_P4
  SITE 93: note = RuvC_P5
  REGION 209..294: note = Tnp_domain
  SITE 217: note = Tnp_P1
  SITE 247: note = Tnp_P2
  SITE 255: note = Tnp_P3
  SITE 256: note = Tnp_P4
  SITE 268: note = Tnp_P5
MKKFIRIGVDIAKNSFQVHALESEDGRATKRKLSRSGIVKFLAEVEPCLVGMEACGSAHYWARRLGAMGHEIRLTPPSYVKPYVKRGKNDAADAAAICEAMSRPNMRFVPVKSEDQQATLMAHKTRDLLIKQRTMGVNALRAHLAEFGVVAAKGIGHVEELVERAAAADLPAMVRATLEVLVGQLRSLEAAIDQLERAIVVAHRRDPVSRLAAGVPGVGALAASAIRASAPDPHIFKSGRDFAAWIGSTPKQNSTGGKAKLGSITKQGNRYIRRLLVLGAISLLRAAPKRKGALSDWLAALRARKPAKVVAVALANKLARIVWAVITTGEPFRGALYAKA

SEQ ID NO: 16113 - protein, 388 aa, unidentified
  source 1..388: note = protein_d12da00
  REGION 43..186: note = RuvC_domain
  SITE 119: note = RuvC_P3
  SITE 121: note = RuvC_P4
  SITE 124: note = RuvC_P5
  REGION 256..343: note = Tnp_domain
  SITE 264: note = Tnp_P1
  SITE 293: note = Tnp_P2
  SITE 301: note = Tnp_P3
  SITE 302: note = Tnp_P4
  SITE 314: note = Tnp_P5
MTTQIDDQSRSLVALEQDTTVIAAVELSQSSWLVGAMVPGLERQPQKKLEPDPSALVKLLERWRDEGVRVGRTMRRIVLAFEAGRDGFWLARWLQKRGIETHVIHSTSVAVSREHRRAKTDRLDLAMLMRVFLGWLRGERKHCSMVAIPTLEQEDAKRPSRERESLTGEKTRIVNRMKSALARLGIRGFKPELRKAPQKLAALSTPEGVALPPNTRAEIARDMARLVVVRGQIEVVERTRLERLQQAAADGPNAMVLLLARVIGVGVETADMLVQEVLSRKLRDRRAVARYAGLTGAPDESGSKRREKGLAKAGNARVRRGLMQLAWRFLRFQRDSALTQWYRARTDGAKGARKTTMIVALARKLLIALWRMVETGEIPAGVALRQAA

SEQ ID NO: 16114 - protein, 400 aa, unidentified
  source 1..400: note = protein_24b7c11
  REGION 8..163: note = RuvC_domain
  SITE 11: note = RuvC_P1
  SITE 60: note = RuvC_P2
  SITE 101: note = RuvC_P3
  SITE 103: note = RuvC_P4
  SITE 106: note = RuvC_P5
  REGION 269..355: note = Tnp_domain
  SITE 277: note = Tnp_P1
  SITE 307: note = Tnp_P2
  SITE 315: note = Tnp_P3
  SITE 316: note = Tnp_P4
  SITE 328: note = Tnp_P5
MTGSQLWAGVDVGKEHHWICVLDTSGTVVLSRRCDNDEATIRAVITEIDALAETVSWTVDLTTAYVTLLLTVLADAGKPVRYLSGRSVWQASSVYRGGEAKTDARDARVIADQSRMRSDLPVLRPDDELIRELQMLTGHRTDLVADRTRTINRLRQQLVAICPGLERLAQISSDRGWVVLLARYQRPKAIRRVGAARLAAMLTGAGVRHAESIARAAVTAAKAQTVRLPGEDVAAELVAELAQAVIDLDARIRAVDAEIEARFRRHPLAEVILSLPGMGFRLGAEFLAAIGDPALIGSADQLAAWTGLAPRPRDSGKRTGRLHTPQRYSRRLRRVMYMSALTAVRCDPASRVYYQRKRAEGKRPVQATICLARRRVDVLYALLRDHRTWQPTVPVTAVAA

SEQ ID NO: 16115 - protein, 396 aa, unidentified
  source 1..396: note = protein_ae9f8c4
  REGION 10..163: note = RuvC_domain
  SITE 13: note = RuvC_P1
  SITE 61: note = RuvC_P2
  SITE 102: note = RuvC_P3
  SITE 104: note = RuvC_P4
  SITE 107: note = RuvC_P5
  REGION 225..310: note = Tnp_domain
  SITE 233: note = Tnp_P1
  SITE 263: note = Tnp_P2
  SITE 271: note = Tnp_P3
  SITE 272: note = Tnp_P4
  SITE 283: note = Tnp_P5
MKRESERVMIGMDPHKRSVTIEVMTAEERVVGGGRFLTDVAGFKSMLEYLRRWPDRVWAIEGCSGIGRHVVLRLLADDQEVVDVPPKLSARVRVFSTGQGRKTDATDAHSVALVGTRMAGLRPVLDDQQLTVLRILVDRRRSLGEDHTRMISQLHHLLLELIPGGAKKDLSAAQAKALLAGVRPRDVAGKVRRRVAAELIGDLERVYARRKAADKELRDLVAATGTSLMELNGIGPSGAARLLVEIGDITRFPDRDHFASWNGTAPIDASSGDQVRHRLSRAGNRQINRVLHIMATVQLRNPTEGRAYYDRRKGDGKTSMEAMRALKRRLSNIVYRTMLDDTIAHATTGSRTGPGGQTGNDSDSSATGSHPGTGSSDKPLPGPAKTHPRTPLPAAS

SEQ ID NO: 16116 - protein, 315 aa, unidentified
  source 1..315: note = protein_5a3d13d
  REGION 12..162: note = RuvC_domain
  SITE 15: note = RuvC_P1
  SITE 57: note = RuvC_P2
  SITE 97: note = RuvC_P3
  SITE 99: note = RuvC_P4
  SITE 102: note = RuvC_P5
  REGION 192..276: note = Tnp_domain
  SITE 200: note = Tnp_P1
  SITE 229: note = Tnp_P2
  SITE 237: note = Tnp_P3
  SITE 238: note = Tnp_P4
  SITE 250: note = Tnp_P5
MAMPVAITQSIVGVDVAKDELVIYHAESDRLETIPNTKAAIKKWLKALPAPVDVAIEATNIYHQEFVNLAYAQGCVIYVIDGYELSHYRKGVKIRAKTDALDARLLARYLSNEGHLLHPWTPPSPLYCRLISLFRRRAALVQARVSLKQSWANEPLLKTAFENQIAAMQRLETLIDKTIQTQLEQAGLAHQLKRCMKVEGIGLLSGARLITSFQRGDFRNADAFIAFLGLDLRIADSGKKKGRRCLSKRGDPEARRLMHNAAMSASRTAAWRGFYEALRARGLSTTQALVALARKLARVVFALLKNQSEYLPKCI

SEQ ID NO: 16117 - protein, 403 aa, unidentified
  source 1..403: note = protein_7f5c867
  REGION 4..160: note = RuvC_domain
  SITE 7: note = RuvC_P1
  SITE 57: note = RuvC_P2
  SITE 97: note = RuvC_P3
  SITE 99: note = RuvC_P4
  SITE 102: note = RuvC_P5
  REGION 274..361: note = Tnp_domain
  SITE 282: note = Tnp_P1
  SITE 312: note = Tnp_P2
  SITE 320: note = Tnp_P3
  SITE 321: note = Tnp_P4
  SITE 334: note = Tnp_P5
MNAVGIDVSKGKSMIAVMRPFGEVVLSPFEVSHTDKDLTELAKKLKSLPGETRVVMEYTGYYHAPVAVALHEAGIYVSAVNAMLVHDYGNNSLRRAKTDKKDAIKLANYALDHWLSLPRYLPAGDTRLMLKTCYRQYEQFSKMRTMQKNNLISLLDVTFPDANKLFSSPPRADGSEKWVDFISQYWHCECVCGLSVNAFTRNYEKWCRKHGYYFSEDKALDIYSSACGHICIMPKCDSTQLMIQQAIIQLKASSAALAALKKQMQDLASTLPEYSVVMQMYGVGPSLGPQLMAEIGDVRRFHSKSALVAFAGIDAPPYQSGQMDVHSRSISKRGSAKLRRTLFLVMSSILQNSPLDEPIYQYMYKKRAEGKPYKVYMMASANKFLRRYYAIVKAHLDEMDYNI

SEQ ID NO: 16118 - protein, 344 aa, unidentified
  source 1..344: note = protein_4ad5f1b
  REGION 5..152: note = RuvC_domain
  SITE 8: note = RuvC_P1
  SITE 55: note = RuvC_P2
  SITE 92: note = RuvC_P3
  SITE 94: note = RuvC_P4
  SITE 97: note = RuvC_P5
  REGION 212..298: note = Tnp_domain
  SITE 220: note = Tnp_P1
  SITE 250: note = Tnp_P2
  SITE 258: note = Tnp_P3
  SITE 259: note = Tnp_P4
  SITE 271: note = Tnp_P5
MSYYAGIDVSLESSAVCVVDGAGKILREAKVASEPRALIDWFRSLGLALERIGLEAGPLSQWLYAALCEAKFAVELLETRHVRDAFKAMPVKSDRNDARGIAQLMRLGWFRPVHCKSIEAQETRAILTARKLLQSKLRDIENSLRGVLRGFGLKVGKTTERTFAERIRELVVGHPSLELVAQALLEAHAVLLREFNGLDKHTQKLAKLHPQAKLLMTTPAVGPIVALTYAAAIDDPKRFRSSKATGAHFGLTPKKYQSGETDYTGRISKIGDASVREALYQAAHIMLTKPVKNCSALKSWAMRIARRAGMRKAKVALARKLAVILHRMLADAKPFNPMAKTIAT

SEQ ID NO: 16119 - protein, 394 aa, unidentified
  source 1..394: note = protein_b37f23c
  REGION 5..159: note = RuvC_domain
  SITE 8: note = RuvC_P1
  SITE 57: note = RuvC_P2
  SITE 97: note = RuvC_P3
  SITE 99: note = RuvC_P4
  SITE 102: note = RuvC_P5
  REGION 265..352: note = Tnp_domain
  SITE 273: note = Tnp_P1
  SITE 304: note = Tnp_P2
  SITE 312: note = Tnp_P3
  SITE 313: note = Tnp_P4
  SITE 325: note = Tnp_P5
MNCFVGIDVSKEKFDACGIGEQGEKVFSLACTMDREGFKKFTLCLPTDKESFLLGMESTASYHIALFSYLTANGYKVAVINPLLINGFSKRSLRKTKTDRKDALMIAQFLMQEQATLSAQVPDCLTTELKDLARRREKLADYVTSLKADMKRLLSVIFPELEHITGVFTKSTLRLLIEYPSAHAIRKAGYSVVEDIFVTRSRGNKPQASAKTLMEAAASSVGIASPAKELVLKQEASLLIHVQEQMKEVTKLLKTLLNERMKQDIEILCSIKGVGENTAMNFLIEMGTEVEMYENDKKLIAASGLDPSTYQSGKYEGKSRISKRGNRHLRRVIWLMATKVIINNGLFRTYFYKRRNEGLPYKKAVLATAHKLIRVMFVMLSRKSFFIEGGIKYS

SEQ ID NO: 16120 - protein, 293 aa, unidentified
  source 1..293: note = protein_42e6701
  REGION 4..99: note = RuvC_domain
  SITE 39: note = RuvC_P3
  SITE 41: note = RuvC_P4
  SITE 44: note = RuvC_P5
  REGION 163..250: note = Tnp_domain
  SITE 171: note = Tnp_P1
  SITE 201: note = Tnp_P2
  SITE 209: note = Tnp_P3
  SITE 210: note = Tnp_P4
  SITE 222: note = Tnp_P5
MGIEACASSHHWAREIGALGHTVKLKPPAYVKPYVKSQKNDSADAEAICEAVTRPNMRFAEVKSVEQQSVLAMHKLRATLIRHRTRVGNSIRAHMAEFGLIAPIGRIGLESLVQIICDEKDERITPMVRRALGYLVNQYDQLQAQILDCDRQVLAWHRGNETSRRLATIPGIGPLAASALAATIGDASTFKSGRALSAWLGLVPKQSSTGGKERLGAISKRGDSYLRWLLVAGSLSVIRYAQRHGTKRPWLVKLLERRTSKIAAVALANKTARMVWALMTKGEQYREPQLQVA

SEQ ID NO: 16121 - protein, 402 aa, unidentified
  source 1..402: note = protein_f8c20d1
  REGION 4..160: note = RuvC_domain
  SITE 7: note = RuvC_P1
  SITE 57: note = RuvC_P2
  SITE 97: note = RuvC_P3
  SITE 99: note = RuvC_P4
  SITE 102: note = RuvC_P5
  REGION 274..361: note = Tnp_domain
  SITE 282: note = Tnp_P1
  SITE 312: note = Tnp_P2
  SITE 320: note = Tnp_P3
  SITE 321: note = Tnp_P4
  SITE 334: note = Tnp_P5
MNAVGIDVSKGKSMIAVMRPFGEVVVSPFEVRHTDSELSELAKQLKSLDGETRVVMEYTGNYHAPVAWSLHDAGIYVSVVNPMLVHGYGNNSLRRAKTDKKDALKLANYAIDRWLSLPQYFPEEDTQLMLKSCYRQYEQYSKLRTMLKNNLIALLDQVFPDANRRFTSPRRTDGSEKWIDFIAAFWHCECVSNLTQAAFILRYQKWCKKHGYNFSEEKAENIYLDSAGHVSVMPMTDTAKLLVQQAVSQLQATSKALATLQREMQTLAASLPEYPVVMQMFGVGSTLGPQLMAEIGNVYRFHSKKALVAFAGIDAPPYQSGTVDVRSRSISKRGSSSLRRTLFLVMGVILQNSPIDEPIYQFMDKKRAEGKPYKVYMMASANKFLRIYYAKVKAYLDALDAN

SEQ ID NO: 16122 - protein, 390 aa, unidentified
  source 1..390: note = protein_a847da0
  REGION 4..163: note = RuvC_domain
  SITE 7: note = RuvC_P1
  SITE 60: note = RuvC_P2
  SITE 101: note = RuvC_P3
  SITE 103: note = RuvC_P4
  SITE 106: note = RuvC_P5
  REGION 266..353: note = Tnp_domain
  SITE 274: note = Tnp_P1
  SITE 304: note = Tnp_P2
  SITE 312: note = Tnp_P3
  SITE 313: note = Tnp_P4
  SITE 326: note = Tnp_P5
MIYVGIDVAKDKHDCCILGSDGEVLFSPFTIQNSLQGFDELYDKICSLSSDSSEIKVGLEATGHYHMNLLRSLLDNGLDSYVINPLHTNLFRKGQSLRKTKTDKVDASSIAMMLLTDKTLKPYSDSSYHNEELKSLTRYRFNKVSERSRLKVSISRLVSILFPELEKLVPTLHISSVYALLSEYPGASYIASANLTHLKHLLSKKSKGHYGRDMAIAIRTAAASSIGTIIPAKSMELKHTIRLAEVITEEIDEIETTINSIMKTLESPITSIPGINTRMGAMILAEIGDFSRFDNADQILAYAGLSPSTYQSGKLTASYSHMEKRGSRYLRYALFNATRYVCLWDPTFSAYLAKKRAEGKHYNIAISHACKKLVRIIYRMQLTGELYHQA

SEQ ID NO: 16123 - protein, 326 aa, unidentified
  source 1..326: note = protein_71cfc57
  REGION 6..158: note = RuvC_domain
  SITE 9: note = RuvC_P1
  SITE 57: note = RuvC_P2
  SITE 95: note = RuvC_P3
  SITE 97: note = RuvC_P4
  SITE 100: note = RuvC_P5
  REGION 201..287: note = Tnp_domain
  SITE 208: note = Tnp_P1
  SITE 238: note = Tnp_P2
  SITE 246: note = Tnp_P3
  SITE 247: note = Tnp_P4
  SITE 260: note = Tnp_P5
MKKLVVGIDISKDTLDFCILESEGVTINGRGQLQNSSKQIKKWLDGFNREQARFVMEHTGHYGMELIQSLAGAGHDFYLINPLELKRSMGIQRGKSDRVDAYRIAEYGITNRHKLTPFVLPTENLVRLRALMTARQRYVKIAVQVKNSIRANEILGRTVDVKSLLREERRQLAQVERTIASLERQMNEAIASDQAIRQTYGKITKVTGVGPIIAMKCIVETDNFTRFTDPRKFCSHGGLAPFPYQSGSSIKGRNRTHHLRDRTLKALLIRGATTAVRHDPQLKRYYNRKTGEGKHHMSVINAVANKLVLRIFAVAKRDEPFVKLAA

SEQ ID NO: 16124 - protein, 285 aa, unidentified
  source 1..285: note = protein_29e1fb4
  REGION 10..99: note = RuvC_domain
  SITE 39: note = RuvC_P3
  SITE 41: note = RuvC_P4
  SITE 44: note = RuvC_P5
  REGION 160..248: note = Tnp_domain
  SITE 168: note = Tnp_P1
  SITE 198: note = Tnp_P2
  SITE 206: note = Tnp_P3
  SITE 207: note = Tnp_P4
  SITE 219: note = Tnp_P5
MVMESCGGAHFMARRVADFGHKAKLISSQFVRPFAKSNKNDFVDAEAICEAVSRPSMRFVTPRTEDQQAMAALHRVRDSLIRERVKTTNQMHVFLLESGVSLPRGVAVIRRLAAVLEENHIPTYLTRLLNRLHSHYVYLSGEIEELDKGLKNHLAEDATAQRLLTIPGVGPMTASLLATRLGDGKNYASSRAFAASTGLVPRQYSTGGKSTLMGISKRGDRNLRRLLVQCARVFMQRLEHNPGRLAEWVKKQLASHHSNVVACGLANKLARIAWAVTAHQAVFSK

SEQ ID NO: 16125 - protein, 341 aa, unidentified
  source 1..341: note = protein_0079ae6
  REGION 5..157: note = RuvC_domain
  SITE 8: note = RuvC_P1
  SITE 56: note = RuvC_P2
  SITE 97: note = RuvC_P3
  SITE 99: note = RuvC_P4
  SITE 102: note = RuvC_P5
  REGION 220..306: note = Tnp_domain
  SITE 228: note = Tnp_P1
  SITE 258: note = Tnp_P2
  SITE 266: note = Tnp_P3
  SITE 267: note = Tnp_P4
  SITE 278: note = Tnp_P5
MTIIIGIDPHKATHTAVAIDEHEDPLAEVTLAADRCQTSRLLAWAAPFDDRAWAVESADGLGKLLSQQLVAEGEHVIDVPATLAAKVRLLGSSKASKNDPNDAYSTAVAGLRHCGLRRVVADDHRQAIRMLIRRYDDITARRTQAVCRLHAVLVELIAGGMPRKLKADKASAVLRRIRTDNPIDIARKHVAADLIVDMRRCDRELEQLRARIAEAVNASGSTILEVYGVGPVVAAFILGYVGDPARFATKEKFASYNGTAPIEASSGPSKRHRLNPRGNRKLNHAMHLIALAQISHAGTPGRVYYDRKLAEGKTKKEAIRALKRRVSDAVWRQLQVDLGRR

SEQ ID NO: 16126 - protein, 340 aa, unidentified
  source 1..340: note = protein_354af47
  REGION 6..147: note = RuvC_domain
  SITE 9: note = RuvC_P1
  SITE 52: note = RuvC_P2
  SITE 87: note = RuvC_P3
  SITE 89: note = RuvC_P4
  SITE 92: note = RuvC_P5
  REGION 211..303: note = Tnp_domain
  SITE 219: note = Tnp_P1
  SITE 249: note = Tnp_P2
  SITE 257: note = Tnp_P3
  SITE 258: note = Tnp_P4
  SITE 270: note = Tnp_P5
MEIKRIGLDLAKYVFEVHAVDNDENVVLRKTLRREAVAQFFAELEPCVVGMEACCGSHYWARVLTDLGHEVRLISPQFVKPYVKSNKNDRNDAEAICEAVGRPSMRFVPPKSPEQLEIQAVHRIRQRVVANRTRLVNQVRGLLGEHGVVVPRDINRIRRTLSEIADGQSGGFGGLFVEMLRDIREELAELDARLAGYNQRIKSLYRSNEMCQRISQIEGIGPITATALVAAVGDKSCFRNGRQFAAWLGLVPKQHSSGGKARLFGISKRGDRYLRTMLIHGARAVLGRSAGKTDTRSQWINRMRERRHPNVVAVALANKNARIVWSLLSNDQEYRRGHTV

SEQ ID NO: 16127 - protein, 354 aa, unidentified
  source 1..354: note = protein_e05192e
  REGION 12..152: note = RuvC_domain
  SITE 15: note = RuvC_P1
  SITE 58: note = RuvC_P2
  SITE 93: note = RuvC_P3
  SITE 95: note = RuvC_P4
  SITE 98: note = RuvC_P5
  REGION 217..302: note = Tnp_domain
  SITE 225: note = Tnp_P1
  SITE 255: note = Tnp_P2
  SITE 263: note = Tnp_P3
  SITE 264: note = Tnp_P4
  SITE 276: note = Tnp_P5
MSNKSIATIATMGIDIGKNSFHVVGLDRRGAIVLRQKWSRGQIEARLAAMPPCLIGMEACVGAHHLSRKLQAHGHNARLMPAKYVRAYNKGQKNDFRDAEAIAEAVQRPTMKFVATKTADQLDLQALHRVRERLVRQRTSIINQIRAFLLERGVAVRQGRHFLRTELPGILAKRSDVLSPRMMRIIEDLAGDWRRLDERIEGLSTDITRVVEQDPACERLMTVPGIGPIISSATVAAIGTGDVFSKGRDFAAWLGLVPRQISTGDRTILGKISKRGNRYLRVLFVQAAWVVLIRPQSWERYGLKPWIEAAKKRLHHNVLAIALANKLARIAWAALNKERNFEVTRTTAPSSRPA

SEQ ID NO: 16128 - protein, 345 aa, unidentified
  source 1..345: note = protein_58838bf
  REGION 6..147: note = RuvC_domain
  SITE 9: note = RuvC_P1
  SITE 52: note = RuvC_P2
  SITE 87: note = RuvC_P3
  SITE 89: note = RuvC_P4
  SITE 92: note = RuvC_P5
  REGION 211..298: note = Tnp_domain
  SITE 219: note = Tnp_P1
  SITE 249: note = Tnp_P2
  SITE 257: note = Tnp_P3
  SITE 258: note = Tnp_P4
  SITE 270: note = Tnp_P5
MELHTIGIDLGKTVFHLVGLNLRGEVVVHKKFSRKQLLHFTANLKVELIGMEACGGAHFLGRALREQGHEVRLMPAQYVKPYVKTNKSDYIDAEAIAEAVGRPKMRFVPIKSDDQLDLQSLHRVRERWVMRRTAVINQIRGLLLERGITLRKGRCHVDAALPGILEDASAKLSGALRVLLAQLKLELNHLQMRIDEADAVIKKTAGDNEACRRLVAIPGIGPITATAIIAAIGNGAAFKKGREFSAWLGIVPGEYTTGGKQKLLGISKRGNSYLRRLFVQGARAVLQQSAKQSSGLSAWLAQLTARAHHNVVAVALANKLARMAWAVLAKNESYRPPVLVDVAAA

SEQ ID NO: 16129 - protein, 343 aa, unidentified
  source 1..343: note = protein_99b3aea
  REGION 6..147: note = RuvC_domain
  SITE 9: note = RuvC_P1
  SITE 52: note = RuvC_P2
  SITE 87: note = RuvC_P3
  SITE 89: note = RuvC_P4
  SITE 92: note = RuvC_P5
  REGION 211..299: note = Tnp_domain
  SITE 219: note = Tnp_P1
  SITE 249: note = Tnp_P2
  SITE 257: note = Tnp_P3
  SITE 258: note = Tnp_P4
  SITE 270: note = Tnp_P5
MEIVRIGLDLAKNIFEVCGVDMRDHVVLRKTLRRDAVPQFFAELPPCLIGMEACSSSHYWAKVLTDLGHQVRLIAPQFVTPYVKSNKNDRNDAEAICEAISRPSMRFVPPKSSEQLEIQAVHRIRQRLVSSRTRLVNQIRGLLAEHGVVIGRDISRLRRALSQIAEGSDRNLGDLMQELACDIHHELTALDERISSYNRRIRDLFRTNEMCQRIGKIEGIGPITATALVAAVGDQSCFKNGRQFAAWLGLVPKQRSSGGKSRLFGISKRGDRYLRTLLIHGARAVLGKADGKQDARSAWINRMRERRHPNVVAVALANKNARIVWSVLSKNEEYRGPEMIQAA

SEQ ID NO: 16130 - protein, 406 aa, unidentified
  source 1..406: note = protein_b9e221f
  REGION 4..160: note = RuvC_domain
  SITE 7: note = RuvC_P1
  SITE 57: note = RuvC_P2
  SITE 97: note = RuvC_P3
  SITE 99: note = RuvC_P4
  SITE 102: note = RuvC_P5
  REGION 271..358: note = Tnp_domain
  SITE 279: note = Tnp_P1
  SITE 309: note = Tnp_P2
  SITE 317: note = Tnp_P3
  SITE 318: note = Tnp_P4
  SITE 331: note = Tnp_P5
MISVGIDVSKGKSMVCIMKPCGEVLKTPFEMLHSMESILRLVKLINSYDEEVRVILEDTGHYHLPVVTLLVENGIFVCCVNALRMKKFCSQSIRRAKTDKIDSVHIAVFGLTYWEELSPVLPTGDVYHELKLLARQYYQTVSILVKAKVNLGNLLDQVIPNIQTVMQDNPSNHKLTDFVKRYYHYGHILAMGKSKFTSDYCKWAKKQGYYLCERSAEKIFALVQNSIPVLPNSSVTKIVVVEAIRMLHEIEASRDTILAQMQDFAKTLPEYSVVREMPCIGDTLAPRVIAEIGDVRRFKNKHSLIAYAGIDAPPYQSGAFNAAERHISKRGNSYLRKTGYEIMQSLIKHKPIGNPVYDFICKKRLEGKCAKEAMIAGLNKFLRIYYGKVTELYNNIDKQLADKNII

SEQ ID NO: 16131 - protein, 312 aa, unidentified
  source 1..312: note = protein_1b7b2de
  REGION 4..151: note = RuvC_domain
  SITE 7: note = RuvC_P1
  SITE 50: note = RuvC_P2
  SITE 90: note = RuvC_P3
  SITE 92: note = RuvC_P4
  SITE 95: note = RuvC_P5
  REGION 182..266: note = Tnp_domain
  SITE 190: note = Tnp_P1
  SITE 219: note = Tnp_P2
  SITE 227: note = Tnp_P3
  SITE 228: note = Tnp_P4
  SITE 239: note = Tnp_P5
MNGIGIDVCKAMLDVAVHRGPFARFHNTPAGHRKLLSWLARQEAGQVVLEASGGYEQRVLDALFDAGHQVVRANAHRCHAFATAIGLPAKTDRLDAINLACMAATLELRAYQPMESWRRKLREFVRARQQLVDPATSAQNQLEQVTDTTLRRVLQANITQMKKHCVRLEKHIAEQVRQQPQLEAMRSFKGVGAILQAVIASYLPELGTLDGKAIAKLVGVAPIAHDSGTTRGIRRIGGGRIEVRNVLYMACLSAIQHEPRIREFYRSLRARGKPGKVAVVAAMRKMLVILNARARDALAGEAQAGEAQAIPT

SEQ ID NO: 16132 - protein, 402 aa, unidentified
  source 1..402: note = protein_18773ba
  REGION 4..160: note = RuvC_domain
  SITE 7: note = RuvC_P1
  SITE 57: note = RuvC_P2
  SITE 97: note = RuvC_P3
  SITE 99: note = RuvC_P4
  SITE 102: note = RuvC_P5
  REGION 274..361: note = Tnp_domain
  SITE 282: note = Tnp_P1
  SITE 312: note = Tnp_P2
  SITE 320: note = Tnp_P3
  SITE 321: note = Tnp_P4
  SITE 334: note = Tnp_P5
MNAVGIDVSKGKSMVAIMRPFGEVVRSPFEVSHTGSELSELAKLLKSLPGETRVVMEYTGYYHAPVAYSLCKAGIYVSAVNAILVHDYGNNNLRRAKTDKKDAVKLANYALDHWLSLPRYIPEEDARLILKTCYRQYQQMSKIQTMQNNNLVSLLDTTFPNVNRLFSSPPRPDGSEKWADFVSQFWHCGCVGKLSLNAFIERYRKWCKKHGYNFSTEKAAKIHEAARNHVPVMPMNETTRFLVQQAVSQLQTTQKALASMRDQMQSLASALPEYPVVMNMYGVGKSIGPQLMAEIGDVRRFHSKKALVAYAGIDAPPYQSGQYELKSRSISKRGSSSLRRTLFLVMSVILRNSPEDQPVYLFMDKKRSEGKPYKVYMMASANKFLRIYYASVTKYLASLEDA

SEQ ID NO: 16133 - protein, 365 aa, unidentified
  source 1..365: note = protein_10289b5
  REGION 21..167: note = RuvC_domain
  SITE 24: note = RuvC_P1
  SITE 68: note = RuvC_P2
  SITE 106: note = RuvC_P3
  SITE 108: note = RuvC_P4
  SITE 111: note = RuvC_P5
  REGION 230..317: note = Tnp_domain
  SITE 238: note = Tnp_P1
  SITE 268: note = Tnp_P2
  SITE 276: note = Tnp_P3
  SITE 277: note = Tnp_P4
  SITE 289: note = Tnp_P5
MEQITRATADVEAGRRAIARVGADLAKRVIQVHAIDAAGRVVCRRALTREKFLAWCARLPAGCVVAMEVSSGAQHWARRLLALGLQPKLMSAQLVEPYRSQGSTGKNDANDAAAICEAASRPSMRFVPVKSVEQQSMLCVHRLREGLKAERTACINRIRGLMAEFGIVHAQGAEALQRVLTELIEDAGNEMNALARRVIQHAQGQWCELDAHIAWCDERIAEHARDNPAVRRAAALTGIGQVGASAAVATVDDFGQFKNGAQFGAWCGIVPRQHSSGGKTQLGRITRRGDSYLRSLLVQGAKSAVFTAHKRSDPISRWALALRERSGWQVAAVALANKNARILWAVMTKAERYNPHHVSVKPPAA

SEQ ID NO: 16134 - protein, 356 aa, unidentified
  source 1..356: note = protein_777c640
  REGION 21..154: note = RuvC_domain
  SITE 58: note = RuvC_P2
  SITE 93: note = RuvC_P3
  SITE 95: note = RuvC_P4
  SITE 98: note = RuvC_P5
  REGION 217..303: note = Tnp_domain
  SITE 225: note = Tnp_P1
  SITE 255: note = Tnp_P2
  SITE 263: note = Tnp_P3
  SITE 264: note = Tnp_P4
  SITE 276: note = Tnp_P5
MREPSTCNLPLLVWISPRTCFRFTAFDAAEKVIVRKKLRRGQVIAFFEALAPCLIGMEACATSHHWARELTKLGHEVRLMPAKDVKAYVKRNKNDAADAEAICEAVRRPTMRFVRIKSAEQQGQLMLHRARDLLMRQRTQLINALRAHLAEFGITAAQGREGIKELLAIVAQEEGSRLPVDAHASLTVLAAQLQAVQTMIGSIEKRIVAQHRSNEASKRLETIPGIGVVGATTITAVVTDPKAFRSGRDFAAWIGIVPRQDSTGGKQKLGPISKQGDQYLRRILIVGAHSVLRRARQQPDKYPWFTQASRSATVQGYRGRAGQQDGADRLAFAGQGWDLPGASTRGSLTRSSAMGG

SEQ ID NO: 16135 - protein, 346 aa, unidentified
  source 1..346: note = protein_d33c7ae
  REGION 7..147: note = RuvC_domain
  SITE 10: note = RuvC_P1
  SITE 53: note = RuvC_P2
  SITE 88: note = RuvC_P3
  SITE 90: note = RuvC_P4
  SITE 93: note = RuvC_P5
  REGION 210..296: note = Tnp_domain
  SITE 218: note = Tnp_P1
  SITE 248: note = Tnp_P2
  SITE 256: note = Tnp_P3
  SITE 257: note = Tnp_P4
  SITE 269: note = Tnp_P5
MNQIIRIGMDTSKHFFQLHGVDAAERPVLRRKLRRKEMMAFFVRLPPTVVGMEACGASHYWARELGQLGHEVRLIAPQHVKPYIKRNKNDGRDAEGLCEAMSRPTMQFVPVKTAEQQAALMLAGMRERLVARRTQLSNAIRGYAAEFGLIAAKGLDKIEPLLADIAADGALPVLARELFAMHGREYAQLQAELKNIEARLMAWHRANADSQRLAQIPGIGPIGATALVMKAPDPRLFPSGRHFAAWIGLTPKDHSTAGKTRLGKITRAGDEMLRSVLVAGATAVIQQVRRGRGRASPWLLALLKHKRPKLAAVALANKIARIAWKLMTTGESYDGARMSGASAFAA

SEQ ID NO: 16136 - protein, 328 aa, unidentified
  source 1..328: note = protein_76c4504
  REGION 4..155: note = RuvC_domain
  SITE 7: note = RuvC_P1
  SITE 60: note = RuvC_P2
  SITE 100: note = RuvC_P3
  SITE 102: note = RuvC_P4
  SITE 105: note = RuvC_P5
  REGION 200..286: note = Tnp_domain
  SITE 208: note = Tnp_P1
  SITE 237: note = Tnp_P2
  SITE 245: note = Tnp_P3
  SITE 246: note = Tnp_P4
  SITE 259: note = Tnp_P5
MFYLGMDVAKAKLDCTLLLNNASSKGKTKVVHNSKAGVADLLAWVAKHKVSPEELHVVMDATGVYHEQAALALVDAGVVVSIINPAQVKDFGRGLAVRTKTDGVDSLVLARYGALMQPAAWMPPTPEAHMLQALLARRDAIAQDLHRERNRQEKAEATDTPALIRKSLEDSIVFLAKQLEQIQKDVDDHISNHPSLKSDMKLLQSIPGVGPQVGGNMLSVLSNHHFGSAEQVAAYLGLVPVEKLSGSSVRGRAKLSKAGPARIRAVLYMAAVAAKRCNPHVKAVYERMLARGKCKMSALGAAMRKLVHLCFGVLKTQQPYQRDYAKNA

SEQ ID NO: 16137 - protein, 397 aa, unidentified
  source 1..397: note = protein_30f41ff
  REGION 9..163: note = RuvC_domain
  SITE 12: note = RuvC_P1
  SITE 60: note = RuvC_P2
  SITE 100: note = RuvC_P3
  SITE 102: note = RuvC_P4
  SITE 105: note = RuvC_P5
  REGION 270..355: note = Tnp_domain
  SITE 278: note = Tnp_P1
  SITE 308: note = Tnp_P2
  SITE 316: note = Tnp_P3
  SITE 317: note = Tnp_P4
  SITE 329: note = Tnp_P5
MTSDYAVFLGLDVGKGEHHAVGLDPAGKRLHDAPLPNTEPKLRAMFDKLAVHGQILVVVDQPATIGALPVAVARACGHDVAYLPGLAMRRIADLYPGNAKTDARDAYVIADAARTLPHTLRQLNVDDEALAELDVLVGFDDDLAAEATRVSNRIRGLLTGIHPALERVLGPKISHLAVLEILSRCGGPIGIRKAGRRKLAAIVTTHAPRMGAKLAEDILAALDEQTVTVAGTAAADKILPRLADSLKTVLQQRKTVAAEAEEILDAHPLAQVLTSMPGIGVRTAARILLEIGDASGFKSSGHLAAYAGIAPVTHRSGTSIKGEHPARTGNRRLKRAFFLAAFAALSDPTSRAYYQRKRDEGKKHNAALICLARRRCDVLYAMLRNHTHYQHPTTSAA

SEQ ID NO: 16138 - protein, 343 aa, unidentified
  source 1..343: note = protein_cc942b6
  REGION 6..147: note = RuvC_domain
  SITE 9: note = RuvC_P1
  SITE 52: note = RuvC_P2
  SITE 87: note = RuvC_P3
  SITE 89: note = RuvC_P4
  SITE 92: note = RuvC_P5
  REGION 211..298: note = Tnp_domain
  SITE 219: note = Tnp_P1
  SITE 249: note = Tnp_P2
  SITE 257: note = Tnp_P3
  SITE 258: note = Tnp_P4
  SITE 270: note = Tnp_P5
MEPTIIAIDLAKSVFQVHFVEPDTGAIHSKVLKRAQLKPFFVNRARCRVVMEACGSAHHWARQLAALGHDVQLITAQFVRPFVKSNKNDAADAAAIWEAAQRPGMRFVAVKTEDQQAMLALHRMRQQLVRIRVMQVNQLRGLLYEFGVVLPQGRRTAIEAAKASLASLAEQLPAMLTDSLQDQISRLLVLDEQIQRIEQRITEWRRGDEACRRISEIPGVGLLTATAAVAVIGNALTFRSGREFAAYLGLVPRQNGSGGKVKLGGISKRGDVYLRTLLIHGARSVISSSRHLPERMRAMLARRPTNVVAVALANKVARMIWALLAYGRTYQPPTSTPAEQHCN

SEQ ID NO: 16139 - protein, 406 aa, unidentified
  source 1..406: note = protein_ece3ac3
  REGION 11..165: note = RuvC_domain
  SITE 14: note = RuvC_P1
  SITE 62: note = RuvC_P2
  SITE 102: note = RuvC_P3
  SITE 104: note = RuvC_P4
  SITE 107: note = RuvC_P5
  REGION 272..357: note = Tnp_domain
  SITE 280: note = Tnp_P1
  SITE 310: note = Tnp_P2
  SITE 318: note = Tnp_P3
  SITE 319: note = Tnp_P4
  SITE 331: note = Tnp_P5
MASSPQYGVFLGFDVGKGEHHAIGLSPDGTRLHDAALPNSEPQLREVFDRLAGHGRILVVVDQPATIGALPVTVARTCGQDVAYLPGLAMRRIADLYPGTAKTDARDALVIADAARTLPHTLRAVDVGDETLAELEVLVGYDDDLASEATRISNRIRGLLTGIHPALERALGPKITHRAVLEILSQCGGPAGIRATDTDTVAAIAAEYAPRMHSKLITAIQAALDEQSVTVPGTAAAETVLPQLAEGLKTVMSQRKTLAKQVEDMLDAHPLAGVLTSMPGIGVRTAARILLEIGDASQFASAAHLAAYAGIAPVTHKSGSSIKGEHPARAGNRKLKRAFFLAAFASLSDPESRAYYDKKRAEGKKHNAALICLARRRCDVLFAMLRNGTYYQPHRPKQEQQIPAAA

SEQ ID NO: 16140 - protein, 400 aa, unidentified
  source 1..400: note = protein_4fe7ea5
  REGION 10..164: note = RuvC_domain
  SITE 13: note = RuvC_P1
  SITE 62: note = RuvC_P2
  SITE 102: note = RuvC_P3
  SITE 104: note = RuvC_P4
  SITE 107: note = RuvC_P5
  REGION 270..356: note = Tnp_domain
  SITE 278: note = Tnp_P1
  SITE 308: note = Tnp_P2
  SITE 316: note = Tnp_P3
  SITE 317: note = Tnp_P4
  SITE 329: note = Tnp_P5
MSKGRARVWAGVDAGKGHHWVAVVDETGATAWSRKVDNDELAILGALGEILELADVVHWAVDISGTASALLLALLAAHGQHAVYVPGRTVNRMSAAYRGEAKTDSRDAYVIAETARHRRDFAPIDVPAQLAADLALLTGHRTDLVADRIRMINRLRDVLTGVFPALERAFDYSAHKGALVLLTGYQIPAAIRRRGRARLTAWLAHRGVRGADVVAAAALEAAQAQRTALPGEDVAGQIVAELAAQILALDDRLKRIDRQIRDTFRCHPQAEIIESLPGMGPILGAEFVVAAGDLSAYADAGRLASAAGLVPVPRDSGRRSGNMHRPKRYSRRLRRVFYMSAQVSITREGPNRDFYLKKRGEGCKHVQAVIALARRRASVLWALLRDNRVFTPAPPIAQAA

SEQ ID NO: 16141 - protein, 319 aa, unidentified
  source 1..319: note = protein_e0a7886
  REGION 6..150: note = RuvC_domain
  SITE 9: note = RuvC_P1
  SITE 53: note = RuvC_P2
  SITE 93: note = RuvC_P3
  SITE 95: note = RuvC_P4
  SITE 98: note = RuvC_P5
  REGION 193..277: note = Tnp_domain
  SITE 201: note = Tnp_P1
  SITE 230: note = Tnp_P2
  SITE 238: note = Tnp_P3
  SITE 239: note = Tnp_P4
  SITE 250: note = Tnp_P5
MPGTFIGVDVSQGHLDVHVRPAALRRRFANTAAGIAELVAWARPHAAERIVFESTGPYQKAAVGALLAEGLPAAVVNARQVRDFARAMNYLAKTDAIDAGVIAHFAEVATTTVRPLEPQEIRDLRELYDRRGQLVHMLAMEKNQRHSASVARASARVLKSIDKHIAYLEAQVHELKRRMDRLVEGCAAFRARDEILQTITGIGPQVSRTLLAYLPELGTTSRQRIAALVGLAPFNDDSGSHAGQRHIRGGRSKVRRGLYQAAVAAIRHCPCMKGVYAALKARGKASRVALIAVARKLLVLANAMIRDMVPYKAPANSVC

SEQ ID NO: 16142 - protein, 316 aa, unidentified
  source 1..316: note = protein_f9aaa70
  REGION 8..155: note = RuvC_domain
  SITE 11: note = RuvC_P1
  SITE 58: note = RuvC_P2
  SITE 98: note = RuvC_P3
  SITE 100: note = RuvC_P4
  SITE 103: note = RuvC_P5
  REGION 193..277: note = Tnp_domain
  SITE 201: note = Tnp_P1
  SITE 230: note = Tnp_P2
  SITE 238: note = Tnp_P3
  SITE 239: note = Tnp_P4
  SITE 250: note = Tnp_P5
MALLLIFVGIDVSKDALDVHLLPGNASWRADNTEQGWKQLMAWLQRHGEPAQITIALEASGGFEKGCARKFAEAGYTVSILDPVRVRRFAEAAGQFAKTDAIDARVIARFAQTFTTTPAVFDQATERLAETVRWRRQLIEQKTALDNQLRGLTSTSLRRATRGLLTRLETLIERISDEIAKQIQANPAWTAVTKPIHSIKGVGPVTVATLLAELPELGRLDRRKIAALVGVCPYTRQSGKSDAKRMIRGGRLGLRNALYMAALTAMRYDPTLKAFSERLRAAGKPGKVAVVAVIHKMLTILNARVRDALAAIPTNT

SEQ ID NO: 16143 - protein, 342 aa, unidentified
  source 1..342: note = protein_7beaae3
  REGION 6..148: note = RuvC_domain
  SITE 9: note = RuvC_P1
  SITE 52: note = RuvC_P2
  SITE 87: note = RuvC_P3
  SITE 89: note = RuvC_P4
  SITE 92: note = RuvC_P5
  REGION 211..296: note = Tnp_domain
  SITE 219: note = Tnp_P1
  SITE 249: note = Tnp_P2
  SITE 257: note = Tnp_P3
  SITE 258: note = Tnp_P4
  SITE 270: note = Tnp_P5
MKITTIGIDLAKSVFQVHGVDERGKAVVKKALKRAQMVPFFVNLPPCLIGMEACGSAHYWARKLQALGHTVRLMAPQFVKPYVKTNKNDAADAEAICEAVTRPTMRFVPIKNDEQQAVLALHRARQGFVKARTAQANQIRGLLAEYGIVIPQGISHIATHLPDILEDAENGLPGVFRQLIDRLGAHLKELDRQVQELEVQIQVWHRANDASRKLAQIPGIGPITASALVASIGDAKSFDNGRQLAAWLGLVPRQHSSGGKQTLLGISKRGDTYLRTLLIHGARAVIRVAERKVNHAGSWLSGVMGRRNKNVAAVALANKNARIVWALLAHDREYTNDYAPVA

SEQ ID NO: 16144 - protein, 332 aa, unidentified
  source 1..332: note = protein_724806a
  REGION 8..155: note = RuvC_domain
  SITE 11: note = RuvC_P1
  SITE 60: note = RuvC_P2
  SITE 100: note = RuvC_P3
  SITE 102: note = RuvC_P4
  SITE 105: note = RuvC_P5
  REGION 195..282: note = Tnp_domain
  SITE 203: note = Tnp_P1
  SITE 233: note = Tnp_P2
  SITE 241: note = Tnp_P3
  SITE 242: note = Tnp_P4
  SITE 255: note = Tnp_P5
MEHELHYIGIDTAKEKLDVDVLRPDGRHRTKKFANTTKGHDELVSWLKGHKIDHAHICIEATGTYMEPVAECLYDAGYIVSVINPALGKAFAQSEGLRNKTDTVDARMLAEFCRQKRPAAWEAPHPLERALRALVVRHQALTDMHTQELNRTETAREVQRPSIDAHLLWLEAELKRLEKQIKDLTDDDPDMKHRRKLLESIPGIGEKTSAVLLAYIGLKDRFAHARQFAAFAGLTPRRYESGSSVRGASRMSKAGHVSLRRALYMPAMVATSKTEWGRAFRDRLAANGKKGKVILGAMMRKLAQVAYGVLKSGVPFDASRHNPVAAYKSRKG

SEQ ID NO: 16145 - protein, 322 aa, unidentified
  source 1..322: note = protein_01e4de2
  REGION 8..150: note = RuvC_domain
  SITE 11: note = RuvC_P1
  SITE 55: note = RuvC_P2
  SITE 95: note = RuvC_P3
  SITE 97: note = RuvC_P4
  SITE 100: note = RuvC_P5
  REGION 190..274: note = Tnp_domain
  SITE 198: note = Tnp_P1
  SITE 227: note = Tnp_P2
  SITE 235: note = Tnp_P3
  SITE 236: note = Tnp_P4
  SITE 247: note = Tnp_P5
MENSSQWVGIDVSKATLDVYIRPIGKALKVGNTELEIINLIEQLRSYNINLIVLEATGGLETELIIQLQAALLPVALINPRQGRDFAKATGRLAKTDAIDAQTLAHFGEAMKPTVLAIESESARQLGELISRRRQLVEMQTAEKNRRSRARGRALVDIEEHIEYLDKRLEQINSEIEQLTQNNQQWIDKVNLLKTTPGIGPVISTTLVSDLPELGKLTAKQISRLVGVAPINHDSGQHKGKRMINGGRAHVRATLYMGAVVAIRHNPLIKAFYQRLVERGKSKKLALTACVHKMLVILNAMVRDNLPWRKTDNSQLIVTTMS

SEQ ID NO: 16146 - protein, 412 aa, unidentified
  source 1..412: note = protein_776e302
  REGION 9..162: note = RuvC_domain
  SITE 12: note = RuvC_P1
  SITE 63: note = RuvC_P2
  SITE 101: note = RuvC_P3
  SITE 103: note = RuvC_P4
  SITE 106: note = RuvC_P5
  REGION 257..343: note = Tnp_domain
  SITE 265: note = Tnp_P1
  SITE 296: note = Tnp_P2
  SITE 304: note = Tnp_P3
  SITE 305: note = Tnp_P4
  SITE 316: note = Tnp_P5
MQDILTCAMGLDVHRDIIVACLVKGAVDAEPEAETRTFSTLIPEMQKLRDWVIESECRNIAMESTGIYWQPIYEMLESCFDGEISILVVNARHMKNVPGRKTDMKDAQWIATLLRAGLLKGSFIPDKAFRELRHLTRYRKSVVHDITAQKNRIDKFLQSSGFRFTAFLSDTFGASGRNIIRHLIEHGSIDREALDKCLKTKTRNRIDEILVALNGSLSEHQRRFLNMVFRHLEDLEAHKHTVEDEITEEVLKHTDALNLLCSIPGIDVTAAAAIIAEIGTDMSSFPDSQHICSWAGLSPGNNESAGKRKSVHINKGNPYLKSMLCEVAWIMASHRKLYLSGWYWKVKQRKGAKRATIALARKILSIIYTMLKTGTPYNEECFEQRRLRCERKRANRLVNELQKLGYVVVAPD

SEQ ID NO: 16147 - protein, 309 aa, unidentified
  source 1..309: note = protein_b61587d
  REGION 1..72: note = RuvC_domain
  SITE 10: note = RuvC_P3
  SITE 12: note = RuvC_P4
  SITE 15: note = RuvC_P5
  REGION 178..264: note = Tnp_domain
  SITE 186: note = Tnp_P1
  SITE 216: note = Tnp_P2
  SITE 224: note = Tnp_P3
  SITE 225: note = Tnp_P4
  SITE 237: note = Tnp_P5
MSAAYTGEGKTDAKDAYVIAETARLRRDLAVIDAETDLVRNLAVLTGHRADLIADRVRMINRLRDLLTSVFPSLERAFDYSAHKGALVLLTRYASPDRIRRLGRARLAQWLRHQKVRGADEVAARALAAAEAQSIVPPGQELTASIVSELAAAILALDARVKALDEKIDHEFRQHPQAEIIVSMPGFGPFLGAALLVGAGDLRAFPTAGHLAAAAGLVPVPNDSGRRTGNLHRPLRYSRPLRHVFYLSAQTSMMRAGPNRDYYLKKRARGATHTQAVIALARRRIDVLWALLRENRTWTATPPPTAQAA

SEQ ID NO: 16148 - protein, 415 aa, unidentified
  source 1..415: note = protein_9735b72
  REGION 6..165: note = RuvC_domain
  SITE 9: note = RuvC_P1
  SITE 62: note = RuvC_P2
  SITE 102: note = RuvC_P3
  SITE 104: note = RuvC_P4
  SITE 107: note = RuvC_P5
  REGION 279..366: note = Tnp_domain
  SITE 287: note = Tnp_P1
  SITE 317: note = Tnp_P2
  SITE 325: note = Tnp_P3
  SITE 326: note = Tnp_P4
  SITE 339: note = Tnp_P5
MNAISVGIDVSKGHSTVAAIRFPGEVVWKPRDVVHTAAALERLAYDIKLLGYNGPEVRVVMEATGRYHEPVAQELHEVGNFVSVVNPKLTKDFGNNTLRKNKNDKADARKMARYGLQNWNELREYTPVEAARAKLKQFSRQYNLYSKIKVQLKNNLIAMLDQVFPGANELHDSPAKPDGHEKWVDFVTTFWHCECIAGMSEAAFIERYRKWCKRFGYHFREAKAADLWVCSLGHVTTLPKNTNTKMLVTEAARQLTSISRTVEIYRAEMLRLAQMMPEYDVVMGIYGVGPTIGPQLMGEIGDVRDFTSRKSLVAFAGVDPGDNSSGKHVSQSDKTSKSGSPLLRKVLFQAVNTYVKKKPVGEPVYQFYAKKRAEGKKYYVCTTACANKFLRIYYARVKEHLDKTLPEEDRFPCQG

SEQ ID NO: 16149 - protein, 342 aa, unidentified
  source 1..342: note = protein_a280c91
  REGION 7..148: note = RuvC_domain
  SITE 10: note = RuvC_P1
  SITE 53: note = RuvC_P2
  SITE 88: note = RuvC_P3
  SITE 90: note = RuvC_P4
  SITE 93: note = RuvC_P5
  REGION 211..296: note = Tnp_domain
  SITE 219: note = Tnp_P1
  SITE 249: note = Tnp_P2
  SITE 257: note = Tnp_P3
  SITE 258: note = Tnp_P4
  SITE 270: note = Tnp_P5
MNNVTIIGIDLAKRVFHAHGAHADGGVAFRKRMGRSQVLPFLARQPTCVIAMEACASAHEWGRAIRELGHEVRLIPPSYVKPYVKRQKNDTADAEAIAEAGSRPTMRFVAVKTEEQQARSMVFRTRDLLVRQRTQLINALRGHLAEHGVIAPQGPAHLKTLAAAIDAAESTMPQLVIDVGRVYLEQVDRLSCEVAELEKILRREAQCGEDTRRLQTMPGVGPITAMAVEAFAPPMSTFKRGRDFAAWLGLVPIQHSTGGKQRLGRTSKMGQRDIRRLLIIGAMSVIQWASRRGARPGSWLARMLDRKPLMLVAMALANKMARSVWAMLTKKEDYRDLGSAAA

SEQ ID NO: 16150 - protein, 370 aa, unidentified
  source 1..370: note = protein_ca5c218
  REGION 5..163: note = RuvC_domain
  SITE 8: note = RuvC_P1
  SITE 62: note = RuvC_P2
  SITE 102: note = RuvC_P3
  SITE 104: note = RuvC_P4
  SITE 107: note = RuvC_P5
  REGION 273..367: note = Tnp_domain
  SITE 281: note = Tnp_P1
  SITE 311: note = Tnp_P2
  SITE 319: note = Tnp_P3
  SITE 320: note = Tnp_P4
  SITE 333: note = Tnp_P5
MNPVVGLDIAKGESQVQMFLDKKIPYKNSVKIEHTVEGLKELHSYLLDLERQTGLKPPVVLESTGHYHTPVVQFLEAREYVVIIVNPLVSYRAKSSSLRKTKTDAIDAYHLGELYYKKDLEPQKKHGIQLLNLRHLTRQHENMTGIMVQTKLQFQAVLDQVFPEYKGIFGDLYAEISLRTLQSFPTSKSVLEAGVEEIAQFIDTHCKARSFNWALERSEKLIGAAERNPFQSTLYQSLLVSLNMYNDLLQVYHQQLSTLERKIDELAAQLEEYELLQSIPGIGEKIAATIISEIGEIDRFNHPKKLVAFAGLDPSIFESGRFKSTKNHITKRGSARLRHMLYTAVRCSIRDSRKKTIARNKRLRTCYDLK

SEQ ID NO: 16151 - protein, 421 aa, unidentified
  source 1..421: note = protein_0f778f4
  REGION 22..174: note = RuvC_domain
  SITE 25: note = RuvC_P1
  SITE 73: note = RuvC_P2
  SITE 111: note = RuvC_P3
  SITE 113: note = RuvC_P4
  SITE 116: note = RuvC_P5
  REGION 281..367: note = Tnp_domain
  SITE 289: note = Tnp_P1
  SITE 320: note = Tnp_P2
  SITE 328: note = Tnp_P3
  SITE 329: note = Tnp_P4
  SITE 340: note = Tnp_P5
MSVTDEPREVDPPRPTPARPTAGIDWADRDHAISVLDPDGTQIARYTLTHTSAGLRELTRRLLDHGVVEVGIERPDGPVVEHLRTAGLVVYVIPPGQLKNLRSRYQSAGNKDDRFDAYVLADTVRTDRRRLRPLITDTPATTALRHTVRARRDLVAHRVAVANQLRAHLQLCLPGVVGLFAHIDSQISLQFLHRFPTQDHADRLTPRRLGTWLASVGYSGRTDPAVLHSRLTSAPRGHTGPDATVSAAVTTAYIAVLATLNTQIAELATQISTQLEHHPDAAIFTSLPRSGRVRAARLLAEIGDARGRFPTADSLACLAGVAPSTRQSGKVKAVAFRWGADRELRDAICDFAADSRHANPWAADLYQRARARNHDHPHAVRVLARAWVGVIWACWTTHNPYQPDRHRALQRVLNQDQPTAA

SEQ ID NO: 16152 - protein, 350 aa, unidentified
  source 1..350: note = protein_cbc674c
  REGION 18..160: note = RuvC_domain
  SITE 21: note = RuvC_P1
  SITE 64: note = RuvC_P2
  SITE 99: note = RuvC_P3
  SITE 101: note = RuvC_P4
  SITE 104: note = RuvC_P5
  REGION 223..314: note = Tnp_domain
  SITE 231: note = Tnp_P1
  SITE 261: note = Tnp_P2
  SITE 269: note = Tnp_P3
  SITE 270: note = Tnp_P4
  SITE 282: note = Tnp_P5
MGKINKSGANQKGQVAFLGIDLSKKSFQLHGVDAKGNVVFKKKLNRKALLPFIANLPKCVIGIEACGGSHYWCRKFTEMGHEVRIIAPQFVKPYVKSNKNDAADAEAICEAMQRPSMRFVPTKTMEQQDIQSLHRIRSQAVARRTALGNQIRGLLMEYGVIIPKGISYIRKQIPLVLEDAENGLTVLFRELLNELYEEMKHLYKRVEKLEQKLETIAANNEACQLLLTIPGIGLLSATAMYAAIGDITAFKTGRELAAWMGLVPKQASTGGVPTLLGISKRGDTYLRTLLIHGGRTVVRVADKHDDKRNNWIKELDKRRGKNISAVAVANKNARIAWAVLTKKEPYKAAA

SEQ ID NO: 16153 - protein, 338 aa, unidentified
  source 1..338: note = protein_85585a4
  REGION 7..149: note = RuvC_domain
  SITE 10: note = RuvC_P1
  SITE 53: note = RuvC_P2
  SITE 88: note = RuvC_P3
  SITE 90: note = RuvC_P4
  SITE 93: note = RuvC_P5
  REGION 209..296: note = Tnp_domain
  SITE 217: note = Tnp_P1
  SITE 247: note = Tnp_P2
  SITE 255: note = Tnp_P3
  SITE 256: note = Tnp_P4
  SITE 268: note = Tnp_P5
MATVTLLGIDIGKNTFHLHGQDARGHQVLRKKLNRSQLLPYLAQISTCKIAMESCGGSQWLARKIKEQGHHVQLIAPQHVKAYVTGNKNDFIDAEAICEAASRPRTRSVQVKTVEQQVLCTEHRLRKSLVSRRTAVINQVHGFLLEFGVIFPAGYAALDRVSGLMQSRELPIRLINAIERMLEDIRQLTGEIKRLDVEIKQSLVQSDAGQRLQSIPGIGPLIASALVADVGDASVFKSSRDFAASLGLVPRQYSTGGETVLLGISKRGDKYLRSLLVQGAHTVLYRVDHRTDALGRWAKNLLVRKPLNKVACALANKMARIIWVLLTKGGTYNSQLLA

SEQ ID NO: 16154 - protein, 341 aa, unidentified
  source 1..341: note = protein_aecd6c8
  REGION 7..149: note = RuvC_domain
  SITE 10: note = RuvC_P1
  SITE 53: note = RuvC_P2
  SITE 88: note = RuvC_P3
  SITE 90: note = RuvC_P4
  SITE 93: note = RuvC_P5
  REGION 209..294: note = Tnp_domain
  SITE 217: note = Tnp_P1
  SITE 247: note = Tnp_P2
  SITE 255: note = Tnp_P3
  SITE 256: note = Tnp_P4
  SITE 268: note = Tnp_P5
MSTVTLIGIDLGKHSFHLHGQDATGRMVFRKKCSRQQLFALLSNTPRSTVVMEACAGAHWMARRIQAQGHQAKLISPQFVRPFVQGNKNDFADAQAICEAASRPSMRFVSARNEAQQTVSALHRVRESLVRERTGVINQVHAFLLEFGISLPRGQAIIRRLPAVLAEHELPPRLVALLERQQEHFKYLDEQIGQIERELCQQLREDERSQRLLEIPGIGPITASVLMTELGDAQQFGSARQFAASVGLVPRQYSTGGKPTLLGISKRGDKNLRRLLVQGARAIMQRIDRRADRLGIWVRELLARRHSNVVACALANKLARIAWAILANGTNYRSEQAGSAA

SEQ ID NO: 16155 - protein, 343 aa, unidentified
  source 1..343: note = protein_96983e9
  REGION 6..149: note = RuvC_domain
  SITE 9: note = RuvC_P1
  SITE 54: note = RuvC_P2
  SITE 89: note = RuvC_P3
  SITE 91: note = RuvC_P4
  SITE 94: note = RuvC_P5
  REGION 213..299: note = Tnp_domain
  SITE 221: note = Tnp_P1
  SITE 251: note = Tnp_P2
  SITE 259: note = Tnp_P3
  SITE 260: note = Tnp_P4
  SITE 272: note = Tnp_P5
MKLSRVGVDLAKNVFQLHGVDRHGRAIWRRRLTRKQWLSALSAQADPDCEIGMEACASAHHWARTLQSLGYTVRLIPPQFVKPYVKSNKNDANDAEAICEAMSRPNMRFVTVKSVAQQDIQATHRIRAELMVQRKAKANQIRGLVAEYGLVAPLTLPALRAAIPHWLEDAENGLTDYFRSLLNGLWSDLVLLDDRVLEMDREIQRLANRNEVTRRLQQLRGVGPMVATALVATVGTAEQYPKGRHMAAALGLTPRQNSSGGKERLLGISKRGDAYMRTLLIHGARAVVSQAKHREDRLSRWVTDIATRRHPNVAAVALANKTARMAWAMLRHGTDYDPDFVMS

SEQ ID NO: 16156 - protein, 325 aa, unidentified
  source 1..325: note = protein_5e2d583
  REGION 22..169: note = RuvC_domain
  SITE 25: note = RuvC_P1
  SITE 69: note = RuvC_P2
  SITE 109: note = RuvC_P3
  SITE 111: note = RuvC_P4
  SITE 114: note = RuvC_P5
  REGION 202..286: note = Tnp_domain
  SITE 210: note = Tnp_P1
  SITE 239: note = Tnp_P2
  SITE 247: note = Tnp_P3
  SITE 248: note = Tnp_P4
  SITE 259: note = Tnp_P5
MGSDEVALSCPSVYLTLMPLWIGIDVAKDTLAVHVLPLDQLLSFPNTAQGHQRLCDHLAGQCVGNALLEATGGYERAVMTALATAGIPVTRINPRRARAFATALGTTAKTDPLDAALLARMAQLVQAPAPIPDPLREQLRMLVQRREQLVQQRDDERRRLHQATLAMVRACLIEQIGDLRRRIQRMNQAIKQVRCQLDDALAHALGTVPGIGEVTTASLMAYLPELGTLDRRQIAALVGLAPYNVDSGQHCGKRRIRGGRATIRRVLYMACWSVVRTQASFKERYQQLRARGKPAKVAITACMRVLLIRLNAMARDRTPWREVIG

SEQ ID NO: 16157 - protein, 338 aa, unidentified
  source 1..338: note = protein_c19ec37
  REGION 6..148: note = RuvC_domain
  SITE 9: note = RuvC_P1
  SITE 52: note = RuvC_P2
  SITE 87: note = RuvC_P3
  SITE 89: note = RuvC_P4
  SITE 92: note = RuvC_P5
  REGION 211..297: note = Tnp_domain
  SITE 219: note = Tnp_P1
  SITE 249: note = Tnp_P2
  SITE 257: note = Tnp_P3
  SITE 258: note = Tnp_P4
  SITE 270: note = Tnp_P5
MNITTIGLDIAKSVFHLFNITKTGRFIGKKQLKRNQVLAYMAKLEPSIVVMEACGGANYWSRKFMAMGHQVKLIAPQYVKPFVKGNKNDYNDAEAIAEASQRPSMRFVPIKSVEQQDIQNLHRQRGLIKKSRTALVNQVRGLLAEYGVVIKKGVSAFHNDLPSILEDANNELTVLSRELFNELYEDLIIIEDRFKKCEKRIKAINKENGTCQRLIGVLGIGPIIASATFAEGGNGKNFVNGRHFSAWLGLVPGQHSTGGKPVLLGISKRGNSYLRTLYIHGARAVLQASSTKSDRFSLWAQALLARRGHNRACVAIANKLARIAWVIMAKGDTYRQAV

SEQ ID NO: 16158 - protein, 293 aa, unidentified
  source 1..293: note = protein_ac27aa2
  REGION 6..97: note = RuvC_domain
  SITE 37: note = RuvC_P3
  SITE 39: note = RuvC_P4
  SITE 42: note = RuvC_P5
  REGION 161..245: note = Tnp_domain
  SITE 169: note = Tnp_P1
  SITE 199: note = Tnp_P2
  SITE 207: note = Tnp_P3
  SITE 208: note = Tnp_P4
  SITE 220: note = Tnp_P5
MEACCGAHHLGRLFAAHGHEIRLMSPEYVRPYVKAQKNDDRDAEGIAEAASRPTMRFVGLKTQEQLDIQTLHRVRSRLVAERRSLINQLRAILLERGTIFPVGRRKLELGIDGMLADENTTLSPRLRQLVSELPAEWRELDARIKALNGEFVELARNDAAARRLTSIPGIGVLNAAALIAAVGDASSFTNARDLGAGLGLVPRQHTTGGKPRLFGISKRGNTYLRTLLIHGARAALPSLSQSDPPLGRWLKAMIERGVHRNAVVVALANKLARIAWAALRKDATFERGYPVAA

SEQ ID NO: 16159 - protein, 343 aa, unidentified
  source 1..343: note = protein_6819fbf
  REGION 10..170: note = RuvC_domain
  SITE 13: note = RuvC_P1
  SITE 69: note = RuvC_P2
  SITE 109: note = RuvC_P3
  SITE 111: note = RuvC_P4
  SITE 114: note = RuvC_P5
  REGION 210..296: note = Tnp_domain
  SITE 218: note = Tnp_P1
  SITE 248: note = Tnp_P2
  SITE 256: note = Tnp_P3
  SITE 257: note = Tnp_P4
  SITE 270: note = Tnp_P5
MTNRLLKQVVGIDVAQKELVVSLGKMDDMAAMTVYANKTFANTKGGFMALISWISKHTDQAYPLRFVMEATGVYHESLAYYLFDKSYSVSIVMPNKISNFFRTLEIKTVTDKSMSAAIAMFGMEKQLDNWVPPKRVYRSLRQLTRERSQLVTERTIIKNQLHAELSEAFPGDDTIRRMQDRIKMVDGQLKEVLTEIRGAINNDKGVKAALDMITTIPGIGLLTAAVILAETNGFELIRSKKQLTSYAGLDVREKESGTSVKGKPKISKRGNKHLRKAMHLPALSAIRHSERYKAVFVRVVSRNGIKMKGAVAVQRKLLEMAYTIYKTNKPYQKGYLQEMVENS

SEQ ID NO: 16160 - protein, 351 aa, unidentified
  source 1..351: note = protein_579d650
  REGION 6..147: note = RuvC_domain
  SITE 9: note = RuvC_P1
  SITE 52: note = RuvC_P2
  SITE 87: note = RuvC_P3
  SITE 89: note = RuvC_P4
  SITE 92: note = RuvC_P5
  REGION 211..295: note = Tnp_domain
  SITE 219: note = Tnp_P1
  SITE 249: note = Tnp_P2
  SITE 257: note = Tnp_P3
  SITE 258: note = Tnp_P4
  SITE 270: note = Tnp_P5
MALHSIGIDLGKTVFHLVGLNHAGEVEVRKKFSRTQLLRFTANVQVDLIGMEACAGSHFLGKALVEQGHTVRLMPAQYVKPFVKTNKNDFIDAEAIAEAVGRPTMRFVPIKTDEQLDMQSLHRVRERWIMRRTAVVNQIRGLLLERGITVRTGRCHLEAALAGILEDGSSSLSGALRFLLVELKRELEQLAGHVEQAETLIQGAAQQSEACRRLDSIPGIGPLTATALIAAIGNGGAFRKGREFAAWVGLVPRQYSTGGKQKLLGISKRGNCYLRKLFVQGARAVLKYRERQCTGLRHWLAELSSRSHYNVVGVALANKLARMAWAVLARGEAYRPPVLADSFAGLQMPAV

SEQ ID NO: 16161 - protein, 343 aa, unidentified
  source 1..343: note = protein_24bb925
  REGION 5..151: note = RuvC_domain
  SITE 8: note = RuvC_P1
  SITE 53: note = RuvC_P2
  SITE 91: note = RuvC_P3
  SITE 93: note = RuvC_P4
  SITE 96: note = RuvC_P5
  REGION 211..298: note = Tnp_domain
  SITE 219: note = Tnp_P1
  SITE 249: note = Tnp_P2
  SITE 257: note = Tnp_P3
  SITE 258: note = Tnp_P4
  SITE 270: note = Tnp_P5
MYQYIGLDVSLKDTAISIRQDGKRIWRGKSPSDPKLLAQLIRKHAPNARRVVFETGPLSTWFYHALTAEGMPAICIEARHAQKVLDETLNKTDANDTDGLAQLAETGFYKAVRVKAFDSMLTRTLVAARNQLLSISTQLSNQIRGLMKTFGLIISNGRGRVFDGNVRELLDGNEGLAKIILPLLDAWRDIRKRAAELDRRLLAVARESQTTQLLMTIPGIGAVTAVSYVAAIEDPENFKTSRSVGARLGLTRRRYQSGEVDYDGHISRRGDNHLRGLLYEAATVVLTRTNSKSESRLKSWGLKLRERLGFKRAAVAVARKLAVIMHSMLKTGEVFNPLAGATA

SEQ ID NO: 16162 - protein, 340 aa, unidentified
  source 1..340: note = protein_d99ea48
  REGION 6..146: note = RuvC_domain
  SITE 9: note = RuvC_P1
  SITE 52: note = RuvC_P2
  SITE 87: note = RuvC_P3
  SITE 89: note = RuvC_P4
  SITE 92: note = RuvC_P5
  REGION 211..297: note = Tnp_domain
  SITE 219: note = Tnp_P1
  SITE 249: note = Tnp_P2
  SITE 257: note = Tnp_P3
  SITE 258: note = Tnp_P4
  SITE 270: note = Tnp_P5
MQIHSIGIDLGKTTFHLVALGAAGKMLVKKKFTQKQLLTHTANLQTSLIGLEACAGAHFLGRALRKQGHDVRLIPAQFVKPFVKSNKNDFVDAEAIAEAVERKNMRFVPIKTDDQLDLQAIHRVRDRLVSRRTAVINQIRAFLLERGLVFAKRPAQLRAAMADVLENAEADLTPMMRNLINTLWDEWKTVEAQIEELGDELERISAADAGCTRIRQIPGIGPVVATAIVAAIGNGAAFRKGRDFAAWLGIVPRQYSTGGKARLFSISKRGNVYLRKMLIHGARAAVLRVKRDSAPFGAWLDRLDARSPKNVVVVAMANKLARIAWAVLSSGNDYRSAVPA

SEQ ID NO: 16163 - protein, 336 aa, unidentified
  source 1..336: note = protein_a819fa5
  REGION 6..147: note = RuvC_domain
  SITE 9: note = RuvC_P1
  SITE 52: note = RuvC_P2
  SITE 87: note = RuvC_P3
  SITE 89: note = RuvC_P4
  SITE 92: note = RuvC_P5
  REGION 209..297: note = Tnp_domain
  SITE 217: note = Tnp_P1
  SITE 247: note = Tnp_P2
  SITE 255: note = Tnp_P3
  SITE 256: note = Tnp_P4
  SITE 268: note = Tnp_P5
MQITTVGLDLAKHVFQLHAVNAAGSVVERRSLRRGQVLAYFAKLSPCLVGMEACATAHYWARELRKLGHEVWLMPAQYVKAYVRRGKTDAADAAAICEAVSRPSMRFVSVKSEDQQAVITMHRARDLLVRQRTQLVNAARGHLAEFGLVQSRGLANIPALLDSMRQDPAIPALAREVVELLAAQLDAVEKRIADLEAKIKAWHQASPTSRRLATIPGIGPLVASAIAAAIADPMFFRNGREFSAWLGLVPRQKSTGGKQRLGRISRQGDQYIRRLLIIGAQTVLLRSRMMRSNPWIQGMLARCPRLKVAVALANKTARIAWAVMAKAEPYRGAAMA

SEQ ID NO: 16164 - protein, 342 aa, unidentified
  source 1..342: note = protein_44c8f89
  REGION 7..149: note = RuvC_domain
  SITE 10: note = RuvC_P1
  SITE 53: note = RuvC_P2
  SITE 88: note = RuvC_P3
  SITE 90: note = RuvC_P4
  SITE 93: note = RuvC_P5
  REGION 211..296: note = Tnp_domain
  SITE 219: note = Tnp_P1
  SITE 249: note = Tnp_P2
  SITE 257: note = Tnp_P3
  SITE 258: note = Tnp_P4
  SITE 270: note = Tnp_P5
MSEITTVGLDLAKNVFQLHGADARGGALLRKKLRRAQVLAFFATLPPCVVAMEACGGAHFWGRELVKLGHDVRLIPPAYVKPFVKRQKNDANDAEAICEAAQRPSMRFVPIKSEETQGAASVFRVRELLIRQRTQAINALRGHLGEYGHVVPQGVRNVGRLIALIESEASDLPATARASLDVLAGMLAELDRQIGVLDAEIDRRARESEVVRRLMTIPGIGPLIATSLATLAPPPEIFRRGRDFAAWLGLTPRQHSTGGKQRLGATTRMGERSLRRLLIIGANSVIIKRHCHAAAQPGTWLGNMLTRKPPMLVRVALANKMARIVWAILKTKEVYRAPAMAA

SEQ ID NO: 16165 - protein, 295 aa, unidentified
  source 1..295: note = protein_fa04563
  REGION 7..149: note = RuvC_domain
  SITE 10: note = RuvC_P1
  SITE 53: note = RuvC_P2
  SITE 88: note = RuvC_P3
  SITE 90: note = RuvC_P4
  SITE 93: note = RuvC_P5
  REGION 211..294: note = Tnp_domain
  SITE 219: note = Tnp_P1
  SITE 249: note = Tnp_P2
  SITE 257: note = Tnp_P3
  SITE 258: note = Tnp_P4
  SITE 270: note = Tnp_P5
MSTMTLLGIDIGKHNFHLHGQDAQGHQVLRKKTNRGQLLSTLAQLPACTVVMESCGGAHWLARQIGVQGHDVKLIAPQYVKPFVKGNKNDFIDAEAICEAASRPAMRFCSIKTAEQQTLSALHRVRESLIGHRTAAINQIHGFLLEFGISLPIGAAALHRVPTLLDDPQHPVPLSFKNLLMRLYRQIQQLDQEIKDIESDLKQQLKEDDAGSRLQSIPGIGPITASALLADIGDASNYRSGRDFSASLGLVPKQHSTGGKTVLLGITKRGDKHIRRLLVQGARAIMQHIDGRDDA

SEQ ID NO: 16166 - protein, 328 aa, unidentified
  source 1..328: note = protein_3ed8126
  REGION 4..155: note = RuvC_domain
  SITE 7: note = RuvC_P1
  SITE 60: note = RuvC_P2
  SITE 100: note = RuvC_P3
  SITE 102: note = RuvC_P4
  SITE 105: note = RuvC_P5
  REGION 200..286: note = Tnp_domain
  SITE 208: note = Tnp_P1
  SITE 237: note = Tnp_P2
  SITE 245: note = Tnp_P3
  SITE 246: note = Tnp_P4
  SITE 259: note = Tnp_P5
MFYLGIDVAKAKLDCSLLLDESGLKRKSKKVANNQTGLAELLTWLAKQAVTLADLHVTMEATGVYHEQAAQTLYDAGVTVSIANPAQVKSLGNTLAIRTKTDGIDSFLIARFGLMCKPAAWIPPTPEARVLKALLARQEAIAEDLQRELNRQEKIQIAAAPERVQKSLDDSITFLQTQLKQLQQEIDDHIDRHPTLKEDLDLLKSIRAIGPQVGKAMLSVMQTHSFKTAEQLAAYLGLVPVERQSGSSVFGRARLSKAGSPEIRAKLYMAAIVAIRYNAHVKALYERLRARGKSAMSALGACMRKLVHLCFGVLKTRVPYDENYGNIA

SEQ ID NO: 16167 - protein, 338 aa, unidentified
  source 1..338: note = protein_ab089dc
  REGION 6..147: note = RuvC_domain
  SITE 9: note = RuvC_P1
  SITE 52: note = RuvC_P2
  SITE 87: note = RuvC_P3
  SITE 89: note = RuvC_P4
  SITE 92: note = RuvC_P5
  REGION 210..304: note = Tnp_domain
  SITE 218: note = Tnp_P1
  SITE 248: note = Tnp_P2
  SITE 256: note = Tnp_P3
  SITE 257: note = Tnp_P4
  SITE 269: note = Tnp_P5
MNYTTVGADIAKNVMQLYWVDPVTGEIVTKAIKRATFLEHFANRCPCLIGMEACGGAQHWARRLQEMGHQVKLIPGKFAKAFNIRNKNDAADARAIWMATQMPGKSVAIKTEAQQAVLALHRIRQQKIKFRTMQMNCLRGLLTEYGEVMGKSRAALDKAIPGVLAKLAERLPAMLIESLREQWNDLQNLDRQIAEIERRLQAWLKEDEACRKIAAIPGVGLLTATAAVATMGDPKAFSNGREFAAWLGLVPKQVGTGGKTILLGISKRGDAYLRTLLVHGARSVLSHSREPGAWIDQLTRRRHRNVVIVAIANKMARTIWAVLAHGNPYEKRHHNIAA

SEQ ID NO: 16168 - protein, 340 aa, unidentified
  source 1..340: note = protein_0ab0f7a
  REGION 6..148: note = RuvC_domain
  SITE 9: note = RuvC_P1
  SITE 52: note = RuvC_P2
  SITE 87: note = RuvC_P3
  SITE 89: note = RuvC_P4
  SITE 92: note = RuvC_P5
  REGION 211..297: note = Tnp_domain
  SITE 219: note = Tnp_P1
  SITE 249: note = Tnp_P2
  SITE 257: note = Tnp_P3
  SITE 258: note = Tnp_P4
  SITE 270: note = Tnp_P5
MKHSVYGVDVAKRVFQVHCVDMETGEITSKQIKRAGFLEHFVNRAPCLIGMEACGGAQHWARRLMEMGHQVKLMPGKAVKAFVHGNKNDVADARAIWMAVQQPGVKAVAVKTEAQQAVLALHRMRQQLVKFRTMQSNGLRGLLTEYGEVMAVGRAALDRAMSDVLARLSDRLPAVLIDTLREQWGMLEKLDQQIAAIEQRLSAWLKQDKACKTIAEIPGVGLLTATAAVATMGDAKAFKSGREFAAWLGLAPGQTGTGGRVRLLGISKRGDTYLRTLLIHGARAVLTHAKEPSAWVQEISKRRPPNVVTVALANKMARTIWALLAHDRQYERSYVSVKPA

SEQ ID NO: 16169 - protein, 340 aa, unidentified
  source 1..340: note = protein_3eff7af
  REGION 7..149: note = RuvC_domain
  SITE 10: note = RuvC_P1
  SITE 53: note = RuvC_P2
  SITE 88: note = RuvC_P3
  SITE 90: note = RuvC_P4
  SITE 93: note = RuvC_P5
  REGION 211..296: note = Tnp_domain
  SITE 219: note = Tnp_P1
  SITE 249: note = Tnp_P2
  SITE 257: note = Tnp_P3
  SITE 258: note = Tnp_P4
  SITE 270: note = Tnp_P5
MNTVSLLGIDQGKNRHHLIGHDRSGHRTLQKQFNRSRLLEFAAKLPACTIAMESCGGSHCLARKLASFGHTVRLIAPQHVKPYVSGNKNDFIDAEAICEAASRPRTRYVTIKTVEQQVLSTEHRLREALVHQRTQAINRIHGFLLEFGISLAPTKAAIAHAHEYLDDPATDLPVRFKIVIEYLLKDIQRLSAEIKTLEMHLREELAASDVGTRLLSIPGIGPITASALVADVGDASSFHCGRDFAASLGLVPRQYSTGGRNNLLGISKRGDKHIRTLLLQGARAMMIRIGKRKDPLGAWVRDLLTRKHPNKVACALANKIARIIWAVLARGGSYSTLEPV

SEQ ID NO: 16170 - protein, 412 aa, unidentified
  source 1..412: note = protein_f3c2b9d
  REGION 9..159: note = RuvC_domain
  SITE 12: note = RuvC_P1
  SITE 63: note = RuvC_P2
  SITE 98: note = RuvC_P3
  SITE 100: note = RuvC_P4
  SITE 103: note = RuvC_P5
  REGION 253..340: note = Tnp_domain
  SITE 261: note = Tnp_P1
  SITE 292: note = Tnp_P2
  SITE 300: note = Tnp_P3
  SITE 301: note = Tnp_P4
  SITE 312: note = Tnp_P5
MEVLHSRCAGMDVSKSDVKVCVRLASPGRKTVQDTTTWSSMCGEILRLRDYLIAEQVTCVVMEATGDYWKPFYYLLEDAPFEVMLVNAHDAKNLPGRKTDVSDAAWLAQLAAHGLLRASFVPPEPIRRLRDLTRTRTAITRERSREIQRLEKVLEDAGIKLSVVASDINGVSARRMLRALVRGERDPAELAEMSVALLRRKIPLLTQALQGRFTDHHAFLVELHLDFIDEHTTRIEALTERIETVMAPFQAKRDLICTIPGISTTTADVIIAETGADMSQFPTPGHLASWAGVCPGQHQSAGRVKNVKTRPGNRYLKGALGAAALSIASHKGTFLNTKYRRLVRSRGKPKAIVALEHSLLTVVWIMLTDNVVYDEPGADYHQQRHPERTKNRALNELHQLGYDVTITPRGAA

SEQ ID NO: 16171 - protein, 313 aa, unidentified
  source 1..313: note = protein_38ff1f2
  REGION 9..153: note = RuvC_domain
  SITE 12: note = RuvC_P1
  SITE 56: note = RuvC_P2
  SITE 96: note = RuvC_P3
  SITE 98: note = RuvC_P4
  SITE 101: note = RuvC_P5
  REGION 192..276: note = Tnp_domain
  SITE 200: note = Tnp_P1
  SITE 229: note = Tnp_P2
  SITE 237: note = Tnp_P3
  SITE 238: note = Tnp_P4
  SITE 249: note = Tnp_P5
MNVTQSDFVGVDIAKETFDVFISPSGRFLHLENTPAGHQQHLEQLASLHVRLVVMEATSRYHNLLAATLELAGIPVAVVNPRQVKNFARALGTLYKTDPNDARVICEFGRRMEPDVRPAPDEQTQRLAMMVARRRQLVDNRTMEQNRYGTCDDELIRVGIKRHIDWLNAEIKDTDDDIDRQIKVMPLWREKVKLLEEVKGIGRTTMAVLLSMLPELGTLNRRKISGLVGVCPYAHDSGKMKGKRCIWGGRSAVRAALYMAALSAVRFNPTLKAFFERLRGKGKVFKVAMTACVRKLVTILNAMLRDNKRWAAD

SEQ ID NO: 16172 - protein, 347 aa, unidentified
  source 1..347: note = protein_b20544b
  REGION 6..148: note = RuvC_domain
  SITE 9: note = RuvC_P1
  SITE 52: note = RuvC_P2
  SITE 87: note = RuvC_P3
  SITE 89: note = RuvC_P4
  SITE 92: note = RuvC_P5
  REGION 211..305: note = Tnp_domain
  SITE 219: note = Tnp_P1
  SITE 249: note = Tnp_P2
  SITE 257: note = Tnp_P3
  SITE 258: note = Tnp_P4
  SITE 270: note = Tnp_P5
MKITTVGIDLAKSVLQIHGVDERGKVAVRKQLKRSEVLSYFANLEPCVIGMEACGSAHHWARKLREFGHTVKLMSPQFVKPYVKTNKNDVVDAEAICEAVSRPTMRYVPVKTVEQQAILSVHRARAGFVKARTAQGNQIRGLLSEFGIVISQGIHSIVKRMPEILEDGENGLPGTMRSLVQRLTENIKEMDRQVKELEKQIQLWHREHEASRRLAQIPGVGPITASAMVATVGKAREFKNGRQLAAWMGLVPKQNSSGGKQNLLGISKRGDTYLRTLLIHGARSVIHHVENKPEGSSWLRRLMARRNKNVAAVALANKNARTIWALLAHEQTFRCDYMPPEAMTAVM

SEQ ID NO: 16173 - protein, 349 aa, unidentified
  source 1..349: note = protein_f648975
  REGION 12..153: note = RuvC_domain
  SITE 15: note = RuvC_P1
  SITE 58: note = RuvC_P2
  SITE 93: note = RuvC_P3
  SITE 95: note = RuvC_P4
  SITE 98: note = RuvC_P5
  REGION 217..302: note = Tnp_domain
  SITE 225: note = Tnp_P1
  SITE 255: note = Tnp_P2
  SITE 263: note = Tnp_P3
  SITE 264: note = Tnp_P4
  SITE 276: note = Tnp_P5
MTKNEQGNAAVYGVDLGKTIFHVVGLDERGAVVQRLKFRREKLLAFFEDAGKALIGMEACPGSQWLARKLQAMGHRVRIIPAQFVRPYVKSNKNDTIDAEAIAEAVTRPTMRFTQVRSTEQVDLQALHRIRDQLVTSRTRLINQARAFCIEYGIAIRQGTGLFRRDLPLVLDDETNDLTPAMRRMLRQIFDDVIRLDQRIAEVTREVEALAARDDRARRLMSIPGIGPLAATALLAAIGDGRQFRRARDLAAWLGLVPREHSTGGKTTLLGISKRGNRFIRRLLIHGARSCVVHLDRGRDRLGGWIDALRGRMHLNKVTVALAAKIARTAWAIITQPGAIYERRDPAVS

SEQ ID NO: 16174 - protein, 340 aa, unidentified
  source 1..340: note = protein_c3d8ab1
  REGION 6..147: note = RuvC_domain
  SITE 9: note = RuvC_P1
  SITE 52: note = RuvC_P2
  SITE 87: note = RuvC_P3
  SITE 89: note = RuvC_P4
  SITE 92: note = RuvC_P5
  REGION 211..296: note = Tnp_domain
  SITE 219: note = Tnp_P1
  SITE 249: note = Tnp_P2
  SITE 257: note = Tnp_P3
  SITE 258: note = Tnp_P4
  SITE 270: note = Tnp_P5
MKITTIGIDLAKNVFQIHGVDAHGKAVLKKQIKREEMTVFFANLEPCLIGMEACGGAHYWARKLQSQGHTVKLMAPQFVKPYVKTNKHDAADAEAICEAVTRPTMRFVPVKHVEQQSVLALHRARQGMVRARTAQANQIRGLLAEFGLVVPQGITHLYQRVPLLLEQAKDELPGLFQQLVQRLMAHLKVLDRQVDEMECEIQMWHRSNLLSRKLEKIPGIGPLTASAVVASVGDAKSFDNGRQLAAWLGLVPKQHSSGGRPTLLGMSKRGDCYLRTLLIHGARAVIYALKRKPPNTGWLANLLARRDKNIVAVALANKNARIIWALLAQDREFRSDYATP

SEQ ID NO: 16175 - protein, 394 aa, unidentified
  source 1..394: note = protein_f04c798
  REGION 5..159: note = RuvC_domain
  SITE 8: note = RuvC_P1
  SITE 57: note = RuvC_P2
  SITE 97: note = RuvC_P3
  SITE 99: note = RuvC_P4
  SITE 102: note = RuvC_P5
  REGION 265..352: note = Tnp_domain
  SITE 273: note = Tnp_P1
  SITE 304: note = Tnp_P2
  SITE 312: note = Tnp_P3
  SITE 313: note = Tnp_P4
  SITE 325: note = Tnp_P5
MKYFVGLDVSKEKFDACCIGEKGEKVFSLTCSMDREGFEKLIVRLPKDKTSFLLGMESTASYHIPLFSYLAAEDYKVVVINPLLINGFSKRSLRKTKTDKKDALTIAQFILQEKEILSVKTPDYLITELKDLARRREKLADHMTSLKGDMKRILSVTFPELEHITGVFTKATLRLLMEYPSAHTIRGADSSAITDVFKGKGRGNKPRVTIKALMDAATSSVGVASPAKELTLRQEASLLMHVEEQMEETAKALMDTLNERMKQDMEILCSMKGIGASTAMNFLIEMGGAIEIYENDKKLIAASGLDPSTYESGKYAGKSRISKRGNRHLRRVIWLMATKVIINNDLFKAYFKKRKQDGLPYKKAVLATAHKLIRTIFVMLSRKTCFIEGGIKYS

SEQ ID NO: 16176 - protein, 398 aa, unidentified
  source 1..398: note = protein_34e0b2d
  REGION 3..157: note = RuvC_domain
  SITE 6: note = RuvC_P1
  SITE 54: note = RuvC_P2
  SITE 94: note = RuvC_P3
  SITE 96: note = RuvC_P4
  SITE 99: note = RuvC_P5
  REGION 264..349: note = Tnp_domain
  SITE 272: note = Tnp_P1
  SITE 302: note = Tnp_P2
  SITE 310: note = Tnp_P3
  SITE 311: note = Tnp_P4
  SITE 323: note = Tnp_P5
MFCGVDVGKGEHHACALDRSGKRLHDRALPNDEAALVGVLSGLAGHGPVLVVVDQPASIGALVIAVARSLGIAVAYLPGLAMRRIADLHPGEGKTDARDAYVIADAARTMPHTLRRVGTDDETLAELGVLAGYDDDLAAQSTRLTNRLRDALLHIHPALERLLGKHIDRGGVLDLLAAAPTPPALRELGQAGIAEVMRPRSPRLCRTLPAKILTALDTQTVVVPGTAAFGRVITGVAAQLRDVHLERADLATDLEARLEAHPLAQVLTSMPGIGVRTAIKILTIVGDGTAFPTAGHLAAYAGLSPVTRRSGSSIKGETRSQRGHHALKSALFLSAFASLSDPASRAYYDRKRAAGKRHNAALICLARRRIDVIYAMLRDHKPYQHPTPNNPEQTTAAA

SEQ ID NO: 16177 - protein, 342 aa, unidentified
  source 1..342: note = protein_708d3f6
  REGION 7..148: note = RuvC_domain
  SITE 10: note = RuvC_P1
  SITE 53: note = RuvC_P2
  SITE 88: note = RuvC_P3
  SITE 90: note = RuvC_P4
  SITE 93: note = RuvC_P5
  REGION 211..296: note = Tnp_domain
  SITE 219: note = Tnp_P1
  SITE 249: note = Tnp_P2
  SITE 257: note = Tnp_P3
  SITE 258: note = Tnp_P4
  SITE 270: note = Tnp_P5
MNEVSIIGLDLAKNVFQAHGAGTDGSVVFRRKLSRAQLLKFIGQQPPCIVAMEACASAHHWGRAIGDLGHEVKLIPPAYVKPFVKRQKNDMADAEAIAEAASRPTMRFVAVKSEEQQGAAMVYRTRDLLVRQRTQTINALRAHLAEQGIVAPTGPAHVGRLATVIDSDHGVLPSTVKDLARLLLGQIATLSRKVADLDAELRRRASVDDTARRLATIPGVGPITAAAITTFAPPMETFLKGRDFAAWVGLTPRQHSSGGKERLGRTSKMGQRDIRRLLIVGAVAVVRWAARKGAPDGSWLARMLARKPNMLVAVALANRMARTAWALMCRGEDYRDPAMATA

SEQ ID NO: 16178 - protein, 405 aa, unidentified
  source 1..405: note = protein_b87a8f4
  REGION 4..162: note = RuvC_domain
  SITE 7: note = RuvC_P1
  SITE 59: note = RuvC_P2
  SITE 99: note = RuvC_P3
  SITE 101: note = RuvC_P4
  SITE 104: note = RuvC_P5
  REGION 270..356: note = Tnp_domain
  SITE 278: note = Tnp_P1
  SITE 309: note = Tnp_P2
  SITE 317: note = Tnp_P3
  SITE 318: note = Tnp_P4
MLFVGDDWAEDHHDIEVQDETGRRLAKARFAEGLAGVAQLHELVAQHLGDAQSAQVAIGIETDRGPWVIALIAAGYRVFAVNPLQVARYRERQSVSGAKSDAADAHILADMVRTDSHQLRQVAGDSDQAEAVKVVARAHKTLIWERTRHAQRLRNALREFFPAALLAFDDLTAADTLELLAKAPDPDAAARLTIAQITAALKRARRHHAADRARVIQAALRTEQLRQPTAVSTAYAATVRAQAAVIATLNTQIKTMGAQVEAHFGQHPDVEIYLSQPGMGPIVGARVLAEFGDDKNRYVDARARKNYAGTSPITRASGKKKTVLARYVHNNRLIDALGQQAFSALTGSPGARAYYDELRQRRMGHLAALRQLANRLVGILHGCLKTGTIYDETTAWSHHAETAAA

SEQ ID NO: 16179 - protein, 293 aa, unidentified
  source 1..293: note = protein_60ea839
  REGION 1..97: note = RuvC_domain
  SITE 37: note = RuvC_P3
  SITE 39: note = RuvC_P4
  SITE 42: note = RuvC_P5
  REGION 161..248: note = Tnp_domain
  SITE 169: note = Tnp_P1
  SITE 199: note = Tnp_P2
  SITE 207: note = Tnp_P3
  SITE 208: note = Tnp_P4
  SITE 220: note = Tnp_P5
MEACASAHHWARELQARGYHVKLIAAQFVKPYVKSNKNDRVDAEAICEAMGRPHMRFVAVKSVAQQDVQAAHRIRSELVQQRTAKANQIRGLIGEYGLVAPTGIGQLRAALPRWLEDAENCLTDDFRVLLAGLAEDLRHLDARIVTVTEGIECHAQTDPIAKRLMTLRGVGILTASALASALGDAQAFKRGRDFAASLGLTPRQHSTGGRDRLLGISKRGDGYLRTLLTHDERAVLRYSEGKEDNLSHWARQLAERKHTNVAVIALANKTARIAWAITRHDQAYDPDLAAQAA

SEQ ID NO: 16180 - protein, 311 aa, unidentified
  source 1..311: note = protein_ae92ed4
  REGION 11..115: note = RuvC_domain
  SITE 56: note = RuvC_P3
  SITE 58: note = RuvC_P4
  SITE 61: note = RuvC_P5
  REGION 180..264: note = Tnp_domain
  SITE 188: note = Tnp_P1
  SITE 218: note = Tnp_P2
  SITE 226: note = Tnp_P3
  SITE 227: note = Tnp_P4
  SITE 239: note = Tnp_P5
MRRDGVISFAAKLPPCVMAMEACCGAHHMGRSLVAFGHEIRLMSPEYVRPYVKAQKNDDRDAEAIAEAASRPTMRFVELKSEEQLDIQTLHRVRDRLVGERTSLTNQIRSLLLERGLVVAQGHARLSLLLSELLDTDAGTLSPRMMFLLHDMRTRWEELDRRIAAFDAEFASMARTDERARRLTDIPGIGALNATALVAAVGDATTFSKGRDLAAWLGLVPRQATTGGRPKLLGITKRGSRYLRKMLIQGARSAMPSLARSDTAVGAWLRGLLARSHSNVAVVALAAKMARTVWALLHHGRSYKVMSITTA

SEQ ID NO: 16181 - protein, 419 aa, unidentified
  source 1..419: note = protein_19c11ae
  REGION 22..174: note = RuvC_domain
  SITE 25: note = RuvC_P1
  SITE 73: note = RuvC_P2
  SITE 111: note = RuvC_P3
  SITE 113: note = RuvC_P4
  SITE 116: note = RuvC_P5
  REGION 281..367: note = Tnp_domain
  SITE 289: note = Tnp_P1
  SITE 320: note = Tnp_P2
  SITE 328: note = Tnp_P3
  SITE 329: note = Tnp_P4
  SITE 340: note = Tnp_P5
MKSASNTANSTLPEYAPNDVTAGNDWARDDHAACIVDGRGRKVATTVVEHTSSGLRDLVAVLGRHGVGEVAIERPDGPVVETLLAAGITVVVISPNQVKNLRGRYGSTGNKDDRFDAYVLADTLRTDRARLRPLVPDTETTVALRRTCRARKDLVAHRVAVANQLRAHLRNVLPCVVGLFATIDSPIALTFLARFDTQDKIDRLTVKRLADWLAKQGYSGKVDPAILHQHILDAPRGATGAHGTSQTPITAGYVALLRTLLAQIRQLGTQIDAQLGAHADAHIFTSLPRSGRIRAARLLAEIGDCRAKFPTPESLTCLAGAAPSTRQSGRLRTVGFRWACDKQLRDAVVDFAGDSRRANPWAADLYDRARARGHNHAHAVRILARAWLHVIWHCWQDSIAYNPEAHHTLQRVLTQNRAA

SEQ ID NO: 16182 - protein, 332 aa, unidentified
  source 1..332: note = protein_eb54d86
  REGION 8..158: note = RuvC_domain
  SITE 11: note = RuvC_P1
  SITE 59: note = RuvC_P2
  SITE 97: note = RuvC_P3
  SITE 99: note = RuvC_P4
  SITE 102: note = RuvC_P5
  REGION 187..290: note = Tnp_domain
  SITE 211: note = Tnp_P1
  SITE 241: note = Tnp_P2
  SITE 249: note = Tnp_P3
  SITE 250: note = Tnp_P4
  SITE 263: note = Tnp_P5
MENVEETIGIDVSKKTLDVHLHHKQLHKQFINDESGYKKILQWIKSQKVLITQSVICFEHTGWYCLHLSYYLHQHQVCYCCVNPMEIKRSIGLKRGKTDKADAKEIARYAWLHREELVASVPPPEKLIELQRMMSLREQIAKQLRALKCLEKGMQVLTVNKQTEDVSEAMIAETICHLEQQMKKLENAMVSLIKTDNQMHKHYKLSRSVKGVGLVLAVQMLVHTHNYTRFASWRQFSCYCGLVPFPHQSGTSINGRMKIHPISDRKMKSLLSMSAISAIQHDKELKQYYEKRVEEGKPKMVVLNIIRNKLVSRVFATINRGTPYVELSQYAA

SEQ ID NO: 16183 - protein, 337 aa, unidentified
  source 1..337: note = protein_c2fdfa7
  REGION 15..168: note = RuvC_domain
  SITE 18: note = RuvC_P1
  SITE 72: note = RuvC_P2
  SITE 112: note = RuvC_P3
  SITE 114: note = RuvC_P4
  SITE 117: note = RuvC_P5
  REGION 212..298: note = Tnp_domain
  SITE 220: note = Tnp_P1
  SITE 249: note = Tnp_P2
  SITE 257: note = Tnp_P3
  SITE 258: note = Tnp_P4
  SITE 271: note = Tnp_P5
MFNSEEGYLHKVVQLGIDVSKAKLDCTLLLDRDTLRSRSKIVPNTAAGFVQLVEWVQRQAQVAAAEVVAAMEPTGVYHQALALALYEAGMTVVVVNPGQLRQFAEGLAVRTKTDAKDSVVLARYAGQPERIVWQPAPVEVRQLQALMGRLATVETELRRELNRREAAQLGHDPQLVQASIADAIAFWSAEQSKLQQAIDEHIDRHPGLKIERERLLTIPAVGPKTANRMLCVLSAHDFGRASQAAAFIGLTPVEHQSGSSVRGRPRLSKCGDARLRAALYMAAVVAIRHNPDVRALYQRLLKRGKAKLSALCAAMRKLVHICFGVLKNQQDYRPQCA

SEQ ID NO: 16184 - protein, 344 aa, unidentified
  source 1..344: note = protein_d605496
  REGION 6..147: note = RuvC_domain
  SITE 9: note = RuvC_P1
  SITE 52: note = RuvC_P2
  SITE 87: note = RuvC_P3
  SITE 89: note = RuvC_P4
  SITE 92: note = RuvC_P5
  REGION 210..300: note = Tnp_domain
  SITE 218: note = Tnp_P1
  SITE 248: note = Tnp_P2
  SITE 256: note = Tnp_P3
  SITE 257: note = Tnp_P4
  SITE 269: note = Tnp_P5
MNIATIGIDLAKNVFQLHGVTSHGKVVLRRQIHRGQMRGLFVNLPPCLIGMEACASAHYWARTLESYGHTVRLIAPHFVKPYVKTHKTDATDAEAICEAVNRPNMRFVPIKSIEQQSALSLHRVRQGFVRARTAQACQIRGLLAEFGLVMPQGIANIKQVPKLLQVAGKELPAPFCRLIERLLAHLKELDRQTRELEEQIVDWHERSEPSRRLAKIPGIGPITASALVASISDVRSFKNGRELAAWLGIVPRQHSSGGKPTLLGISKRGDRYLRTLLVHGARSVIVRVLKRDDEKDGWLKRLLERRHVNVATVALAHKTVRTVWAILAHDREYCPNYKSLPVAA

SEQ ID NO: 16185 - protein, 342 aa, unidentified
  source 1..342: note = protein_6bffffe
  REGION 6..148: note = RuvC_domain
  SITE 9: note = RuvC_P1
  SITE 52: note = RuvC_P2
  SITE 87: note = RuvC_P3
  SITE 89: note = RuvC_P4
  SITE 92: note = RuvC_P5
  REGION 211..296: note = Tnp_domain
  SITE 219: note = Tnp_P1
  SITE 249: note = Tnp_P2
  SITE 257: note = Tnp_P3
  SITE 258: note = Tnp_P4
  SITE 270: note = Tnp_P5
MNITSLGIDLAKNTFSLVGMNKHSKIVCRKTISRKKLLPFIAQCPPCLIGMEACSGSHYWAREFEKLGHRVGIIAAKFVEPYRKGGKNDNNDAEAICEAVMRPNIWFVPIKSPDQQAVLCIHRVRQGLVKDRTGLLNQLRGLLSEFGIIMPKGRYPAQHAIPSILEDAENGLPMLARNIISDLWLRIQEANKQILTYDRELAKLVREDSVAKRLMTIPGVGEQVATGVVASVPDPRIFKNSRQFCAWLGLVPRQFTTGGHIRLGRITKRGDKYLRMCLVHGARAVVAALKDKQDHVSCWVRELVERRGYLRAVVALAARNARLIWTLMIKGEDYKPMPVIQA

SEQ ID NO: 16186 - protein, 392 aa, unidentified
  source 1..392: note = protein_08fd24e
  REGION 4..163: note = RuvC_domain
  SITE 7: note = RuvC_P1
  SITE 59: note = RuvC_P2
  SITE 100: note = RuvC_P3
  SITE 102: note = RuvC_P4
  SITE 105: note = RuvC_P5
  REGION 267..353: note = Tnp_domain
  SITE 274: note = Tnp_P1
  SITE 304: note = Tnp_P2
  SITE 312: note = Tnp_P3
  SITE 313: note = Tnp_P4
  SITE 326: note = Tnp_P5
MIYVGIDAAKRKHDCCILDTQGKPYPVFSFSNSHDGFQAFFQKLFSICSDKGQIKIGLEATGPYSENLFNALVDRSLPVLRINPLLVKNFKSSMSLRRTKTDKVDAQAIAQMVKEKGDSLQTYSTSLYHMEELKSLTRYRSKLVAEQSKLRVSVSRLVTILFPELESLVSSLHLASIQALLIEWPGHQQLADCNLKRLTNLLKKYSRGQFGKPKAIAIQQAARQSIGRVSPSKSLELRQTLKKVAYVQRDLDEVEAQIKDMVDSLHSPILDIPGIGYTTGAMILAEVGDFNRFANADKLLAFSGMSPSKYESGEFKGTTGKMEKRGSSYLRYALYTAAKLVSQFAPQFKSYYQKKRAEQKPYNVALSHVAKKLTRVLYKLGTTGEAYQPQAA

SEQ ID NO: 16187 - protein, 412 aa, unidentified
  source 1..412: note = protein_a26cc71
  REGION 4..170: note = RuvC_domain
  SITE 7: note = RuvC_P1
  SITE 67: note = RuvC_P2
  SITE 107: note = RuvC_P3
  SITE 109: note = RuvC_P4
  SITE 112: note = RuvC_P5
  REGION 278..364: note = Tnp_domain
  SITE 286: note = Tnp_P1
  SITE 317: note = Tnp_P2
  SITE 325: note = Tnp_P3
  SITE 326: note = Tnp_P4
MLFVGNDWAEDHHDVEIVDEQGRRLARKRLPDGLAGITGLHTLIAQFFPEEWAELEPGAAASRVKVGIETDRGQWVQALIAAGYEVFAINPMSVARYRERHSTSGAKSDAADAHVLAEIVRLDRAHHRPVAGDSELAEAIKLVARAHQSLVWDRTRQVLRLRGVLREFFPAALEAFADLDAADTLELLTLAPDPDRAARLSKSRIVAALRRANRRGVDDRADANHSMLRAPALRQPAQVQVAFAAIVTSQVRLISALNGEIAQLGEVVADHFGRHPDAEIYASQPGLGVILGARVLAEFGDDRTRFADAKARKNYAGTSPITRASGKKKVVLARYARNTRLGDAVQQWAFSSLKGSRGARAYYDALRARNIGHQAALRQLANRLVGILHGCLKTDTLYEETTAWAHHLTAAA

SEQ ID NO: 16188 - protein, 342 aa, unidentified
  source 1..342: note = protein_141727f
  REGION 6..148: note = RuvC_domain
  SITE 9: note = RuvC_P1
  SITE 52: note = RuvC_P2
  SITE 87: note = RuvC_P3
  SITE 89: note = RuvC_P4
  SITE 92: note = RuvC_P5
  REGION 211..299: note = Tnp_domain
  SITE 219: note = Tnp_P1
  SITE 249: note = Tnp_P2
  SITE 257: note = Tnp_P3
  SITE 258: note = Tnp_P4
  SITE 270: note = Tnp_P5
MKITTIGIDLAKNVFQVHGVDAHGKTVIKKQLKRDQVALFFANLPTCLVGMEACGSAHHWARKLQALGHTVRLIAPQFVKPYVKTNKNDAADAQAICEAVARPTMRFVAIKTIDQQSVLALHRARQAFVKARTAQANQIRGLLAEYGLALPLGIHHIPQRVPELIEDGGIELPGQFRLLIERLVEHFKELNQQVIELEAQIKAWHRANPASSRLEKIPGIGPITASALVASIGDARHFINGRQVAAWLGLVPRQHSTGGKAVLLGMSKRGDTYLRTLLIHGARSVLSHAWRRADQSRWLHRLVQRRNANVAAVALANKNARIIWALLAHDREFRADYVSVAS

SEQ ID NO: 16189 - protein, 366 aa, unidentified
  source 1..366: note = protein_3491540
  REGION 7..149: note = RuvC_domain
  SITE 10: note = RuvC_P1
  SITE 53: note = RuvC_P2
  SITE 88: note = RuvC_P3
  SITE 90: note = RuvC_P4
  SITE 93: note = RuvC_P5
  REGION 212..299: note = Tnp_domain
  SITE 220: note = Tnp_P1
  SITE 250: note = Tnp_P2
  SITE 258: note = Tnp_P3
  SITE 259: note = Tnp_P4
  SITE 271: note = Tnp_P5
MGEITTVGIDIAKYVFQLHGVDAAGEVVLGRRLRRSQIAAFFAALPPCVVGMEACGTAHFWAREIAAVGHDVRLMPPSYVKPYVKRNKHDAADAEAVCEAVRRPSMRFVPVKTPEQQAALVAHSVRDLLVRQRTMLVNALRGHLAEFGIVAPRGIHKAEELIAVIGDVSDERIPSAARRVLPVLATELAALGLRITAIEAEIVARTRADPVARRLATIPGIGPIIASRITATVPDPSIFQSGRDFAAWIGLVPRQNSTGGKIRLGGISKRGNGTLRRLLVGGAMAAMFRTKVLQNDPWLCQLRARKPAKVAAVALANKIARTAWAVMQHGQDWRPATALSSRPQEPAAVLAAVKTMPPSAMAFGQS

SEQ ID NO: 16190 - protein, 404 aa, unidentified
  source 1..404: note = protein_c8b82c0
  REGION 4..160: note = RuvC_domain
  SITE 7: note = RuvC_P1
  SITE 57: note = RuvC_P2
  SITE 97: note = RuvC_P3
  SITE 99: note = RuvC_P4
  SITE 102: note = RuvC_P5
  REGION 270..356: note = Tnp_domain
  SITE 278: note = Tnp_P1
  SITE 309: note = Tnp_P2
  SITE 317: note = Tnp_P3
  SITE 318: note = Tnp_P4
MIFVGIDWSETHHDACVLDVDGRVLTKGRVPEGIDGVSTLHEMVAAHAEDLSQVVVGIELDRGLLVGALVAAGYAVHAINPLSVDRYRDRHRTSGAKSDPGDAKVLADLVRTDRHLHRQVAGDTELAEAVKVLARAHQSLIWSRQRQLNQLRNALREFYPAALEAFGTDLASADALAVLEVAPTPAEARSVSSARIAAALKRAGRRRRITERAKEIEAALRSPQLEASALLARAYGDVVASTVRIVAEMTAQIQTLADQLEANFEGHPDAEILRSLPGLGSVLGARVLAEFGDDPARYPDPKARKNYAGTSPITKASGRSKVALARFARNRRLADALQMWAFCSLSLSPGARRYYDAHRAKGQNHQRALRSLANRWVGILHGCLRHRQRYAEHLAWPMAQGAAA

SEQ ID NO: 16191 - protein, 394 aa, unidentified
  source 1..394: note = protein_6bd3a65
  REGION 4..157: note = RuvC_domain
  SITE 7: note = RuvC_P1
  SITE 58: note = RuvC_P2
  SITE 98: note = RuvC_P3
  SITE 100: note = RuvC_P4
  SITE 103: note = RuvC_P5
  REGION 263..353: note = Tnp_domain
  SITE 271: note = Tnp_P1
  SITE 301: note = Tnp_P2
  SITE 309: note = Tnp_P3
  SITE 310: note = Tnp_P4
  SITE 326: note = Tnp_P5
MATIGIDVGKHQHIAAIHRDGEREARKAVLRFSADRSGLAELSAWLTRQGEISRAVLESSGHYHLNLAAALQRAGVPVAVVNPLESKYFGKRRLQRTKSDPADARTLATLAMVDEPQVRDVLAGAELREAARFAMSLVDELGRIDQRICRLVEIGFPELEQAYDDPTCVSALALLRLAPTAQAATRKRASSLADANRGRGRRAVGATKATQIQALARDTIAAPELAEQIGFQMRLLIAQHDLLEAQVTEAEAHLGTLLDGELVRRLRTIPGAGPAIVATLIAEIGDIWRFSEFDKLVAYIGVHPAEKSSGEKGRNPETSWRMSKAGNAYLRTALYRMAIVGIQHNPVIRAHYARKRAQGKSKMNAVGHCMKKALAIVWGVWRSGTDFAAPPSTP

SEQ ID NO: 16192 - protein, 415 aa, unidentified
  source 1..415: note = protein_a7df084
  REGION 26..181: note = RuvC_domain
  SITE 29: note = RuvC_P1
  SITE 78: note = RuvC_P2
  SITE 118: note = RuvC_P3
  SITE 120: note = RuvC_P4
  SITE 123: note = RuvC_P5
  REGION 288..373: note = Tnp_domain
  SITE 296: note = Tnp_P1
  SITE 326: note = Tnp_P2
  SITE 334: note = Tnp_P3
  SITE 335: note = Tnp_P4
  SITE 347: note = Tnp_P5
MPQAGRDGSESGYKIVNEHETVDIYLGLDVGKGEHHATALTPAGKKTFDKPLPNTEPKLRELFAKLQAKHGTVLVVVDQPASMGALPLAVARDMNCQVAYLPGLTMRRIADLYPGEAKTDARDAYVIADAARAMPHTLRAVGPADETTAELQMVAGFDDDLAAENTRIKNRLRGLLTHIHPSLEQVLGPRLDHPAVLALLERFGSPAQIRKAGRRRLVSLLRPKAPRTAERLADDIFTALDEQTVVVPGTEAAALIILSLASSLSSVLGQRKALAARIEELLEDHPLSQVLTSMPGIGTRTAARILIDVGDGTAFPTAGHLAAYAGLAPVTRTSGSSIRGEHPARRGNRQLKRALYLAAFASLKQPESRAYYDKKRREGKHHVAAVIALARRRVDVLFAMLRDGTFYQAPAGTSA

SEQ ID NO: 16193 - protein, 348 aa, unidentified
  source 1..348: note = protein_cba687a
  REGION 6..146: note = RuvC_domain
  SITE 9: note = RuvC_P1
  SITE 52: note = RuvC_P2
  SITE 87: note = RuvC_P3
  SITE 89: note = RuvC_P4
  SITE 92: note = RuvC_P5
  REGION 214..297: note = Tnp_domain
  SITE 222: note = Tnp_P1
  SITE 252: note = Tnp_P2
  SITE 260: note = Tnp_P3
  SITE 261: note = Tnp_P4
  SITE 273: note = Tnp_P5
MQIAVLGIDLGKNSCSVAGLDATGRIVLRRRMHRDSVIKLASRLPACVMAMEACCGAHHLGRVLQAHGHEVRLMSPEYVQPYVKAQKNDERDAEAIAEAATRPTMRFVELKSEMQLDVQSLHRARSRLVGERTALINQLRAVLFERGVTVAQGRRRLERYLALVLERDEAPTLQLSPRMRLLIDDMRAQWCELDRRIAAFDAEFVAAARSDETARRLSTIPGIGAINATALVAAVGDARSFARARDLAAWLGLVPRQATTGGRPRLLGITKRGNKYLRTLLIHGARAALPSLTATEGSLGNWLRGLSARAHRNTVIVALASKLARIAWAVLRSTATYNATLGDQAAAA

SEQ ID NO: 16194 - protein, 345 aa, unidentified
  source 1..345: note = protein_2c18566
  REGION 9..169: note = RuvC_domain
  SITE 12: note = RuvC_P1
  SITE 68: note = RuvC_P2
  SITE 108: note = RuvC_P3
  SITE 110: note = RuvC_P4
  SITE 113: note = RuvC_P5
  REGION 209..295: note = Tnp_domain
  SITE 217: note = Tnp_P1
  SITE 247: note = Tnp_P2
  SITE 255: note = Tnp_P3
  SITE 256: note = Tnp_P4
  SITE 269: note = Tnp_P5
MTEILKQAAGVDVSQDELVVSLGRVTRSLEPEIYAFKTFANKPSGFAALEAWVNKNTDQQVPVRFVMEATGVYHEKLAYYLSEQNREVSIVLPNKICNFAKTLETKTITDKTASQAICRFGLEKKLCIWQPPKKIFRDIKQLMRERDQIIAERTVAKNQLHAENAEAFPNKRSIARLNERIQLFNRQEKEIRYEIAEIIKQDEELVERIKNVTTIPGVAKLTTVIVLAETNAFDLITSRKQASSYAGFDIVEKQSGTSVKGKPKMSKRGNRHLRKAMHMPALAAIRHNERFKAIFVRLVSKHGIKMKAAVAVQRKLLELIYTVWTTNTKYDPNYLQKMIENDTAT

SEQ ID NO: 16195 - protein, 316 aa, unidentified
  source 1..316: note = protein_9407b00
  REGION 7..152: note = RuvC_domain
  SITE 10: note = RuvC_P1
  SITE 54: note = RuvC_P2
  SITE 94: note = RuvC_P3
  SITE 96: note = RuvC_P4
  SITE 99: note = RuvC_P5
  REGION 190..274: note = Tnp_domain
  SITE 198: note = Tnp_P1
  SITE 227: note = Tnp_P2
  SITE 235: note = Tnp_P3
  SITE 236: note = Tnp_P4
  SITE 247: note = Tnp_P5
MSEPVYVGIDMAKSSFEVAVTGESQTLGLSNDEAGHTELCQLLIPLAPRLVLLEATGGYEQDLALALAAAGLRVSVVNPRQARDFARCTGKLAKTDRIDALALRAFAAMLDTQGHEPCALADEQQRELTAMVVRRRQLVAMLVAERQRLAVAHPKARPSILQIMDAIAAQLHDVDGELKVHIRAHHADLAKLLTSVKGVGPTTASTLLAQLPELGKLNRKQITALVGLAPMNRDSGTLRGQRHIFGGRADVRRALYVAALVGMRFNPMLKAFYARLLAAGKPKKVALVACVHKLLVILNAIARTRSPWDNAIAVTN

SEQ ID NO: 16196 - protein, 446 aa, unidentified
  source 1..446: note = protein_902fcba
  REGION 41..200: note = RuvC_domain
  SITE 44: note = RuvC_P1
  SITE 97: note = RuvC_P2
  SITE 137: note = RuvC_P3
  SITE 139: note = RuvC_P4
  SITE 142: note = RuvC_P5
  REGION 310..396: note = Tnp_domain
  SITE 318: note = Tnp_P1
  SITE 349: note = Tnp_P2
  SITE 357: note = Tnp_P3
  SITE 358: note = Tnp_P4
MGWRARPLSGVSTGSIRARAVSSAGRTHEFVERLEKRVLFVGDDWAEDHHDVEVQDATGRRLATARLMEGVEGVAKLHALLARHGGEDLEPEEVVVGIETDRGPWVQSLLAVGYRVYAVNPRQAARFKERYATSGAKSDRGDTHALADMVRIDRAQLRPIAGDSEQAQAVKVVARAHQTLIWERTRAFQRLRTTLREYFPGALAAYAGLELTSTDALELLVKAPTPETGRKLTKQQTTAVLARHRRRNRDQKTAAIQKELREPQLDVAAPVAAAYAAAATAHARLLLALNEQIDALEIEVKAHFLAHPDAEIYLSMPGIGEIVGARVLAEFGDDPTRYASAKARKNYAGTSPITRASGKVHTVQARYVRNNRLADALQRQAFCALQNSPGARRYYDKQRARDLDYNPALRQVGNRLVGILHGCLKTRTHYDEATAWAHHGQLPTAA

SEQ ID NO: 16197 - protein, 428 aa, unidentified
  source 1..428: note = protein_206067d
  REGION 4..157: note = RuvC_domain
  SITE 7: note = RuvC_P1
  SITE 59: note = RuvC_P2
  SITE 94: note = RuvC_P3
  SITE 96: note = RuvC_P4
  SITE 99: note = RuvC_P5
  REGION 283..370: note = Tnp_domain
  SITE 291: note = Tnp_P1
  SITE 322: note = Tnp_P2
  SITE 330: note = Tnp_P3
  SITE 331: note = Tnp_P4
MLGVGIDWAEDFHLVAVGRPGEGVVEVARVEHTPAAVEALVARIAGLEPDPAEVRVVIETRHGLLVEALIDAGYTVLPVNPDLVARRRGPAKKKDDAEDARIACLLALDQYTELRALVPHGQLAGELRAIARDDVRACRDERRLLNRLRADLAATFPAAATIAGDDLGSPVMLKLLHRWPTAGELAAAGRAEVEALARQARHGWPHRLADRVDQALAGEHFQPRDYLVRAKADTIRLTCAQLLLLREQRRSWQRRMGELLLGDRRRGRAKQPGDQRGPAVPGGEIYLSFPGLGDRLAARIAGEIGDAIGQFDTPNALQCYAGKAPVTRRSGKSELVVASRLACNRYLADAVQQWAFTSLSTSGWAREFYDTQRSRGKKHHAALRALGNRWLEVLWHCLTRNTPYDESVHVANRNRALGRVNQPTKLAA

SEQ ID NO: 16198 - protein, 313 aa, unidentified
  source 1..313: note = protein_09e16fe
  REGION 8..152: note = RuvC_domain
  SITE 11: note = RuvC_P1
  SITE 53: note = RuvC_P2
  SITE 93: note = RuvC_P3
  SITE 95: note = RuvC_P4
  SITE 98: note = RuvC_P5
  REGION 189..273: note = Tnp_domain
  SITE 197: note = Tnp_P1
  SITE 226: note = Tnp_P2
  SITE 234: note = Tnp_P3
  SITE 235: note = Tnp_P4
  SITE 246: note = Tnp_P5
MIIPLRCVGIDVSKHHLDIFDEAIGVSERIDNATQAITQLVARWRCDALVVFEATGVYDLELRQALRQAGVRFARINPARARDFARASGQLAKTDPIDARMLAAFARAMKPATEQAATPARNALARLAKRRDQLVAMRAQEKNRCSEAEDRAMAERIGRLIEVLNDEIVEIEAEISALVKAEPELADDAKLMRSVPGVGPVACMQLLTQMPELGHLGPKEVAALAGLAPFNVDSGAYRGKRKIGGGRKRVRDALYMAALNAVRRADRFKIFYERLRNAGKPAKLALIAVARKLLTVLNAMMRDRKPYTIAPST

SEQ ID NO: 16199 - protein, 326 aa, unidentified
  source 1..326: note = protein_eac1723
  REGION 4..156: note = RuvC_domain
  SITE 7: note = RuvC_P1
  SITE 61: note = RuvC_P2
  SITE 101: note = RuvC_P3
  SITE 103: note = RuvC_P4
  SITE 106: note = RuvC_P5
  REGION 201..286: note = Tnp_domain
  SITE 209: note = Tnp_P1
  SITE 238: note = Tnp_P2
  SITE 246: note = Tnp_P3
  SITE 247: note = Tnp_P4
  SITE 259: note = Tnp_P5
MHYIGIDVSKAKLDCCWLRDAEKNKFKTKVFKNNVADSKALDIWLTSLTKAAPSEITVLMEATGIYHENLAHYLFERGYQICVVNPARTKEFASSLGNTHKTDAKDSQILALYCHRMHPEHWQPERPEIRELKALLARLEALETDLNREANRLEKAEFNCSSERVIGSLNLMIEQLKAEKKRLEKDIDNHIGRYPQLRKDRQLMESIPGVGPIVSRLMLSVLHSRSFRTAGQVAAFLGLVPRIQQSGQWKGRSRLSKKGPANVRAKLYMAAVVCLRYNPDIQAQCRRLMENGKSKMQALGAGMRKLVQICFGVVKHQSEYHPQVVT

SEQ ID NO: 16200 - protein, 348 aa, unidentified
  source 1..348: note = protein_4264a71
  REGION 10..152: note = RuvC_domain
  SITE 13: note = RuvC_P1
  SITE 56: note = RuvC_P2
  SITE 91: note = RuvC_P3
  SITE 93: note = RuvC_P4
  SITE 96: note = RuvC_P5
  REGION 218..306: note = Tnp_domain
  SITE 225: note = Tnp_P1
  SITE 255: note = Tnp_P2
  SITE 263: note = Tnp_P3
  SITE 264: note = Tnp_P4
  SITE 276: note = Tnp_P5
MQSTAQLPVIGLDIAKNVFQLHSVDAATGEIQRRQLKRPKVAEFFANRQPSLVAIEACGGAHHWARTLLAMGHKVKLLPAKHVRAFVLRDKTDALDAQAIWIAAQQPHIKDVSVKSEQQQACLALHSMRQQLMKMRIMQTNALRGLLYEFGIVLPVGHSKLLGSIQSEMTQAQLNNRLPDIVVLSVQEQLKRIDAMQEDIDGLSKRLIALLKQNQQMLAVQAIPGVGPLTATALVASVGDVLPFKSGRHFASWLGLTPRQVGTGGKTQQLGISKRGDTYLRTLLIAGARSIVGRSAHNGWIERLLQRRHFNVVVAAVANKMARTVWAVLAKGAAFDQVKWSPAEPVAV

SEQ ID NO: 16201 - protein, 344 aa, unidentified
  source 1..344: note = protein_a241a99
  REGION 6..146: note = RuvC_domain
  SITE 9: note = RuvC_P1
  SITE 52: note = RuvC_P2
  SITE 87: note = RuvC_P3
  SITE 89: note = RuvC_P4
  SITE 92: note = RuvC_P5
  REGION 211..304: note = Tnp_domain
  SITE 219: note = Tnp_P1
  SITE 249: note = Tnp_P2
  SITE 257: note = Tnp_P3
  SITE 258: note = Tnp_P4
  SITE 270: note = Tnp_P5
MQIDILGIDLAKRVFQLHGAIRGGAVVHRSKVSRPGLMQAIVRLQPRLVVMEACASAHHWARQLEASGIKVQLISPQFVTPFAKTNKNDRNDAEAIVEAASRPTMRFVAVKSVEQQDIQALHRMRQLLVHQRTAVINHLRGILGERGVVVAKSPAAFHSAMPAVLAAESNELTATCRGLLVESLQHLDVIERRIEEADARVRRLMSSCELSRKIGAIEGIGPLTATAVVAAVGDASAFKNGRHLAAWLGLVPRQHSSGGRSQLHGISKRGDTYLRTLLIHGARSVLRWLGEKQDAHSRWLRDLIERRGFNRAAVALANKNARIIQALLSSERAYRPRSLVAAPA

SEQ ID NO: 16202 - protein, 353 aa, unidentified
  source 1..353: note = protein_5e0c454
  REGION 12..153: note = RuvC_domain
  SITE 15: note = RuvC_P1
  SITE 58: note = RuvC_P2
  SITE 93: note = RuvC_P3
  SITE 95: note = RuvC_P4
  SITE 98: note = RuvC_P5
  REGION 217..302: note = Tnp_domain
  SITE 225: note = Tnp_P1
  SITE 255: note = Tnp_P2
  SITE 263: note = Tnp_P3
  SITE 264: note = Tnp_P4
  SITE 276: note = Tnp_P5
MSQNQDSMIAVVGIDIGKNSFHVVGNDKRGSIVLRQKWSRGQIEARLANLPPCLVGMEACVGAHHLARKLTAFGHDARLMPAKYVRPYARGQKNDFNDADAIAEAVQRPTMRFVATKTANQLDLQALHRVRERLVSQRTGVINQIRAFLLERGIAVRQGQRFLRAELPGILATPCDVLSPRMVRVIEDLAGDWRRLDERIEGLSSEIGAVARQDAGCERLMSVPGIGPIISSAMVAAIGTGDAFSKGRDFAAWLGLVPRQMSTGDRTILGKISKRGNRYLRVLFVQAAWVVLIKPKSWERYGLKPWLEAAKKRLHHNVLAIALANKLARIAWSVLARGRSFEVSKIEVSAQPA

SEQ ID NO: 16203 - protein, 408 aa, unidentified
  source 1..408: note = protein_bd2a219
  REGION 5..161: note = RuvC_domain
  SITE 8: note = RuvC_P1
  SITE 60: note = RuvC_P2
  SITE 98: note = RuvC_P3
  SITE 100: note = RuvC_P4
  SITE 103: note = RuvC_P5
  REGION 270..356: note = Tnp_domain
  SITE 278: note = Tnp_P1
  SITE 309: note = Tnp_P2
  SITE 317: note = Tnp_P3
  SITE 318: note = Tnp_P4
MTIFVGDDWAETHHDVHLMNDAGTKLATKRLPEGLHGIAAFHAMLADHANDPSEVIIGIETDRGMWVQALIAAGYTVYAVNPLSVSRYRDRHNTAGAKSDPGDAKLLADLVRTDRHNHRPVAGDTDQVGGLKVLARAHQNLIWDRTRHTNRLRSDLREYFPAALVAFGDLHDRDTIAVLGKAPHPDQARQLTTTQIRAALKRGGRKRNLDTKAAEVQEALRSPQLAAPPAVATAFAVTTRALIAVIAGLNSAIAELETELASSFEQHPDADIYLSQPGLGVVLGARVLAEFGDDPERYDNAKSRRNYAGTSPRTIASGKKRAVLARHVRNRRLYDAIDQWAFCSLSTSPGCRAFYDQRRAADDLHHQALRALGNRLVGYLHGCLTSRTLYDEHTAWAHRQQQEIPIAA

SEQ ID NO: 16204 - protein, 343 aa, unidentified
  source 1..343: note = protein_0aab861
  REGION 5..158: note = RuvC_domain
  SITE 8: note = RuvC_P1
  SITE 56: note = RuvC_P2
  SITE 97: note = RuvC_P3
  SITE 99: note = RuvC_P4
  SITE 102: note = RuvC_P5
  REGION 220..305: note = Tnp_domain
  SITE 228: note = Tnp_P1
  SITE 258: note = Tnp_P2
  SITE 266: note = Tnp_P3
  SITE 267: note = Tnp_P4
  SITE 278: note = Tnp_P5
MTIIIGIDPHKASHTAVAIDHTECVLDELRVRACAAQTDRLRSWAAPFPDRVWAIESARGLGYLLAQQLVAAGETVVDVPAVLSTRTRLLGSGKAQKNDPNDARSVAIAALRTDGLARVGVDEHAQVLKLLAKRHRDLGRLRGKAACRIHALLMELEPGGIAKRMNVTRANDLLDQVVVDTEMAAHRVGVAREFVADLAHYEAQMKTSRTRLRHAVAATSTSLTDIRGVGVVTAAMIIGHVGDVSRFKSAAHFASYNGTAPIEASSGERRRHRLNPRGNRQLNYAIHVVAITQLRYPCEGREYYDRKRAEGKSAKEAIRSLKRQISNVVYRALIADARRSSSQ

SEQ ID NO: 16205 - protein, 398 aa, unidentified
  source 1..398: note = protein_2fab35c
  REGION 6..162: note = RuvC_domain
  SITE 9: note = RuvC_P1
  SITE 60: note = RuvC_P2
  SITE 100: note = RuvC_P3
  SITE 102: note = RuvC_P4
  SITE 105: note = RuvC_P5
  REGION 267..354: note = Tnp_domain
  SITE 275: note = Tnp_P1
  SITE 306: note = Tnp_P2
  SITE 314: note = Tnp_P3
  SITE 315: note = Tnp_P4
  SITE 327: note = Tnp_P5
MFRIWAGVDIGKEHHHCVALDARGERRLSRRVGNDEPELLELIHEVLALADRGEVLWAVDTNHGSAALLIGLLLDAGQPMVYLTGLTVHRAAAGYRGQSKTDAKDAHVIADQARMRQDLGLLRPGDDVAVDLRILTGRRLDLVNDRTRQINRLREQLLEIFPALERVLPRKGRGPVVLLTGYQTPGAIRRTGVCRLESWLKNRGVKNASALAHTAVEAAQAQHIALPGERLAGAMVARIAEGLLALDAEIAELDALIEARFHAHPHAKVIETLPGMGPRLGAEFLAATGGDLAAFGTPDRLAGYAGLAPVPHDSGRIRGNLRRPCRYHRGLLRACYLAAMASIRCCPVSQRYYQRKRDEGKSHIQAVLALARRRLNVLWAMIRDHTSYELRPPTAAAA

SEQ ID NO: 16206 - protein, 339 aa, unidentified
  source 1..339: note = protein_8163acf
  REGION 6..147: note = RuvC_domain
  SITE 9: note = RuvC_P1
  SITE 52: note = RuvC_P2
  SITE 87: note = RuvC_P3
  SITE 89: note = RuvC_P4
  SITE 92: note = RuvC_P5
  REGION 210..299: note = Tnp_domain
  SITE 218: note = Tnp_P1
  SITE 248: note = Tnp_P2
  SITE 256: note = Tnp_P3
  SITE 257: note = Tnp_P4
  SITE 269: note = Tnp_P5
MKLMPVGIDIAKNVMQMHYVDEGTGEVVNKPIKRAQFLEYFANRAPCLIGMEACGGAHHWARQLTKMGHQVKLMPAEFVKAFNIRNKNDAADARAIWLAVQQPSKPVAVKTEMQQAMLALHRTRERMVAFRTMQINGLRGMLTEYGEVMGKGRAAITKAIPEVLARVADRLPAVLIDTLREQWNRVAELDEQIARIERRMREWKKDDRAVKAISEIPGVGLLTATAAVAMMGDVKAFRSGREFAAWVGLVPKQTGSGGKVNLHGISKLGDTYLRTLLIHGARSVLTNAKEPGPWIEQMKKRRPLNVVIVALANKMARTIWAVLAHDRPYQKGYVSAKPA

SEQ ID NO: 16207 - protein, 338 aa, unidentified
  source 1..338: note = protein_8ad4d25
  REGION 6..148: note = RuvC_domain
  SITE 9: note = RuvC_P1
  SITE 52: note = RuvC_P2
  SITE 87: note = RuvC_P3
  SITE 89: note = RuvC_P4
  SITE 92: note = RuvC_P5
  REGION 211..299: note = Tnp_domain
  SITE 219: note = Tnp_P1
  SITE 249: note = Tnp_P2
  SITE 257: note = Tnp_P3
  SITE 258: note = Tnp_P4
  SITE 270: note = Tnp_P5
MNIARIGIDLAKQVFQIHGVDRTEKVLVRRQLRRSQMLDYFSKLTPCLIGMEACGSAHYWARELGKLGHEVRLMAPQFVKPYVKSGKNDANDAEAICEAVGRPNMRFVAIKTAGQQVIQAEHRIRARLIKSRTALSNEIRGLLAEFGIVVETSIGRLRKALPELLEDSENGLPGSFRVLLAGLGEELRALDDSIATFDARIVQAVREDGRIRRLLEVEGIGPITASALVAAVGNGTQFNSGRDMSAWLGLTPRQYSSGGKNRLGGISKRGDKYMRMLLIHGARAALNAAKNKEDGRSRWVKSLATRRNKNIATVALANKNARIAWSILSRGESYRKAA

SEQ ID NO: 16208 - protein, 341 aa, unidentified
  source 1..341: note = protein_0e5f8de
  REGION 7..148: note = RuvC_domain
  SITE 10: note = RuvC_P1
  SITE 53: note = RuvC_P2
  SITE 88: note = RuvC_P3
  SITE 90: note = RuvC_P4
  SITE 93: note = RuvC_P5
  REGION 211..297: note = Tnp_domain
  SITE 219: note = Tnp_P1
  SITE 249: note = Tnp_P2
  SITE 257: note = Tnp_P3
  SITE 258: note = Tnp_P4
  SITE 270: note = Tnp_P5
MSEVAIIGIDLAKRVFQLHGACANGTVVFRKKLTRIQRLAFMSQQSACIVAMEACATAHSWGRQFEKLGHTVRLIAPNYVKPFVKRQKNDVADAEAIVEAASRPTMRFVELKSEAQQARAMLFRTRQMFVGQRTQTINALRGHLAEHGVVAPQGAIQVKRLADAVTDETVGLPAGVRELAKVYIVQIEDLSAQIAALDRQMKGAAKEAEAARRAQTMPGVGPITALAIETFAPDLNCFRRGRDFAAWLGLVPKQTSTGGRPRLGKTSKMGQRDIRRLLISGAMAVLQAVERFGKPHNGWLISMLERKPRMLVAVALANKMARGLWAMVTKQEDYQNPAMMA

SEQ ID NO: 16209 - protein, 289 aa, unidentified
  source 1..289: note = protein_6cb1f21
  REGION 1..98: note = RuvC_domain
  SITE 37: note = RuvC_P3
  SITE 39: note = RuvC_P4
  SITE 42: note = RuvC_P5
  REGION 161..249: note = Tnp_domain
  SITE 169: note = Tnp_P1
  SITE 199: note = Tnp_P2
  SITE 207: note = Tnp_P3
  SITE 208: note = Tnp_P4
  SITE 220: note = Tnp_P5
MEACGASHYWARELIKLGHEVKLIAPVYVKPYVKRGKSDAADAEAICEAVSRPTMRFVEVKSPEQQAILSLHRARSLVVRQRTQTINALRGLLAEFGIVFAQGVGHAIRFAKRVSQGDALDLPPTAHDTIMDLGEQLLTLHGRVLWYGRKLTQASKSEPRIALLETIPGIGPITASAIVATIGGAEQFRCGRDFAAWLGLTPLNRSTGGKERLGRISKMGDRYIRNLMVVGMTSRIKQIKTAPERFDPWFSDILERKPAKLAAIAMANKTARIIWAVLTRNEPYRIRTV

SEQ ID NO: 16210 - protein, 327 aa, unidentified
  source 1..327: note = protein_d46f21b
  REGION 9..151: note = RuvC_domain
  SITE 12: note = RuvC_P1
  SITE 56: note = RuvC_P2
  SITE 96: note = RuvC_P3
  SITE 98: note = RuvC_P4
  SITE 101: note = RuvC_P5
  REGION 191..276: note = Tnp_domain
  SITE 199: note = Tnp_P1
  SITE 228: note = Tnp_P2
  SITE 236: note = Tnp_P3
  SITE 237: note = Tnp_P4
  SITE 248: note = Tnp_P5
MAKRTTICAGIDTGKRKLDVALDGSSEQLQIDNAPEGYKVLLDWLRCHRVKRIGIEASGGYEQAVVAELRRKRVVVVVFQPAQVRAYARFHLQRAKNDKIDAALIAACTAAVKKIHPPPDARLLPFAEHLTMIDQIGEDIALLKNRLETCRNPRIQQVWKEDLARLAKRERIEFKALVAAIREHRDLAERLDLIYSVSGAGLPTAVAILVRMPEIGQLTREQAAALAGLAPYDDDSGKHVGVRHIDGGRERLRRALYTAALPASFRWNPQLITLYKRLIAAGKGHKRALIACARKLLIFVNAVVARGIPWDHERPPTVAATALPQTG

SEQ ID NO: 16211 - protein, 343 aa, unidentified
  source 1..343: note = protein_2537ca6
  REGION 5..152: note = RuvC_domain
  SITE 8: note = RuvC_P1
  SITE 55: note = RuvC_P2
  SITE 92: note = RuvC_P3
  SITE 94: note = RuvC_P4
  SITE 97: note = RuvC_P5
  REGION 212..300: note = Tnp_domain
  SITE 220: note = Tnp_P1
  SITE 250: note = Tnp_P2
  SITE 258: note = Tnp_P3
  SITE 259: note = Tnp_P4
  SITE 271: note = Tnp_P5
MDHFAGLDVSVKETSICIVDDTGRIVREVKVASEPEALLKVLGNPAYRFKRIGLEAGPLSQWLFSALAEAGLPVICVETRHMRAVLQAQINKTDRNDARGMAQMMRAGLYRPVHVKTLRSQKLRMLLTHRKLLQSKAIAIDNDLRGTLRNFGLKVGVVGTVKFEARIKELVENLPDLAELVEPLLIVRRTLREQIGILHRRLLAIVRDDEVCRRLMTVPGVGPVVALTYRATVDVPARFRNSKAVGAVFGLTPSKYQSGEINRTGAISKCGDEMMRVMLYEAAQIMLVRSAKWSWLKAWAMKIVRHRGMKKAIVALARRLAVIMHRIWVDGTEFRWTREVAAA

SEQ ID NO: 16212 - protein, 352 aa, unidentified
  source 1..352: note = protein_5d81d42
  REGION 6..163: note = RuvC_domain
  SITE 9: note = RuvC_P1
  SITE 68: note = RuvC_P2
  SITE 106: note = RuvC_P3
  SITE 108: note = RuvC_P4
  SITE 111: note = RuvC_P5
  REGION 212..299: note = Tnp_domain
  SITE 220: note = Tnp_P1
  SITE 250: note = Tnp_P2
  SITE 258: note = Tnp_P3
  SITE 259: note = Tnp_P4
  SITE 272: note = Tnp_P5
MKKIVVGIDISKEKIDASAIDVREGQIGLVKLGYQVFENRPMGFRRMIVWAKRLIKGTRHEDVLFCCETTGGYDRALCDYVYAKGLDIWRESALQIKRSMGVRKGKDDKADSLMIAEYAMRHMDKAVFYETPSEAVRELKTLFLYRYKLVQEKTEKTVRMKEMEATAAKSKSMTFILRDARKSIKAIDKSIKECERQILQIYSDNENLKKNYDHINSVSGIGIVNATAFIAYTNNFANFTTANKIASYWNCASFRERSGTSVDKKAYVKCYSSSLLKAYLTQAAECTVKNHGIYHDYYLRLNAAGKPYGVIINNVRNKLIHMVFSLVNNDMDYEENHEFIREKRKGKQKLSA

SEQ ID NO: 16213 - protein, 320 aa, unidentified
  source 1..320: note = protein_64fea6f
  REGION 4..150: note = RuvC_domain
  SITE 7: note = RuvC_P1
  SITE 51: note = RuvC_P2
  SITE 91: note = RuvC_P3
  SITE 93: note = RuvC_P4
  SITE 96: note = RuvC_P5
  REGION 190..277: note = Tnp_domain
  SITE 198: note = Tnp_P1
  SITE 228: note = Tnp_P2
  SITE 236: note = Tnp_P3
  SITE 237: note = Tnp_P4
  SITE 250: note = Tnp_P5
MTYIGIDVSKDSFVAAYPAQSGYTTKTFKNTTGGVREFIKSLPIGCHCVMEATGNYSMLLLYLLQMANITVSMENPQKIKHFARAMLSTTKTDDIDAKLIAMYGEKMEPTPYKIPSECIMMLKQKRTLLRQLKKQLTMMLNLQHSMSVLPKQDPTTKAATEQTIKFFRKKIAMLEDEITHLSNKEFKRQMELLTSIKGIGKTLASALIVATGGFAYFSNAKQISRFLGLCPTYQQSGTSVNFKGHINRNGDTYLRSQLYIAAVSSIKFNAACKETFERLKARGKSGKVAVIAVANKLIRQAFAVVTNNRPYVNGYVSALP

SEQ ID NO: 16214 - protein, 341 aa, unidentified
  source 1..341: note = protein_32e0920
  REGION 7..148: note = RuvC_domain
  SITE 10: note = RuvC_P1
  SITE 53: note = RuvC_P2
  SITE 88: note = RuvC_P3
  SITE 90: note = RuvC_P4
  SITE 93: note = RuvC_P5
  REGION 211..295: note = Tnp_domain
  SITE 219: note = Tnp_P1
  SITE 249: note = Tnp_P2
  SITE 257: note = Tnp_P3
  SITE 258: note = Tnp_P4
  SITE 269: note = Tnp_P5
MQTVTIIGVDLAKSVFQLHGAAADGSVVFRKKLARSQFRKFMASHPPCIIAMEACASSHYWAREMARLGHEPRLIAPRYVKPFVKRQKNDAADAEAIIEAAQRPTMRFVEHKTEEQQSRAILFRTREQLVGQRTELVNALRAHLYEFGYVAPQGIRYLSRLEEIVEDESARVPHLVHDVCRDLLEQIWRMTGRVEALNKKIDVLSKQADTSRRLRTMPGVGAIAALAIETFAPPMETFKRGRDFAAWLGLVPLQNSTGGKRLGKVSKMGQRDIRRLLVIGAMAVVRWASRKGAREGSWLGRMMAKKPRMLVAIALANKMARGIWAMMTKEENYRDPATVSA

SEQ ID NO: 16215 - protein, 409 aa, unidentified
  source 1..409: note = protein_e98e8e6
  REGION 4..167: note = RuvC_domain
  SITE 7: note = RuvC_P1
  SITE 64: note = RuvC_P2
  SITE 104: note = RuvC_P3
  SITE 106: note = RuvC_P4
  SITE 109: note = RuvC_P5
  REGION 275..361: note = Tnp_domain
  SITE 283: note = Tnp_P1
  SITE 314: note = Tnp_P2
  SITE 322: note = Tnp_P3
  SITE 323: note = Tnp_P4
MLFVGDDWAEDHHDVELVDEAGRTLARRRFPEGLDGITRLHALIAEHLPEPAGPADPVPLVVVGIETERGPWAAALVAAGYRVFAINPMSSARYRERHSTSGAKSDAGDAHVLAEIVRLDRAHHRQVAGDSALAEAVKLAARTHQSLIWDRTRQILRLRSALREFFPAALNAYNELDAPDTLQLLRLAPDPDQAARLTKRQVVAALARANRRHPDQMADQITAVLRAGELRQAPPVQAAFAAIVAAQVEVITTLNDQIDILGEVVADHFGRHRDAELLTSLPGLGVILAARVLGEFGDDPARYLDAKARKAYAGTAPITRASGTKKVVMARYARNQRLGDALQQWAFCSMRGSVGAKAYYNTLRARGIGHQAALRQLANRWVGILHGCLKTGQPYNETLAWNHPSTAAA

SEQ ID NO: 16216 - protein, 341 aa, unidentified
  source 1..341: note = protein_63de5c3
  REGION 7..148: note = RuvC_domain
  SITE 10: note = RuvC_P1
  SITE 53: note = RuvC_P2
  SITE 88: note = RuvC_P3
  SITE 90: note = RuvC_P4
  SITE 93: note = RuvC_P5
  REGION 211..301: note = Tnp_domain
  SITE 219: note = Tnp_P1
  SITE 249: note = Tnp_P2
  SITE 257: note = Tnp_P3
  SITE 258: note = Tnp_P4
  SITE 270: note = Tnp_P5
MLEVNTIGLDLAKNVFQAHGSDASGAVLFRKKLRRDHVLRFLAAQPACRVAMEACAGGHYWGREIARLGHNVRLITPGYVKPFVKRQKNDAADAEAICEAAQRPTMRFVAVKSEEQQAAAMVFRARDLVVRQRTQTINAIRGHLAEFGLVAAQGVFHVAKLVAAIEDKDSTIPEAARPILSLLVEQLRSLDERVAVLDREVARRAREDAEARRLMTIPGIGPITATAVTALAPSASTFKRGRDFAAWLGLTPLQRSSGGKQKLGETSRMGERTLRRLLIIGASATVRWAMRKGASMDPWLSRMLERKPPMLVIVALANKTARIVWALMARGGTYRAPALAR

SEQ ID NO: 16217 - protein, 341 aa, unidentified
  source 1..341: note = protein_9f40186
  REGION 6..148: note = RuvC_domain
  SITE 9: note = RuvC_P1
  SITE 52: note = RuvC_P2
  SITE 87: note = RuvC_P3
  SITE 89: note = RuvC_P4
  SITE 92: note = RuvC_P5
  REGION 211..297: note = Tnp_domain
  SITE 219: note = Tnp_P1
  SITE 249: note = Tnp_P2
  SITE 257: note = Tnp_P3
  SITE 258: note = Tnp_P4
  SITE 270: note = Tnp_P5
MQITTVGLDIAKNVFQVHGIDGAEKVIVRKQLRRGQVMAFFEALAPCVVGMEACATSHHWARELTKLGHEVRLMPAKDVKAYVKRNKNDAADAEAICEAVRRPTMRFVRIKTAEQQGQLMQHRTRDLLMRQRTQLINALRAHLAELGITAVQGREGIKELLAIVTQDDGSRLPVDAGASLMVLATQLQTVQTLIGSIEKRIVAQHRSNEASKRLETIPGIGVVGATTITAVMTDPKAFRSGRDFAAWIGIVPRQDSTGGKPKLRPISKQGDQYLRRILIVGAHSVLRRARQQPEKYPWLTQLLARRPFKVVAVALANKMARVAWALLAKGGTYRAPQLVAV

SEQ ID NO: 16218 - protein, 288 aa, unidentified
  source 1..288: note = protein_6622338
  REGION 11..95: note = RuvC_domain
  SITE 34: note = RuvC_P3
  SITE 36: note = RuvC_P4
  SITE 39: note = RuvC_P5
  REGION 157..242: note = Tnp_domain
  SITE 165: note = Tnp_P1
  SITE 195: note = Tnp_P2
  SITE 203: note = Tnp_P3
  SITE 204: note = Tnp_P4
  SITE 216: note = Tnp_P5
MRRSHFWGREIGKLGHDVRLIPPAYVKPFVKRQKNDATDAEAICEAAVRPTMRFVPVKSEETQGAAMIFRVRELLIRQRTQAINALRGHLTEFGQIVPQGAANASKLIAVVEDPESGIPADAIATLKVLVMALAHLEAEIGKLNAEIARRAKENDVARRLMTVPGIGPLIATAIAVLAPPPDTFRKARDFAAWLGLVPRQHSTGGKQRLGATTKMGERSLRRLLIIGANSVIIKRHVHAAAKPGTWLGGMLTRKPPMLVRVALANKMARIVWALMARGGVYKAPATAV

SEQ ID NO: 16219 - protein, 310 aa, unidentified
  source 1..310: note = protein_b78aa66
  REGION 1..112: note = RuvC_domain
  SITE 16: note = RuvC_P2
  SITE 51: note = RuvC_P3
  SITE 53: note = RuvC_P4
  SITE 56: note = RuvC_P5
  REGION 175..262: note = Tnp_domain
  SITE 183: note = Tnp_P1
  SITE 213: note = Tnp_P2
  SITE 221: note = Tnp_P3
  SITE 222: note = Tnp_P4
  SITE 234: note = Tnp_P5
MMKYFANLEPCLIGMEACGGAHYWARKLAGCGHTVKLMAPQFVKPYVKTNKNDVADAEAICEAVSRPNMRFVTVKTVEQQAILSVHRARQGFVKARTAQGNQIRGLLSEFGIIIPQGIRSILKQVPTIVEDGENGLPGTMRDLLARLSSNLKEMDRQAKELEKQILMWHRDNEASRKLEAIPGIGPMTASAMVATIGNASEFKNGRQLAAWMGLVPRQHSSGGKQNLLGISRRGDTYLRTLMIHGARAVIRFAENKAHEEGWLRKLMARRNKNVAAVALANKNARIVWALLAHERTFRPDYSPATAGAAV

SEQ ID NO: 16220 - protein, 351 aa, unidentified
  source 1..351: note = protein_a62c80a
  REGION 12..153: note = RuvC_domain
  SITE 15: note = RuvC_P1
  SITE 58: note = RuvC_P2
  SITE 93: note = RuvC_P3
  SITE 95: note = RuvC_P4
  SITE 98: note = RuvC_P5
  REGION 217..302: note = Tnp_domain
  SITE 225: note = Tnp_P1
  SITE 255: note = Tnp_P2
  SITE 263: note = Tnp_P3
  SITE 264: note = Tnp_P4
  SITE 276: note = Tnp_P5
MPAPTEIAVSVIGIDIGKNSFHIVGLDQRGAIVLRQKWSRGQVDVRLANMPPCLIGMEACVGAHHLSRKLRALGHDARLMPAKYVRPYCKGQKNDFRDAEAIAEAVQRPTMKFVATKTADQLDLQALHRVRERLVSQRTGIINQIRAFLLERGIAVRQGQRFLRVELPRILAMPPDVLSPRMVRVIEDLASDWRRLDERIETLSSEIETLARQDAGCERLMSIPGIGPIISSAMVAAIGTGDGFSKGRDFAAWLGLVPRQISTGDRTILGKISKRGNRYLRVLFVQAAWVVLVKVKPNRWDGHGLKHWIEAAKKRLHHNVLAIALANKLARIAWSVLARGRAFEASKLQAA

SEQ ID NO: 16221 - protein, 283 aa, unidentified
  source 1..283: note = protein_12d916c
  REGION 1..136: note = RuvC_domain
  SITE 43: note = RuvC_P2
  SITE 81: note = RuvC_P3
  SITE 83: note = RuvC_P4
  SITE 86: note = RuvC_P5
  REGION 181..245: note = Tnp_domain
  SITE 189: note = Tnp_P1
  SITE 218: note = Tnp_P2
  SITE 226: note = Tnp_P3
  SITE 227: note = Tnp_P4
  SITE 240: note = Tnp_P5
MLTAEADKCKTKVVVNTAAGVQALLAWCAKHGAQPAQLHAILEPTGLYHEQAATALPQVRVSLVNPAQARDFAKALALRSKNDALDSYVLARYGQTLSPALWHPAPLHARQLRALLTRREALSKDLLRELNRKEKSQFSPSAPLVDGSIDKAIAFLREQIKQIERAIDQHIDNHPDLKQDCELLNSIPAIGPQAGNAILAVMHNRHIDSAQSLAAYLGVVPVQRQSGSSLNSCARLSKAGPPRCAPRYTWRPWLGPATTPTSAPFTSACSKQEKAKRPRWARP

SEQ ID NO: 16222 - protein, 339 aa, unidentified
  source 1..339: note = protein_6f96615
  REGION 6..147: note = RuvC_domain
  SITE 9: note = RuvC_P1
  SITE 52: note = RuvC_P2
  SITE 87: note = RuvC_P3
  SITE 89: note = RuvC_P4
  SITE 92: note = RuvC_P5
  REGION 210..295: note = Tnp_domain
  SITE 218: note = Tnp_P1
  SITE 248: note = Tnp_P2
  SITE 256: note = Tnp_P3
  SITE 257: note = Tnp_P4
  SITE 269: note = Tnp_P5
MNYTTVGVDIAKSVMQLHWIEPATGEIMNKPVKRAVFLEHFANRAPCLIGMESCGGSQHWARRLIEMGHQVKLMPAKFVKAFNTGNKNDAADARAIWMATQMPAKAIAVKSEAQQAVLALHRIREQKVKFRTAQINCLRGLLTEYGEVMGKSRAALDKAIPGVLERLADRLPAMLIESLREQWNGLDGLDQEIAGIERRLHTWMKEDKACKAIAAIPGVGLLTATAAVATMGDPKAFTSGREFAAWLGLVPKQTGSGGKVQLLGISRRGDTYLRTLLIHGARSVLYHAKEPGAWVEQLGKRRPKNVVIVALANRMARTIWAMLAHDRPYDKAYVSVKPA

SEQ ID NO: 16223 - protein, 411 aa, unidentified
  source 1..411: note = protein_66b7462
  REGION 5..164: note = RuvC_domain
  SITE 8: note = RuvC_P1
  SITE 61: note = RuvC_P2
  SITE 101: note = RuvC_P3
  SITE 103: note = RuvC_P4
  SITE 106: note = RuvC_P5
  REGION 272..358: note = Tnp_domain
  SITE 280: note = Tnp_P1
  SITE 311: note = Tnp_P2
  SITE 319: note = Tnp_P3
  SITE 320: note = Tnp_P4
MRLFVGDDWAEDHHDVELMDAGGRVLAKRRLPEGIAGMARLHEMIGQQLGEDADDAEVAVGIETDRGPWVAALAAAGCTVYGVNPLQASRYRERHGVSGAKSDSGDAHMLTDMVRTDSHQLRAVAGDSADAEGIKVLARTHKTLIWERTRQARRLRHQLLAYFAAALEAFDDLDAPDALELPGKAPDPARAAKLTRAQVSAALKRARRRNIPDKATAILAALRSEHLGQPPAVTAAYAATVRSLIAVITVLNEQVKVLQGQVEADFGRHPDAEIYRSQPGIGAVLGARALGELGDDPDRHADGKARRNYAGTSPLTRASGKKKVVAARFIHNDRLVDALNAQAFAALNASPGARALYDELRARGIEHNDALRRLANRLVGILHGCLKTRTLYDEATAWSHRQNLPQSSVAA

SEQ ID NO: 16224 - protein, 356 aa, unidentified
  source 1..356: note = protein_b58c661
  REGION 29..170: note = RuvC_domain
  SITE 32: note = RuvC_P1
  SITE 75: note = RuvC_P2
  SITE 110: note = RuvC_P3
  SITE 112: note = RuvC_P4
  SITE 115: note = RuvC_P5
  REGION 231..319: note = Tnp_domain
  SITE 239: note = Tnp_P1
  SITE 269: note = Tnp_P2
  SITE 277: note = Tnp_P3
  SITE 278: note = Tnp_P4
  SITE 290: note = Tnp_P5
MRWSPHPVSGTWQGVFFLKGIIMQNVTLIGIDLGKDSFHVHCQDEKGHALLRKKFSRTQRMHFLASCKAATVMMESCGGAHFMGRRIADLSHEAKLISPHFVRPFVKSNKNDFVDAEAICEAASRPSMRFVTPRTEAQQAMSALHRVRDSLIRQRVKTTNQMHAFLLEFGVSLPRGIALIRRLTVVLEENDFPPYLVRVLNRLHSQYVYLSWEIDEIDNELKTHLTEDETAQRLLSIPGVGPVTASLLATRQGDGKNYASSRDFAASPWRVPRQYSTGGKMPLMGISKRGNKNLRRLLVQCARVFMQRLEHNPGRLSEWVKKQLASHHSNVVACALANKLARIVWAVTAHQAAFSK

SEQ ID NO: 16225 - protein, 393 aa, unidentified
  source 1..393: note = protein_99fec8a
  REGION 4..163: note = RuvC_domain
  SITE 7: note = RuvC_P1
  SITE 60: note = RuvC_P2
  SITE 101: note = RuvC_P3
  SITE 103: note = RuvC_P4
  SITE 106: note = RuvC_P5
  REGION 266..355: note = Tnp_domain
  SITE 274: note = Tnp_P1
  SITE 304: note = Tnp_P2
  SITE 312: note = Tnp_P3
  SITE 313: note = Tnp_P4
  SITE 328: note = Tnp_P5
MICVGIDVAKDKHDCFILSSEGKVLADVFTIPNNAEGFGTLLQTILRCTRPTDKIKVGLEATGHYSYNILGFLLDKGLPTYVINPLHTNLYRKSLSLRKTKTDRVDARTIAAMLMSDVDLKSYTDTAYHNEELKSLTRYRFDKVRERAKLKQSVSRLVTILFPELEKLVSSLHMASVYAVLGEFPGAKQIAGAHLTHLKTLLNDASKGHYGRDMATEFRNAARCSVGSVMPAKSLELQHTIRLIRELDTEINDIETAIQAIMEEMQSPITTIPGIGIRMGAMILAEIGDFSRFDSPDKILAYAGMSPSTYQSGQLSLSGAYSHMEKRGSRYLRYALYNATKYVCLWDPTFEAYLAKKRAEGKHYNVALSHAAKKLVRLIYAMEKSRRPYNRAA

SEQ ID NO: 16226 - protein, 352 aa, unidentified
  source 1..352: note = protein_b921965
  REGION 4..163: note = RuvC_domain
  SITE 7: note = RuvC_P1
  SITE 60: note = RuvC_P2
  SITE 101: note = RuvC_P3
  SITE 103: note = RuvC_P4
  SITE 106: note = RuvC_P5
  REGION 267..346: note = Tnp_domain
  SITE 274: note = Tnp_P1
  SITE 304: note = Tnp_P2
  SITE 312: note = Tnp_P3
  SITE 313: note = Tnp_P4
  SITE 326: note = Tnp_P5
MIFVGIDVAKDKHDCFILNSEGTVLADVFTIANNRIGFETLLSRIQSCSQGESKIKVGLEATGHYSYNLLGFLLDSGLATYVINPLHTNLYRKSLSLRRTKTDRIDARTIAMMLMSDVDLKSYSNTAYHNEELKSLTRYRFDKVKERAKLKSSVARLVNILFPELEKLVSSLHIAVVYALLSNYPGASYIANANTEELAETLCTASKGRYTKSKTAKIQVAAGVSIGSKMPAKSMELKHTIALIRELDKEISEVESAIDKITSQMDSPIFTIPGIGRHMGAMILAEVGDFSNFASADKLLAYAGLSPSTYQSGQLQNCYAHMEKRGSRYLRYALFQCRQICLPLVSYILGLS

SEQ ID NO: 16227 - protein, 335 aa, unidentified
  source 1..335: note = protein_94362e3
  REGION 6..148: note = RuvC_domain
  SITE 9: note = RuvC_P1
  SITE 52: note = RuvC_P2
  SITE 87: note = RuvC_P3
  SITE 89: note = RuvC_P4
  SITE 92: note = RuvC_P5
  REGION 211..300: note = Tnp_domain
  SITE 219: note = Tnp_P1
  SITE 249: note = Tnp_P2
  SITE 257: note = Tnp_P3
  SITE 258: note = Tnp_P4
  SITE 270: note = Tnp_P5
MKTPVIGMDIAKHVFQLHAVNVATGKIERVKLKRGDVSNFFAKRERSLVVIEACGSAHHWARQLRQFGHDVRLICAHSVRPFVLRNKSDAADARAIWTAAQQPEARFVAIKSEAQQSVLALHRIRAQLMKVRIMQTNALRSILYEFGEILSGGYQSFAKEIAPALTRTSERLPSMLVDSLREQWARIQAVNEDIAVLERRLSHALRDSPECQRIAEIPGVGLLTATATVSMIGDPATFHSGREFAAWLGLVPRQTGTGGRIRQLGLSKRGNTYLRTLLMHGARAVIARCTHTPWLDDLLARRPFNVAVAAVANKLARTIWALLSRQTRYEAPVHA

SEQ ID NO: 16228 - protein, 343 aa, unidentified
  source 1..343: note = protein_acd0658
  REGION 6..148: note = RuvC_domain
  SITE 9: note = RuvC_P1
  SITE 52: note = RuvC_P2
  SITE 87: note = RuvC_P3
  SITE 89: note = RuvC_P4
  SITE 92: note = RuvC_P5
  REGION 211..298: note = Tnp_domain
  SITE 219: note = Tnp_P1
  SITE 249: note = Tnp_P2
  SITE 257: note = Tnp_P3
  SITE 258: note = Tnp_P4
  SITE 270: note = Tnp_P5
MQVVRIGLDLAKYVFEVHGVDNHGKVVVRKRLRRDAVAGFFANLPACLVGMEASNGAHYWARVLTELGHQVRLISPQFVTPYVKSNKNDQNDAEAICEAVGRPSMRFVPPKSTDQLAVQAVHRIRRRLVADRVRLVNQIRGLLSEHGIVIARDIAQLRRGLAVIVGSINDGLGEMLRALMRELQEELSELDTRIAAHDRRIREIFRTSEQCQRLGKIEGVGPVTATALIAAVGDRSCFKNGRQFAAWLGLVPKQRSSGGRARLFGISKRGDRYLRTLMIHGARAALSRATGKQDPRSLWLGKMRQRRHPNVVAVALANKNARIVWAMLTGDAAYEPALSVKAA

SEQ ID NO: 16229 - protein, 412 aa, unidentified
  source 1..412: note = protein_b75d163
  REGION 4..170: note = RuvC_domain
  SITE 7: note = RuvC_P1
  SITE 67: note = RuvC_P2
  SITE 107: note = RuvC_P3
  SITE 109: note = RuvC_P4
  SITE 112: note = RuvC_P5
  REGION 278..364: note = Tnp_domain
  SITE 286: note = Tnp_P1
  SITE 317: note = Tnp_P2
  SITE 325: note = Tnp_P3
  SITE 326: note = Tnp_P4
MLFVGDDWAEDHHDVEIVDDTGQVLARRRLPEGLDGVTRLHALIGEHAPVEWADLEPDRAAAMVKVGIETDRGPWVAALAAAGYEVFAINPMSVARYRERHSTSGAKSDAADAHLLAEIVRVDRAHHRPLAGDSAGGEAIKLTARAHQSLVWDRTRHVLRLRSALRDFFPAALKAFRDLDAPDTLELLARAPGPDKAARLTKSRIEATLKRARRHHVETKATELASILGEDQLRQPPPIQSAYEAVVSSEVAIIAALNTQIDQLGTVVAAHFGQHPDAEIYASQPGLGTILAARVLGEFGDDPHRYADAKARKNYAGTSPITRASGTRKVVLARYARNRRLADALQQWAFSAMRGSPGAKTYYQQLRARNIGHQAALRQLANRLVGILHGCLKTHTRYDEHTAWAHLTTAAA

SEQ ID NO: 16230 - protein, 349 aa, unidentified
  source 1..349: note = protein_fc6ab03
  REGION 9..164: note = RuvC_domain
  SITE 12: note = RuvC_P1
  SITE 68: note = RuvC_P2
  SITE 108: note = RuvC_P3
  SITE 110: note = RuvC_P4
  SITE 113: note = RuvC_P5
  REGION 209..296: note = Tnp_domain
  SITE 217: note = Tnp_P1
  SITE 247: note = Tnp_P2
  SITE 255: note = Tnp_P3
  SITE 256: note = Tnp_P4
  SITE 269: note = Tnp_P5
MKKVLKQVLGVDVAQKELVVTLGRMFNDLSVDLYAYKVFKNNKNNFASLLKWLDSLIEKDIEIQFVMEATGVYHQKFAYFLEEKGLNLSIVLPNKISNYMRTLNTKTVTDKTASQAICRFGLERQLDAWKRPKKIYKELQQLTRERSQIVDERVIVKNQLHAEKSEAEPNQSSLKRLKSRIKFLNKQEKEIKLEIQEMINLDLNLKKEVQNICTIPGVGVLTAVTVLAETNGFELIRNKKQLTSYAGLDVKQKQSGTSVNKRTKISKQGNKNLRKSLHLPSLSAVKYNNTHKELYIRLVAKSGIKMKGLIAVQRKLLELIYVIYKNKKGFIQDYEQQKRATLLEIEIAL

SEQ ID NO: 16231 - protein, 332 aa, unidentified
  source 1..332: note = protein_cd4e74c
  REGION 4..163: note = RuvC_domain
  SITE 7: note = RuvC_P1
  SITE 60: note = RuvC_P2
  SITE 101: note = RuvC_P3
  SITE 103: note = RuvC_P4
  SITE 106: note = RuvC_P5
  REGION 267..325: note = Tnp_domain
  SITE 274: note = Tnp_P1
  SITE 304: note = Tnp_P2
  SITE 312: note = Tnp_P3
  SITE 313: note = Tnp_P4
MVCVGIDVAKDKHDCCILDSDGMVRADCFTIPNNMDGFKQLLQTIRNCTKKSDKIKVGLEATGHYSYNILGFLLDNDLAVYVMNPLHTNLYRKSLSLRKTKTDRVDARTIATMLLSDVDLKSYTDTAYHNEELKSLTRYRFDKVRERAKLKQSVSRLVTILFPELEKLVPSLHIASVYSLLSEYPGAKQVSEVHLTKLTNLLTTASKGRYGKDKAIQIRDAAKTSIGSVMPAKSLELKHTIKLIKELTSEIDEIEDSIQQIMDELHPPILSIPGVGIQSAAMILAEIGDFSNFESPDKSLLTLAALPSTYQSGKTYKLLRSYGKAWFTLFAI

SEQ ID NO: 16232 - protein, 341 aa, unidentified
  source 1..341: note = protein_8f165dc
  REGION 6..147: note = RuvC_domain
  SITE 9: note = RuvC_P1
  SITE 52: note = RuvC_P2
  SITE 87: note = RuvC_P3
  SITE 89: note = RuvC_P4
  SITE 92: note = RuvC_P5
  REGION 211..297: note = Tnp_domain
  SITE 219: note = Tnp_P1
  SITE 249: note = Tnp_P2
  SITE 257: note = Tnp_P3
  SITE 258: note = Tnp_P4
  SITE 270: note = Tnp_P5
MSVKTIGIDLAKEVFQIHGIDEHGNRLFNKQLKRAKMLSFFANIPPCLIGMEACASAHFWAGKLISMGHNVKLMAPQFVKPYVKTNKHDAADAEAICEAVTRPNMRFVPVKSPEQQAVLALHRSRQSFIKQRTAQANQIRGLLAEFGLVVPRGIQRLQLQLPEILEDADNSLPSLFRVQLSLLQHHMTYLFDVIATLDKQIEQCYRQNALCQRIGKIPGIGPVTATALIATIGNASNFENSRQLAAWLGLVPRQNSSGGKQVLLGISKRGDVYLRTLLIHGARAVLQSVKRKQDAVSGWASRLLARRNNNIASVALANKNARIVWALLAKDQEYGAAVMNV

SEQ ID NO: 16233 - protein, 348 aa, unidentified
  source 1..348: note = protein_c735086
  REGION 13..155: note = RuvC_domain
  SITE 16: note = RuvC_P1
  SITE 59: note = RuvC_P2
  SITE 94: note = RuvC_P3
  SITE 96: note = RuvC_P4
  SITE 99: note = RuvC_P5
  REGION 218..304: note = Tnp_domain
  SITE 226: note = Tnp_P1
  SITE 256: note = Tnp_P2
  SITE 264: note = Tnp_P3
  SITE 265: note = Tnp_P4
  SITE 277: note = Tnp_P5
MKNISRNKMITTVGIDLAKGVFHLHGVDAQGEFVVRKRLNRSKLIEFMAQLTTCLVAMEACGGSHYWARKFEDMGHDVRLISPQFVKPYVKGNKNDEADAEAICEAVQRPNMRFVPIKNIEQQDIQSIHRAREQVVCRRTAQGNQIRGLLMEYGLVIPQGRKVLCGQLPDILADADNGLSLMFRDLLSGLWEEMIHLEQRVAEYDLQIETLSKQSEVCQRLMKVPGVGPMVATALVASVADGKVFKSGREMAAWLGLVPRQHSTGGKPKLLGISKRGDTYLRKLIIHGARAALRWTDKKNDKRSVWATSLKERRGQNVAAVALANKIVRTAWVLITRNEDYQMSTAKI

SEQ ID NO: 16234 - protein, 397 aa, unidentified
  source 1..397: note = protein_2c82f6b
  REGION 4..162: note = RuvC_domain
  SITE 7: note = RuvC_P1
  SITE 59: note = RuvC_P2
  SITE 99: note = RuvC_P3
  SITE 101: note = RuvC_P4
  SITE 104: note = RuvC_P5
  REGION 272..360: note = Tnp_domain
  SITE 280: note = Tnp_P1
  SITE 310: note = Tnp_P2
  SITE 318: note = Tnp_P3
  SITE 319: note = Tnp_P4
  SITE 332: note = Tnp_P5
MISVGIDVAKEKSVVAIMNEERKLLKKVVTLNHTMSEISAFIELLSFYQEDEEVRIIMEATGYYHEPVLQLLCESGFKVYVVNALVIKKYNDAKLRQVKTDKQDAIKLAEYLLGNHYQLREHKEEGSKYQELRFYAREYHKSMAIKVKIKNQLTQLIDKCFPGIKKIYHNNMEGTLLDVLEKYPTIDHVSRLGQKRFSNLFIKWATKKGHRIAEKKAVQIYELTLKGVQTVPSSECAEMMMRLLIKSLREQIEITTSILTQMKTIAESIPEYGVVREMSGVGDRTGPRLLAEIGDIRRFRSSRALVAYAGIDVSPYQSGQFEARERKITKRGSKYLRKVLYEIVQSLKTVKPTRDSAVYQYVLRKELEGKASKKAKVAGMNKFLRIYYARVMEVYQL

SEQ ID NO: 16235 - protein, 342 aa, unidentified
  source 1..342: note = protein_3fd5e8b
  REGION 6..148: note = RuvC_domain
  SITE 9: note = RuvC_P1
  SITE 52: note = RuvC_P2
  SITE 87: note = RuvC_P3
  SITE 89: note = RuvC_P4
  SITE 92: note = RuvC_P5
  REGION 211..296: note = Tnp_domain
  SITE 219: note = Tnp_P1
  SITE 249: note = Tnp_P2
  SITE 257: note = Tnp_P3
  SITE 258: note = Tnp_P4
  SITE 270: note = Tnp_P5
MKATTIGIDLAKHLFQLHGVDQHGKTVLKRQLKRGQMISFFSNLPPSLIGMEACGSAHYWANKLQGLGHTVKLMAPQFVKPYVKTNKNDAADAEAICEAVTRPTMRFVPIKSSEQLAILALHRARQGFIKARTAQANQIRGLLAEYGFILPQGITHIGKHVPELLEDSENGLPGTFRHLLMRLHEHLKMLDKQVNELEDAIVRWHKDSAASQTLAQLPGIGPITASALVASIGNAKNFKNGRQLAAWLGLVPRQHSSGGKQNLLGISKRGDSYLRTLLIHGARAVLRVAERKESFSGSWLAGVMARRNPNVAAVAQANKTARIIWALLAHDRKYDAHYGMAA

SEQ ID NO: 16236 - protein, 343 aa, unidentified
  source 1..343: note = protein_729bb49
  REGION 6..146: note = RuvC_domain
  SITE 9: note = RuvC_P1
  SITE 52: note = RuvC_P2
  SITE 87: note = RuvC_P3
  SITE 89: note = RuvC_P4
  SITE 92: note = RuvC_P5
  REGION 211..296: note = Tnp_domain
  SITE 219: note = Tnp_P1
  SITE 249: note = Tnp_P2
  SITE 257: note = Tnp_P3
  SITE 258: note = Tnp_P4
  SITE 270: note = Tnp_P5
MQIRSVGIDLGKTTFHLVALDDNGTVLIRRKFTQRQLITFTANLQTSLIGMEACGGAHFLGRMLRAQGHDVKLIPAQFVKPFVKSNKNDFLDAEAIAEAVDRQNMRFVPIKTDDQLDLQALHRVRDRLIARRTSVINQLRAFLLERGLVFAKSPAKLRERMPEILENAEEDITPRMRNLLALLWNEWTDLESQLEEMNDEVERIASSDAACMRLRQIPGIGPLVATAIVAAIGNGAAFHKGREFAAWLGIVPRQYSTGGKARLYGISKRGNNYLRKILIHGARAVVLRSKRERIAMGAWMTALEARAPRNVLIVATANKLARIAWAVLSTGQDYRAVQDPVPA

SEQ ID NO: 16237 - protein, 339 aa, unidentified
  source 1..339: note = protein_36b01a6
  REGION 6..147: note = RuvC_domain
  SITE 9: note = RuvC_P1
  SITE 52: note = RuvC_P2
  SITE 87: note = RuvC_P3
  SITE 89: note = RuvC_P4
  SITE 92: note = RuvC_P5
  REGION 210..297: note = Tnp_domain
  SITE 218: note = Tnp_P1
  SITE 248: note = Tnp_P2
  SITE 256: note = Tnp_P3
  SITE 257: note = Tnp_P4
  SITE 269: note = Tnp_P5
MKYTTVGVDIAKNVFQLHWVDAGTGEIVSKQLKRAVFLEHFANREPCLIGMEACGGSQHWARRLTEMGHQVKLMPAKFVKAFNIGNKSDPADARAIWMATQMPSKPVAVKTEAQQAVLALHRLRQQRIKFRTMQMNTLRGLLAEYGEVMAKSRAALDKAIPGVLARLAERLPAMLIDSLRELWSDLDRLDRQIADIERRLQAWMKEDRACKAIAAIPGVGLLTATATVATMGDAKAFRSGREFAAWLGLVPKQIGTGGKIQLLGISRRGDTYVRTLLIHGARSVLYHRKHAGAWAEQLQKRRPSNVVAVALANKMARTIWAILAHDRPYDPGHLTPNAA

SEQ ID NO: 16238 - protein, 343 aa, unidentified
  source 1..343: note = protein_c3f097e
  REGION 6..147: note = RuvC_domain
  SITE 9: note = RuvC_P1
  SITE 52: note = RuvC_P2
  SITE 87: note = RuvC_P3
  SITE 89: note = RuvC_P4
  SITE 92: note = RuvC_P5
  REGION 211..294: note = Tnp_domain
  SITE 219: note = Tnp_P1
  SITE 249: note = Tnp_P2
  SITE 257: note = Tnp_P3
  SITE 258: note = Tnp_P4
  SITE 270: note = Tnp_P5
MEVVVLGIDLGKNSCSVVGLDQAGRVVLRRRMRRESVIKLGASLPACTMAMEACCGAHHLGRILEAQGHKVRLMSPEYVRPYVKAQKNDDRDAEAIAEAATRPTMRFVELKDEEQLDMQTLHRARDRLVGERTALINQLRAILLERGITAPQGRRKLAIWLDLARSNGELLLGRRVAVLIEDMQAQWSELDRRIQAFDEEFKSYALADAACRLLTSIPGIGPLNATALTASIGEAQLFTRGRDLAAWLGLVPRQMTTGGKPRMLGITKRGNKYLRKMLIHGARAALPTLSSATTPLGAWLRGLLGRAHKNTVVVALAAKLARIVCGVLKSGRPFDHGVTPAAA

SEQ ID NO: 16239 - protein, 344 aa, unidentified
  source 1..344: note = protein_47d8656
  REGION 6..148: note = RuvC_domain
  SITE 9: note = RuvC_P1
  SITE 52: note = RuvC_P2
  SITE 87: note = RuvC_P3
  SITE 89: note = RuvC_P4
  SITE 92: note = RuvC_P5
  REGION 211..296: note = Tnp_domain
  SITE 219: note = Tnp_P1
  SITE 249: note = Tnp_P2
  SITE 257: note = Tnp_P3
  SITE 258: note = Tnp_P4
  SITE 270: note = Tnp_P5
MQVITFGIDLAKNVFQIHGVDAAGHTVVKKQLKRDQLAPYFANVAPATIGMEACSSAHYWARKLQGMGHSVKLMAPQFVKPYVKGNKNDANDAEAICEAVARKSMRFVPIKNVEQQALLSLHCVRQGFVAERTAYSNRIRGLMGEFGFVIPQGMHYISERVHDLIEDANNELPGMFRENVDRLLQHLQELNRHVHELEMKIQGWHRSNEASQKLAAIPGIGPLTASALIASIGDAKNFKSGRELSAWLGLVPRQHSSGGKQNLLGISKRGDLYLRMLLVQGAHSVINASCRKGVEAGWLPGLLKRRNHNVAAVAVANKNARIAWALLARERQYETRYSRDTALT

SEQ ID NO: 16240 - protein, 350 aa, unidentified
  source 1..350: note = protein_6036628
  REGION 11..152: note = RuvC_domain
  SITE 14: note = RuvC_P1
  SITE 57: note = RuvC_P2
  SITE 92: note = RuvC_P3
  SITE 94: note = RuvC_P4
  SITE 97: note = RuvC_P5
  REGION 216..301: note = Tnp_domain
  SITE 224: note = Tnp_P1
  SITE 254: note = Tnp_P2
  SITE 262: note = Tnp_P3
  SITE 263: note = Tnp_P4
  SITE 275: note = Tnp_P5
MSQILSTVAVIGIDIGKNSFHVVGLDDRGAIVLRQRWSRGQIETRLANMLPCLIGMEACVGAHHLSRKLKAFGHDARLMPAKYVRPYSKGQKNDFRDAEAIAEAVQRPTMKFVATKTADQLDLQALHRVRERLVSQRTGIINQIRAFLLERGIAVRQGLRFLRAELPRILAMPADVLSPRMVGLIEGLAEDWRRLDERIDRLSGEITALARQDAGCERLVSVPGVGPIISSAMVAAIGTGEAFSKGRDFAAWLGLVPKQISTGDRTILGKISKRGNRYLRVLFVQAAWVVLIKPQSWQRHGLKPWIEAAKRRLHRNVLAIALANKLARIAWSVLARGRTFEVRSAMMPAA

SEQ ID NO: 16241 - protein, 345 aa, unidentified
  source 1..345: note = protein_966f3c2
  REGION 6..147: note = RuvC_domain
  SITE 9: note = RuvC_P1
  SITE 52: note = RuvC_P2
  SITE 87: note = RuvC_P3
  SITE 89: note = RuvC_P4
  SITE 92: note = RuvC_P5
  REGION 212..297: note = Tnp_domain
  SITE 219: note = Tnp_P1
  SITE 249: note = Tnp_P2
  SITE 257: note = Tnp_P3
  SITE 258: note = Tnp_P4
  SITE 270: note = Tnp_P5
MQITTVSVDLAKAVFQLHAIDQQGKTALRKQLKRDQVVPFFANLEPCLVGMEACGGAHYWARKLQALGHTVKLMAPQFVKPYVKSNKNDVADAEAICEAVTRPNMRFVPIKTVEQQAILAVHRARQGFVKARTAQANSIRGLLGEFGVVLPQGIRHIVERLPDILEDHENALPGSLRQLMQRLMEHFKELDRQVVELEREIQQWHRSNEDSCRLAEIPGVGPLTATALVASVGDAKNFSNGRQMAAWLGLVPRQHSSGGKPTLLGISKRGDGYLRTLLIHGSRSMVRVVESKTDPSADWLKGLLARRHTNVAVVAQANKTARIAWALLAHGGKFRPDYTPDVTVA

SEQ ID NO: 16242 - protein, 398 aa, unidentified
  source 1..398: note = protein_047aef7
  REGION 6..162: note = RuvC_domain
  SITE 9: note = RuvC_P1
  SITE 60: note = RuvC_P2
  SITE 100: note = RuvC_P3
  SITE 102: note = RuvC_P4
  SITE 105: note = RuvC_P5
  REGION 267..354: note = Tnp_domain
  SITE 275: note = Tnp_P1
  SITE 306: note = Tnp_P2
  SITE 314: note = Tnp_P3
  SITE 315: note = Tnp_P4
  SITE 327: note = Tnp_P5
MSRIWAGTDCGKTHHHTLVMDAEGDTLLSRRVANDEPELLKLIGDVLDLADDREVTWAMDMTGGEPALLIALLINHDQELVYIPGIAVNRASAGYRGAGKTDARDARVIADQARMRRDLQPIRPGDDASIELRLLTERRTDLVADRTRTTNRLKALLNSMFPALERALDIGTAGSLLLLTGYQSPAAIRRTGLRRLTTWLRNRKVRNPEALAAKAVEAAERQHTAVAGESAIAKMVHTLAKEVMTLNEKITETDKLIESRFREHELAEVIQSLPGVGTTLGAEFLVAVGGSLEAFPSPDRLAAFAGVAPTPRDSGKVTGNHHRPQRYHRRLQRVFYTSALVSIQCDPNSRKFYDRKRAEGKRHVQAVLALARRRVNVLWALIRDRRCYQVTPPVTTAA

SEQ ID NO: 16243 - protein, 303 aa, unidentified
  source 1..303: note = protein_6271c19
  REGION 5..152: note = RuvC_domain
  SITE 8: note = RuvC_P1
  SITE 55: note = RuvC_P2
  SITE 92: note = RuvC_P3
  SITE 94: note = RuvC_P4
  SITE 97: note = RuvC_P5
  REGION 212..297: note = Tnp_domain
  SITE 220: note = Tnp_P1
  SITE 250: note = Tnp_P2
  SITE 258: note = Tnp_P3
  SITE 259: note = Tnp_P4
  SITE 271: note = Tnp_P5
MEHYAGLDVSLELTSVCIVDARGGIICEVKVASEPEALIRFLSDQGLELARVGLEAGPLSQWLHAALMDAGFETVLLETRHVKAALSAMTVKTDRRDARGIAQLLRLGWYRRVHAKSASAQEVRSLLTARKLIQAKLLDLESGIRGVLRGFGLKVGPISRGRFEARIRELVDGHTMLETVIGSMLSARTALQQEFASLHRTMLTLVRADPVCRQLMTVPGVGAIVAITFKSGVDDPTRFRRSRDVGPHFGLTPRKYQSGELDVTGSISKVGDRMVRTALYEAASVMLTRTVRITTEELGDGRG

SEQ ID NO: 16244 - protein, 341 aa, unidentified
  source 1..341: note = protein_fa518fe
  REGION 5..147: note = RuvC_domain
  SITE 8: note = RuvC_P1
  SITE 51: note = RuvC_P2
  SITE 86: note = RuvC_P3
  SITE 88: note = RuvC_P4
  SITE 91: note = RuvC_P5
  REGION 209..291: note = Tnp_domain
  SITE 217: note = Tnp_P1
  SITE 247: note = Tnp_P2
  SITE 255: note = Tnp_P3
  SITE 256: note = Tnp_P4
  SITE 268: note = Tnp_P5
MDTMIGVDLAKSVFQLHGAAMTGEVVFRKKLTRQQFVKFMSDHAPAVVVMEACGGAHYWARVMADLGHKVRLIAPQYVRPFVKRQKNDAADAEAIVVAAQRPEMRFVDPKTEEQQARAALFRSRDRLVRQRTELINALRGVLYEHGHAFPAGARNLGRIQTLLCDPDNGLHPLVLADCHDLLEQISEKSERIDARTRTTAALSAQASVTRRLQTIPGVGPLTALAVETFAPPMESFESGRAFAAWLGIVPRQHSSGGKQRLGKISKAGQGDIRRLLIMGAMTRLTPRGRRGVPEGSWLARLLERKPRMLVAIALANKMARQIWALLRKQEDYREPAQMAAA

SEQ ID NO: 16245 - protein, 345 aa, unidentified
  source 1..345: note = protein_166334c
  REGION 6..147: note = RuvC_domain
  SITE 9: note = RuvC_P1
  SITE 52: note = RuvC_P2
  SITE 87: note = RuvC_P3
  SITE 89: note = RuvC_P4
  SITE 92: note = RuvC_P5
  REGION 211..294: note = Tnp_domain
  SITE 219: note = Tnp_P1
  SITE 249: note = Tnp_P2
  SITE 257: note = Tnp_P3
  SITE 258: note = Tnp_P4
  SITE 270: note = Tnp_P5
MQIAVLGIDLGKNSCSVVGVDERGQVVLRRRLRREGVVKLGATLPSCIMAMEACCGAHHVGRQLRSQGHDVRLMSPEYVRPYVKAQKNDDRDAEAIAEAATRPTMRFVDIKEEEQLDMQTLHRARDRLVGERTALINQLRAILLERGITVPQGRRKLEIWLDLNTDEERVSLSRRTVALIADMRAQWSEMDRRIAAFDQEFKAYARSDQPCRLLGTIPGIGPLNATALVATVGDARTFGRGRDLAAWLGLVPRQMTTGGKPKLLGITKRGNGYLRKMIIHGARAALPVLSKSATPLGEWLRALLGRAHKDKAIVALAAKLARIVWAVLQSGRAYNNNGLEPVAQA

SEQ ID NO: 16246 - protein, 346 aa, unidentified
  source 1..346: note = protein_d6ad3bb
  REGION 7..149: note = RuvC_domain
  SITE 10: note = RuvC_P1
  SITE 53: note = RuvC_P2
  SITE 88: note = RuvC_P3
  SITE 90: note = RuvC_P4
  SITE 93: note = RuvC_P5
  REGION 212..299: note = Tnp_domain
  SITE 220: note = Tnp_P1
  SITE 250: note = Tnp_P2
  SITE 258: note = Tnp_P3
  SITE 259: note = Tnp_P4
  SITE 271: note = Tnp_P5
MKQITTIGLDLAKQIFQVHGADADGSPVFNRRLRLGEVLRFFEKHPSCLVGIEACGSSHYWAREIAALGHEVRLMPPAYVKPFVKRGKTDAADAEAISEAVVRKTMRFVPVKSVEQQAAAIVLKTRGLLVRQQTQLINALRAHLSELGIVVGTGRAKVAGLVEIVRDETDVRLPKAARFALSAIADQIEALARQIDRLGREIVAEAKRDKDMRRLTTIPGVGAITAASIKALVPDPAGFKSGRHLAAWLGLTPRPHSSGGKERLGRISKMGNPELRSLLVLGATAVLRHARGNTNASKWLVALMARRPYKVAAVALANKMARIIWALLTKGGTYRNMEAATPAASA

SEQ ID NO: 16247 - protein, 350 aa, unidentified
  source 1..350: note = protein_9368bb6
  REGION 7..147: note = RuvC_domain
  SITE 10: note = RuvC_P1
  SITE 53: note = RuvC_P2
  SITE 88: note = RuvC_P3
  SITE 90: note = RuvC_P4
  SITE 93: note = RuvC_P5
  REGION 210..298: note = Tnp_domain
  SITE 218: note = Tnp_P1
  SITE 248: note = Tnp_P2
  SITE 256: note = Tnp_P3
  SITE 257: note = Tnp_P4
  SITE 269: note = Tnp_P5
MHQLVRIGMDTSKKVFQLHGVDAEERVALSRKLSRHQMIRFFEKLPPTVIGIEACGASHHWARTLGALGHEVRLMAPQLVKPYVRRSKNDAADAEALCEAMSRPTMRFVPVKTVEQQAALMLVGMRERLVGRRTQLANSIRGYAAEFGLTAPLGLSRVEPFLRQIASEDILPSLAREMFAQMAEEYGALMEHIRELDEKLATWHRSQDVSRRLAGIPGIGPLGAALLLMKAPDPHLFRSGRDFAAWIGLTPRDHSSGGKVRHGGITRAGDSRLRSTLVVGATTVLRHVRQNKQSRLATPWLVSLLGRKKPKLAAVALANRIARIAWKLMTSGETYRKPVAVDAMTAATAS

SEQ ID NO: 16248 - protein, 307 aa, unidentified
  source 1..307: note = protein_d84295d
  REGION 5..149: note = RuvC_domain
  SITE 8: note = RuvC_P1
  SITE 52: note = RuvC_P2
  SITE 92: note = RuvC_P3
  SITE 94: note = RuvC_P4
  SITE 97: note = RuvC_P5
  REGION 181..266: note = Tnp_domain
  SITE 189: note = Tnp_P1
  SITE 218: note = Tnp_P2
  SITE 226: note = Tnp_P3
  SITE 227: note = Tnp_P4
  SITE 238: note = Tnp_P5
MRRYVGIDVSKAELVIHVLPDEQAWTQPNTPQGQCALAQRLAGLGCERIVLEASGGYERAVLQVLRKAGLPAVRMAADRPRKLAQALGLHAKTDALDARLLAMAAQRIPTTPTPVVPEHQQSLRELLDLRATVVGQRDAHRRRLEHITRPEVQRHCREVIALLNQQIQTLTQEIEQQGRTCSTLPKVPGLGTILRAVLAARLPELGTLPPRKLAALVGLAPFNHDSGCWKGQRRIKGGRADVRRVLYMATWASIRAKSPLANTYARLRAAGKPAKVAIVACMHKFLRWLNAIARDQAPYAPPVIAGA

SEQ ID NO: 16249 - protein, 343 aa, unidentified
  source 1..343: note = protein_f9ffbcd
  REGION 7..149: note = RuvC_domain
  SITE 10: note = RuvC_P1
  SITE 53: note = RuvC_P2
  SITE 88: note = RuvC_P3
  SITE 90: note = RuvC_P4
  SITE 93: note = RuvC_P5
  REGION 212..303: note = Tnp_domain
  SITE 220: note = Tnp_P1
  SITE 250: note = Tnp_P2
  SITE 258: note = Tnp_P3
  SITE 259: note = Tnp_P4
  SITE 271: note = Tnp_P5
MQTTTTIGLDIAKSVFQVHGIDRDGNVVVRRQLKRRYVLTFFAKLPPCLIGIEACASSHYWSRELQALGHTVRLMPPAYVKPYVKRHKNDAADAEAICEAVTRPNMRFVPTKTPEQQSCLTLHRTRHLFIRQQTAIINSIRAHLAEFGIVAPVGRRGVEQLLKVVADANDTRLPEIARACVAALGTQLLALKAQILAFDRRIMAWHRSNETSKRLDAIPGVGPALATALVASIGEPKAFRSGRDFSAWIGLVPKQNSSGGKDKLGNISKQGDRYLRSLFTAGALAVIRYAKLHGTEHRPWLTALLARRPTKVAAIALANKIARMAWAIMTKGERYKEPVALAA

SEQ ID NO: 16250 - protein, 324 aa, unidentified
  source 1..324: note = protein_5aa5eb3
  REGION 5..160: note = RuvC_domain
  SITE 8: note = RuvC_P1
  SITE 58: note = RuvC_P2
  SITE 98: note = RuvC_P3
  SITE 100: note = RuvC_P4
  SITE 103: note = RuvC_P5
  REGION 196..282: note = Tnp_domain
  SITE 204: note = Tnp_P1
  SITE 234: note = Tnp_P2
  SITE 242: note = Tnp_P3
  SITE 243: note = Tnp_P4
  SITE 255: note = Tnp_P5
MSSVVGIDIAKSTFDVATPLPNGKYRTRGKIPNTRKGFEQLDSWLKEHASLGARVVMEATGVYHEALAEHLYHQGYEVIVVNPARVYHFKKSEGVHYKTDKVDAKLLADFAQAKHKKSLFPWKPEPTSLRHLRVLLKRLDDLQEMLQMERNRLDTAHRAVRESIESHIKHIEKDIAQTRRLIDQHIDDDPDLGSKRDLLLSIDGIGEKTAAVILAELGDVSEFRSARAIVSFAGLNPKLNESGTLKGRTPITKAGSGRLRRALYLPCVTAMNMSEPMMAMKSRLKANGKAGKQIVCAGMRKMLHIVFGVLKSGQMYDPKLALAR

SEQ ID NO: 16251 - protein, 343 aa, unidentified
  source 1..343: note = protein_03b3860
  REGION 7..149: note = RuvC_domain
  SITE 10: note = RuvC_P1
  SITE 53: note = RuvC_P2
  SITE 88: note = RuvC_P3
  SITE 90: note = RuvC_P4
  SITE 93: note = RuvC_P5
  REGION 212..298: note = Tnp_domain
  SITE 220: note = Tnp_P1
  SITE 250: note = Tnp_P2
  SITE 258: note = Tnp_P3
  SITE 259: note = Tnp_P4
  SITE 271: note = Tnp_P5
MSEIITIGIDIAKNVFQIHGVDETGGVVVRRQLRRRQVLPFFHRLPACLVGMEACASSHHWAREIGRFGHEVKLMPPRYVKPYVKRNKNDAADAEAICEAVTRPTMRFVPIKTEEQQSVLMLHSTRQLFVRQRTTVINAIRAHMAEFGIVAGIGRNGVEALLALIVKGEDERIPAHARDCLMALAMQLELLKRQILEADRRVLVWHRQNELSKRLEAIPGVGPLIASALVASIPDPTIFRSGRDMSAWIGLVPKQNSTGGKERLGSITKAGNKYLRKLLVVGALSVIKRAKQVGYTRHPWLVALLGRRTTMIAAIALANKIARIAWAMMVRGEKFEPSRLQPA

SEQ ID NO: 16252 - protein, 415 aa, unidentified
  source 1..415: note = protein_07fcbfc
  REGION 19..176: note = RuvC_domain
  SITE 22: note = RuvC_P1
  SITE 75: note = RuvC_P2
  SITE 115: note = RuvC_P3
  SITE 117: note = RuvC_P4
  SITE 120: note = RuvC_P5
  REGION 283..370: note = Tnp_domain
  SITE 291: note = Tnp_P1
  SITE 321: note = Tnp_P2
  SITE 329: note = Tnp_P3
  SITE 330: note = Tnp_P4
  SITE 342: note = Tnp_P5
MAEVSLSVLLDPSSFAYVVGIDIGSEDCCFTVLTPQKQVVIKPTKLANAASGFALLQERMARLGVDPGQIVVGLEATSRYGENLFHFLQQQGYHLCLLHPRQTHEFAKQRGLRAKTDRLDATTIARVLLSGEARAGYVPNEQIASYRELVRLHTQLSDELAWDKNEIQALLVVLFPEFSQVFADPCRLTATTVLQAYPSAKAIREAGVDAIAAVLRTSAPRNYGQQTARRLVQLAEHSVSSDLALEARSLSLKIWCEQLQHTLAHLAQIEEEMGKRLSRDPGAKGLQEVPEFGTKTVAVLRAELGDVARFQRLDQVVAYAGMDIEIKQSGKWQGQAKLSKRGSGLVRRMLYMAAMRCTCLPGSAFGAYYHRLLARGLGKKTALMAVMRKMLVIAAYLLRTGEDYDPTKVAAGPAG

SEQ ID NO: 16253 - protein, 391 aa, unidentified
  source 1..391: note = protein_9c7edf9
  REGION 1..146: note = RuvC_domain
  SITE 43: note = RuvC_P2
  SITE 83: note = RuvC_P3
  SITE 85: note = RuvC_P4
  SITE 88: note = RuvC_P5
  REGION 254..340: note = Tnp_domain
  SITE 262: note = Tnp_P1
  SITE 293: note = Tnp_P2
  SITE 301: note = Tnp_P3
  SITE 302: note = Tnp_P4
MDQAGRVLARAKLPEGVAGIARLHAMIGEHLGEDEDEPTVVVGIETERGPWVQALIAAGYQVHAVNPLQAARYRERHSVSGAKSDTGDAHVLADMVRTDRHQLRPVAGDSAEAEAVKVLSRAHKTLIWERTRHLLRLRHALREFFPAALLAFDDLTAVDALELLAVAPEPTAAAALSLDTISAALKMARRHNRAAKAEAIAAVLRAEHLGQPPVVAAAYAVTVRAQVAILSVLNTQIAELEEQVEANFSEHPDADIYLSQPGLGAVLSARVLGEFGDDKNRYADAKARRNYAGTSPITRQSGKKKVVMARYVHNDRLLDALGRQAFSALRTSPGARAYYDRIRARGTGHQAALRQLGNRLVGILHGCLKTGTKYDEAKAWAPTQQDQQLAA

SEQ ID NO: 16254 - protein, 344 aa, unidentified
  source 1..344: note = protein_40a3f4c
  REGION 6..147: note = RuvC_domain
  SITE 9: note = RuvC_P1
  SITE 52: note = RuvC_P2
  SITE 87: note = RuvC_P3
  SITE 89: note = RuvC_P4
  SITE 92: note = RuvC_P5
  REGION 212..297: note = Tnp_domain
  SITE 219: note = Tnp_P1
  SITE 249: note = Tnp_P2
  SITE 257: note = Tnp_P3
  SITE 258: note = Tnp_P4
  SITE 270: note = Tnp_P5
MKITTVGIDLAKNVFQIHAVDERGKTVLKKQLKRDQVAAFFVNLPPCLVGMEACGSAHHWARKLEGFGHTVKLMAPQFVKPYVKTNKNDAADAEAICEAVARPNMRFVPIKNIGQQSVLALHRVRQGFVKARTAQANQIRGLLGEFGLIIPQGIAHIAKRVPELIEDASNELTGSFRLLVQRLMDHLKELDKQVGELEVQIKTWHRASEASCKLEIIPGIGPITASALVASVGNAKNFDDGRQLAAWLGLVPKQHSSGGKSTLLGISKRGDSYLRTLLIHGARSVIFRAQQKADKSGWLHKLLERRNPNVAAVALASKNARIIWALLANDRNFQADYARPLATA

SEQ ID NO: 16255 - protein, 343 aa, unidentified
  source 1..343: note = protein_69487f0
  REGION 7..149: note = RuvC_domain
  SITE 10: note = RuvC_P1
  SITE 53: note = RuvC_P2
  SITE 88: note = RuvC_P3
  SITE 90: note = RuvC_P4
  SITE 93: note = RuvC_P5
  REGION 212..297: note = Tnp_domain
  SITE 220: note = Tnp_P1
  SITE 250: note = Tnp_P2
  SITE 258: note = Tnp_P3
  SITE 259: note = Tnp_P4
  SITE 271: note = Tnp_P5
MDNVSTVGLDLAKNVFQVHCADEKGRCIQSKVIRRSQLLRFFATLKPCLVGMEACGSSHYWARELKLLGHDVRLMAPQYVKAYVKTNKNDAADAEAICEAVTRPGMRFVDIKTEEQQAILLLHRDREGLTRDRTALINRLRATLAEFGVTAPSGPQRLNRWFREDYSGYGVRLPGLVERQVERMRTRLRGLESEIAALDVEIDLTSRSNEACQRLEAVPGIGRLTASAVVATVGKGQSFKSGRQFAAWLGLVPRQYSSGGKPRLLGISKRGDGYLRRLLIHGARAVIRHMNPKRAVTGWLAQLSTRAHHNVVIVALANKLARIAWAILYKERTYSEALVAGRR

SEQ ID NO: 16256 - protein, 399 aa, unidentified
  source 1..399: note = protein_f574f5c
  REGION 10..164: note = RuvC_domain
  SITE 13: note = RuvC_P1
  SITE 61: note = RuvC_P2
  SITE 101: note = RuvC_P3
  SITE 103: note = RuvC_P4
  SITE 106: note = RuvC_P5
  REGION 271..358: note = Tnp_domain
  SITE 279: note = Tnp_P1
  SITE 310: note = Tnp_P2
  SITE 318: note = Tnp_P3
  SITE 319: note = Tnp_P4
  SITE 331: note = Tnp_P5
MTPDDIDVWVGLDVGKSAHHAHALDHDGNTLYDKPLRQDEKAIRTMLEKLSERGRVLLVVDQPNTIGSLPLTVARSMGVQVAYLPGAAMRRTAQLLPGAAKTDRRDAYVIAWAALKLPESLRDAGPDDETLAALKILAGHDEDLAHESARHINRLRSLLLQTHPAFERVLKGERATRDATLALLERYGGPMGMGAAGIEQVRRWAGKEGLRAGRIIDDMFKAIGEQTVTVPGTAMAESIIPSIARDIKTIKDRRRDLAAQVERLLDGHPLLTVLTSMPGIGVRTASNILLGIGGDAAHFKSAAHLAAYAGIAPVTSQSGTSIKGERPARGGNKRLKNALWQSAFVASTKHPPSIAYYKRKREQGKHHNAAVICLARRRCDVIYSMLKNGTLYQEQTLAA

SEQ ID NO: 16257 - protein, 346 aa, unidentified
  source 1..346: note = protein_074ac57
  REGION 7..147: note = RuvC_domain
  SITE 10: note = RuvC_P1
  SITE 53: note = RuvC_P2
  SITE 88: note = RuvC_P3
  SITE 90: note = RuvC_P4
  SITE 93: note = RuvC_P5
  REGION 210..299: note = Tnp_domain
  SITE 218: note = Tnp_P1
  SITE 248: note = Tnp_P2
  SITE 256: note = Tnp_P3
  SITE 257: note = Tnp_P4
  SITE 269: note = Tnp_P5
MEQISRIGMDTSKRFFQLHGVNAAETVVLRKKLRRKEMVGFFEKIAPTVVGIEACGASHHWARLLQSFGHTVKLIPAQLVKPYVKRGKNDMADAEALCEAMSRPTMRFVPIKTADQQAALMLVGLRDRLIRNRTQLSNAIRGYAAEFGLTAANGLANLRPLLERIQADEGVPDLACELFAAQAEEYAQLEEQIAEISAKLMAWHKADECSRRLAKIPGIGPIGAALLMMKTPAPELFRSGRQFAAWIGLTPRDHSTAGKVKLGVITRAGDEALRAVLVSGATAVIKHAVGCKGRASPWLIDLLKRKPPKLAAVALANKLARIAWKLMVTGEAYAATSTPIASAAAV

SEQ ID NO: 16258 - protein, 318 aa, unidentified
  source 1..318: note = protein_0ed13c7
  REGION 7..155: note = RuvC_domain
  SITE 10: note = RuvC_P1
  SITE 54: note = RuvC_P2
  SITE 94: note = RuvC_P3
  SITE 96: note = RuvC_P4
  SITE 99: note = RuvC_P5
  REGION 193..277: note = Tnp_domain
  SITE 201: note = Tnp_P1
  SITE 230: note = Tnp_P2
  SITE 238: note = Tnp_P3
  SITE 239: note = Tnp_P4
  SITE 250: note = Tnp_P5
MSDSVFIGIDVSSQTLEVASSAQAKTWQASNDAHGIESLCSQLTALGPALVVLEATGGYEFEAACVLQAAGLPTAVVNPRMARDFARAMGALAKTDALDAHMLAAFARVLHQHPERERFVKPLADAQLQQLQALVLRRRQIVQMLTGERQRLRISHAAARPSIERVIEFLKQELGDSDTEVAAHVQHHHAQLAQALTSVPGIGAASVAVLLAELPELGKLDRRRVAALVGVAPLNRDSGQMRGQRSIWGGRAQVRRTLYMATLTAVRYNPVPKPYYEHLLAAGKRKKVALVACMRKLLTMLNAIAKHGCTWNPNHHCA

SEQ ID NO: 16259 - protein, 391 aa, unidentified
  source 1..391: note = protein_3eaf365
  REGION 6..163: note = RuvC_domain
  SITE 9: note = RuvC_P1
  SITE 61: note = RuvC_P2
  SITE 102: note = RuvC_P3
  SITE 104: note = RuvC_P4
  SITE 107: note = RuvC_P5
  REGION 267..351: note = Tnp_domain
  SITE 273: note = Tnp_P1
  SITE 303: note = Tnp_P2
  SITE 311: note = Tnp_P3
  SITE 312: note = Tnp_P4
  SITE 324: note = Tnp_P5
MSMYFVGIDISKYKHDCCILSAADQNVVSKFTIKNDMSGFEQLITTLHSLSNPEDIKIGFESTAHYALNLELFLENAHHSFMEINPVLIKEYKKSTSLRRTKTDSVDCESIARWLMTVEYKPHPKGFYHAYSLKSLTRLRDKLVRQRSFYLVKITNVLDHTFPEFKPFFHERLSKTALYLLENYSSAEKMARMNSASYEKLRSLSRGKFSPQQFLRLKELASNTVGINNSIFDVELNCLLTLYKSLVKEIGALETEINKLIEEVHPHYMSVPGIGPISAAVIYSEYGDLSNFSTPAQMLAFAGIEPGINESGTESHGGRMVKHGSSQLRYVLINCCLPLIRFDMTFAAYYAKKRAEGKPHRVAITHVAKKLVRVIYALERQGTDFNAQKLR

SEQ ID NO: 16260 - protein, 347 aa, unidentified
  source 1..347: note = protein_0394048
  REGION 9..151: note = RuvC_domain
  SITE 12: note = RuvC_P1
  SITE 55: note = RuvC_P2
  SITE 90: note = RuvC_P3
  SITE 92: note = RuvC_P4
  SITE 95: note = RuvC_P5
  REGION 214..302: note = Tnp_domain
  SITE 222: note = Tnp_P1
  SITE 252: note = Tnp_P2
  SITE 260: note = Tnp_P3
  SITE 261: note = Tnp_P4
  SITE 273: note = Tnp_P5
MSTQAIHIIGIDLGKNWFHLVGMDEKGKPLLRKKLNRTQLAEFATTASTCIVVMESSPGSQYWGRKFQNAGHTVRVIPAQFVKPYLKSNKNDFNDAEAIAEAASRGTMRTVPLKTTDQLEMQAMHRVRQRLIVERTALVNQMRALLLEHGIVIPVGRALFARALPRILEAVDNALSPRMRQLLYRSRQRWLALDDEIDIASVEIHQIAKESELCRLVSTVPGVGPIVSSALIAAVGNGQAFGKARDMAAWLGLVPRQYSTGGKSNLGSISKRGNGYLRMLVIQGARALMSHMKRDQSRMEQWLHEIERRSHPHVALIALANKIVWICWKVLTGGENYRPFPYESINA

SEQ ID NO: 16261 - protein, 277 aa, unidentified
  source 1..277: note = protein_4f9b312
  REGION 5..152: note = RuvC_domain
  SITE 8: note = RuvC_P1
  SITE 55: note = RuvC_P2
  SITE 92: note = RuvC_P3
  SITE 94: note = RuvC_P4
  SITE 97: note = RuvC_P5
  REGION 212..273: note = Tnp_domain
  SITE 220: note = Tnp_P1
  SITE 250: note = Tnp_P2
  SITE 258: note = Tnp_P3
  SITE 259: note = Tnp_P4
MEHYAGLDVSVKETSVCVVDGAGQVVREVKVASEPGAILGVLADEAFTLKRIGLEAGPLSQWLYGALAEADLPVICVETRHMKAALSAQINKSDRNDARGITQMMRVGLYRRVHVKTLASQKRRMLLTSRQLLQAKAHDIESDLRGTLRNFGLKVDPVSRGKFEARIRELVVDCPGLAAITGPLLIAWRTLREQFAVLHRQLLAVVRDDAVCHRLMTVPGVGPVVALTFRATVDVPSRFANSKAVGAVFGLTPRQHQSGEVESSAGWWSDVVRRDDG

SEQ ID NO: 16262 - protein, 277 aa, unidentified
  source 1..277: note = protein_6ed46db
  REGION 5..152: note = RuvC_domain
  SITE 8: note = RuvC_P1
  SITE 55: note = RuvC_P2
  SITE 92: note = RuvC_P3
  SITE 94: note = RuvC_P4
  SITE 97: note = RuvC_P5
  REGION 212..273: note = Tnp_domain
  SITE 220: note = Tnp_P1
  SITE 250: note = Tnp_P2
  SITE 258: note = Tnp_P3
  SITE 259: note = Tnp_P4
MEHYVGLDVSVKETSICVVDGAGQVVREVKVASEPGAILGVLADEAFTLKRIGLEAGPLSQWLYGALAEADLPVICVETRHMKAALSAQINKSDRNDARGITQMMRVGLYRRVHVKTLASQKRRMLLTSRQLLQAKAHDIESDLRGTLRNFGLKVDPVSRGKFEARIRELVVDCPGLAAITGPLLIAWRALREQFAVLHRQLLAVVRDDAICHRLMTVPGVGPVVALTFRATVDVPSRFANSKAVGAVFGLTPRQHQSGEVESSAGWWSDVVRRDDG

SEQ ID NO: 16263 - protein, 412 aa, unidentified
  source 1..412: note = protein_e236ad9
  REGION 12..167: note = RuvC_domain
  SITE 15: note = RuvC_P1
  SITE 64: note = RuvC_P2
  SITE 104: note = RuvC_P3
  SITE 106: note = RuvC_P4
  SITE 109: note = RuvC_P5
  REGION 275..361: note = Tnp_domain
  SITE 283: note = Tnp_P1
  SITE 314: note = Tnp_P2
  SITE 322: note = Tnp_P3
  SITE 323: note = Tnp_P4
MSLALPEALFFTGIDWAAETHAVCVMDAAGKIVARFTIEHSPDGIAALARRLATYGKPGDMPVAIERPNGRLVDLLLEAGHPVVPVKPNAIKAWRDGEVLSGAKSDAGDAAVIAEYLRLRQHKLKVGVPYSDETRALRTVVRARGDLVEMRVAATSQLSALLDAHWPGARAIFADVESPISLDFLTRYPTPAAAAHLGEKRMAAFCAKHGYSGRRIAAQLLARLHHAPAGAAGEALAEALRDAVLAAVGVLTALNASVKNLDRAAAAHLGEHPDGAIFTSLPRSGQVNAAQVLAEWGDCRQAYERPDPVAALAGCTPVTKESGKHRAVHFRWACNKRFRVAITTFADNSRHASLWAAKIYNDARASGKDHPHAVRILARAWIRVIWRCWLDGVPYDPAQHTAAAALIEPKAA

SEQ ID NO: 16264 - protein, 334 aa, unidentified
  source 1..334: note = protein_2b98b6a
  REGION 7..149: note = RuvC_domain
  SITE 10: note = RuvC_P1
  SITE 53: note = RuvC_P2
  SITE 88: note = RuvC_P3
  SITE 90: note = RuvC_P4
  SITE 93: note = RuvC_P5
  REGION 208..295: note = Tnp_domain
  SITE 216: note = Tnp_P1
  SITE 246: note = Tnp_P2
  SITE 254: note = Tnp_P3
  SITE 255: note = Tnp_P4
  SITE 267: note = Tnp_P5
MEQITTVGIDLAKSVFSLHGVDGAGRVVLRRTVRREQLVATVAALPPCLIGMEACSGAHEWGRRFLGLGHSVRLMAPKFVAPYRKSGKNDGNDAEAICEAVTRPNMRFVPVKSAEQQALLALHRVRHGFVVERTAIINRLRGLIAEIGVVLPLRSITVRRQAAAAAESLPELAKRAIGDLLEQLRLLDERIAGYDREIEAQAQLSEPARRLMKIRGIGATTALAIVATVGNAREFKNGRQFAAWIGLTPSQYSTGGKPRLGHISKRGDAYLRNLLVQGARSVLNSAAGHQDRMSRWILELQPRRGYYRTLVAIANKNARIAWALLAKNETLRTA

SEQ ID NO: 16265 - protein, 330 aa, unidentified
  source 1..330: note = protein_70a951d
  REGION 5..153: note = RuvC_domain
  SITE 8: note = RuvC_P1
  SITE 55: note = RuvC_P2
  SITE 95: note = RuvC_P3
  SITE 97: note = RuvC_P4
  SITE 100: note = RuvC_P5
  REGION 197..283: note = Tnp_domain
  SITE 204: note = Tnp_P1
  SITE 234: note = Tnp_P2
  SITE 242: note = Tnp_P3
  SITE 243: note = Tnp_P4
  SITE 256: note = Tnp_P5
MSVFVGIDIAANSFEMVSRKNGKVSKVESYRQTSQGHAQALKRLTELKPALIVMEATGIYYFDLAVALAQADLPVAVINPKSFHHFASLKLANSKTDGVDAALLAEYGERMQPRRWMPPDETRLALRDIGRQINRLTGTRSQAKNRLHALQSKRSTLPLLIEDEQAGIALLDQRIERLSEAALSLIAESPALSRDFSNLCAAKGVGKATALSVLGELCVLPCELKAPQVSRFAGLDVRLTQSGSSVNRPARLSKAGNAYLRSTLYMPAMSAVRYDPRAKAFYENLVARGKKKIQALCAVMRKYLTGLWACLKTKTAFDSTLLFSEQHLQT

SEQ ID NO: 16266 - protein, 323 aa, unidentified
  source 1..323: note = protein_27431ce
  REGION 5..159: note = RuvC_domain
  SITE 8: note = RuvC_P1
  SITE 58: note = RuvC_P2
  SITE 98: note = RuvC_P3
  SITE 100: note = RuvC_P4
  SITE 103: note = RuvC_P5
  REGION 195..281: note = Tnp_domain
  SITE 203: note = Tnp_P1
  SITE 233: note = Tnp_P2
  SITE 241: note = Tnp_P3
  SITE 242: note = Tnp_P4
  SITE 254: note = Tnp_P5
MSAFVGIDIAKNSFDIATPLDNGKFRTKAKLPNDSKGYQVLQAWLETHSEPGAWVVMEATSVYHQGVADFLHGQGYRVCVVNPASIHQYGKDDLRRVKTDKADAKLIASYAQAKQAKLREWVPEPAPRRRLRALVRRLDDLQEILQMESNRLDVAEDKVKESIESVISHVRTQIAETKKAIKDSIDDDPDLRQKRDLIVSIDGLGDTTAALILAELGDPLDYKGPRSIVAFAGLDPLGGSSGNWTGPTHISKTGSKRLRTGLYMPGMVGLKHNAVLMALKTRMKASGKAPKEIICAAMRKLLHLVYGVLKSGKPFDPLIALAR

SEQ ID NO: 16267 - protein, 341 aa, unidentified
  source 1..341: note = protein_3032d8f
  REGION 7..149: note = RuvC_domain
  SITE 10: note = RuvC_P1
  SITE 53: note = RuvC_P2
  SITE 88: note = RuvC_P3
  SITE 90: note = RuvC_P4
  SITE 93: note = RuvC_P5
  REGION 210..296: note = Tnp_domain
  SITE 218: note = Tnp_P1
  SITE 248: note = Tnp_P2
  SITE 256: note = Tnp_P3
  SITE 257: note = Tnp_P4
  SITE 269: note = Tnp_P5
MKKFIRIGVDLAKNYFQIHALASESGPAVTRKLKRSKMLEFFSQIEPCLVGMEACGSAHYWARELKKLGHEVLLMPPDYTKPYVKRGKNDAVDADAICEAMSRPGMRFVPVKSAEQQATLMLHKTRELLVKQRTMSVNALRSHLSEFGIIAAKGIGRVDELLELAESDATLPAATRAAVEVLALHLEGLDKSIDDLEDTIASAHAQSEMSRLLDEVPGIGKLIASVIAASVPDAGVFKSGRDFAAWLGITPRQNSSGGKQTLGAITKQGNRYIRKLLVLGATSLLRVVGKRKGALRDWIVGLLAKKPARLVTVALANKLARIIWAMMKTGESFRTEMFAKA

SEQ ID NO: 16268 - protein, 400 aa, unidentified
  source 1..400: note = protein_8de5a9e
  REGION 10..164: note = RuvC_domain
  SITE 13: note = RuvC_P1
  SITE 62: note = RuvC_P2
  SITE 102: note = RuvC_P3
  SITE 104: note = RuvC_P4
  SITE 107: note = RuvC_P5
  REGION 270..356: note = Tnp_domain
  SITE 278: note = Tnp_P1
  SITE 308: note = Tnp_P2
  SITE 316: note = Tnp_P3
  SITE 317: note = Tnp_P4
  SITE 329: note = Tnp_P5
MSERRAQVWAGVDAGKGHHWAAVVDETGATLWSKKIDNDESAILTALGEILDFADEVHWAVDISGTSSALLLALLAAHGQRAVYVPGRTVNRMSGAYRGEAKTDARDAYVIAETARHRNDFTAIDVPAQLAADLALLTAHRADLVADRVRMINRLRDVLTGVFPALERAFDYSSHKGALVLLTGYQTPAAIRRRGRARLTAWLANRSVRGADTVAATALEAAQAQQTALPGEDVAAQIVADLAAQILALDDRLKRIDRQIRDTFRSHPQAEIIESLPGMGPILGAEFVVAAGDLSAYTDAGHLASAAGLVPVPRDSGRRTGNLHRPKRYSRRLRRVFYMSAQTSMTREGPNRDFYLKKRGEGLKHVQAVIALARRRASVLWALLRDNRVFTSAPPVAQTA

SEQ ID NO: 16269 - protein, 406 aa, unidentified
  source 1..406: note = protein_1cb6eff
  REGION 16..170: note = RuvC_domain
  SITE 19: note = RuvC_P1
  SITE 68: note = RuvC_P2
  SITE 108: note = RuvC_P3
  SITE 110: note = RuvC_P4
  SITE 113: note = RuvC_P5
  REGION 275..362: note = Tnp_domain
  SITE 283: note = Tnp_P1
  SITE 314: note = Tnp_P2
  SITE 322: note = Tnp_P3
  SITE 323: note = Tnp_P4
  SITE 335: note = Tnp_P5
MCDDELAEVTVPEIWGGVDIGKEHHHCVVIDAQGERLLSRRILNDESALLELIGDVLAVSEDALRAVDINHGGAALLIGLLISHGQPMVYLTGLAVHQASAAYRGQGKTDAKDAFVIADQARMRKDLGVLRPCDEIAVDLKILVRRRTDLVNDRTRQVNRLRGQLLEIFPALERSLSLTNKGPLLLLTGYQTPAAIRRSGARRIETWLKNRKVKGATALAQVAVEAAQAQHTALPGEKLAASMVARLAKGVMALEEEIAELDTFIEARFHEHPHAEVIRSLPGVGALLGAEFVAATGGDLEVFGTADRLAAFAGLSPVPRDSGRVSGNMRRPRRYHRGLLRAFYLSSMASLRSCPASRAYYDRKRAEGKGHKQALLSLARRGANVQWAMIRDGAWYQAAPPVTLAA

SEQ ID NO: 16270 - protein, 396 aa, unidentified
  source 1..396: note = protein_f0398ad
  REGION 4..158: note = RuvC_domain
  SITE 7: note = RuvC_P1
  SITE 59: note = RuvC_P2
  SITE 99: note = RuvC_P3
  SITE 101: note = RuvC_P4
  SITE 104: note = RuvC_P5
  REGION 264..354: note = Tnp_domain
  SITE 272: note = Tnp_P1
  SITE 302: note = Tnp_P2
  SITE 310: note = Tnp_P3
  SITE 311: note = Tnp_P4
  SITE 327: note = Tnp_P5
MTTIGIDIGGRTHVAARCRDGQARADREIFRVSQSRGGFAALDAWLRWQPEPVTLVTMESSGHYWMPLASHLRRRDVPVAVVNPLAAKYFTKSRLGRTKSDPADARSLAEMAMRDTPPARDPLAGVELRQAVRFAMTLVTEQATVCQRLIRLVELGFPELGELFDDPTCRTAREVLRVAPTARAASHRRTATLANANAGPGRRRLGPAKAERLQAAALDSIAVPELDAEVAFEVGLLLDQFDLLERQIEEADRRVATLLDGEIARRLRTIPGVGPSIAATLIAEIGDIERFSDFDQLLAYAGVHPAERSSGRKGSNPETAWHMSKAGNSHLRAAAYRMAVVGVQHNPVIAAHYARKRAAGKSKMNALGHCMHKALSIVWGVWRNGADFDPKWGLET

SEQ ID NO: 16271 - protein, 407 aa, unidentified
  source 1..407: note = protein_26549f1
  REGION 4..160: note = RuvC_domain
  SITE 7: note = RuvC_P1
  SITE 57: note = RuvC_P2
  SITE 97: note = RuvC_P3
  SITE 99: note = RuvC_P4
  SITE 102: note = RuvC_P5
  REGION 274..361: note = Tnp_domain
  SITE 282: note = Tnp_P1
  SITE 312: note = Tnp_P2
  SITE 320: note = Tnp_P3
  SITE 321: note = Tnp_P4
  SITE 334: note = Tnp_P5
MNAVGIDVSKGKSMMAALRPMGEVALPPKEYPHTEVGLERMALDILALGEDTRALMEATGRYHEPVAAALHEYGIRVTVLNPLFIKQSGGGSIRKVKTDKADAMKIAKYALDNWVDLREYTPMEAIREQLKLCSRQYNLYMKNVVVLQNNLISLTDKVFPGVNELFTSPDRADGSQKWIDFVTTFWHCECICLVSETAFTERYRKWCKRKGYQFSAQKAAELYMDSMGHITTLPRNSNTKLLITTAAKELASAKATLVVLRTEMTRLAQQLPEYETVRSMYGVGETTAVQLIAEIGDVRRFPRRSSIVSFAGVDPAVDNSGKHISKSNPTTKRGSPHLRKTLYQIVRTYLRKAPADEQVYQFLDKKRAEGKPYFVYMTAAENKFLRIYYARLKECLIAADSKEPSED

SEQ ID NO: 16272 - protein, 393 aa, unidentified
  source 1..393: note = protein_964ee9a
  REGION 4..161: note = RuvC_domain
  SITE 7: note = RuvC_P1
  SITE 60: note = RuvC_P2
  SITE 100: note = RuvC_P3
  SITE 102: note = RuvC_P4
  SITE 105: note = RuvC_P5
  REGION 266..353: note = Tnp_domain
  SITE 274: note = Tnp_P1
  SITE 304: note = Tnp_P2
  SITE 312: note = Tnp_P3
  SITE 313: note = Tnp_P4
  SITE 326: note = Tnp_P5
MFIVGVDIAKRSHEAIVINDSGGIVKKAFNFKNDSEGFKKLIDALNSISTDPSDFVIGMESTAHYWLALYSGLSKSGYTVHVLNPIQSNALRGMYIRQVKNDEHDSLIIADVIRFGRYTEGGMPPSELYELRELCRARSFIVDMTADLKRKVISLLDQTFPEYETIFANIFGLTSSELLLNCSTPEEILAIDTAKLAAIIEIPSRKRFSIPKAEQIKEVAANSFGIVMEYGTTSLLIKQYMEHIRYTEMQIAGLEEKITELYSHFDTYLTTIPGIGIILGATILSEIGDISRFSSSAKLAAFAGIDPTVKQSGEFTATHNHMSKRGSPYLRRALWQASTCAVIHDSALKTFFEKKRMEGKPYMNAIGHVTRKMTNIIFAVLRDSKPYYLRDNT

SEQ ID NO: 16273 - protein, 329 aa, unidentified
  source 1..329: note = protein_d6e03be
  REGION 4..159: note = RuvC_domain
  SITE 7: note = RuvC_P1
  SITE 58: note = RuvC_P2
  SITE 98: note = RuvC_P3
  SITE 100: note = RuvC_P4
  SITE 103: note = RuvC_P5
  REGION 263..328: note = Tnp_domain
  SITE 271: note = Tnp_P1
  SITE 301: note = Tnp_P2
  SITE 309: note = Tnp_P3
  SITE 310: note = Tnp_P4
  SITE 323: note = Tnp_P5
MIYVGIDIAKLNHFASTISSDGEIMLQPFKFTNDYDGFHLLLHKLDSLDPDSLIIGLGSTAHYGNNLLEFLVKHNYKVCVINPIQTSAMRKNNIRKTKTDKVDTYIIAKTLMMDPHRFFSQHDLSIMHLKELGRFRMKLIKKRTQGKIQLMSYVDQAFPELQYFFKSGIHQKSVYAVLKEAPTTKDIASMHLTHLSHLLEVSSHGHFKKDTATALRILAQKSVGCNDSSISTQITQTIELIELLDSQVHDVESEMELIVNSLDSVIMTIPGIGFINGGMILGEIGDITRFSSPSKVLAFAGLDPTVYQSGNFNASHTKMSKRGSRPLSL

SEQ ID NO: 16274 - protein, 401 aa, unidentified
  source 1..401: note = protein_2f8e308
  REGION 5..158: note = RuvC_domain
  SITE 8: note = RuvC_P1
  SITE 56: note = RuvC_P2
  SITE 97: note = RuvC_P3
  SITE 99: note = RuvC_P4
  SITE 102: note = RuvC_P5
  REGION 220..305: note = Tnp_domain
  SITE 228: note = Tnp_P1
  SITE 258: note = Tnp_P2
  SITE 266: note = Tnp_P3
  SITE 267: note = Tnp_P4
  SITE 278: note = Tnp_P5
MQVFIGVDPHKLSATIEVVDARETVLAKGMFDTNKAGYAAMRRHVATWPDRVWAVEGSGGAGRPLAQRLLADGERVVDVPPKLSARARLFDTGHNRKTDAHDAHAVAAVAVRTKGLRVLSYDGNLEVLRMLTDRRAELISQRVQTVNRLQRLLSELIPGEVKLNLTAPQAREILSRRRPRDLAGKTCKRLALEQLEDLQVIDRRIKAADKELKALVIASGSRLMDLPGIGPVGAARILADVGDVARFADRNRFASWTGTAPLDASSGEQVRHRLSRAGNRKINHMLHMAALSQIRLDTEGRAYYRRKSSAGKTHLEALRCLKRRISDAVYRQLLDDVADTAGAVGTSPGGQSGASQESSAADSHPLIGTSDQPLPDPHPRRYAATSQPRKPQPVEALRDAG

SEQ ID NO: 16275 - protein, 403 aa, unidentified
  source 1..403: note = protein_9401b6e
  REGION 12..166: note = RuvC_domain
  SITE 15: note = RuvC_P1
  SITE 63: note = RuvC_P2
  SITE 103: note = RuvC_P3
  SITE 105: note = RuvC_P4
  SITE 108: note = RuvC_P5
  REGION 273..357: note = Tnp_domain
  SITE 281: note = Tnp_P1
  SITE 310: note = Tnp_P2
  SITE 318: note = Tnp_P3
  SITE 319: note = Tnp_P4
  SITE 331: note = Tnp_P5
MIVDQHDIEVFIGLDVGKSDHHAVALNRSGKKLFDKALPNDEARLREILAKLSEHGKTLLVVDQPATIGALPVAVARATGAEVGYLPGLAMRRIADLHPGQAKTDARDAMIIAEAARTMPHTLRSIAPDDETLAELGVFCGFDDDLAAQITATSNRIRGLLTQIHPALERALGPHLDHPAVADLLTRYPTPAALKTAGRGHVRARLKKHAPRAAERLTEAIFTALEEQTVVVTGTNAAGIVVPKLAEQLLSLRHQRDAIAAQVEALVEAHPLHRVLTSMPGVGVRTCARILTEVTGKHFTSAAHLASYAGIAPVTRHSGTSIRGEHTSRRGNKKLKRALFLSAFAALHHPPSRAYYDRKRAEGKRHNQALIALARRRSDVLFAMLRDGTLYQDPEPRNLPSAA

SEQ ID NO: 16276 - protein, 346 aa, unidentified
  source 1..346: note = protein_af515c8
  REGION 9..151: note = RuvC_domain
  SITE 12: note = RuvC_P1
  SITE 55: note = RuvC_P2
  SITE 90: note = RuvC_P3
  SITE 92: note = RuvC_P4
  SITE 95: note = RuvC_P5
  REGION 214..300: note = Tnp_domain
  SITE 222: note = Tnp_P1
  SITE 252: note = Tnp_P2
  SITE 260: note = Tnp_P3
  SITE 261: note = Tnp_P4
  SITE 273: note = Tnp_P5
MNATPKTVVGVDTAKNVFQIYTVDKDTGELTSKQLKRSQFLSWFANREPCLVGMEACGGSQHWARKLQGLGHEVKLMAGKTVKAFVPGNKNDAADARAIWVAAQQSCVKAVAVKTEEQQAVLALHRIRRQLVKNRTAQRNELRGLVAEYGEVFGLRKAGFEAGMKEALARLSERLPAMLIDTLREQWDELHRLDERIARIEARLLAWLRQDRAARAIAEIPGVGLLTATAAVATMGQPKTFRSGREFAAWIGLVPAQTGTGGKVRLLKISKRGDIYLRSLLVQGAHSIQRHAKVLPTWLQEISKRRPSNVVTIALANKMARTIWAVLAHERAYDRAYVSVRPGTLN

SEQ ID NO: 16277 - protein, 335 aa, unidentified
  source 1..335: note = protein_4f9ce99
  REGION 7..149: note = RuvC_domain
  SITE 10: note = RuvC_P1
  SITE 53: note = RuvC_P2
  SITE 88: note = RuvC_P3
  SITE 90: note = RuvC_P4
  SITE 93: note = RuvC_P5
  REGION 208..294: note = Tnp_domain
  SITE 216: note = Tnp_P1
  SITE 246: note = Tnp_P2
  SITE 254: note = Tnp_P3
  SITE 255: note = Tnp_P4
  SITE 267: note = Tnp_P5
MEQITTVGIDLAKSVFSLHGVDAAGKAVLRRTVRRDRLVETVASLSPCLIGMEACSGAHEWGRRFQQHGHTVRLMAPKFVAPYRKSEKNDGNDAEAVCEAVTRPSMRFVPVKSAEQQALLAVHRVRQGFVVERTATINRLRGLLSEFGVVLPLRSVTVRRQAAAAAEVLPELARRAIDDLLAQLRLLDERIDAYDTQIHAQARLSEPARRLMQIRGIGATTALAIVATVGNAREFKNGRQFAAWIGLVPGQYSTGGRSRLGHISKRGDAYLRNLLVQGARSVLQTAPMHQDRMSRWALELQARRGYYRTLVAIANKNARIAWALLAKEGSMQLKN

SEQ ID NO: 16278 - protein, 396 aa, unidentified
  source 1..396: note = protein_b118804
  REGION 10..163: note = RuvC_domain
  SITE 13: note = RuvC_P1
  SITE 61: note = RuvC_P2
  SITE 102: note = RuvC_P3
  SITE 104: note = RuvC_P4
  SITE 107: note = RuvC_P5
  REGION 225..310: note = Tnp_domain
  SITE 233: note = Tnp_P1
  SITE 263: note = Tnp_P2
  SITE 271: note = Tnp_P3
  SITE 272: note = Tnp_P4
  SITE 283: note = Tnp_P5
MRGEPGRVVIGMDPHKRSVTIEVMAADERVFGGGRFGTDVAGYRSMLEYLKQWPDRVWAIEGCNGIGRHIAMRLLADGQEVIDVPPKLSARARVFSTGQGRKTDATDAHSVALVGTRMSGLRPVINDEQLAVMRVLVDRRRALGEDHTRMISQVHHLLLELIPGGAKKDLSAAQAKALLAKVRPRDAAGKIRRRVAAELIGDLERIYQRSKAADKELKELVAASGSSLMDLHGIGPSGAARLLVEVGDITRFPDRDHFGSWTGTAPVDASSGDQVRHRLSRGGNRQINRVLHIMATVQLRHPTEGRAYYDRRKADGKTSMEALRALKRRLSNIVYKTMVDDAITHTVAGSRTGPGGQTGHDSDSSATGSHPSAGSSDKPLPGPARPQPRTPLPAAS

SEQ ID NO: 16279 - protein, 404 aa, unidentified
  source 1..404: note = protein_d919660
  REGION 5..161: note = RuvC_domain
  SITE 8: note = RuvC_P1
  SITE 58: note = RuvC_P2
  SITE 98: note = RuvC_P3
  SITE 100: note = RuvC_P4
  SITE 103: note = RuvC_P5
  REGION 275..362: note = Tnp_domain
  SITE 283: note = Tnp_P1
  SITE 313: note = Tnp_P2
  SITE 321: note = Tnp_P3
  SITE 322: note = Tnp_P4
  SITE 335: note = Tnp_P5
MYNAVGIDVSKGKSTIAVLQPGGVIVRKPFDVFHTSQSLKELSNYLASLEGDTRIVMECTGRYHESMANSLSNAGFFVTVVNPHLIKNFGNNTLRKVKSDPADAKKIARYTLDNWAELRQYSCMDNTRNQLKTLNSQFSFFMKQKVAAKANLIALLDNTYPGVNKLFNSPAREDGSEKWVDYAYSFWHVDCVRKTGLKAFTVRYEAFCRKHHYIYQPSKPEELFNASKELVAVFPKETSYKLLIQQSIQQLNLASAHIEQLRREMNALASTLPEYEVVMGMYGVGKTYGPQLIAEIGDVSRFTHREAITAFAGVDPGVEQSGQHNSKSNKASKCGTGRLRKTLFQVMTTLLQNAPENEPVYQFLNRKRSEGKPYYVYMTAGANKFLRIYYGKVKAHLRSLEQNE

SEQ ID NO: 16280 - protein, 346 aa, unidentified
  source 1..346: note = protein_d46f78a
  REGION 13..155: note = RuvC_domain
  SITE 16: note = RuvC_P1
  SITE 59: note = RuvC_P2
  SITE 94: note = RuvC_P3
  SITE 96: note = RuvC_P4
  SITE 99: note = RuvC_P5
  REGION 218..304: note = Tnp_domain
  SITE 226: note = Tnp_P1
  SITE 256: note = Tnp_P2
  SITE 264: note = Tnp_P3
  SITE 265: note = Tnp_P4
  SITE 277: note = Tnp_P5
MSNHTLKNDVAVLGIDLAKQSFQLHGVDTGGKTVLKKRLSRKDLYSFIAQLPACTIGIEACGGANHWVRVFEKFGHTVHMIAPQFVKPYVKSNKNDAADAEAICEAVQRPSMRFVPAKSLEQQDIQSLHRIRSQAVARRTAQANQIRGLLMEYGLIIPQGIAYVRKSIPLILEDADNELTVMFRELLANLYDEMVHLDARIKTLEIKLESLCVQNEDCQRLLGIPGVGLLSATAMVASIGDISVFKNGRELAAWLGLVPRQHSTGGKPTLLGISKRGDTYLRTLLIHGGRTVVRVANKHEDKRSTWVTQLEGRRGKNISAVAVANKNARVAWALLSKKSTYQASAA

SEQ ID NO: 16281 - protein, 357 aa, unidentified
  source 1..357: note = protein_2a24116
  REGION 23..164: note = RuvC_domain
  SITE 26: note = RuvC_P1
  SITE 69: note = RuvC_P2
  SITE 104: note = RuvC_P3
  SITE 106: note = RuvC_P4
  SITE 109: note = RuvC_P5
  REGION 225..311: note = Tnp_domain
  SITE 233: note = Tnp_P1
  SITE 263: note = Tnp_P2
  SITE 271: note = Tnp_P3
  SITE 272: note = Tnp_P4
  SITE 284: note = Tnp_P5
MRATLSRGVLFSEAIVTSESALIGIDLGKHTFHLHGQDKSGREVFRKKCSRAQMMQFFGNVPSCVVVMEACAGSHFVARQLMAMGHTAKLISPQFVKPFVKGNKNDFVDAEAICEAASRPSMRFVTPKTESQQTLSVLHRMRESLVHDRTKTANQMHGFLLEFGVSLPKELAIMKRLASVLAEHELPVRLTVLLQRLHDHFVYLDEQIKALDKELAGQLADDDMGSRLLSMPCVGPITASLLAVEMGDGKQYRCSRDFAASVGLVPRQYSTGGKANLLGISKRGDKHLRQLLVQCSRVYMQRLDHQKGALADWVKTLLSRRHSNVVACALANKLARIAWAIAARHTQYEAGPDALNA

SEQ ID NO: 16282 - protein, 354 aa, unidentified
  source 1..354: note = protein_cf9245c
  REGION 8..161: note = RuvC_domain
  SITE 11: note = RuvC_P1
  SITE 67: note = RuvC_P2
  SITE 107: note = RuvC_P3
  SITE 109: note = RuvC_P4
  SITE 112: note = RuvC_P5
  REGION 208..295: note = Tnp_domain
  SITE 216: note = Tnp_P1
  SITE 246: note = Tnp_P2
  SITE 254: note = Tnp_P3
  SITE 255: note = Tnp_P4
  SITE 268: note = Tnp_P5
MAIQKQSVGIDISMTTFSACLCQRSEDGALTFSKAVNFTNETKGYNQFLRWVKSVITVGPELVFLMEATGVYYEKLAYHLHKINKTVHVVLPNTSKHYFASLNIKTKTDLVDARVLSRFGAERVHKPWLPPPAALLQLRNLTRYYVQLQEQKTALGNIKHSKDSSQDVQSFIIKSNKGLITEIDKQIAKCLSEIKRLVELDKQLKVKIKKLATIKGIGLITIVTILAETMGFEQFHSAKQLVSYAGYDVVQRESGTSIKGKTRISKKGNRYIRNALYFPAMVACRYNTTLKETYLRIIQKKSSKMVGQVAIQRKLLVLIYAIWKNDSEFIENYKAGSPDHKTEATQDSSATELL

SEQ ID NO: 16283 - protein, 340 aa, unidentified
  source 1..340: note = protein_a5859f6
  REGION 14..161: note = RuvC_domain
  SITE 17: note = RuvC_P1
  SITE 66: note = RuvC_P2
  SITE 106: note = RuvC_P3
  SITE 108: note = RuvC_P4
  SITE 111: note = RuvC_P5
  REGION 208..294: note = Tnp_domain
  SITE 215: note = Tnp_P1
  SITE 245: note = Tnp_P2
  SITE 253: note = Tnp_P3
  SITE 254: note = Tnp_P4
  SITE 267: note = Tnp_P5
MSKESVSSHVSVYAGIDVSAATLAVAVQREDRAGFEQRQFANSGMGHKQLIDWLLKGGEIVRVSLEATGIYSLDVALAMDLAENIEVSVLNPKIANRFAQTLRRSKTDAADAVALAEYSRRMQFVAWKRPSRVELELRAISRHIVALTDEHTRLNNRLHAAEASATTPRCVRQDLKHSINALKKRVVRLRKAASELVELNETLAMKFKQLIEIPGIAEASALQLLGELAPLDPEMTARQWVAHSGLDPAQQVSGSSVHKPSRISRHGNRYLRRALYMPALVGVRFDPHLKAFYLQLQARHKTKLQALMAVARKLLHAIYGIFKSGTHYDGRKLFPQLGAV

SEQ ID NO: 16284 - protein, 350 aa, unidentified
  source 1..350: note = protein_303e140
  REGION 6..147: note = RuvC_domain
  SITE 9: note = RuvC_P1
  SITE 52: note = RuvC_P2
  SITE 87: note = RuvC_P3
  SITE 89: note = RuvC_P4
  SITE 92: note = RuvC_P5
  REGION 211..295: note = Tnp_domain
  SITE 219: note = Tnp_P1
  SITE 249: note = Tnp_P2
  SITE 257: note = Tnp_P3
  SITE 258: note = Tnp_P4
  SITE 270: note = Tnp_P5
MKVTIIGIDLAKNVFQVHGVDEQGKTVIKKQLKRHQMAEFFVNMPTCLIGMEACSGAHYWGRKLTAMGHTVRLMAPQYVKPYVKSQKNDAADAQAICEAVGRPSMRFVAIKNVDQQSVLALHTARRGFVKARTALANQMRALVGEFGVVIPKGLSNVTSRLPQELEDASNELTTVVRLLLQQLLEHFKEIDTQVKKLEKQIRVWSRQDEQARRIEQIPGIGPITASAVVASLGDVSLFEDGRQVSAWLGLVPRQHSSGGKTVLLGITKRGDSYLRVLFIQGARAAIQAAQRSAEGPPAWLAKLLARKHPNVAAVALASRNARTVWALLAHKRDYDPKHGLDKCISAALAA

SEQ ID NO: 16285 - protein, 401 aa, unidentified
  source 1..401: note = protein_5e55e69
  REGION 10..164: note = RuvC_domain
  SITE 13: note = RuvC_P1
  SITE 62: note = RuvC_P2
  SITE 102: note = RuvC_P3
  SITE 104: note = RuvC_P4
  SITE 107: note = RuvC_P5
  REGION 270..356: note = Tnp_domain
  SITE 278: note = Tnp_P1
  SITE 308: note = Tnp_P2
  SITE 316: note = Tnp_P3
  SITE 317: note = Tnp_P4
  SITE 329: note = Tnp_P5
MTVEGDGTWIGVDVGKTHHWVCAVDERGQKLLSLKVLNDEAQILEMITAVSGLAQSRVWAIDILGTPSALLLALLAQAGESVRYASGRLVAAMSTAYAGEGKTDAKDAYVIAETARIRTDLAVVDTDTDVVRTLGVLTGHRADLVADRVRMINRLRDLLTSVFPALEREFDFASCKGALVLLTGYATPEAIRRMGEARLSRWLRQRRVRGYADVAARAVAAAQSQHTVLVGQDVTASIVAELASTVLSQHERLKALDEQIQDTFAQHPQAAVIESMPGFGPVLGASLLVAAGDLAAFPTAGHLAAAAGLVPVPNDSGRRVGNLHKPRRYSRPLRHALYLSAQTSMMRAGPNRDYYLKKRDQGRTHSQAVIALARRRIDVLWALLRDDRAWTAAPPARAHAA

SEQ ID NO: 16286 - protein, 343 aa, unidentified
  source 1..343: note = protein_f4d7492
  REGION 6..148: note = RuvC_domain
  SITE 9: note = RuvC_P1
  SITE 52: note = RuvC_P2
  SITE 87: note = RuvC_P3
  SITE 89: note = RuvC_P4
  SITE 92: note = RuvC_P5
  REGION 211..296: note = Tnp_domain
  SITE 219: note = Tnp_P1
  SITE 249: note = Tnp_P2
  SITE 257: note = Tnp_P3
  SITE 258: note = Tnp_P4
  SITE 270: note = Tnp_P5
MQVTTVGLDLAKRIFQVHGVDAAGKVVIRRRLQRSEIAAFFADLPACLVGIEACATAHHWARLIGASGHQVRLIPPSYVKPYVRRSKTDAADAEAICEAVGRPSMRFVPVKSAHQQAALLHHRARDLLVRQRTMLINAIRGHLGEFGIIAPAGRHRVADLLNLLQGADDAEVPALAREALQSLFAELSALEIRIKVVEAVIMREHRSNAVSRRLTTIPGIGPITASALAGTIADPFAFKSGRELAAWIGLVPRQHSSGGKQKMGRVSKQGDRYLRRLLTVGATAVMRRLPGKTDGLSLWVRALLDRRPFRLVSLALANKMARIAWAIMVRPETYKASAMTAAA

SEQ ID NO: 16287 - protein, 348 aa, unidentified
  source 1..348: note = protein_748a397
  REGION 7..148: note = RuvC_domain
  SITE 10: note = RuvC_P1
  SITE 53: note = RuvC_P2
  SITE 88: note = RuvC_P3
  SITE 90: note = RuvC_P4
  SITE 93: note = RuvC_P5
  REGION 210..294: note = Tnp_domain
  SITE 218: note = Tnp_P1
  SITE 248: note = Tnp_P2
  SITE 256: note = Tnp_P3
  SITE 257: note = Tnp_P4
  SITE 269: note = Tnp_P5
MEQISRIGMDTSKHVFQLHGVDAAERPVLRKTLRRKEMVRFFERLLPTPIAIETCGGSHHWARLLGGFGHEVRLIAPQLVKPYVKRGKNDAADAEALCEAMARPTMRFVPIKTAEQQAALMLVGLRDRLVRSRTQLVNAIRGYVAEFGITAAKGTAHIGALLERIRADEAVPDLARDLFAVQAREYEALQARLDEVEAKLMAWHKADACSRRLAQIPGVGPIGAVLLAMKTPAPEAFRSGRQFAAWIGLTPKDHSTAGKTRLGGITRAGDEGLRSVLVVGATALIRRVRQGTGGRGFAAWVTELLRRKPPKLVAVAVANKMARVAWKLMITGESYATRVIPADMGPRS

SEQ ID NO: 16288 - protein, 321 aa, unidentified
  source 1..321: note = protein_ddc1989
  REGION 9..164: note = RuvC_domain
  SITE 12: note = RuvC_P1
  SITE 57: note = RuvC_P2
  SITE 97: note = RuvC_P3
  SITE 99: note = RuvC_P4
  SITE 102: note = RuvC_P5
  REGION 196..280: note = Tnp_domain
  SITE 204: note = Tnp_P1
  SITE 233: note = Tnp_P2
  SITE 241: note = Tnp_P3
  SITE 242: note = Tnp_P4
  SITE 253: note = Tnp_P5
MSAPSFVTVGIDVAKAHVDVALLGARLDAQRFNNDADGHTALATALQPLGIDLVVMEATGGYEAELACALQGAGLPVAVVNPRQARDFARAMGKLAKTDSIDARMLAEMASVLVRREDLSRLLRPVSDERQQWLAALLTRRRQLITMLLSERQRLQITPERLHPSLQAIIAAIQAQLDDIDAQMVGHVREHFAELDRLLQSTRGIGPVSSACLIAQLPELGKLNRRQIAALVGVAPVACDSGSRQGRRRVQGGRFEIRRVLYMATLTATRHNPAIKAFHQRLKAAGKLPKVALVACMRKLLTMLNAMVKSNTLWDDSLHLA

SEQ ID NO: 16289 - protein, 342 aa, unidentified
  source 1..342: note = protein_868d750
  REGION 6..147: note = RuvC_domain
  SITE 9: note = RuvC_P1
  SITE 52: note = RuvC_P2
  SITE 87: note = RuvC_P3
  SITE 89: note = RuvC_P4
  SITE 92: note = RuvC_P5
  REGION 211..293: note = Tnp_domain
  SITE 219: note = Tnp_P1
  SITE 249: note = Tnp_P2
  SITE 257: note = Tnp_P3
  SITE 258: note = Tnp_P4
  SITE 270: note = Tnp_P5
MQIAVLGIDLGKNSCSVVGLDATGRVVLRRRLHRDGVVKLAAGLPSCMMAMEACCGAHHLGRKLSGQGHQVRLMSPEYVRPYVKAQKNDDRDAEAIAEAATRPTMRFVALKNEDQLDMQSLHRARDRLVGERTALINQMRAILLERGIIVPQGRRKLEVAVETLLAAEQVCLSPRTRLLIEDQRAEWRELDRRIEAFDEEFARQARTDERARLLTTIPGIGPLNATALVAAIGKAETFERGRDLAAWLGLVPRQMTTGGKPKLLGISKRGNVYLRKMLIHGARAALPTLSKGETPLGGWLRGLAARAHRNTVVVALAAKLARIICAVLRSGQGFEMQAATAS

SEQ ID NO: 16290 - protein, 342 aa, unidentified
  source 1..342: note = protein_589e8c8
  REGION 7..148: note = RuvC_domain
  SITE 10: note = RuvC_P1
  SITE 53: note = RuvC_P2
  SITE 88: note = RuvC_P3
  SITE 90: note = RuvC_P4
  SITE 93: note = RuvC_P5
  REGION 211..296: note = Tnp_domain
  SITE 219: note = Tnp_P1
  SITE 249: note = Tnp_P2
  SITE 257: note = Tnp_P3
  SITE 258: note = Tnp_P4
  SITE 270: note = Tnp_P5
MAEVTIVGLDLAKRVFQVHGATADGGVAFRKKLSRGQVLAFFADLPPCVVAMEACATAHYWAREISALGHTVRLIPPAYVKPFVKRQKNDAADAEAIAEAASRPTMRFVEPKSPRQQGRAMIFRTRDLFVRQRTQTINALRAHLAEHGLIVPQGLSNLAGIQRLVEKRVTDLEPLVAETARIYLEQINDLTGRIAKMETTLKQEVARSDASSRMMTMPGLGPITAMAIEAFASALSVFKRSRDFAAWLGLVPRQHSTGGKQILGRTSKMGQRDIRRLLIIGAMSVIRWATRKGTIQGTWLHAMLLRKPRKVVAIALANKMARTLWAMEKRKEDYRDPRLAAA

SEQ ID NO: 16291 - protein, 343 aa, unidentified
  source 1..343: note = protein_bea93fb
  REGION 6..146: note = RuvC_domain
  SITE 9: note = RuvC_P1
  SITE 52: note = RuvC_P2
  SITE 87: note = RuvC_P3
  SITE 89: note = RuvC_P4
  SITE 92: note = RuvC_P5
  REGION 211..296: note = Tnp_domain
  SITE 219: note = Tnp_P1
  SITE 249: note = Tnp_P2
  SITE 257: note = Tnp_P3
  SITE 258: note = Tnp_P4
  SITE 270: note = Tnp_P5
MKLHVLGIDLGKTVFHLVGLDSTGKVVIRKRCSRTQLLAFTANLQVQLIGMEACSGAHFLGRALREQGHEVRLMPAQYVKPYVQTNKSDYLDAEAIAEAVQRPRMRFVPIKTEEQLDLQALHRVRERWVMRRTAVVNQIRSLLLERGLTLPKGRSHLDEQLPRILEDAELNLSDSFRVLLAQLQLELEQLAARVEEMDRVIQKTARENEACQRLTEIPGVGPVTATALIAAVGNASAFRKGRNLSAWMGIVPGEYSTGGKQKLLGISKRGNKYLRRLFVQGARSVLQQRHKQAPGLSSWLAQLLGRAHQNVVVVALANKLVRMAWAVLCKNERYRAPVFAVTT

SEQ ID NO: 16292 - protein, 339 aa, unidentified
  source 1..339: note = protein_2657b67
  REGION 6..148: note = RuvC_domain
  SITE 9: note = RuvC_P1
  SITE 52: note = RuvC_P2
  SITE 87: note = RuvC_P3
  SITE 89: note = RuvC_P4
  SITE 92: note = RuvC_P5
  REGION 211..297: note = Tnp_domain
  SITE 219: note = Tnp_P1
  SITE 249: note = Tnp_P2
  SITE 257: note = Tnp_P3
  SITE 258: note = Tnp_P4
  SITE 270: note = Tnp_P5
MKSIVVGVDIAKRVFQLHWVEPETGEMVSVQLKREKFLEHFANRASCVIGMEACGGSQHWARSLQKLGHRVKLLSARMVKPFVGGNKNDVADARAIWTAVQQPGVKAVAIKSEAQQAVLALHRMREQLVKFRTAQINGLRGLVTEYGEVMPQGRAGIKRDIPGALGRLSDRLPAMVIDTLREQYARLGELDEQISQIERRLRHWQCEDSATQRIAAIPGVGLLSATAAIATMGDAKAFKSGREFAAWLGLVPRQIGTGGRVRLVGISMRGDKYLRTLLIHGARSVLTHSKSPPEWLTELLKRRPKNVAVVAMANKMARTIWALTAHERAYQSGYVSQPA

SEQ ID NO: 16293 - protein, 340 aa, unidentified
  source 1..340: note = protein_479ffd2
  REGION 6..149: note = RuvC_domain
  SITE 9: note = RuvC_P1
  SITE 52: note = RuvC_P2
  SITE 88: note = RuvC_P3
  SITE 90: note = RuvC_P4
  SITE 93: note = RuvC_P5
  REGION 212..297: note = Tnp_domain
  SITE 220: note = Tnp_P1
  SITE 250: note = Tnp_P2
  SITE 258: note = Tnp_P3
  SITE 259: note = Tnp_P4
  SITE 271: note = Tnp_P5
MEIATIGLDLAKHWFQVHGVDAEGRAVVRKRLRRREVIPFFASLPRCLVGAEACATAHHWARELKDLGHEVRLMPPGYVKPFVRRQAKNDATDAAAICEAVTRPNMRFVSVKSPEQRGFLMLHRARGLLVRQRTMTACAIRAHLAEFGVVAGQGRQRVEGLIALLEDETAIALPAFAREALDALIAQLGNLDRQIDAIERRLAEIHRSHPISRLLASIPGVGPISATAFAATVPDPAMFRSGREFAAWLGLTPRQNSTGGKERLGRITKQGDAYLRHLLVIGARNVVRYPKARARVGAGWIDELLQRRRPMVVAVAVANKLARIIWAMMTTGELFRPATP

SEQ ID NO: 16294 - protein, 346 aa, unidentified
  source 1..346: note = protein_dc92bc8
  REGION 6..148: note = RuvC_domain
  SITE 9: note = RuvC_P1
  SITE 52: note = RuvC_P2
  SITE 87: note = RuvC_P3
  SITE 89: note = RuvC_P4
  SITE 92: note = RuvC_P5
  REGION 211..299: note = Tnp_domain
  SITE 219: note = Tnp_P1
  SITE 249: note = Tnp_P2
  SITE 257: note = Tnp_P3
  SITE 258: note = Tnp_P4
  SITE 270: note = Tnp_P5
MKITTIGIDLAKVVFQIHGVDERGKVALRKQLKRAEMSGYFANLEPCLIGMEACGSAHHWARKLEGYGHTVKLMAPQFVKPYVKTNKNDMADAEAICEAVSRPNMRFVALKNVEQQAILSVHRARQGFVKARTAQGNQIRGLLSEFGIIIAQGIGAIAKRVPEILEDGENGLPGTMRNLIERLTENLKEMDRQAKELEAQIQLWHRDNAASRKLAEIPGLGPITASAIVATVGDAREFKNGRQLAAWMGLVPKQNSSGGKQNLLGISKRGDTYLRTLMIHGARSVVRVAEKKAEPGSWMRKLMDRRNKNVAAVALANKNARIVWALLAHDRMFRLDYIPAATAAGM

SEQ ID NO: 16295 - protein, 394 aa, unidentified
  source 1..394: note = protein_8010607
  REGION 10..164: note = RuvC_domain
  SITE 13: note = RuvC_P1
  SITE 61: note = RuvC_P2
  SITE 101: note = RuvC_P3
  SITE 103: note = RuvC_P4
  SITE 106: note = RuvC_P5
  REGION 271..355: note = Tnp_domain
  SITE 279: note = Tnp_P1
  SITE 308: note = Tnp_P2
  SITE 316: note = Tnp_P3
  SITE 317: note = Tnp_P4
  SITE 329: note = Tnp_P5
MDIEDIEVFVGIDVGKTHHWATALTKGGKKVFDKALPNDEARLRALYEKLAAHGHLLVVVDQPATIGALAVAVARDMGITVGYLPGLSMRRIADLTPGSAKTDAKDAAVIAGAARTMPHTLRAISTSDEDAAALSMLTGFDLDLARQVNQTANRIRGLYTQIHPALETILGPRLKHDAVLEVIAAWPTPTALRKAGRARIDAKLKKHGARRHAAWAGKIVSALGRQTVTVTGTEAAGTVLPHLARQLIALHSQRADVAARVETLVRAHPLHEVLTSMPGVGVGTAAVFLAETLGKTFDTGAQLASYAGLTPVTRRSGSSIRGERVCRTGNKRLKHAMFLSAFASLRDPVSRTYYQRKRDQGKRLGPGPARPGPPPHPHPARHDPQPATKLPTAA

SEQ ID NO: 16296 - protein, 417 aa, unidentified
  source 1..417: note = protein_0341bc3
  REGION 18..170: note = RuvC_domain
  SITE 21: note = RuvC_P1
  SITE 69: note = RuvC_P2
  SITE 107: note = RuvC_P3
  SITE 109: note = RuvC_P4
  SITE 112: note = RuvC_P5
  REGION 277..363: note = Tnp_domain
  SITE 285: note = Tnp_P1
  SITE 316: note = Tnp_P2
  SITE 324: note = Tnp_P3
  SITE 325: note = Tnp_P4
  SITE 336: note = Tnp_P5
MKSARNTLPEEPAGGVTAGIDWARDDHAVSVADARGREKSRCTVEHSTAGLRELISVLARSGAREIAIERPDGPLIDTLLGAGVTVVVISPSQVKNLRSRYGSAGNKDDRFDAFVLAGTLRTDRARLAPLTPGCPATVSLRRACRARKDLVGHRVAIANQLRAHLRNVLPGAAGLFSRIDSPVSLAFLARFGTQDRADWLTPARLGKWLASIGYSGHTGPDVLHARLTAAPRGLTGPDADAQACITQALHAVLVTLTEQIKTLSTQIGGQLAAHADSHVFTSLPRAGTVRAARLLAEIGDCRTRFPTPESLACLAGAAPSTRQSGKLRAVTFRWACDKQLRDAVTDFAGDTRHASPWAAHLYSQARARGHDHPHAVRILARAWLFVIWHCWQDRTAYNPARHNALQTLLKQDQQSEA

SEQ ID NO: 16297 - protein, 392 aa, unidentified
  source 1..392: note = protein_1be0fb5
  REGION 4..162: note = RuvC_domain
  SITE 7: note = RuvC_P1
  SITE 60: note = RuvC_P2
  SITE 101: note = RuvC_P3
  SITE 103: note = RuvC_P4
  SITE 106: note = RuvC_P5
  REGION 267..354: note = Tnp_domain
  SITE 275: note = Tnp_P1
  SITE 305: note = Tnp_P2
  SITE 313: note = Tnp_P3
  SITE 314: note = Tnp_P4
  SITE 327: note = Tnp_P5
MLFVGIDIGKNNHVASMMDEKGKVVFKAFSFSNTTDGGNALFSKLSSFSSDPSDFEIGMEATGHYWLSVYSFLFEKSFLLHVINPIQTDGWRKGTEIRKRKNDTIDSVLIADLIRYGQFVETRLADEDLFSLRTLTRFRTYLVESISDLKRKVVCILDQVFPEYQSIFSNIFGRTSKEILLQFPSPIDFENISSETLAKLLAQLSRQKVGATKAEQLKAAASSSFGITFAQNSFTFQLKALIEQISFIENQVKETETEISRIMEKLKSPITTITGIGNVTGAAIISEIGDISKFDSPRKLVAFAGIDASVTQSGEFEATHNVMSKRGSPYLRKAIFQSALIASFKDPVLSAYYQKKRSEGKHHLTCVGAVSRKMCNIIYAVLKNNEPYVPKA

SEQ ID NO: 16298 - protein, 294 aa, unidentified
  source 1..294: note = protein_9d3932d
  REGION 2..120: note = RuvC_domain
  SITE 25: note = RuvC_P2
  SITE 60: note = RuvC_P3
  SITE 62: note = RuvC_P4
  SITE 65: note = RuvC_P5
  REGION 183..270: note = Tnp_domain
  SITE 191: note = Tnp_P1
  SITE 221: note = Tnp_P2
  SITE 229: note = Tnp_P3
  SITE 230: note = Tnp_P4
  SITE 242: note = Tnp_P5
MDKQVRRQDFLAYFSNREPCLIGMEACGGSQYWERELTKQGHKVRLLQARFVKAFVMGNKNDVMDARAIWMAVQQPGKEIAVKTEEQQSILVLHRSRRQLVKFRTMQINSLHGTLLEFGETIHKGRAAMEREFPEALERMKERLPPYLITVLENQYNRLNELDSLIDDIEKQLISVARQNETCRRLLDIPAVGPFIATAALAIMGKASVFKSGREFAAYVGLVPRQTGSGGKIRLLGISKRGDKYLRTLFIHGARAAALLTKEPGPRITELKNVVRPSWQLSQWQTSWRERCGQ

SEQ ID NO: 16299 - protein, 314 aa, unidentified
  source 1..314: note = protein_186a74e
  REGION 6..148: note = RuvC_domain
  SITE 9: note = RuvC_P1
  SITE 50: note = RuvC_P2
  SITE 90: note = RuvC_P3
  SITE 92: note = RuvC_P4
  SITE 95: note = RuvC_P5
  REGION 186..270: note = Tnp_domain
  SITE 194: note = Tnp_P1
  SITE 223: note = Tnp_P2
  SITE 231: note = Tnp_P3
  SITE 232: note = Tnp_P4
  SITE 244: note = Tnp_P5
MQTSFIGVDVSKSELVISVDDQPPLSVANDMAYITRWLAAMPRDCCIAMESTGRYHLLLAQLASQAGLVVYVLNARDVYFYAKALGARAKSDALDCAVIRRYVQEHYQSLYPWQPSTEVQQQLHALLRRRAQVSAHQAAIKQTLKHISLPGQQLASLMQSLKDLLEAMDRQVIDLIAKDDVMQQGCTRLQTITGIGPQTGALLTELLSRLHFANSDALVAYSGLDPRANDSGTKRGRRRLSKRGPALLRRQMYLAAFAASHSKALKPLYAHIRAKGFSTTESMVILARKLLRVAFAIWRGQTTFNPEQLLPKVA

SEQ ID NO: 16300 - protein, 269 aa, unidentified
  source 1..269: note = protein_6225e25
  REGION 2..75: note = RuvC_domain
  SITE 14: note = RuvC_P3
  SITE 16: note = RuvC_P4
  SITE 19: note = RuvC_P5
  REGION 138..229: note = Tnp_domain
  SITE 146: note = Tnp_P1
  SITE 176: note = Tnp_P2
  SITE 184: note = Tnp_P3
  SITE 185: note = Tnp_P4
  SITE 197: note = Tnp_P5
MPPAYVKPYVKRHKNDAADAEAICEAVTRANMRFVATKTPEQQSCLMLHRTRHLFIRQQTAVINAIRAHLAEFGIVAPVGRNGVEQLLDVAADASDNRLPEAARACLLALGAQLRALKAQILNFDRQIMAWHRSNEASKRLDEIPGVGPALATALVASVADPKAFRSGRNFSAWIGLVPKQHSSGGKDKLGSISKQGDRYLRSLFTAGALAVIRYAKIHGTKHRPWLTALLARRPTKVVAIALANKMARMAWAMMAKGDRYKEPIALAA

SEQ ID NO: 16301 - protein, 345 aa, unidentified
  source 1..345: note = protein_8c449ca
  REGION 6..147: note = RuvC_domain
  SITE 9: note = RuvC_P1
  SITE 52: note = RuvC_P2
  SITE 87: note = RuvC_P3
  SITE 89: note = RuvC_P4
  SITE 92: note = RuvC_P5
  REGION 211..298: note = Tnp_domain
  SITE 219: note = Tnp_P1
  SITE 249: note = Tnp_P2
  SITE 257: note = Tnp_P3
  SITE 258: note = Tnp_P4
  SITE 270: note = Tnp_P5
MHIASIGIDLGKTTFHLVALGEHNKILLRKKFSRSQLLAHTAKLPTALVGLEACAGSHFLGAVLREQGHQVRLIPAQFVKPYRKSNKNDFLDAEAIAEAVTKQNMRFAQLKTQEQLDWQAMHRVRDRLVQRRTALINEIRGFLLERGITFAAQPIHLRKNLPAVIEDAEQNLSPRLRWLLNRMWQEWKQIEIDIEELTDEIEHISNDDARCRQLRQIPGFGPLVSTATVAAIGNGSAFRRGRDFAAWVGVVPRQHSTGGKQKLYGISKRGNVYLRRMLIHGARSVLFRVKYDTGGFGQWVRRLAQRAPSNKVVVAIANKLARIAWAVLSSGRDYRHQPMPQRAAA

SEQ ID NO: 16302 - protein, 346 aa, unidentified
  source 1..346: note = protein_79a9fc9
  REGION 6..148: note = RuvC_domain
  SITE 9: note = RuvC_P1
  SITE 52: note = RuvC_P2
  SITE 87: note = RuvC_P3
  SITE 89: note = RuvC_P4
  SITE 92: note = RuvC_P5
  REGION 211..300: note = Tnp_domain
  SITE 219: note = Tnp_P1
  SITE 249: note = Tnp_P2
  SITE 257: note = Tnp_P3
  SITE 258: note = Tnp_P4
  SITE 270: note = Tnp_P5
MKITTIGIDLAKEVFQIHGVDMHGKAVLRKRLRRSEMVRFFVNLEPCLIGMEACGSSHYWARKLCEFGHTVKLMSPQFVKPYVKTNKHDMADAEAICEAVSRPNMRFVPIKNVEQQAILSVHRARQGFVKARTAQANQIRGLLSEFGIVIPQGIRSIHKRIPDILGDAENGLPGSLRPLLEKLNDHLKELNRQVEELELQIKLWHKENEASQRLEAIPGIGPITASAIVATVGDATEFKNGKQLSAWFGLVPKQRSSGGKQTLLGISKRGDTYLRTLLIHGARAVVRFAENKAESESWLRKLIIRRNKNIAAVALANKNARIIWALLARDTKFHPDHTLALVAARA

SEQ ID NO: 16303 - protein, 395 aa, unidentified
  source 1..395: note = protein_fc5e65d
  REGION 4..161: note = RuvC_domain
  SITE 7: note = RuvC_P1
  SITE 60: note = RuvC_P2
  SITE 100: note = RuvC_P3
  SITE 102: note = RuvC_P4
  SITE 105: note = RuvC_P5
  REGION 266..353: note = Tnp_domain
  SITE 274: note = Tnp_P1
  SITE 304: note = Tnp_P2
  SITE 312: note = Tnp_P3
  SITE 313: note = Tnp_P4
  SITE 326: note = Tnp_P5
MFIVGIDVAKRSHEVCMITSDGQTVQRPFSIRNNCTGYNLMLEKIRKHTNIKSQIVFAMESTAHYWLALFTRLRKDGYHVILLNPIQTSAMRDMFIRKIKTDAKDSFIIAELIRFGRYAESNVAQDRLLALKELCRNRFYLVDMAGDLKRKLIALIDRVFPEYEAQFDTIFCKSSVALLKKYPTPQKLSNAHLDKLTELLWNSSNGHFGEWKARELKELARNSFGVEDCDGAYSTLILLMLDQIQSLSGKADALEKEISRLFQSFDTTVTTIPGVGPIIGAVILSEVGDISRFSSADKLAAYIGVDPSVNQSGEFQAAHAHMSKRGSPYLRRCIWMASQVAVQRDPMFRAYYEKKAAEGLKYMTIIGHVTRKMTAVVFAILRDHKVYEPILPTAA

SEQ ID NO: 16304 - protein, 348 aa, unidentified
  source 1..348: note = protein_7e0ad12
  REGION 10..151: note = RuvC_domain
  SITE 13: note = RuvC_P1
  SITE 56: note = RuvC_P2
  SITE 91: note = RuvC_P3
  SITE 93: note = RuvC_P4
  SITE 96: note = RuvC_P5
  REGION 217..305: note = Tnp_domain
  SITE 225: note = Tnp_P1
  SITE 255: note = Tnp_P2
  SITE 263: note = Tnp_P3
  SITE 264: note = Tnp_P4
  SITE 276: note = Tnp_P5
MKSTATLPVIGMDIAKNVFQLHVVESETGEIQRYKIKRDRVTDFFANRQSSIVAMEACGGAHHWARVLQAYGHEVKLLPAKHVRPFVLRDKTDARDAQAIWVAAQQFHIKSVPVKSVQQQACLALHRIRAQLMKMRIMQTNALRGILYEFGVTLPEGHRVLLQRIQGELAKAQEHDGLPSVVVASVQEQLARIESLQNDIDQLDKRLTSLVKQNQQMLALQAVPGIGPLTATALVATATDLSSFESGRQFAAWLGLTPRQTGTGGKTRQLGLSKRGDAYVRTMLMHGARAVIARSSRSSWIERLLQRRPYSVVVAALANKLARTAWAVLAKGKAFDQAKWNPTEIAAA

SEQ ID NO: 16305 - protein, 417 aa, unidentified
  source 1..417: note = protein_e6ee7dd
  REGION 13..172: note = RuvC_domain
  SITE 16: note = RuvC_P1
  SITE 69: note = RuvC_P2
  SITE 109: note = RuvC_P3
  SITE 111: note = RuvC_P4
  SITE 114: note = RuvC_P5
  REGION 282..368: note = Tnp_domain
  SITE 290: note = Tnp_P1
  SITE 321: note = Tnp_P2
  SITE 329: note = Tnp_P3
  SITE 330: note = Tnp_P4
MYVERLEKRVLFVGDDWAEDHHDVEVQDDSGRRLWAARLPEGVEGVAKLHALIARHGGEDLEPGGVVVGIETDRGPWVQALLAAGYQVYAVNPRQAARFKERYGTSGAKSDKGDAHALADMVRIDRAQLRPIAGDSEQAQSVKVVARAHQTLIWERTRTFQRLRSTLREYFPGALAAYAGLELTSTDALELLLKAPTPEQAAKLTKQQITAVLARHRRRNREQRAASIQAALREPQLNVAAPVADAYAAAVTAHARLMITLNEQIDALEGQVKTHFLAHPDAEIYLSMPGIGEITGARVLAEFGDDPTRYTSAKARKNYAGTSPITRASGKSHSVQARFVRNNRLADALQRQAFCALQNSPGARRYYDKQRARDLDYNPALRQLGNRLVGILHGCLKTRTHYSEATAWAHHANLATT

SEQ ID NO: 16306 - protein, 340 aa, unidentified
  source 1..340: note = protein_a11ac69
  REGION 7..149: note = RuvC_domain
  SITE 10: note = RuvC_P1
  SITE 53: note = RuvC_P2
  SITE 88: note = RuvC_P3
  SITE 90: note = RuvC_P4
  SITE 93: note = RuvC_P5
  REGION 211..296: note = Tnp_domain
  SITE 219: note = Tnp_P1
  SITE 249: note = Tnp_P2
  SITE 257: note = Tnp_P3
  SITE 258: note = Tnp_P4
  SITE 270: note = Tnp_P5
MSTINILGIDIGKFTFHLIGHDSSGREICRKKLSRPKLIQFISTIELTTIAMEACGGCHWLARKCQEFGHKVLLIPPQYVKPYVKTNKNDFIDADAIAEAATRPSMRFVTVKPESSQVISVIQRIRSSYLKDRTACMSRIGATLLEFGMSFPKSHAKMKTLFQWLAEHGEPIPPMLLLELRDHHDYYLKLNQLILTQDKKLKEIVDNDERAQLLKTIPGVGTLTASRCISDISNAADFKNGRHLAAWLGLVPRQFSTGGKPTLLGISKRGNKGLRELFIHGARAVLVRPEKAVAVFGNWILELLSRKHFNVVVIALANKLARIAWSVLSTKQAFEVRVQA

SEQ ID NO: 16307 - protein, 402 aa, unidentified
  source 1..402: note = protein_678255f
  REGION 5..160: note = RuvC_domain
  SITE 8: note = RuvC_P1
  SITE 57: note = RuvC_P2
  SITE 97: note = RuvC_P3
  SITE 99: note = RuvC_P4
  SITE 102: note = RuvC_P5
  REGION 268..354: note = Tnp_domain
  SITE 276: note = Tnp_P1
  SITE 307: note = Tnp_P2
  SITE 315: note = Tnp_P3
  SITE 316: note = Tnp_P4
  SITE 327: note = Tnp_P5
MNFFVGLDWASQAHAVCVLDATGQVCWQGSVEHSADGLAELLRRLARFGPPASLPVALERPSGLVVDTLMDAGYRVVPIHPNALKASRPRYSAAGGKSDPGDAFILGDLLRTDGHRFRPLQPLSDETRALRALVRGRDDLVAERVALANQLRALLDRFWPGAAAIFADVDSPIALAFLSRYPTPHSAERLGEKRLARFLVQHAYCGRRPAAELLARLRSAPITQTSELEAEASGEIVRALVTVLLPLVTQIQQLSTAIAAALPQHPDGPLLQSFPRSGSVNAAQILAELGDDRSRFATDEQLAAEGGVAPVTRESGKHRGVAFRRACNKRLRQALTSFADHSRHASPWAAAIYAAARRRGCHHPHAIRVLARAWVRVLWRCWQDRRPYDLTLHRAAQRVAAA

SEQ ID NO: 16308 - protein, 344 aa, unidentified
  source 1..344: note = protein_4d37777
  REGION 6..148: note = RuvC_domain
  SITE 9: note = RuvC_P1
  SITE 52: note = RuvC_P2
  SITE 87: note = RuvC_P3
  SITE 89: note = RuvC_P4
  SITE 92: note = RuvC_P5
  REGION 211..296: note = Tnp_domain
  SITE 219: note = Tnp_P1
  SITE 249: note = Tnp_P2
  SITE 257: note = Tnp_P3
  SITE 258: note = Tnp_P4
  SITE 270: note = Tnp_P5
MKITTIGIDLAKNVFQIHGADARGKTVLRRQLKRAQMLAFFARLEPCKVAMEACSSAHYWARKLNTQGHTVMLIALQYVKPFVKRNKNDAADAEAICEAATRPEMPTVPVKTASQQAILSIHRARQSFVKARTAQANQIRGLLTEFGFVIPQGISHITKCVPEIIEDAENDLPGSFRQLIGRLTEHLKVLNLHVTELESEIVRWHKENEASKRLAEIPGVGPLTASALVASVGDARNFKNARQLAAWLGLVPRQHSSGGKPTLLGISKRGDAYLRTLLIHGARSVLRFKQAKPDAGTWTEQLLARRHKNVVAVALANKNARIVWALLTHDRRFRLDHMSACAAV

SEQ ID NO: 16309 - protein, 413 aa, unidentified
  source 1..413: note = protein_84c7c04
  REGION 27..181: note = RuvC_domain
  SITE 30: note = RuvC_P1
  SITE 78: note = RuvC_P2
  SITE 118: note = RuvC_P3
  SITE 120: note = RuvC_P4
  SITE 123: note = RuvC_P5
  REGION 287..371: note = Tnp_domain
  SITE 295: note = Tnp_P1
  SITE 324: note = Tnp_P2
  SITE 332: note = Tnp_P3
  SITE 333: note = Tnp_P4
  SITE 345: note = Tnp_P5
MPWTDQPICMADGKLMIENYDSVDVFIGVDVGKSEHHAVALDRSGKRLYDKALPNDEAKLRAVIQKLKVRGTVLLVVDQPETVGALPVAVAYDEGILVGYLPGLAMRRIADLHASEAKTDARDAAIIAEAARTLPQALRPLRVEDEQMAELSILCGFDDDIVGQMTATSNRIRGLLMQVHPALEGVLGPHLDHPAVLDLLQKYPTPTAMKAAGLNRLGTRLLKLAPRIGRRLAEEIFQALSEQTVVGGTHATRAVLPRLAEQLATLRRQRAEIALEVEELVDANPLEPILTSMPGVGVRTAARLITEVSGKDFATAGHLASYAGLAPVTRRSGSSIRGEHPSRRGNKALKRALFFSAFAALSDPVSRTYYDRKIAQGKRHNQALIALARRRCDVLYAMLRDGTIYQAQSPPTP

SEQ ID NO: 16310 - protein, 315 aa, unidentified
  source 1..315: note = protein_1259b9d
  REGION 12..162: note = RuvC_domain
  SITE 15: note = RuvC_P1
  SITE 57: note = RuvC_P2
  SITE 97: note = RuvC_P3
  SITE 99: note = RuvC_P4
  SITE 102: note = RuvC_P5
  REGION 192..276: note = Tnp_domain
  SITE 200: note = Tnp_P1
  SITE 229: note = Tnp_P2
  SITE 237: note = Tnp_P3
  SITE 238: note = Tnp_P4
  SITE 250: note = Tnp_P5
MAMSAAESRSVRGVDVAKNELVIYDQKRDQLITIPNTKTAIKQWLKALAGAVSIAIEATDIYHVMFADLAYEAGCSVYLVDGYALSHYRKGVNVRAKTDAIDARLLARYLRNEGGNLHPWVPPQPFYRKLLSLFRRRAALVQARTSLTLSWANEPLLKAAFKSQLASMQRLEALVEKMIKELLEKAGLMAQVKRCMKVEGIGFLTAARLVRSYQRGQFSGGDAFIAFLGMDLRVAQSGQKKGLSKLTKRDDPEARRLLHNAAMSARRTTAWKDYYETQRARGFSSIQVLVMLARQLARVVFALLQNGSEYQTKAA

SEQ ID NO: 16311 - protein, 403 aa, unidentified
  source 1..403: note = protein_898a1df
  REGION 6..158: note = RuvC_domain
  SITE 9: note = RuvC_P1
  SITE 57: note = RuvC_P2
  SITE 95: note = RuvC_P3
  SITE 97: note = RuvC_P4
  SITE 100: note = RuvC_P5
  REGION 266..352: note = Tnp_domain
  SITE 274: note = Tnp_P1
  SITE 305: note = Tnp_P2
  SITE 313: note = Tnp_P3
  SITE 314: note = Tnp_P4
  SITE 325: note = Tnp_P5
MSNCFAGLDWASRTHAVCVIDERGSVRVQFEVAHDAAGLTELVRRLRTAGVSAVAIERPSGLIVDALVEARLCVVPIHPNIVKATRPRYRSHGGKSDATDAYLLADLLRTDGHRFKPLACQSDEIRALRALVRGRDDLVATRVQLANQLRSLLQSFWPGAAEVFAEVDSPIALAFVKRYPTPESASRLGPRRMAGFCGQHGYSGRRSPEELLQRLHQAAAVALGELEMEAKGELALSLVRTLSPLVEQIRVLTSRIEHDVGSFDDGKLIMSFPRAGRVCAAQIVCEIGSVRERFDSDEHLAGEAGVAPVTYASGKSKAVAFRWACNHRLRAALTCLADNSRHASAWAADVYDRAMARGCDHPHATRILARAWLRVIWRAWQDRKPYDPTQHRAAVMLLKTAGG

SEQ ID NO: 16312 - protein, 345 aa, unidentified
  source 1..345: note = protein_5689413
  REGION 14..162: note = RuvC_domain
  SITE 17: note = RuvC_P1
  SITE 65: note = RuvC_P2
  SITE 105: note = RuvC_P3
  SITE 107: note = RuvC_P4
  SITE 110: note = RuvC_P5
  REGION 206..293: note = Tnp_domain
  SITE 214: note = Tnp_P1
  SITE 244: note = Tnp_P2
  SITE 252: note = Tnp_P3
  SITE 253: note = Tnp_P4
  SITE 266: note = Tnp_P5
MNKLKASSTDLAFCGIDVSAATVSVAVIKPDQHLAEREFSNTASGHRSLLTWLGQCGVVVRISLEATGVYSLDLTLALDAAAHCEVAVLNPKLVNRFAQTLVRNKTDSADAVVLAEYSRRMPFTAWSRPSVEQLQLRALGRYIESLAADLTGVKNRLHAAERSTGMPRAVLHDLKQAQAALVRRLARMRQQARKLVEADKLLARRFDLLRNMPGIAETSALSILCELVMLPPEMTVRQWVAMSGLDPSHRESGTSVHKPARISRAGNRHLRRALYMPALSAARHDPHLRAFYRALRERHKTALQALVAVARKMLHAIYGIFKSEKPYDGQRLFPQLQLEVKSIAG

SEQ ID NO: 16313 - protein, 345 aa, unidentified
  source 1..345: note = protein_a39ce54
  REGION 6..147: note = RuvC_domain
  SITE 9: note = RuvC_P1
  SITE 52: note = RuvC_P2
  SITE 87: note = RuvC_P3
  SITE 89: note = RuvC_P4
  SITE 92: note = RuvC_P5
  REGION 211..297: note = Tnp_domain
  SITE 219: note = Tnp_P1
  SITE 249: note = Tnp_P2
  SITE 257: note = Tnp_P3
  SITE 258: note = Tnp_P4
  SITE 270: note = Tnp_P5
MEIITIGLDIAKRVFQVHGVDASGKAVIRRKLRRSEVLAFFGKLPPSLVGIEACGTAHHWAREIGALGHQVRLMPASYVKPYVKRGKTDAADAEAICEAVTRPSMRFVPVKTAEQQAVLVLHRTRDLLVRQRTGLVNALRGHMAEFGLIAPQGISGVADLMALLLGEDETGLPALARQALRTLVAKLETLDQRIEAVEAAILTWHKDNEASRRLAAIPGIGPITASALVATVTDPSQFRSARQFATWIRLVPKQNSSGGKQRQGGVSKQGDRYLRRLLVLGATAVFRHARTKPAAVAGWLKGLLERRPVRLVSVAQANKTARIVRALLAKGDSYRAPAPARMAAA

SEQ ID NO: 16314 - protein, 345 aa, unidentified
  source 1..345: note = protein_83f7abf
  REGION 7..148: note = RuvC_domain
  SITE 10: note = RuvC_P1
  SITE 53: note = RuvC_P2
  SITE 88: note = RuvC_P3
  SITE 90: note = RuvC_P4
  SITE 93: note = RuvC_P5
  REGION 210..297: note = Tnp_domain
  SITE 218: note = Tnp_P1
  SITE 248: note = Tnp_P2
  SITE 256: note = Tnp_P3
  SITE 257: note = Tnp_P4
  SITE 269: note = Tnp_P5
MEQISRIGMDTSKHCFQLHGVNAAEKVVLRKKLRRKEMVAFFKALAPTVIGIEACGASHHWARILRSFGHEVKLIAAQLVKPYVKRGKNDMADAEALCEAMSRPTMRSVPMKTAEQQAALMLVGLRDRLIRNRTQLSNAIRGYATEFGFAAAKGMAHLDPLLDRIRADESVPNLARELFLALAEEYAQLQAQIGEVDAKLMAWHKANECSRRLAKVPGIGPIGATLLMMKTPAPEMFRSGRQFAAWIGLTPKDHSTAGKVRLGVITRAGDEALRSVLVVGATAVIQHVRRGGRGSPWIVDVLKRKPPKLAAVALANKMARVAWKLMVTGNSYTTKSVPAAIARAA

SEQ ID NO: 16315 - protein, 345 aa, unidentified
  source 1..345: note = protein_c344848
  REGION 7..148: note = RuvC_domain
  SITE 10: note = RuvC_P1
  SITE 53: note = RuvC_P2
  SITE 88: note = RuvC_P3
  SITE 90: note = RuvC_P4
  SITE 93: note = RuvC_P5
  REGION 211..299: note = Tnp_domain
  SITE 219: note = Tnp_P1
  SITE 249: note = Tnp_P2
  SITE 257: note = Tnp_P3
  SITE 258: note = Tnp_P4
  SITE 271: note = Tnp_P5
MGQAIRFGIDLAKSVIQVHGVDAQGEVVVRRQLRREQFATFFSKQPPALIGMEACGSAHYWGRELSALGHDVRLMPALYVKAYLKRGKNDARDAEASCEAVGRPTMRFVPIKSVEQQCGRAIERARDLLVRQRTQHANAIRGQLYEMGLTASKGASGIAALLQRIEMSDAAIPPALLPALAPLARQWRAADAEVAALDKQILELVREDPAARRLMTIPGVGPITAHAVVAAVGDGRQFKTARDFAAWVGLTRHNHDTGGKARLTGRITKAGDRGLRRLLVLGASSWLRHVRAPGRTTYPAGSIWIRGVLARRPVRVAVVAQAAKTARIVWAVLTTRDVYRAPGAA

SEQ ID NO: 16316 - protein, 319 aa, unidentified
  source 1..319: note = protein_fdebb0b
  REGION 6..158: note = RuvC_domain
  SITE 9: note = RuvC_P1
  SITE 57: note = RuvC_P2
  SITE 97: note = RuvC_P3
  SITE 99: note = RuvC_P4
  SITE 102: note = RuvC_P5
  REGION 192..278: note = Tnp_domain
  SITE 200: note = Tnp_P1
  SITE 230: note = Tnp_P2
  SITE 238: note = Tnp_P3
  SITE 239: note = Tnp_P4
  SITE 251: note = Tnp_P5
MTSTIIGIDIAKLKFDVARLAEGKYKHAKFANNLEGFAAFAAWLDGFGDTDRRLCLEATGAYGLPLAEFLADGGYFVSVVNPAQIHAFGKSELSRAKTDKADAKLIARYALQADLVAWKPLPANLRQLQALTRRLEHLLEMQRMEQNRLETADTAIVPSINTVLATLAAELKATRQAIQDHVDKDPDLKQQSDLLTSIPGIGPATTAYLLVALSPHHGYANAKQVVAQAGLAPAIRQSGQWQGKTRIAKTGDARLRKALYLPALVAWQHNPAIRVQCQRLKANGKNGKLIVCAAMRKLIHLAFAILKSGKPFDPNFSLA

SEQ ID NO: 16317 - protein, 393 aa, unidentified
  source 1..393: note = protein_d148bb5
  REGION 4..162: note = RuvC_domain
  SITE 7: note = RuvC_P1
  SITE 60: note = RuvC_P2
  SITE 101: note = RuvC_P3
  SITE 103: note = RuvC_P4
  SITE 106: note = RuvC_P5
  REGION 267..354: note = Tnp_domain
  SITE 275: note = Tnp_P1
  SITE 305: note = Tnp_P2
  SITE 313: note = Tnp_P3
  SITE 314: note = Tnp_P4
  SITE 327: note = Tnp_P5
MLYLGIDVAKHNHVASLLDGNAKPLFKAFSFANSTDGADSLLQKLYSHIQCSDEVEIGMEATGHYWLSIYSFLINNGFVVHVVNPIQTDGWRKGTEIRKRKNDIIDSILIADLIRYGDFVETSLSDEDTMSLRNLSRFRHYLVSSIGDLKRKVICVLDQVFPEYPSVFSDIFGETSKELLSHFQTADDFENITAEQLEDALKNVVFKGFAKNKLTHISKLAAHSFGLDFCRDSFALQLKLLIEQIKFIEAQVDDVETEIHTILDRINSPITTIPGIGAVTGAAILGEIGDISRFSNASKLVAYAGIDASVSQSGEYQSTNNKMSKRGSPYLRKALFNAALVAAFHDPVFSAFYQKKRSEGKHHLTSIGAVARKLCNTIFAVLKNNTPYEVQQK

SEQ ID NO: 16318 - protein, 319 aa, unidentified
  source 1..319: note = protein_903ded7
  REGION 10..156: note = RuvC_domain
  SITE 13: note = RuvC_P1
  SITE 56: note = RuvC_P2
  SITE 96: note = RuvC_P3
  SITE 98: note = RuvC_P4
  SITE 101: note = RuvC_P5
  REGION 196..280: note = Tnp_domain
  SITE 204: note = Tnp_P1
  SITE 233: note = Tnp_P2
  SITE 241: note = Tnp_P3
  SITE 242: note = Tnp_P4
  SITE 253: note = Tnp_P5
MDMISQGAIIGIDVSRDWLDIHCLPEGQYERFPNTDMGHERLTELARMTGAVVCFEATGGQEWRLWAELDAAGIVTRQLPPAQIKAFAASRGTRAKTDRIDAELIARFLSFRPDAGRALPAQKLRVLRALTSKRGQLVETRKRLLGQIKARQKQGMDEPFEEMDSTLRCLLDTQVAKLENQIECLIAADDVLAQTASILRSVPGIGPVASTMLIAEMPELGQISGEQAAALTGLAPIAHDSGALRGKRAIGGGRNLLRHVMFQAALVASHHNPTLKPFADRLRAAGKPHKVVITAVARKLVTIVNALCKSRQNWVIQAN

SEQ ID NO: 16319 - protein, 345 aa, unidentified
  source 1..345: note = protein_b050f93
  REGION 14..162: note = RuvC_domain
  SITE 17: note = RuvC_P1
  SITE 65: note = RuvC_P2
  SITE 105: note = RuvC_P3
  SITE 107: note = RuvC_P4
  SITE 110: note = RuvC_P5
  REGION 206..293: note = Tnp_domain
  SITE 214: note = Tnp_P1
  SITE 244: note = Tnp_P2
  SITE 252: note = Tnp_P3
  SITE 253: note = Tnp_P4
  SITE 266: note = Tnp_P5
MNKLVSTQQATEFCGIDVSAASLSVALIAPDGGLAQREFSNDASGHGALSVWLKKCSSRIRVSLEATGIYSLDLALALDAEASVELMVLNPKLVNRFAQTLRRSKTDAADAVVLAEYSMRMPFCRWQRPQASHLQLRTMSRYIGSLVVVQAGLKTRLRSAQSTATTPRAVRVDLKRALAAVERRVEKMRAEALKLVEAEAELYERYHLLTTVPGIGAVSALTMLSELILLALGMTVRQWVASSGLDPAHQQSGTSLNKPSRISRAGNRRLRAALYMSALSASRYDRHLAAFYQALRTRHKTGLQALMAVARKILHAIYGIFKSGTPYDGQRLFPNIRTEVESVAG

SEQ ID NO: 16320 - protein, 404 aa, unidentified
  source 1..404: note = protein_c8d570f
  REGION 11..165: note = RuvC_domain
  SITE 14: note = RuvC_P1
  SITE 62: note = RuvC_P2
  SITE 102: note = RuvC_P3
  SITE 104: note = RuvC_P4
  SITE 107: note = RuvC_P5
  REGION 272..358: note = Tnp_domain
  SITE 280: note = Tnp_P1
  SITE 310: note = Tnp_P2
  SITE 318: note = Tnp_P3
  SITE 319: note = Tnp_P4
  SITE 331: note = Tnp_P5
MEQDIGFNVWCGLDVGKQAHHACALDAAGRRIADKPLPQDQARLEELFTSLLAHGRVLVVVDQPNTIGALPIAVASSMGIQVAYLPGLAMRRIADLHPGNAKTDARDAFIIADAARTMPHTLRRVDLGEETLAELKVLVGFDEDLAAEATRLTNRIRGLLTQIHPALERVLGPKLSTKAGLAVIEHLGGPQGIGKATPSRLLRIITKANPRGAQAFADAIGKALSEQSVVVAGTAAAEQVLPQLAATLRQTLDQRSQLAAQIEKVVDAHPLAPVLTSMPGVGVRTAARILLDVGDAAAFPTAGHLAAYAGLAPVTRRSGTSIRGEFPARSGNKHLKRALFLSSFAALRSDPISRAYYDRKRAQGKKHNAALICLSRRRCDVLYAMLRNQETYRASEPSKQSLAA

SEQ ID NO: 16321 - protein, 316 aa, unidentified
  source 1..316: note = protein_506ec25
  REGION 10..159: note = RuvC_domain
  SITE 13: note = RuvC_P1
  SITE 55: note = RuvC_P2
  SITE 95: note = RuvC_P3
  SITE 97: note = RuvC_P4
  SITE 100: note = RuvC_P5
  REGION 190..274: note = Tnp_domain
  SITE 198: note = Tnp_P1
  SITE 227: note = Tnp_P2
  SITE 235: note = Tnp_P3
  SITE 236: note = Tnp_P4
  SITE 248: note = Tnp_P5
MAMHVSKSIVGVDVAKVELVIYEPDQDLLTSITNDKPAIKRWLKTLPRPTAIAVEATNVYHIDLIELAYEAGLDVYIIDGYQLSNYRKSVGVRSKTDASDARLLARYLKNEGEDLRPWTPPPAVYGKLQSLLRRRASLVQAKASLTQSWANDASLKAVFATFLKSVERLDLLVQKKLRDVLREAGLLEEVARCQAIEGIGFLTATALVMAYNRGDFNSSDSFIAFLGMDLRVSDSGQKNGRRSLTKRGCSEVRRLLHNAAMSASRSIAWKAFYNKHLGSGKATTQVLVMLGRKLARIAFSLMKNQSDYQPKRGILA

SEQ ID NO: 16322 - protein, 412 aa, unidentified
  source 1..412: note = protein_b3bc951
  REGION 4..170: note = RuvC_domain
  SITE 7: note = RuvC_P1
  SITE 67: note = RuvC_P2
  SITE 107: note = RuvC_P3
  SITE 109: note = RuvC_P4
  SITE 112: note = RuvC_P5
  REGION 278..364: note = Tnp_domain
  SITE 286: note = Tnp_P1
  SITE 317: note = Tnp_P2
  SITE 325: note = Tnp_P3
  SITE 326: note = Tnp_P4
MLFVGDDWAEDHHDIEVQDEGGRRLARARLAEGIGGLARLHELIAEHLTDDDVDAETGFVAQSVVIGIETDRGTWVSALVAAGYQVFALNPVQVARYRERHGASGAKSDRGDAHVLAEIVRLDRAHHRPMAGDSPEVEGLKLVARSHQAFIWDRTRHFQRLRSALREYFPAALEAFPDLMVPEALELLERAPDPARAARLSRSKITAALIRAHRRDPEPRAEAIQAVLRAPALRQDPAIEAAYAVIVASAVRLIASLNNQIAELQAVVAEGFGRHPDAEIVTSQPGLGPVLGARVLAEFGDDHGRYAGAKARKNYAGTSPITRASGTRRVVLARYARNRHLADAAHQWAFCALTASPGARAYYDTLRARGTEHHAALRQLGNRLVGILHGCLKTRTTYREDTAWPHLNADAA

SEQ ID NO: 16323 - protein, 342 aa, unidentified
  source 1..342: note = protein_85ec5c9
  REGION 6..147: note = RuvC_domain
  SITE 9: note = RuvC_P1
  SITE 52: note = RuvC_P2
  SITE 87: note = RuvC_P3
  SITE 89: note = RuvC_P4
  SITE 92: note = RuvC_P5
  REGION 211..301: note = Tnp_domain
  SITE 219: note = Tnp_P1
  SITE 249: note = Tnp_P2
  SITE 257: note = Tnp_P3
  SITE 258: note = Tnp_P4
  SITE 270: note = Tnp_P5
MQVTTYGLDLAKRVMQLHWVDMETGEIHRKQMKRRALLEFFANRQPGIVAMEACGSAHYWGRELRNLGHEVHLVAAQFVRPFVKTNKNDAADAAAIWETVQRPDMRFVAVKSEEQQFVLSLHRIREQLIKVRTMQVNQIRGLLYEFGADLPQGRQKGLKEVPDALADLEEFLSPMFLDTVRQQLKRLEQMDKDIADIEKCLALWKKDQEAVKRLMAIPSVGLLTATGNIATVGDMESFRSGREFAAFLGLVPRQSGTGGKVRLLGISKRGDSYLRKLLTHGARAVVNFQIKNRNPWMDKLLCRRPHNVVVVAQANKMARTIWSLLVRDTIYDANHATIKTAA

SEQ ID NO: 16324 - protein, 310 aa, unidentified
  source 1..310: note = protein_5f035b3
  REGION 11..121: note = RuvC_domain
  SITE 25: note = RuvC_P2
  SITE 60: note = RuvC_P3
  SITE 62: note = RuvC_P4
  SITE 65: note = RuvC_P5
  REGION 183..271: note = Tnp_domain
  SITE 191: note = Tnp_P1
  SITE 221: note = Tnp_P2
  SITE 229: note = Tnp_P3
  SITE 230: note = Tnp_P4
  SITE 242: note = Tnp_P5
MRRQLRRGDVLRFFGRLPRCLVGMEACATAHHWARELTKLGHTVRLMPPAYVKPYVKRGKTDIADAEAIAEAVTRPTMRFVAIKTADQQAALMLHKVRELLVRQRTMLINALRGHLAEFGIVAARGPGGVTAAIIALHEAQDRLPELARVALHGLIDQLRIVRGEIARVEKRIVAWHRASNASRRLATIPGIGPITASAIAAAVPDATLFQSGRQFAAWLGLTPRARNSGGKERLVGISKQGDGYIRRLLVTGATAVIRLARQGNASKTWAAKLLERKSARLVSVALANKTARIAWTVLARNQSYVAPAM

SEQ ID NO: 16325 - protein, 315 aa, unidentified
  source 1..315: note = protein_15e2113
  REGION 12..162: note = RuvC_domain
  SITE 15: note = RuvC_P1
  SITE 57: note = RuvC_P2
  SITE 97: note = RuvC_P3
  SITE 99: note = RuvC_P4
  SITE 102: note = RuvC_P5
  REGION 193..276: note = Tnp_domain
  SITE 200: note = Tnp_P1
  SITE 229: note = Tnp_P2
  SITE 237: note = Tnp_P3
  SITE 238: note = Tnp_P4
  SITE 250: note = Tnp_P5
MAMPVSISKPIVGVDVAKNELVIYNAELDLLEEIPNTKAAITKWLKALPGAVVIAIESTNIYHLAFADLAHEAGCVIYMIGGYELHHYREGVKVRAKTDALDAKLLARYLKNEQQELRPWTPPSPLYRQLLSLFRRRAALVQARVGLEQSWANEPLLKTAFAEQVKSMQQLETLVEKTINDQLKEAGLVGQLKRCLKVEGIGFLTGARLIAAFQRGDFRNADAFVAFLGMDLRVSKSGQKDGRRSLTKRGDPEARRLLHNAAMSASRTKAWKGFYESQRARGFSTTQALVMLARKLARVVFALLKGQGEYRPKVS

SEQ ID NO: 16326 - protein, 354 aa, unidentified
  source 1..354: note = protein_2a4e67f
  REGION 12..152: note = RuvC_domain
  SITE 15: note = RuvC_P1
  SITE 58: note = RuvC_P2
  SITE 93: note = RuvC_P3
  SITE 95: note = RuvC_P4
  SITE 98: note = RuvC_P5
  REGION 217..302: note = Tnp_domain
  SITE 225: note = Tnp_P1
  SITE 255: note = Tnp_P2
  SITE 263: note = Tnp_P3
  SITE 264: note = Tnp_P4
  SITE 276: note = Tnp_P5
MSQNPNTAIAIVGIDIGKNSFHVVGLDQRGAIVLRQKWSRGQVEARFANMPPCQIGMEACVGAHHLSRQLKALGHDARLMPAKYVRPYSKGQKNDFRDAEAIAEAVQRPTMKFVATKTADQLDLQALHRVRERLVSQRTGIINQIRAFLLERGVAVRQGLRFLRAELPRILATPPDVLSPRMVRVIEDLAGDWRRLDERVQNLSDEIEAVARQDAGCERLMSVPGIGPIISSAMVAAIGTGDGFSKGRDFAAWLGLVPKQISTGDRTILGKISKRGNRYLRVLFVQAAWVVLIKPKSWERHGLKPWIEAAKKRLHPNVLAIALANKLARIAWSVLAHGRNFETRTNTNATVQAA

SEQ ID NO: 16327 - protein, 342 aa, unidentified
  source 1..342: note = protein_3f8ed1b
  REGION 6..148: note = RuvC_domain
  SITE 9: note = RuvC_P1
  SITE 52: note = RuvC_P2
  SITE 87: note = RuvC_P3
  SITE 89: note = RuvC_P4
  SITE 92: note = RuvC_P5
  REGION 211..297: note = Tnp_domain
  SITE 219: note = Tnp_P1
  SITE 249: note = Tnp_P2
  SITE 257: note = Tnp_P3
  SITE 258: note = Tnp_P4
  SITE 270: note = Tnp_P5
MKITTVGIDLAKNVIQVHGINEQGNKVFNKPLQRKHVLTHFAQLPPCLIGMEACSSAHFWARKLQGQGHTVKLMAPQFVKPYVKTNKNDAADAEAICEAVTRPTMRFVPIKNGEQQAVLSLHRARQGFVKARTAQANQIRGLLMEYGITIPQGISHITKRLPELLEDGENELPGVFRQLLQRLGDHLKDLDRQATELDEQIKTWHRGSEASKTLARIPGIGPLTASALVASIGDASSFKNGRQLAAWLGLVPRQHSSGGKPRLQGISKRGDTYLRTLLIHGARSVIRVATGKTTPMHCWAVNLVERRNKNVAAVALANKNARIVWALMTQNREYQSDFVQTV

SEQ ID NO: 16328 - protein, 401 aa, unidentified
  source 1..401: note = protein_3517d25
  REGION 5..163: note = RuvC_domain
  SITE 8: note = RuvC_P1
  SITE 62: note = RuvC_P2
  SITE 102: note = RuvC_P3
  SITE 104: note = RuvC_P4
  SITE 107: note = RuvC_P5
  REGION 274..363: note = Tnp_domain
  SITE 282: note = Tnp_P1
  SITE 312: note = Tnp_P2
  SITE 320: note = Tnp_P3
  SITE 321: note = Tnp_P4
  SITE 334: note = Tnp_P5
MNPVIGLDVSKGESHAQAFSDRGSPYGKTFRFEHNLEGLASFLRFTQNLESFTGQRPAIVLEATGHYHSPVIQFLDEHQYLYIIINPLISHQAKKMNLRKVKTDVADAYQLGELFYKEELEPYKKRGQYLMNLRYLTRQHESLTEMYVQTKLQFQAVLDQVFPEYHGVFGDLYSKVSLRFLAQYPTSQSVLAMTVENVTANIQRLVGHVASNRWSLERAQKLMAAAQLNPFRETAFPSHLISLELFINLLLQYQEHLTKLDKSIEALAEELLEYDLIQSIPGIGTKIAATILAEIGEIDRFDHAKKLVAFAGIDPSVFSSGKFTATRNKITKRGSRRLRTALYQAVRCGLRSSRNKKIRAYYDKKRVEGKLFKVAVIACANKLIQWIYAILTKKEPYRLTE

SEQ ID NO: 16329 - protein, 404 aa, unidentified
  source 1..404: note = protein_18c1a26
  REGION 10..161: note = RuvC_domain
  SITE 12: note = RuvC_P1
  SITE 60: note = RuvC_P2
  SITE 98: note = RuvC_P3
  SITE 100: note = RuvC_P4
  SITE 103: note = RuvC_P5
  REGION 268..354: note = Tnp_domain
  SITE 276: note = Tnp_P1
  SITE 307: note = Tnp_P2
  SITE 315: note = Tnp_P3
  SITE 316: note = Tnp_P4
  SITE 327: note = Tnp_P5
MQDATARFGSVDWATRGHAACVVDAAGQIVDQFTVDHTALGLATLVRHFQHQQVRRVAIERPDGPVVEALLAADLEVVVVSSRAVKALRTRYGLAGNKADRSDAYVLADCLRTDGHRWPALQTDTLQTLALRAAVRARKDLVATRVARANQLRAHLQVVFPAAVGVFAEIDSGIALRFLERFPNQDKAAWLSERRLAAWLQANAYCGRRPPGDLLQRLHSATPGVRGQAAEALAVVTLSLVRVPRTLAAEIAELEAHIREQLALHPDGPIFQSLPRAGSVRAAALLAEIGDCCARFPSSESLAALAGAVPSTRASGQHRVVTFRWACDKKLRDALVDFAQDTPRASPWAEQLYRRHRQQRKTHPHAARILTRAWINVIWRCWQDRQPYDPARHRGLQRVLASGG

SEQ ID NO: 16330 - protein, 389 aa, unidentified
  source 1..389: note = protein_3048ca1
  REGION 4..161: note = RuvC_domain
  SITE 7: note = RuvC_P1
  SITE 59: note = RuvC_P2
  SITE 99: note = RuvC_P3
  SITE 101: note = RuvC_P4
  SITE 104: note = RuvC_P5
  REGION 265..352: note = Tnp_domain
  SITE 273: note = Tnp_P1
  SITE 303: note = Tnp_P2
  SITE 311: note = Tnp_P3
  SITE 312: note = Tnp_P4
  SITE 325: note = Tnp_P5
MIYVGIDIAKLDHYASAIDSDGVVLIEPFKFRNDADGFHTLSSKLESLPTGDKVIIGLESTAHYGNNLVRYLVCRSYDVCVLNPIQTATLRKNNIRKTKTDKVDTFIICKALAMQQSYRLVSFDDLDLMDLKSLGRFRQKAIKQRTRLKIQLKASLDQTFPELQYFFKSGLHQKGVYALLREAPTAKDVASMHLTHLAHLLDVASHGHFKKDQAKELRVLARNSVGYPDSAIAIQIVHAVEQIELLDSQIAHVEAEMTDIMKVRDSVIMTIPGIGYINGGMILGEIGDVHRFSSPKQLLAFAGLDPTVYQSGQFQAKKTKMSKRGSKVLRYALVNAAHNVVKNNVTFAAYYDAKMAQGRTHYNALGHCAGKLVRVIFKMLTDNVEFNLD

SEQ ID NO: 16331 - protein, 313 aa, unidentified
  source 1..313: note = protein_74fb065
  REGION 10..169: note = RuvC_domain
  SITE 13: note = RuvC_P1
  SITE 55: note = RuvC_P2
  SITE 95: note = RuvC_P3
  SITE 97: note = RuvC_P4
  SITE 100: note = RuvC_P5
  REGION 190..276: note = Tnp_domain
  SITE 198: note = Tnp_P1
  SITE 227: note = Tnp_P2
  SITE 235: note = Tnp_P3
  SITE 236: note = Tnp_P4
  SITE 248: note = Tnp_P5
MTKPVEYILVGIDVSKAELVIARSDSPQIEAISNSPSAIKRWLKSLPQGSRIALEATGIYHRQLATLAHAAAYPLYLLDGYRLSRYRDGVGTRAKTDPSDARLILRYLSNELEELKPWIPAHDAFYRIQSLIRRRASLVHTRVALSQSLQDIPELKQVRKQLDTHIRRVELLITQRLKQALADVGWDADAKRCMDIEGIGELSSMALANTFHRGRFKSSDAFIAYLGMDVKVRDSGKQVGRRKLTKKGDPELRRLLYNAAMAARKTTAWKELYETYLSQGLKPIQALIKLARKLARIAFALMQNQTVYRPKTL

SEQ ID NO: 16332 - protein, 326 aa, unidentified
  source 1..326: note = protein_4974031
  REGION 6..160: note = RuvC_domain
  SITE 9: note = RuvC_P1
  SITE 57: note = RuvC_P2
  SITE 95: note = RuvC_P3
  SITE 97: note = RuvC_P4
  SITE 100: note = RuvC_P5
  REGION 200..287: note = Tnp_domain
  SITE 208: note = Tnp_P1
  SITE 238: note = Tnp_P2
  SITE 246: note = Tnp_P3
  SITE 247: note = Tnp_P4
  SITE 260: note = Tnp_P5
MKKQVIGIDISKDKLDFCVLDKQSVQVLSKGEVQNNEKAIKKWLGQFEQSTSTFALEHTGHYGAALCKSLADQSFIFYLINPLELKKSLGIQRGKSDAKDAYRIAEYGITNKHKLKPYQFPAESLSRLKALMTARERYVKMSVQVQNSLKANEILNKTIDVKVLIKEEKKQDQSIKKSIKAIENEMQKIIKSDQELEESYRKATSVIGIGPIIALKCIVETENFSKFSEPRKFCCHCGLAPFPYQSGSSIKGKTKTHFLRDKSLKAVLTKGAITAIQHDPQIKAYYHRKIGEGKHHMSVINAVANKLVLRIFAVAKRETLFVKLSA

SEQ ID NO: 16333 - protein, 339 aa, unidentified
  source 1..339: note = protein_28c8bfc
  REGION 6..148: note = RuvC_domain
  SITE 9: note = RuvC_P1
  SITE 52: note = RuvC_P2
  SITE 87: note = RuvC_P3
  SITE 89: note = RuvC_P4
  SITE 92: note = RuvC_P5
  REGION 211..297: note = Tnp_domain
  SITE 219: note = Tnp_P1
  SITE 249: note = Tnp_P2
  SITE 257: note = Tnp_P3
  SITE 258: note = Tnp_P4
  SITE 270: note = Tnp_P5
MTVKTIGLDLAKDVFQVHGISANGRVIFNKKVKRAKLLQFFESLPPCVVGMEACGSAHHWGRELRKLGHDVRLMPASYVKPYVKRGKTDAVDAEAICEAVRRPTMRFVELKTEDQQAILTIHRTRDLVVRQRTQVVNMIRSILREFGHVLPTGVEAVLAFAKRHLDGDLPDMPELANGILGTLCHQLMGLNTRVVGYTKMIEQHAMMNADARRLMRIPGIGPITASAIIATIGDAKQFRTGRDLAAWLGLTPLNKSSGGKERLGKITKKGDRYIRKLLIVGMTSRALMGKKHPERVDLWTAKILAGKPFRLATVAMANKAARIVWAMLTKQQDYRQPST

SEQ ID NO: 16334 - protein, 386 aa, unidentified
  source 1..386: note = protein_5df7d54
  REGION 4..160: note = RuvC_domain
  SITE 7: note = RuvC_P1
  SITE 58: note = RuvC_P2
  SITE 99: note = RuvC_P3
  SITE 101: note = RuvC_P4
  SITE 104: note = RuvC_P5
  REGION 263..346: note = Tnp_domain
  SITE 268: note = Tnp_P1
  SITE 298: note = Tnp_P2
  SITE 306: note = Tnp_P3
  SITE 307: note = Tnp_P4
  SITE 319: note = Tnp_P5
MIYIGIDISKYKHDCFICNDTGEVIVENFSFENTKKGFQQFLDLLKPYDNSNVHIGLEATGHYGLNLKLFLEKNNYSFMEFNPLLVKEFKKSLTLRRTKTDKVDAIVICQKLMSVPYKPNSKLFYHKYSIKSLSRLRDSLIKQRSKYMVQLTNILDIVFPEFKSFFNNRFSSTSLYLLNKYRSAEKIANMRDFDTPNKLSKGHFTYAKFAKLKELAKNSIGESNEVFEIELQTLISLYNEIDSKINSIDKQISTIIKELNPPTLSIPGIGELTTAVIISEYGDFNRFSNADKLLSFAGLEPGIYQSGTILTNGKMVKRGSGYLRYSLMNIANVVIRYNPIFYDFYLKKRSEGKTHRVALSHVCKKLLRVIYKLETQNIQFDPSLLK

SEQ ID NO: 16335 - protein, 348 aa, unidentified
  source 1..348: note = protein_cdc2e2d
  REGION 6..147: note = RuvC_domain
  SITE 9: note = RuvC_P1
  SITE 52: note = RuvC_P2
  SITE 87: note = RuvC_P3
  SITE 89: note = RuvC_P4
  SITE 92: note = RuvC_P5
  REGION 209..295: note = Tnp_domain
  SITE 217: note = Tnp_P1
  SITE 246: note = Tnp_P2
  SITE 254: note = Tnp_P3
  SITE 255: note = Tnp_P4
  SITE 267: note = Tnp_P5
MNLKRIGLDTSKAVFTLHGVDQDEKAVLCRNMKRAEMEAFFAKLSPTHVALEACGGSHHWGRRLASFGHTVQLIPPQYVKPFVRRGKNDRNDAEGISEAAARPGMPSVSVRSAEQQAEAIVLSARELLIRQRTQLVNAVRGHAAEFGIIAAKNISQLPVLLETVAAAQTVPTTAKQLLEFLGGQVAQLDERIGELERRMKQQHKANPVSQLLAEVPGIGPIGALSLALTIDPGRFQSGRHFAAWLGLTPKEHSTGGRQRLGGISRAGNERLRQLLVLGAMAVIKYAKPGSKTASAWLLALLERKPRKLAAVALANKMARVVWAMMATGEAYRGSKKVATQAAGVAVAA

SEQ ID NO: 16336 - protein, 352 aa, unidentified
  source 1..352: note = protein_51f43e8
  REGION 7..149: note = RuvC_domain
  SITE 10: note = RuvC_P1
  SITE 53: note = RuvC_P2
  SITE 88: note = RuvC_P3
  SITE 90: note = RuvC_P4
  SITE 93: note = RuvC_P5
  REGION 212..301: note = Tnp_domain
  SITE 220: note = Tnp_P1
  SITE 250: note = Tnp_P2
  SITE 258: note = Tnp_P3
  SITE 259: note = Tnp_P4
  SITE 271: note = Tnp_P5
MNEIIRIGMDTSKHFFQLHGVNAAEDVVLRRKFRRKEMEKFFQKLSPCEIGIEACGASHHWARWLQSLGHTVRMMPPQLVKAYVQRNKNDAADAEALCEAMSRPKIRARFVPVKTAEQQADLMLMSVRERLVHDRTRLSNAIRGHAAELGYAAAKGMAHLEPLLERLQADDRLPERALKLFAAMAEDYWRLTQRLSEIDTELKAWHQSNECSQRLDRIGGVGIICAALLVMKVPDPAAFESGRDFAAYLGLTPKDHSTGGKLRLGRITRAGDEALRCNLVAGATAVIQHVRRTGKGSPWLIELLKRKPPKLVAVALANKIARIAWKLMKTGEAYNPTHAKAAQVQAEGAAIA

SEQ ID NO: 16337 - protein, 396 aa, unidentified
  source 1..396: note = protein_939c947
  REGION 5..164: note = RuvC_domain
  SITE 8: note = RuvC_P1
  SITE 61: note = RuvC_P2
  SITE 101: note = RuvC_P3
  SITE 103: note = RuvC_P4
  SITE 106: note = RuvC_P5
  REGION 261..347: note = Tnp_domain
  SITE 269: note = Tnp_P1
  SITE 300: note = Tnp_P2
  SITE 308: note = Tnp_P3
  SITE 309: note = Tnp_P4
MRLLVGDDWAQDHHDIEVMDEAGRVLARRRVPEGVAGIGQLHELISRFLPEQGTDAEVQVGIETDRGPWVAALVAAGYTVFPVNPLQASRYRSRHSVSGAKSDSGDAHVLADVVRTDAHQLRPAAGDSQQAEAVKVLARTHTTLIWQRAAMAQRLRAQLLEYFPAAVTAFGDLDAPDALELLGKAPDPARAAKLTRAQISAVLKRAGRYKIAERTGAILATLRSPQLAQAPALTAVIATLNDQVAVLQGQVEAHFGQHPDAEIYLSQPGLGAITGARVLGEFGDDPYRYACAKARRNYAGTSPITRASGKKKIVAARFVRNDRLIDALMIQAFAALRVSPGARTFYDDLRTRGIEHNDALRRLASILHGCLKARTCYDETTAWGHRENTGQSPVAA

SEQ ID NO: 16338 - protein, 344 aa, unidentified
  source 1..344: note = protein_0b50220
  REGION 7..147: note = RuvC_domain
  SITE 10: note = RuvC_P1
  SITE 54: note = RuvC_P2
  SITE 89: note = RuvC_P3
  SITE 91: note = RuvC_P4
  SITE 94: note = RuvC_P5
  REGION 213..297: note = Tnp_domain
  SITE 221: note = Tnp_P1
  SITE 250: note = Tnp_P2
  SITE 258: note = Tnp_P3
  SITE 259: note = Tnp_P4
  SITE 271: note = Tnp_P5
MNSIKVVGIDLAKSVFQVCVWMSDGTVASNRKIPRNELLDTLRQFPANTLIAMEACATSHYWGRTFKSIGLLVRLIPTQHVKAFTRHQKNDANDALAICEAALRPGIHFVTIKTVGQQDIKALRSARQLMVEQRTAVANQARALAAEQGIELPVGIHILSQRLPELIEDPALDISPVLRGLLFSLLENLHFLDERIRSTEHNILALCQQLPKYKVLMTIPGVGPLIAAAFLSEVNAEQFTNGRQLSSWCGLVPRQRSSGGKNNLSSMTKNGNRDLRTLIIHGARSVMFWSQKRDDALGSWMKHLIERRGKMKATVALANKLTRIIWRLLTGSENFNINKAFATN

SEQ ID NO: 16339 - protein, 343 aa, unidentified
  source 1..343: note = protein_6c91983
  REGION 6..149: note = RuvC_domain
  SITE 9: note = RuvC_P1
  SITE 54: note = RuvC_P2
  SITE 89: note = RuvC_P3
  SITE 91: note = RuvC_P4
  SITE 94: note = RuvC_P5
  REGION 213..299: note = Tnp_domain
  SITE 221: note = Tnp_P1
  SITE 251: note = Tnp_P2
  SITE 259: note = Tnp_P3
  SITE 260: note = Tnp_P4
  SITE 272: note = Tnp_P5
MKINRVGVDLAKNVFQLHGTDRKGKAVWRRQLSRGKWLQVLSDNVEPGTEIGMEACAGAHHWARLLAQRGYPVKIIPPQFVKPFVKSNKNDANDAQAICEAMGRPNMYPVRVKTVAQQDIQAIHRVREEIKSHRIAKANQIRGLVAEYGLVAPQQLPALRRAIPGWLEEADNGLTLLFRHLLQGLWGDLYALDQRMAELDKQITVIAQEDPTARRLQQLRGVGPLIATALVATVGDARQYRKGRDMAAALGLTPRQHSSGGKDRLLGISKRGDAYLRCLLVHGARSAVRTAKDKEDRLSRWIIDLQARRHANVVAVAMANKMARMAWAMMVKETDYDPGFTAC

SEQ ID NO: 16340 - protein, 315 aa, unidentified
  source 1..315: note = protein_def8b95
  REGION 5..148: note = RuvC_domain
  SITE 8: note = RuvC_P1
  SITE 52: note = RuvC_P2
  SITE 92: note = RuvC_P3
  SITE 94: note = RuvC_P4
  SITE 97: note = RuvC_P5
  REGION 186..270: note = Tnp_domain
  SITE 194: note = Tnp_P1
  SITE 223: note = Tnp_P2
  SITE 231: note = Tnp_P3
  SITE 232: note = Tnp_P4
  SITE 243: note = Tnp_P5
MVSYLGIDVSSLSLDAAVRPQGTRLHVSNDPAGFEALLDGLCGLSIKRVLLEATGGYERNILRFLQDAGYKVIRVNPRRARAFAESIGVKAKTDAIDAEVLAHYAEVIPDQPTLRISPERALLRELLQQRDRLVQQRDDDRRRLKQAQFSAVSDFLKANLQHFKSQIKLIEQAISQQTEALKDERVTQLVQVKGIGVVTAGKLITLLPELGRVESKEIASLVGVAPFNHDSGKSVGKRSISGGRFEARRSLYMSCLVAIKYNPALKARYEALRGRGKVAKVALVACMRVLIVRLNAMLRTGKPWLDLVLPQPMRT

SEQ ID NO: 16341 - protein, 423 aa, unidentified
  source 1..423: note = protein_4fb2ae5
  REGION 9..157: note = RuvC_domain
  SITE 12: note = RuvC_P1
  SITE 63: note = RuvC_P2
  SITE 97: note = RuvC_P3
  SITE 99: note = RuvC_P4
  SITE 102: note = RuvC_P5
  REGION 259..347: note = Tnp_domain
  SITE 267: note = Tnp_P1
  SITE 298: note = Tnp_P2
  SITE 306: note = Tnp_P3
  SITE 307: note = Tnp_P4
  SITE 318: note = Tnp_P5
MKVTFLTCCGVDVHKSFLVATIIKTTGGIDPSYLKKRFSTFNNSILEFKQWLLDNDCHDVCMESTGKYWIPVFNLLEDEINVTIANPKWVKAVKGNKDDTKDSKWIGDLFRLGLVKGSYVPCKAIRILREYTRYRYKLVSCRSSEKNRYQNALTVCNVALDSVVSDIFGKSSTSIIDYLLEQPGTSVNHEEIASKLLKSLKSKEDAVIESIEGYQMTDSQKYRMRLIRTHMDYITAEINDIDSSIEKMISSNPDYENAVWLLCTIPGVKRDSAIAIISEIGTDMTQFCNSKRLCCWAGLTPGCNETGGKKKSVRIMRAGVYLKPALVQCAHAAVKSSKSPYYKKKYESLVKRRGKKRAIIAIARMILTAIYQMLSTGEEWNPCDLYKVDMPAPLIEKQKTKAIKQAKKLLLREGIISESQLVS

SEQ ID NO: 16342 - protein, 411 aa, unidentified
  source 1..411: note = protein_aaa2461
  REGION 4..160: note = RuvC_domain
  SITE 7: note = RuvC_P1
  SITE 57: note = RuvC_P2
  SITE 97: note = RuvC_P3
  SITE 99: note = RuvC_P4
  SITE 102: note = RuvC_P5
  REGION 274..361: note = Tnp_domain
  SITE 282: note = Tnp_P1
  SITE 312: note = Tnp_P2
  SITE 320: note = Tnp_P3
  SITE 321: note = Tnp_P4
  SITE 334: note = Tnp_P5
MNAVGIDISKGKSMVSVMRPLGEVVAKPFSVRHTGSELKELADYLKSLNGETRVIMEHTGRYYEPVAQFLHDAGLYVSAVNPKLIKDYGNNSLRKVKTDKADSRKIAKYGLDNWVELRQYASMDKIRYQLKTLNRQCNLYTKTKTMMKNNLIALLDQTYPGVNALFGSPVREDGTQKWVDFAASFWHVDCVRNMSPAAFTERYRKWCKRHGYNFSSDRAAGIHAGAKDQIAVMPKDDLTKMLIRQAIVSLNAVSKTVEQMKAEMLQLAAQLPEYPVVMGMHSVGDSLGPQLMAEIGDVTRFARRSSITSFAGVDPGADQSGGHEAKSVPTSKSGPPELRKALFLVMDNLLKSMPQDDPVYRFMDKKRAEGKPYLVYMTAGANKFLRIYYGKVKEYLAKLEQPSEPVSNERI

SEQ ID NO: 16343 - protein, 416 aa, unidentified
  source 1..416: note = protein_3f5b11d
  REGION 9..154: note = RuvC_domain
  SITE 12: note = RuvC_P1
  SITE 59: note = RuvC_P2
  SITE 93: note = RuvC_P3
  SITE 95: note = RuvC_P4
  SITE 98: note = RuvC_P5
  REGION 248..335: note = Tnp_domain
  SITE 256: note = Tnp_P1
  SITE 286: note = Tnp_P2
  SITE 294: note = Tnp_P3
  SITE 295: note = Tnp_P4
  SITE 307: note = Tnp_P5
MEPQMNKVCGIDVHKRFLIATILSRNGTKEIRRFSATLEDLLTFRDWLIENGCEQAAIESTGIYWHPVHAVLEGKIDLIVANAYKIKHTPGRKTDISDSEWIAELCLNGMIEPSRIFPKDDRELRRLTRAREGYVKQMTQEKNKIHHSLDSACIKLASVVSDIFGKSGMYLLNSILEGKDIDEIVEGIPSSRLKKKADQIKEAIKSHLEISQIILIRGSLCLMRSIQERINELDGEISARIQRRKNDLAIAMSIPGMGFISATAILAEIGDYTDFENSEKLAAWCGLVPSLYQSAEKVVLGGITKQGSKHIRRMLIQIAYAISRTKKSKLKRFFLRIQAKKGSKVAAVALARKVLCILHHLLINQEMYQEDEDKKNTRRKTIVSPSSIEMPIQEMIDCIVRAGYVVTKSDSRGRSG

SEQ ID NO: 16344 - protein, 300 aa, unidentified
  source 1..300: note = protein_7afaddd
  REGION 1..72: note = RuvC_domain
  SITE 10: note = RuvC_P3
  SITE 12: note = RuvC_P4
  SITE 15: note = RuvC_P5
  REGION 176..263: note = Tnp_domain
  SITE 184: note = Tnp_P1
  SITE 214: note = Tnp_P2
  SITE 222: note = Tnp_P3
  SITE 223: note = Tnp_P4
  SITE 236: note = Tnp_P5
MRKNNIRKTKTDKVDTYIICKTLMMQESLRFVTFYDLDLMDLKALGRFRQKTIKQRTRLKIQLTSYVDEIFPELQYFFKSGLHQKSVYALLKEAPTPEAIASMHMTHLAHLLKVNSHGRFDKEMAQQLRVLAQKSVGASDSSLSIQVTHTIQQIELLDSQLERVEAEMTEIMKFNDSVIMTIPGIGYINGGMILGEIGDIRRFSSPNKLLAYAGLDPSVYQSGNFQAKKTRMSKRGSKVLRYALVNVAHNVVKNNATFKAYYEAKMAEGRTHYNALGHCAGKLVRIIWKMMTDNVEFNLD

SEQ ID NO: 16345 - protein, 325 aa, unidentified
  source 1..325: note = protein_1f8cf49
  REGION 6..155: note = RuvC_domain
  SITE 9: note = RuvC_P1
  SITE 54: note = RuvC_P2
  SITE 92: note = RuvC_P3
  SITE 94: note = RuvC_P4
  SITE 97: note = RuvC_P5
  REGION 197..284: note = Tnp_domain
  SITE 205: note = Tnp_P1
  SITE 235: note = Tnp_P2
  SITE 243: note = Tnp_P3
  SITE 244: note = Tnp_P4
  SITE 257: note = Tnp_P5
MEKTFIGIDVSSNRLDICVFSQGERHSFVIKNAIQSITRFFKKHNSETVFVAMENTGRYNWSLYEALSSFKGHIYVISPLHMKRSMGLIRGKNDKVDAIRIVDFIQKNYEQLTEWRPLPVAIENIKVLLSERNLRISQKKQMDQQLSYYGLLKNTGLDKELLKLNRQMIKTLKAQIELLEKKINEIINTDESLSVLAKLISSVPGVGKVLTWTLISATEGFQKITEARKLACFCGVVPFEHQSGTSVRGRTRVSSFADKRLKTILHMAAMRAVRLKNELQVYYNRKVKEGKNKMAVLNAVRNKIIHRVFAVIKQQRPYQMDLALS

SEQ ID NO: 16346 - protein, 320 aa, unidentified
  source 1..320: note = protein_523b022
  REGION 6..153: note = RuvC_domain
  SITE 9: note = RuvC_P1
  SITE 58: note = RuvC_P2
  SITE 98: note = RuvC_P3
  SITE 100: note = RuvC_P4
  SITE 103: note = RuvC_P5
  REGION 193..279: note = Tnp_domain
  SITE 201: note = Tnp_P1
  SITE 231: note = Tnp_P2
  SITE 239: note = Tnp_P3
  SITE 240: note = Tnp_P4
  SITE 252: note = Tnp_P5
MHTLSVGIDMAKAKFDAAILNSEDKYRSKIFPNTSAGFLQFLDWLAKHNALGAHLCMETTGIYGRDLANFLVQKQLLVSVVNPAQIHAFGKTELNRAKTDKADARLIARYCRMHRPAPWAPPAEEIATLQALVQRLEDLLGLQMMENSRLEAATGPARESVEAVLQFIEQQIEMVRLQIQIHIDQHPGLKSQKELLSSIPGIGDNTAATLLAFLSPVERFHTAKQVVAYAGLNPRIRQSGQWAGKSPIAKTGNALLRKALYLPAVVAKHHNPIIAAFCDRLLARGKRPMQVVVAAMRRLLHLVFGVLKSGKRFDPKFGLA

SEQ ID NO: 16347 - protein, 408 aa, unidentified
  source 1..408: note = protein_4ee0909
  REGION 5..161: note = RuvC_domain
  SITE 8: note = RuvC_P1
  SITE 58: note = RuvC_P2
  SITE 98: note = RuvC_P3
  SITE 100: note = RuvC_P4
  SITE 103: note = RuvC_P5
  REGION 275..362: note = Tnp_domain
  SITE 283: note = Tnp_P1
  SITE 313: note = Tnp_P2
  SITE 321: note = Tnp_P3
  SITE 322: note = Tnp_P4
  SITE 335: note = Tnp_P5
MLNAVGIDVSKGRSTVAVLQPGGVVIRKPFDVYHNQNDLNDLVTFIKSLDGDTKAVLECTGRYHRPIVETLHRADIFVSAVNPHLIRNFGNNTIRKVKTDPADAKKIARYALDNWHELSEYSDMDSKREQLKTMNTQFDFFMKQKTAAKSNLIALLDQTYPGVNNLFDSPVRADGSEKWVDFAYSFWHVDCVRKLSLNAFKERYTAFCKKHGYIFNELKAEEIYSASKSLVATLPKENGYRDLIRFSIKQLNLESEHVEKLRVDMNSLAAQLPEYPVVMGMYGVGTTFGPQLMAEIGDVMRFTHREALTAFAGVDPGRDDSGQRVAKSVKASKCGSARLRKTLFQIMSCLLQNMPEDDPVYQFIDKKRSEGKEYYVYMTAGANKFLRIYYGKVKEYMRNLQAEQSQGK

SEQ ID NO: 16348 - protein, 416 aa, unidentified
  source 1..416: note = protein_6f2e833
  REGION 4..160: note = RuvC_domain
  SITE 7: note = RuvC_P1
  SITE 57: note = RuvC_P2
  SITE 97: note = RuvC_P3
  SITE 99: note = RuvC_P4
  SITE 102: note = RuvC_P5
  REGION 274..361: note = Tnp_domain
  SITE 282: note = Tnp_P1
  SITE 312: note = Tnp_P2
  SITE 320: note = Tnp_P3
  SITE 321: note = Tnp_P4
  SITE 334: note = Tnp_P5
MNAAGIDVSSRKSTVAVLRPFGEVVRLPFDVAHNTEGLASLAEQLKALDRETRVVLEHTGRYYEPVAKALHEAGLYVSAVNPLLIKEYGANSLRRVKTDKADAVKIARYALDNWADLRDYTPMDTIRYDLKTLNRQFQLASKQRTASANNLIALLEQSFPGIRKCFDSPVRSDGTQKWVDFVHTFWHVECVRKQSLNAFSERYRKWCKRHGYIFKQGNAVEVYSLAKNAVVLVPKSEVTKVLVQEAANQLTSISRSVETYRAEMERLASTLPEYPVVMAMYGVGKSFGPQLMAEIGDVRRFERKQSLVAFAGIDPMPNQSGDKNVRSNKSSKRGSPYLRKTLFNIMGIYLKCSPQDEPVYQFLDHKRSEGKPFYVYMTAASNKFLRRYYAQVRDYLSTLDDLPPVDMDSTGLKTSD

SEQ ID NO: 16349 - protein, 342 aa, unidentified
  source 1..342: note = protein_030c53b
  REGION 7..149: note = RuvC_domain
  SITE 10: note = RuvC_P1
  SITE 53: note = RuvC_P2
  SITE 88: note = RuvC_P3
  SITE 90: note = RuvC_P4
  SITE 93: note = RuvC_P5
  REGION 211..296: note = Tnp_domain
  SITE 219: note = Tnp_P1
  SITE 249: note = Tnp_P2
  SITE 257: note = Tnp_P3
  SITE 258: note = Tnp_P4
  SITE 270: note = Tnp_P5
MSEIITVGLDLAKNVFQVHGADGAGRAVLRKKLRRGQVLEFFSQLPTCVVAMEACGGAHFWGREIGKLGHEVRLIAPAYVKPFVKRQKNDAADAEAICEAALRPTMRFVPVKSEETQGTAMVFRVRELLIRQRTQAINALRGHLGEFGQVVPQGAANASKLIAIVEDLDSGLPADAIPTLKVLIVALAQLEAEIGKLDDEISRRAKENEVALRLMTVPGIGPLIATAIATLEPPPENFRKARDFAAWLGLTPRQHSTGGKQRLGATTKMGERSLRRLLIIGANSVIIKRHVHFAARPGTWLSGMLTRKPPMLVRVALANKMARIVWALMARGGVYQSPVAAA

SEQ ID NO: 16350 - protein, 322 aa, unidentified
  source 1..322: note = protein_7337fee
  REGION 9..157: note = RuvC_domain
  SITE 12: note = RuvC_P1
  SITE 56: note = RuvC_P2
  SITE 96: note = RuvC_P3
  SITE 98: note = RuvC_P4
  SITE 101: note = RuvC_P5
  REGION 195..279: note = Tnp_domain
  SITE 203: note = Tnp_P1
  SITE 232: note = Tnp_P2
  SITE 240: note = Tnp_P3
  SITE 241: note = Tnp_P4
  SITE 252: note = Tnp_P5
MSQPSPLCVGIDVSKASLDIAASTTISAFTISNDPDGFDVIVSTLKEHTISLILMEATGGLEAAVAYALQAEGLDVVIINPRQARDFARAMGYLAKTDRIDAKVLAQMAEVIDRHPERERFIRALPDAERQVLSAMVVRRRQLITMLVAERNRLHPSHPQSRKSINVIIEALERELSRIDNDMNNHIKTHFKSISERLCSVKGIGTTTTAALLAEVPELGKLTRREISALVGVAPVNRDSGTMRGRRTISGGRAGVRTALYMAALVATRFNPVIKAFYNRLLAAGKAKKVALVACMRKLLTILNAMTKKNEEWNESYHYITS

SEQ ID NO: 16351 - protein, 370 aa, unidentified
  source 1..370: note = protein_98ccd45
  REGION 7..160: note = RuvC_domain
  SITE 10: note = RuvC_P1
  SITE 61: note = RuvC_P2
  SITE 100: note = RuvC_P3
  SITE 102: note = RuvC_P4
  SITE 105: note = RuvC_P5
  REGION 225..313: note = Tnp_domain
  SITE 232: note = Tnp_P1
  SITE 262: note = Tnp_P2
  SITE 270: note = Tnp_P3
  SITE 271: note = Tnp_P4
  SITE 283: note = Tnp_P5
MENIIYIGMDVHKESFSLCALHGTTGEILGEARCASNVSLVKKFVEKLKMKYGEDIKIKAGYEAGCLGYSLHNLLEQNGIDCDILAPTTMYSSSKNKMVKNDRFDAKMIALNLANGTYKEVYVPEEEDVAVKEYIRMLGDFKTSLKKIKQQIKSFLLRHGCVYEGKSSWTIAYMKWLKNLDLQGLFKETLDEYLLQYDVLVDKIERFSLRLEELSHSERYEEPVGKLRCLKGIDTTSAMTVHVEIADFTRFPTAKAFMAYVGLTPSESSSGERINRSSITKQGNSTVRSTLVECANALVKGTIGLKSKRVKARQKGQRSEVISYADQAVERLQRKYHRMIYQGKPRNVAVTAIARELGCFIWGLETGKIH

SEQ ID NO: 16352 - protein, 339 aa, unidentified
  source 1..339: note = protein_ca59c9e
  REGION 6..148: note = RuvC_domain
  SITE 9: note = RuvC_P1
  SITE 52: note = RuvC_P2
  SITE 87: note = RuvC_P3
  SITE 89: note = RuvC_P4
  SITE 92: note = RuvC_P5
  REGION 211..297: note = Tnp_domain
  SITE 219: note = Tnp_P1
  SITE 249: note = Tnp_P2
  SITE 257: note = Tnp_P3
  SITE 258: note = Tnp_P4
  SITE 270: note = Tnp_P5
MTVKTVGLDLAKDVFQVHGISENGRVIFNKAIKRAKLLSFFGTLPSCRVGMEACGSSHHWGRQLRKLGHDVKLMPAGYVKPYVKRGKNDAVDAEAICEAVRRPTMRFVEIKTEEQQAILSIHRTRDLAVRQRTQMANTIRSLLREFGHILPIGIEAVTAFAKRHLGGDHPDMPEIANGMLGIQCYQFIGLNERIEGYSKMIEQHALLNADARRLMRMPGIGPITASAIVATIGDAHQFRTGRDLAAWLGLTPLNKSSGGKERLGKITKKGDRYIRKLLVVSMTSRAVMAKRSPEKVDLWTANIIADKPFRLATTAMANKAARIIWAMLTKKQEYRQPAF

SEQ ID NO: 16353 - protein, 346 aa, unidentified
  source 1..346: note = protein_a2bbfc5
  REGION 7..149: note = RuvC_domain
  SITE 10: note = RuvC_P1
  SITE 53: note = RuvC_P2
  SITE 88: note = RuvC_P3
  SITE 90: note = RuvC_P4
  SITE 93: note = RuvC_P5
  REGION 212..301: note = Tnp_domain
  SITE 220: note = Tnp_P1
  SITE 250: note = Tnp_P2
  SITE 258: note = Tnp_P3
  SITE 259: note = Tnp_P4
  SITE 272: note = Tnp_P5
MSYSTTVGVDLAKNVIQVSVVSGRGKELLNRSLTRKKFSEFLGKQKPALVAFESCATAHYWARAAVRHGHEARIIPAKAVAPFRQGHKTDSNDALAVAEAARRPNIKEAPIKTVEQQGLQAILRARDRLIQECIAQSNHLRGILLEFGIAIPQGFAALLRTLPEVLEDGDNELPDFYRPTLHRLYHRMLELRQDIDAMTKEVGQLVKTHAVCSRFTALEGVGPIGAMSLHATIGSGAAFSKGREASAYVGLTPRQYSSGGKANIVGLSKRVGNRKLRSVLIQGALAYVYRMKEPRSAKDRWLKDLVERAGPRRAAVALANKNVRTAWAMVTQGTEYQRRAQLEMAA

SEQ ID NO: 16354 - protein, 346 aa, unidentified
  source 1..346: note = protein_a978ff7
  REGION 7..149: note = RuvC_domain
  SITE 10: note = RuvC_P1
  SITE 53: note = RuvC_P2
  SITE 88: note = RuvC_P3
  SITE 90: note = RuvC_P4
  SITE 93: note = RuvC_P5
  REGION 212..299: note = Tnp_domain
  SITE 220: note = Tnp_P1
  SITE 250: note = Tnp_P2
  SITE 258: note = Tnp_P3
  SITE 259: note = Tnp_P4
  SITE 271: note = Tnp_P5
MVETTTIGLDVAKRFFQVHGVSADGKVTIKRQLRRSEVLGFFGGLERCTVGLEACGGSHFWAREIRALGHDVRLIPPAYVKPYVKRGKTDAADAEAICEAVARPTMRFVPIKTADSQAALMVLKTRDLLVRQRTQAINAVRGHLAEIGIVAAKGLAKVATLIAIVRDGNDQRLPPAARMALNLFADQIEMLTERVDTLGREIAAEVRRDNTMRRLATIPGIGPITAATIQASVPDPGAFKSGRHFAAWIGLTPKMHSSGGKDHLGKISKMGNPTLRSLLVVGATAVLQHARRGATISPWLTALLARRPAKVAAIALANKMARIVWALLTKGGTFIRKNRAAEPAAA

SEQ ID NO: 16355 - protein, 418 aa, unidentified
  source 1..418: note = protein_23b8915
  REGION 9..165: note = RuvC_domain
  SITE 12: note = RuvC_P1
  SITE 62: note = RuvC_P2
  SITE 102: note = RuvC_P3
  SITE 104: note = RuvC_P4
  SITE 107: note = RuvC_P5
  REGION 280..366: note = Tnp_domain
  SITE 288: note = Tnp_P1
  SITE 318: note = Tnp_P2
  SITE 326: note = Tnp_P3
  SITE 327: note = Tnp_P4
  SITE 340: note = Tnp_P5
MKSMEITAVGIDVSKSKSTVAIRRPGGVIVARPFDISHSNHDLEKLVSILKTTGGDIRVVMEHTSNYWKPIALTLKEAGFYVSVVNAMLIHDFSDNSIRKLKTDRADSLKIANYALTFWNELPPFNDEDETRLVLREQSRMYERLASTATSLRNGLIALADQTFPSIDQAFGHAIKNADSHEKWVDFFSIYWHRDCVLRLSIEKFTESYRKWCLRRNYKFRTNTAHKLYALAQDAVPTLPKNNGTKALVLQACKSLNAVCEAKQSTQEEMNRLASLLPEYEVVMQMEGTGPITGPALMAEIGDVRRFKNKKALVAFAGIDAPPFQSGNFESKSRHVSKRGSPHLRRAVFLVANIILTLSHKDNSVFCFMDKKRAEGKHYYVYTIAGSAKFLRIYYARVTEYLRTQEIPVAASCLNGNS

SEQ ID NO: 16356 - protein, 261 aa, unidentified
  source 1..261: note = protein_ad01ac9
  REGION 1..65: note = RuvC_domain
  SITE 5: note = RuvC_P3
  SITE 7: note = RuvC_P4
  SITE 10: note = RuvC_P5
  REGION 129..214: note = Tnp_domain
  SITE 137: note = Tnp_P1
  SITE 167: note = Tnp_P2
  SITE 175: note = Tnp_P3
  SITE 176: note = Tnp_P4
  SITE 188: note = Tnp_P5
MKSNKNDFIDAEAIAEAVERKNMRFVPIKTDDQLDLQGIHRVRDRLICRRTAVTNQLRAFLLKRGMVSAHRPANLMAAMADILENAEADLTPQMRSLINMLWDEWKLVEEQIKKLDLELEQISVADAGCTQIRQIPGIGPVVATAIVASIGNGAAFNKGRDFAAWLGIVPRQYSTGGKAKLLGISKRGNIYLRKILIHGARAAVLRIKRDRAPIVPWLDALDARAPKNVVVVAMANKLARIAWAVLSSGEDYRPMGNIVAA

SEQ ID NO: 16357 - protein, 287 aa, unidentified
  source 1..287: note = protein_df49d67
  REGION 5..98: note = RuvC_domain
  SITE 37: note = RuvC_P3
  SITE 39: note = RuvC_P4
  SITE 42: note = RuvC_P5
  REGION 160..250: note = Tnp_domain
  SITE 168: note = Tnp_P1
  SITE 198: note = Tnp_P2
  SITE 206: note = Tnp_P3
  SITE 207: note = Tnp_P4
  SITE 219: note = Tnp_P5
MKACASAHHSGRELLALGHDVRLMPPAYVKPYVKRGKTDAADAEASCEAVTRPTMRFVAVKSVDQQAVLMLHKTRDLLVRQRTALINALRAHLSEYDIVSSKGPGGVSVLMKLLHEGQEQLPAHARSALHTIGAQLRSLASEVDRLEAQILAWHRTDDTSRRLATIPGIGPITASAIAAAVPDASLFRSERQFAAWLGLTPRPHSSGGKERLGGISKQGDEYLRKLLVVGATAVMRMARKDAARQPWLAQLLERKPVKIATMGLANKTARIAWAVMARKEVYAAAAA

SEQ ID NO: 16358 - protein, 363 aa, unidentified
  source 1..363: note = protein_0631794
  REGION 8..152: note = RuvC_domain
  SITE 11: note = RuvC_P1
  SITE 57: note = RuvC_P2
  SITE 93: note = RuvC_P3
  SITE 95: note = RuvC_P4
  SITE 98: note = RuvC_P5
  REGION 221..309: note = Tnp_domain
  SITE 229: note = Tnp_P1
  SITE 258: note = Tnp_P2
  SITE 266: note = Tnp_P3
  SITE 267: note = Tnp_P4
  SITE 279: note = Tnp_P5
MFTERTSVGLDVHARSVAAAAIDGVTGELVQSRLTPSHEHILSWLQDLPGPVAVAYEAGPTGFGLCRTLREAGIRCEVVAPSKLQRPAGDRVKTDAKDAVHLARLLRLDEITPVAVPSVDQEAARDLVRAREDCRGDLMRARHRLSKLLLRQGLVYSGGQAWTGAHHTWLVHQAQPQLLQRATRLAFDADYETVMVTLIRRNRLDKDIAAMAAESEFTPVVRRLGCLRGVSTLTGFALAVEIGDWHRFTGNSIGSFVGLVPSEHSSGQTRSQGPITKAGNTHVRRLLVEAAWHHRARYTIGKTMRDRWDLAPGPARARGDAGNRRLHERWVRFLARDKRGTVANVAVARELAGWCWSLAVMGD

SEQ ID NO: 16359 - protein, 403 aa, unidentified
  source 1..403: note = protein_82dca37
  REGION 29..181: note = RuvC_domain
  SITE 32: note = RuvC_P1
  SITE 78: note = RuvC_P2
  SITE 118: note = RuvC_P3
  SITE 120: note = RuvC_P4
  SITE 123: note = RuvC_P5
  REGION 282..367: note = Tnp_domain
  SITE 290: note = Tnp_P1
  SITE 319: note = Tnp_P2
  SITE 327: note = Tnp_P3
  SITE 328: note = Tnp_P4
  SITE 340: note = Tnp_P5
MSREAAFRSTDDWKDTTMPTEAATCAAVIGLDVGKFSHWACHVTRQGEVLRSEPVANTEHDLDGLSAQAEAGTLVVVDQVRNIGSLAISRARLAGLPVAYLPGIAAHGAAKLFAGDAKTDERDAAVIAKTALGIPDSLLPVPKHGERLEAARSMAAQRSHMAACSTRGKNRLRSILLESCPEFEALADLADPHWLRMMESLGGPWGIVDAGKAAVGAVTRGANRARIDAAVAAAASTRPSEYRVMAENPQVKVLARRIRESAEEAARLDAEITALLAGDETYACLPTIPGIGPRTESELVTSIDIGDFPDHDHLASYCGIAPRNRRSGKSISSVSSSRQGNKRLKNLLIFSCNSLSRSKGRFGDYYRSCRERGMCHGEALKAVARKRLKVIYAIMRDKVPYSA

SEQ ID NO: 16360 - protein, 396 aa, unidentified
  source 1..396: note = protein_e42ec2c
  REGION 6..160: note = RuvC_domain
  SITE 9: note = RuvC_P1
  SITE 58: note = RuvC_P2
  SITE 98: note = RuvC_P3
  SITE 100: note = RuvC_P4
  SITE 103: note = RuvC_P5
  REGION 265..352: note = Tnp_domain
  SITE 273: note = Tnp_P1
  SITE 304: note = Tnp_P2
  SITE 312: note = Tnp_P3
  SITE 313: note = Tnp_P4
  SITE 325: note = Tnp_P5
MTAIWAGIDAGRTHHHCVVIDDTGKRLLSRRVANDESELLKLLADVLALSVEVTWGIDLADGGAALLIDLLLNHGKHMLYIPGRAVSRASEGYRGEGKTDAKDAAIIADQARIRRDLQPLRPGDELVAEIKVLTGHRRDLADDRTRVINRLHNHLTSIFPALDRALDLTNAGPLILLTGYQTPAAIRRTGARRLETWLRNRKVRSAAQLAETALAAAESQHTSVTGEKPTAQLVHTLAREVMRLNEQIAETDKLIEARFREHKHAEVIASMPGIGPLLGAEFLAVTGGDMAAFDSPDRLAGFAGVAPAPRDSGKISGNLHRPRRYSRRLQRVFYTSALISIRCCEESRRFYDRKRAEGKRHTQAVLALARRRVNVLWALLRDGRCYEPIPPVTNAA

SEQ ID NO: 16361 - protein, 338 aa, unidentified
  source 1..338: note = protein_32e207f
  REGION 6..148: note = RuvC_domain
  SITE 9: note = RuvC_P1
  SITE 52: note = RuvC_P2
  SITE 87: note = RuvC_P3
  SITE 89: note = RuvC_P4
  SITE 92: note = RuvC_P5
  REGION 211..300: note = Tnp_domain
  SITE 219: note = Tnp_P1
  SITE 249: note = Tnp_P2
  SITE 257: note = Tnp_P3
  SITE 258: note = Tnp_P4
  SITE 270: note = Tnp_P5
MKISVIGMDIAKRVIQLHTVCPETGEIGRFKLQRRETLAFLARREPSIVAMEACGSAHWWGREISKLGHEVRLLAPKSVRPFVLRNKTDAADARAIWTAAQQPEARFVAVKTEIQQSVLALHRLRAQLLKFRIMQTNALRGLLYEFGEVVPEGYVALSKALPLALATLDSRLPAALIDSLREQWARVQRLDSEIATIERRLAGILKETPQCQSVAAIPGVGLLTATAAVASIGDARTFKSGREFAAWLGLVPKQRGTGGWVRQLGLSKRGDVYLRTLLMHGARAVIVRHSDKPWLAALLNRRPYNVVVAAVANKLARTIWAVLAKGTPFDASQFATAA

SEQ ID NO: 16362 - protein, 424 aa, unidentified
  source 1..424: note = protein_530054a
  REGION 4..157: note = RuvC_domain
  SITE 7: note = RuvC_P1
  SITE 59: note = RuvC_P2
  SITE 94: note = RuvC_P3
  SITE 96: note = RuvC_P4
  SITE 99: note = RuvC_P5
  REGION 287..373: note = Tnp_domain
  SITE 294: note = Tnp_P1
  SITE 325: note = Tnp_P2
  SITE 333: note = Tnp_P3
  SITE 334: note = Tnp_P4
  SITE 346: note = Tnp_P5
MLAVGIDWAEAFHLVALGRPGEGVIGVRRVEHTPAAVAALLADIAALEPDPAEVRVVLETRHGVLVEWLVDAGFTVLPVNPDLIARRRGPARKKDDAEDARLACLLALDRYTSLRPLLPHGELAAELRAIARDDERAARDQRRLLNRLRQDLLSTFPAALQLAGEELGAPTILKLLARWPTAAALGTATRHELVAFARGAHHGWPERLADQVAAALATDQFTPRDYLVRAKADTIRLAATQLLAIATQRRVWERRMGTLLLGAPRRGRANTPRQDELDQGQAFPGGEVYLSFPGLGDRLAARVAGEIGDHPQQFGSPNALACYAGKASVTRRSGKSELVVACRLACNRYLAGAVQQWAFCSLRESGWARAFYDAQRARGKTHQAALRALGNRWLEVLWHCLRKGVRYDEATHVANRNRALGKAA

SEQ ID NO: 16363 - protein, 306 aa, unidentified
  source 1..306: note = protein_d8e08ae
  REGION 7..149: note = RuvC_domain
  SITE 10: note = RuvC_P1
  SITE 53: note = RuvC_P2
  SITE 88: note = RuvC_P3
  SITE 90: note = RuvC_P4
  SITE 93: note = RuvC_P5
  REGION 211..296: note = Tnp_domain
  SITE 219: note = Tnp_P1
  SITE 249: note = Tnp_P2
  SITE 257: note = Tnp_P3
  SITE 258: note = Tnp_P4
  SITE 270: note = Tnp_P5
MLEVSTIGLDLAKNVFQVHGANASGAVVFRKKLRRDRVLDFLAVQPACTVAMEACASSHYWGREIAKLGPVVRLIAPDYVKPFVKRQKNDAADAEAICEATQRPTMRFVAVKGEEQQAGAVMFRARDLLVRQRTQIINAIRGHLTEFGMVVAKGPFHVAKLVAAIEDNHAGVPAMARPILRLLADQLRSLDGRVVVLDRELARRAREDEEAKRLTTIPGIGPITATALVALAPAAQAFKRGRDFAAWLGLTPLQRSTGGKQKLGETSRMGERTLRRLLIIGASATVRFGNAQGLDHTAVACAHAEP

SEQ ID NO: 16364 - protein, 396 aa, unidentified
  source 1..396: note = protein_cb670d8
  REGION 4..161: note = RuvC_domain
  SITE 7: note = RuvC_P1
  SITE 58: note = RuvC_P2
  SITE 98: note = RuvC_P3
  SITE 100: note = RuvC_P4
  SITE 103: note = RuvC_P5
  REGION 273..359: note = Tnp_domain
  SITE 280: note = Tnp_P1
  SITE 310: note = Tnp_P2
  SITE 318: note = Tnp_P3
  SITE 319: note = Tnp_P4
  SITE 332: note = Tnp_P5
MYAVGIDVSKGKSTISIITTEGEIIEEPFEINHNQEGFDILLSKIKNIKKEEIKFLMEATGHYHLPILNSLIEKDYFVCVENALVIKKYCDMDLRKAKNDRKDSLKLASYCSDKWFKLRKFELSDKTREQLQFLSRQYCQYIKIKTSLKIQLTNMIDKTFPGIKKIIDEENRYELLLDIYEKYSYPSLVLEKSKEEFVDEINNMAKKYRHKVGKAIGENIYTKAPTVITSCPYNESLQLSINSCILLLRDTIKVTNDIIAKMDELAMQLKEFNTVNNMKGVGPKTRSRLIAEVGDIRRFKNANCLIAFCGIDAPPYQSGNFNSTNRHISKRGNKYLRKVGYEITKSIKSCRPKTDNAVYLFMLRKEAERKNKTSAKIAGLNKFLRIYYARVKELYN

SEQ ID NO: 16365 - protein, 340 aa, unidentified
  source 1..340: note = protein_95c913f
  REGION 6..147: note = RuvC_domain
  SITE 9: note = RuvC_P1
  SITE 52: note = RuvC_P2
  SITE 87: note = RuvC_P3
  SITE 89: note = RuvC_P4
  SITE 92: note = RuvC_P5
  REGION 211..300: note = Tnp_domain
  SITE 219: note = Tnp_P1
  SITE 249: note = Tnp_P2
  SITE 257: note = Tnp_P3
  SITE 258: note = Tnp_P4
  SITE 270: note = Tnp_P5
MHITTIGLDLAKNIFQVHGVQEDGTVAFNRPLRRAQMIPFFAGLEPCLIGMEACGTSHYWGRELRALGHDVKLMPPAYVKPYVKRGKSDAADAEAICEAVTRPTMRFVEIKSADQQAILCQHRAREIMVGQRTQLSNTIRGLIGEFGITIRKGLESIRHFAEDIQNGNAPDIPEIGQDVIHSLCNQLLSLHVRINQLDKAIAAAAKTDHRIKLLQTIPGIGPINASAIVATIGSAHQFKSGRDLAAWIGLTPLNKSSGGKERLGKISRKGDRYLRKLLVVGMSARVRAAMTRPERVDPWTADILKRKPTRVATVAMANKTARIIWAVLTKNESFTPRHTA

SEQ ID NO: 16366 - protein, 255 aa, unidentified
  source 1..255: note = protein_f826222
  REGION 6..147: note = RuvC_domain
  SITE 9: note = RuvC_P1
  SITE 52: note = RuvC_P2
  SITE 87: note = RuvC_P3
  SITE 89: note = RuvC_P4
  SITE 92: note = RuvC_P5
  REGION 210..254: note = Tnp_domain
  SITE 218: note = Tnp_P1
  SITE 248: note = Tnp_P2
MKYTPVGVDIAKHLIQIHFIDEHSGEVVDRQLRSKDFLMFFSNREPCLVGMEACGGSQHWARELEKLGHKVRLMQGRFVKAFVMGNKNDVMDARAIWMAVQQPGKTIAVKTEEQQSVLVLHRSRRQLVKFRTAQINALHGTLLEFGETIHKGRTAMDRELPAALDRLKTTLPPYLIAVLEDQYRRLSELDKLIDGLEKQLHSVAKQNEACRRLMEIPGVGPLIATAAVATMGEASAFKSGREFAAYIGLVPKQTG

SEQ ID NO: 16367 - protein, 343 aa, unidentified
  source 1..343: note = protein_1b50e91
  REGION 6..148: note = RuvC_domain
  SITE 9: note = RuvC_P1
  SITE 52: note = RuvC_P2
  SITE 87: note = RuvC_P3
  SITE 89: note = RuvC_P4
  SITE 92: note = RuvC_P5
  REGION 212..301: note = Tnp_domain
  SITE 220: note = Tnp_P1
  SITE 250: note = Tnp_P2
  SITE 258: note = Tnp_P3
  SITE 259: note = Tnp_P4
  SITE 271: note = Tnp_P5
MQISTIGVDLAKNVFQVHGVDSQGKIVLVRQLRRQQIMEFFRRLPSCLVGMEACATAHHWARELMKLGHTVRLIPPSYVKAYVKRSKNDAADAAAICEAVTRPSMRFVPIKTAEQQATLTVHRTRDLLISQRTQLINALRAHLAELGFVTNQGRDGVTKLIAIVTAENNLQALPAMMREALRVVVAHLASLQQQIRELERSIHAQHRASDVSQRLESIPGIGVIGATAIAATITDPNVFTSGRDLAAWIGLVPRQSSTGGKERLGGISKQGDRYLRRLLVVGATAVVRHARRHPDKHPWITKLLARKPAKLVAIAVANKTARIAWAIMNKGGIYRTPALAAAA

SEQ ID NO: 16368 - protein, 355 aa, unidentified
  source 1..355: note = protein_f04be0a
  REGION 17..164: note = RuvC_domain
  SITE 20: note = RuvC_P1
  SITE 67: note = RuvC_P2
  SITE 104: note = RuvC_P3
  SITE 106: note = RuvC_P4
  SITE 109: note = RuvC_P5
  REGION 224..312: note = Tnp_domain
  SITE 232: note = Tnp_P1
  SITE 262: note = Tnp_P2
  SITE 270: note = Tnp_P3
  SITE 271: note = Tnp_P4
  SITE 283: note = Tnp_P5
MYGLKHQKEKRSMDYFAGLDISVKDTSVCIVDDTGKIVREVKVASEPDSLLAVLTNPAYRFKRVGLEAGPLSQWLFSGIAEAGLPVICVETRHMRAVLKAQINKTDRNDARGIAQMMRVGLYRPVHVKTLRSQKLRMLLTHRKLLQSKAIAIENDLRATLRNFGLKVGVVGTIKFEARIKDLVENVSDLAMLVEPLLIVRRALREQIGILHRRLLAIVRDDDVCRRLMTVPGVGPVVALTYRATVDVPARFRNSKAVGAVFGLTPSKYQSGEVDRTGAISKCGDEMMRMMLYEAAQSMLTRTIKWSWLKAWAMKIARHRGMKKAIVALARRLAVIMHRIWVDGTEFRWSREVEPA

SEQ ID NO: 16369 - protein, 341 aa, unidentified
  source 1..341: note = protein_98147aa
  REGION 7..149: note = RuvC_domain
  SITE 10: note = RuvC_P1
  SITE 53: note = RuvC_P2
  SITE 88: note = RuvC_P3
  SITE 90: note = RuvC_P4
  SITE 93: note = RuvC_P5
  REGION 211..297: note = Tnp_domain
  SITE 219: note = Tnp_P1
  SITE 249: note = Tnp_P2
  SITE 257: note = Tnp_P3
  SITE 258: note = Tnp_P4
  SITE 270: note = Tnp_P5
MSEVFIVGVDLAKRVFQIHAADVGGHAIYRKKLSRPQFAKFLAETPGCVIAMEACASAHYWGQEAKSAGHEVRLVPAGYVKPFVKRHKSDAVDAEAITEAALRPSMRFVPVKTPDQQSQAMLFRTREMFVRQRTQSINGLRAHLAEFGIVLRLRIRNPDTFRREVAARASELPDLAGSLAECLLVQIASISEQISALDMKIKLRARSSRDAQLMQTMPGVGPMSAMAVQAFCPPAENFRTGRDFAAWLGLVPRQHSTGGKERLGRVTKMGQKDVRRLLIIGAMSVLNAIERRKRCVEPWLTRMLETRPRMVVAVALANRMARRLWAMLATGQDYQVPRSVA

SEQ ID NO: 16370 - protein, 339 aa, unidentified
  source 1..339: note = protein_8f13b66
  REGION 7..149: note = RuvC_domain
  SITE 10: note = RuvC_P1
  SITE 53: note = RuvC_P2
  SITE 88: note = RuvC_P3
  SITE 90: note = RuvC_P4
  SITE 93: note = RuvC_P5
  REGION 212..298: note = Tnp_domain
  SITE 220: note = Tnp_P1
  SITE 250: note = Tnp_P2
  SITE 258: note = Tnp_P3
  SITE 259: note = Tnp_P4
  SITE 271: note = Tnp_P5
MNNVSTIGLDLAKKVFQVHGVDQAGEVLVRRTLRRSQVLAYFGKLAPCLVGMEACATAHYWARELSKLGHTVRLIPPAYAKAYVRRNKNDPADAAAICEAVARPAMRFVTIKTAEQQAAAGVHKVRELLMKQRTMLMNSLRGLMAEFGIVVAEGPRHIGELVSILADPGDQRVPAPLHGGLARMADALLHLERQIKVVDKQILDWGRGNAMCRHLITIPGFGPILSSAMAAVVVNPATFRSGRDFSASLGLVPRQDGTGGKVKLGPISKRGNGYLRRLLVSGAMTVLSGKRAKQDPWLVKLLTTKARKVAAVALANKMARIAWAMMMRQEDFRTVPAAA

SEQ ID NO: 16371 - protein, 345 aa, unidentified
  source 1..345: note = protein_b2920f8
  REGION 7..151: note = RuvC_domain
  SITE 10: note = RuvC_P1
  SITE 55: note = RuvC_P2
  SITE 90: note = RuvC_P3
  SITE 92: note = RuvC_P4
  SITE 95: note = RuvC_P5
  REGION 214..301: note = Tnp_domain
  SITE 222: note = Tnp_P1
  SITE 252: note = Tnp_P2
  SITE 260: note = Tnp_P3
  SITE 261: note = Tnp_P4
  SITE 273: note = Tnp_P5
MGQITRVGVDIAKSVFHVHAVDRFGERQWKGKYCRTKWLDAIENKVPKGTEIAMEACGSSHYWGRELQKRGFKVKIIHAQFVKPYVKSNKNDAIDAEAICEAMSRPNMRFVSVKSSKQQDIQSIHRIRDKLMVQKASKANQIRGLVSEYGLVAPVGINKLREAIPLWLEDAENGLSALFRLLLRDLFDDLRQLQERVDTLDTLIEKEVKNDPVARSLLQLRGIGILCASALSCAIGDAKGYRKGRDFAASIGLTPRQHSTGGKPRLLGISKRGDGYLRKLLVHGARSVIRHANRHDDNLSKWIEKLCAYKHVNTVTVALANKTARAAWAMVNTNESYDPELIASA

SEQ ID NO: 16372 - protein, 344 aa, unidentified
  source 1..344: note = protein_e6c16e2
  REGION 6..147: note = RuvC_domain
  SITE 9: note = RuvC_P1
  SITE 52: note = RuvC_P2
  SITE 87: note = RuvC_P3
  SITE 89: note = RuvC_P4
  SITE 92: note = RuvC_P5
  REGION 212..295: note = Tnp_domain
  SITE 220: note = Tnp_P1
  SITE 250: note = Tnp_P2
  SITE 258: note = Tnp_P3
  SITE 259: note = Tnp_P4
  SITE 271: note = Tnp_P5
MSIVILGVDLGKNSCSIVGVDGSGAVVARRTMRRQTLIEYVGKLPQCVVAMEACCGAHHLGRLFATHGHEIRLMSPEYVRPYVKAQKNDDRDAEAIAEAASRPTMRFIDLKSSEQLDLQTLHRVRSRLVAERTSLINQARAILLERGVTFPAGRRKFEVGLEALLADDADAGLSARMRQLIGELRAEWKALDVRVEALNGEFVETARQDETMRRLTSIPGVGVLNATALVAAVGNGSGFDKARDLGAWLGLVPRQHSTGGKARLFGITKRGNKYLRTLLIHGARAALPSLSQSDTPIGRWLKAMIARGVHRNAIIVALANKLARIAWAMLRKDVRFERSYPVAA

SEQ ID NO: 16373 - protein, 316 aa, unidentified
  source 1..316: note = protein_a925a94
  REGION 8..150: note = RuvC_domain
  SITE 11: note = RuvC_P1
  SITE 55: note = RuvC_P2
  SITE 95: note = RuvC_P3
  SITE 97: note = RuvC_P4
  SITE 100: note = RuvC_P5
  REGION 190..274: note = Tnp_domain
  SITE 198: note = Tnp_P1
  SITE 227: note = Tnp_P2
  SITE 235: note = Tnp_P3
  SITE 236: note = Tnp_P4
  SITE 247: note = Tnp_P5
METQQQWIGIDISQTRLDVALYPLGVSFSVNQTEGGRAELVSKLTGYAIAGIVLESTGGLERCVMAELEAHGYETRRVNPAQVRHFAKAMGRLAKTDRIDAEMIARFGESRNPEVTRLPEATIRELQALVARRQQVVELITMEKKRLHSCESWVRESVNSVLSALETELKTLEARLAELSAKRPEWQEHLAILTSVKGIGTVISQALLVSLPELGARSGRTIAALVGVAPFNRDSGKLKGQRRIQGGRKELRSLLYMAALCAVQHNPVIRDHYQQLTKRGKAKKVALVACLRKLLVILNAMLRDRQPWRHPAPSAV

SEQ ID NO: 16374 - protein, 342 aa, unidentified
  source 1..342: note = protein_6dd407a
  REGION 7..149: note = RuvC_domain
  SITE 10: note = RuvC_P1
  SITE 53: note = RuvC_P2
  SITE 88: note = RuvC_P3
  SITE 90: note = RuvC_P4
  SITE 93: note = RuvC_P5
  REGION 212..297: note = Tnp_domain
  SITE 220: note = Tnp_P1
  SITE 250: note = Tnp_P2
  SITE 258: note = Tnp_P3
  SITE 259: note = Tnp_P4
  SITE 271: note = Tnp_P5
MSTPFFCGVDLAKHHFSLHAVDDHGKVILHKSVSRAKLLATLANMPTMCIGIEACSGAHYWAREFNKLGHDTRIMAAKYVGPYRTKGKNDLNDAVAICDAVQRPNSRFIPVKSPERQAILAIHRVREHWVNERTALINRIRALLPEFGIIIPTGRAAVHRQVPLILEAAENGLPDIARAVVADCFDHLQTLNQRIADTEQCFDMVTKASPNAQRILNVRAIGPQTATAIIATIGKGEQFDSGRDFAAWLGLVPKQYSTGGKPRLGRISKRGDKYLRTLLVHGARAIITNLGDKQDRLSVWGRNVLERRGMNRAIVSLAAKIVAVIRRNTPTGSLHTQVDEYR

SEQ ID NO: 16375 - protein, 313 aa, unidentified
  source 1..313: note = protein_5f9248e
  REGION 8..148: note = RuvC_domain
  SITE 11: note = RuvC_P1
  SITE 53: note = RuvC_P2
  SITE 93: note = RuvC_P3
  SITE 95: note = RuvC_P4
  SITE 98: note = RuvC_P5
  REGION 189..273: note = Tnp_domain
  SITE 197: note = Tnp_P1
  SITE 226: note = Tnp_P2
  SITE 234: note = Tnp_P3
  SITE 235: note = Tnp_P4
  SITE 246: note = Tnp_P5
MIIPLRCVGIDVSKHHLDVFDETIGAPERIANVPHAITELVARWRCDAFVVFEATGVYDRELREALHQAGIRFSRINPARARDFARASGQLAKTDPIDACMLAAFARAMRPATEQVSTAARNALARLAKRRDQLVLMRAQEKNRRSEVDDCAMAERISRLIEVLDHEIAGIEAEISVLIKAEPELSEDAQLMRSLPGVGPVTCIQLITQMPELGHVGPKQAAALAGLAPFNVDSGAHRGKRKIGGGRKRVRDALYMAALNAVRRAHPFKAFYAKLRQAGKPAKIALIAVARKLLTILNAMLRDRKEYTITQAT

SEQ ID NO: 16376 - protein, 354 aa, unidentified
  source 1..354: note = protein_7a4dad3
  REGION 12..152: note = RuvC_domain
  SITE 15: note = RuvC_P1
  SITE 58: note = RuvC_P2
  SITE 93: note = RuvC_P3
  SITE 95: note = RuvC_P4
  SITE 98: note = RuvC_P5
  REGION 217..302: note = Tnp_domain
  SITE 225: note = Tnp_P1
  SITE 255: note = Tnp_P2
  SITE 263: note = Tnp_P3
  SITE 264: note = Tnp_P4
  SITE 276: note = Tnp_P5
MSQNSNTAIAIVGIDIGKNSFHIVGLDQRGAIVLRQKWSRGQVEARFANMPPCLIGMEACVGAHHLSRKLKELGHDARLMPARYVRPYSKGQKNDFRDAEAIAEAVQRPTMKFVATKTADQLDLQALHRVRERLVSQRTGIINQIRAFLLERGVAVRQGLRFLRAELPRIIAAPPDVLSPRMVRVIEGLAGDWRRLDERIERLSGEIEAVARQDAGCERLMSVPGIGPIISSAMVAAIGTGDVFSKGRDFAAWLGLVPKQISTGDRTILGKISKRGNRYLRVLFVQAAWVVLIKPKSWERHGLKPWIEAAKKRLHRNVLAIALANKLARIAWSVLARGRAFEVRKVGEAAARSA

SEQ ID NO: 16377 - protein, 339 aa, unidentified
  source 1..339: note = protein_58544fc
  REGION 5..151: note = RuvC_domain
  SITE 8: note = RuvC_P1
  SITE 91: note = RuvC_P3
  SITE 93: note = RuvC_P4
  SITE 96: note = RuvC_P5
  REGION 211..299: note = Tnp_domain
  SITE 219: note = Tnp_P1
  SITE 249: note = Tnp_P2
  SITE 257: note = Tnp_P3
  SITE 258: note = Tnp_P4
  SITE 270: note = Tnp_P5
MGEYIGLDVSLKETAVSIRHSGKRIWRGKCASDPQALAELIRKRAPDAERVVFETGPLSVWFYHELTALGVPAICIDARHAKAALDMAANKTDANDADGLPHLAEVGFFREVRVKGYDSMLMRTLVAGRSKLVRVATGLSNQIRGLMKTFGLVVPAGQGGVFEKNVRRLLDGEEALARIVLPILEAWRAMRIHAAELGRQLTAAARHSQSCQLLMSIPGVGVVTATAFTTAIEDPANFAKSRSVGAWIGLTTRRYQSGEVDYDGHISRRGDANLRSLLYEAATTILTRVHADSDLRTWGPKLRERLGFRRAAVAVARKLAVIMHAMLRSGELFNRTAAA

SEQ ID NO: 16378 - protein, 409 aa, unidentified
  source 1..409: note = protein_97e9534
  REGION 13..166: note = RuvC_domain
  SITE 16: note = RuvC_P1
  SITE 64: note = RuvC_P2
  SITE 105: note = RuvC_P3
  SITE 107: note = RuvC_P4
  SITE 110: note = RuvC_P5
  REGION 228..314: note = Tnp_domain
  SITE 236: note = Tnp_P1
  SITE 266: note = Tnp_P2
  SITE 274: note = Tnp_P3
  SITE 275: note = Tnp_P4
  SITE 286: note = Tnp_P5
MRMRSMLVTAVMIGVDPHKGSHTAVAITAAEQPLAELRVRASAAQAGRLVAWAQAWPERTWAVEGAGGLGRLLAQQLVAAGERVLDVQPKLAARVRLLEAGDTNKNDPNDALSVAVAALRSKARREVKAEDHAVVLKVWSKRHRDLARSRNQVACRLHAVLCELRPGGFSKEISAAQAAKILEQIEPCGAVAVARHELAAEFLTDLRRLDAQLRDTKKKLAAAVRASGTTLTGIFGVGPVIAGIIIGDVTDVTRFASRDRFAAYNGTAPVEVSSGNRKVHRLSLRGNRRINHAIHMAAITQIRHAHSDGRAFYDKKIAEGKTHKEALRALKRRISNAVFARLRADARKAAAAVGRGPGGQPGNDSVASAAGSHPEHRLFGPATPEPATTLRPGNPGRRKVAAKATTRSP

SEQ ID NO: 16379 - protein, 409 aa, unidentified
  source 1..409: note = protein_e1e1814
  REGION 5..161: note = RuvC_domain
  SITE 8: note = RuvC_P1
  SITE 60: note = RuvC_P2
  SITE 98: note = RuvC_P3
  SITE 100: note = RuvC_P4
  SITE 103: note = RuvC_P5
  REGION 272..357: note = Tnp_domain
  SITE 279: note = Tnp_P1
  SITE 310: note = Tnp_P2
  SITE 318: note = Tnp_P3
  SITE 319: note = Tnp_P4
MVVFVGDDWAEAHHDLYVMNEAGDRLDSARVPHGLDGMARFHELAADHVEDPTDVIVGIEVDRGLWIEALVACGYQVHGINPRAASRYRDRLNVGGAKSDRGDAKMLADLVRTDRHQHRQVAGDSEIAQATRVLARAHQSLVWDRTRHTNRLRHGLRDYFPAAAQAFAGELAGMDAIGILAKAPTPVEAAQLSVSQIRSALKTGGRQRNVDKRARELQALLRADHLATTPAVAAAFGATTRSLVAIIVELNQQIETLEAELASAFSKHPDTDIYRSLPGFGPVLSARVLGEFGDDPERYANAKSRKNYAGTSPLTRASGRSHIVSARHIRNRRLYDALDQAALCSLTQSPGCRDFYDQRRAKGDLHHQALRALANRLVGILHGCLKTRTHYNEHTAWSHRQEPETRIAA

SEQ ID NO: 16380 - protein, 299 aa, unidentified
  source 1..299: note = protein_9e715b0
  REGION 8..163: note = RuvC_domain
  SITE 11: note = RuvC_P1
  SITE 56: note = RuvC_P2
  SITE 96: note = RuvC_P3
  SITE 98: note = RuvC_P4
  SITE 101: note = RuvC_P5
  REGION 195..259: note = Tnp_domain
  SITE 203: note = Tnp_P1
  SITE 232: note = Tnp_P2
  SITE 240: note = Tnp_P3
  SITE 241: note = Tnp_P4
  SITE 252: note = Tnp_P5
MSVSSVVVGIDVAKAHVDVWVLSTKLDVQRFDNEAEAHSALAAALKPLDVALVVMEATGGYEATLACALQAAGLPVAVVNPRQTRDFAKSMGRLAKTDRIDARMLAEFAAVLVRRDDLASFIRPLADQEQQALAAMVTRRRQLVTMMLSERQRLQLAIAVVRPSIEAMIEAIRKQLDDVEAQMVGHVQAHHAELDKLLRSASGIGPVASATLIAELPELGKLNRREIAALVGVAPMANDSATRRGDGACRAGASRYAACSTWPRSRLHATTRPSSASMTGCWQQASCPRSLWWPACASS

SEQ ID NO: 16381 - protein, 319 aa, unidentified
  source 1..319: note = protein_92b6859
  REGION 10..152: note = RuvC_domain
  SITE 13: note = RuvC_P1
  SITE 56: note = RuvC_P2
  SITE 96: note = RuvC_P3
  SITE 98: note = RuvC_P4
  SITE 101: note = RuvC_P5
  REGION 196..280: note = Tnp_domain
  SITE 204: note = Tnp_P1
  SITE 233: note = Tnp_P2
  SITE 241: note = Tnp_P3
  SITE 242: note = Tnp_P4
  SITE 253: note = Tnp_P5
MSRIPHSAIIGIDVSRDWLDVHCLPDGRRLRLPNTAKGHVQLASMASAEHALVCFESTGGQEWRLWAALDTAGVPTRQLPPAQIKAFAASRGTRAKTDRIDAELIARFMAFRPDAGRCLPAEKLRLLRAMTSKRGQLVETRKRFLAQIKAHEKLGTADAFADIDSALKVLLDRQIAEVEQRIEAIVAHDDVIAETAAILRSIPGIGPVASSTLIAAMPELGQITGEQAAALTGLAPIAHDSGTLRGRRSISGGRRALRHVMFQAALVATHHNPVLRKFAERLRATGKPHKVIITAVARKLVTIANALCKSRHSWAQEPV

SEQ ID NO: 16382 - protein, 403 aa, unidentified
  source 1..403: note = protein_c19a467
  REGION 3..161: note = RuvC_domain
  SITE 6: note = RuvC_P1
  SITE 58: note = RuvC_P2
  SITE 98: note = RuvC_P3
  SITE 100: note = RuvC_P4
  SITE 103: note = RuvC_P5
  REGION 268..354: note = Tnp_domain
  SITE 276: note = Tnp_P1
  SITE 307: note = Tnp_P2
  SITE 315: note = Tnp_P3
  SITE 316: note = Tnp_P4
  SITE 327: note = Tnp_P5
MFVGWDWGSTVHGVCLIDDHGAVVKKWMVRHTEDQLMSVFNELAQLVEDGEVGQVPIAIERGEGLIVGLIAGAGHPVWMVEPAAFKAARPRWGSAGAKSDLGDAFMLADYARTDGHRLRRVEPVAQATRELAALVRARTALVEARTAASNQLWAILAEHWPGAAMVFQKLTSAIALDFLTDYPTPQAAAHLGKGRMGQFCRRHSYRGGKSPAELVGRLRAAPVSASPIAAPILTSIVHTSTAQIRLLNAEITRLEGDLARALATHPKTPLLQTLPRVATVSLAALIAEIGPLLERCDNPEQVAAMCGAAPVTRASGKSRTVGFRYTANKPARVAITSFADNSRHSSDWANDAYRRARARGARHPHAIRILARGWVRVIWACWTTDTAYDPSRHCSRQLLAAVS

SEQ ID NO: 16383 - protein, 402 aa, unidentified
  source 1..402: note = protein_b6372a2
  REGION 10..164: note = RuvC_domain
  SITE 13: note = RuvC_P1
  SITE 61: note = RuvC_P2
  SITE 101: note = RuvC_P3
  SITE 103: note = RuvC_P4
  SITE 106: note = RuvC_P5
  REGION 271..356: note = Tnp_domain
  SITE 279: note = Tnp_P1
  SITE 308: note = Tnp_P2
  SITE 316: note = Tnp_P3
  SITE 317: note = Tnp_P4
  SITE 329: note = Tnp_P5
MNIQDVEVFVGIDVGKAEHWATALTGDGKKLFDKALPNSEDRLREIYQRLGEHGRVLVAVDQPATIGALAVAVAQAMGIMMGYLPGLSMRRIADLTPGNAKTDAKDAAVIAEAARTMPHTLRSISTSDEDAASLSMLTGFDLDLARQVNQTANRIRGLYTQIHPALETVLGKWLEHDSVLEVIAAWPTPADLRKAGRARIDAKLKAKGAKRHAAWAQAITGTLGKQTVVVAGTDAAGVVLPHLARQLIALHAQRRDVAAQVEALVEAHPLYPVLTSMPGVGARTAAIFLAETAGRTFPTGAHLASYAGLTPVTRRSGSSIRGEYVSHAGNKRLKRAMFLSAFASLRSDPASRAYYERKRTQGKHHNQAVLTLAHRRILTLYAMIRDGSLYDPQPAQQLPTAA

SEQ ID NO: 16384 - protein, 340 aa, unidentified
  source 1..340: note = protein_4173b9b
  REGION 7..148: note = RuvC_domain
  SITE 10: note = RuvC_P1
  SITE 53: note = RuvC_P2
  SITE 88: note = RuvC_P3
  SITE 90: note = RuvC_P4
  SITE 93: note = RuvC_P5
  REGION 209..295: note = Tnp_domain
  SITE 217: note = Tnp_P1
  SITE 247: note = Tnp_P2
  SITE 255: note = Tnp_P3
  SITE 256: note = Tnp_P4
  SITE 268: note = Tnp_P5
MDTVSLIGIDLGKHCFHLHAQAASGHMVFRKKLTRNQLFSLLGNVPSCTVVMEACAGAHWMARRIQGLGHQAKLISPRFVKPFLRGNKNDFADAQAICEAGSRPAMRFVSPRNETQQTLSALHRVREGLIRDRTGTVNQIHGFLLEFGVSLPKGMAVIRRLPAVLAAHELPPRLIALLERLQAHFKYLDEQIGELDREVVQQLGEDERSQRLLEIPGIGPVTASVLATELGDARQFASARQFAASIGLVPRQYSTGGKPTLLGISKRGDKNLRRLLVQCARSVMQRIERRTDRLSVWLRGLLTRRHSNVVACALANKLARIAWAILAKGTHYLCEQAAAA

SEQ ID NO: 16385 - protein, 411 aa, unidentified
  source 1..411: note = protein_21d9038
  REGION 5..163: note = RuvC_domain
  SITE 8: note = RuvC_P1
  SITE 62: note = RuvC_P2
  SITE 102: note = RuvC_P3
  SITE 104: note = RuvC_P4
  SITE 107: note = RuvC_P5
  REGION 273..373: note = Tnp_domain
  SITE 281: note = Tnp_P1
  SITE 311: note = Tnp_P2
  SITE 319: note = Tnp_P3
  SITE 320: note = Tnp_P4
  SITE 333: note = Tnp_P5
MNPVVGLDVAKGESQIQGFLDKKKPYKTSFKVPHTLDGLEKLLHFLIEIENNTGVRPPVVLESTGHYQAPVVQFLDKKDYLTIIVNPLIPYKAKSSSLRKVKTDVIDARHLCELYYKEDLEPQKKRGIQLLNLRNLTRQHENITGLYVQTKLQFHSVLDQVFPEYRGVFGDLYSTVSLFTLLNYPTSKDVLQADKDILAEHIHEFCPRRSSDWAATKAEKLIEAALRDPFQETLYESHMISIEMYIKMLLEYQKHLSKLEDQIDALAHQIEECKIIQSIPGIGEKIAATIISEIGEIDLFDNPKKLVAFAGLDPKVYESGRFKGTVNRITKRGSSRLRHALFMAVRSAIRDSRKQKTTDEVIPRNKKLRAFYDKKREEGKPYKVAIIACANKLLHWIYALLKSNTTFQDIA

SEQ ID NO: 16386 - protein, 341 aa, unidentified
  source 1..341: note = protein_53c2cc9
  REGION 7..149: note = RuvC_domain
  SITE 10: note = RuvC_P1
  SITE 53: note = RuvC_P2
  SITE 88: note = RuvC_P3
  SITE 90: note = RuvC_P4
  SITE 93: note = RuvC_P5
  REGION 212..299: note = Tnp_domain
  SITE 220: note = Tnp_P1
  SITE 250: note = Tnp_P2
  SITE 258: note = Tnp_P3
  SITE 259: note = Tnp_P4
  SITE 271: note = Tnp_P5
MADVHVIGLDIAKSVFQLHGLDGAGATVLQKRLSRARLLPFFQKLPPCLVGIEACATSHYWAREIARLGHEVRLMPAQYVKPYLKRQKNDMADAEAIAEAVTRPNMRFVAGKDPHEQSAMMLHKVRLMLNRQLVMLTNAIRAHMAEFGIVAPVGRLGVDRLLAVIEDETDHRIPEAARQCLQMLVAQLKVVKQQILENDRRVLALARSSELGRRLMAVPGIGPLVASALVACVPDPSVFQCGRNMAAWMGLVPRQNSSGGKARLGSITKAGNRYLRQMLFAGAMAVIRRAMQSTQRTWLVSLLDRRKPKVAAMALANKNARIAWAMMTSGDAYRGPAAIAA

SEQ ID NO: 16387 - protein, 335 aa, unidentified
  source 1..335: note = protein_dca96ce
  REGION 7..155: note = RuvC_domain
  SITE 10: note = RuvC_P1
  SITE 60: note = RuvC_P2
  SITE 98: note = RuvC_P3
  SITE 100: note = RuvC_P4
  SITE 103: note = RuvC_P5
  REGION 203..290: note = Tnp_domain
  SITE 211: note = Tnp_P1
  SITE 241: note = Tnp_P2
  SITE 249: note = Tnp_P3
  SITE 250: note = Tnp_P4
  SITE 263: note = Tnp_P5
MKSKSFIGIDVSKLSLDICLITEEGEIKNFKANNTVGHLKKLFKLIAQDVDVEETLVCAEYTGHYSNILKSYCLDNGVALWLESGAEIKLRSGVQRCKSDKIDAQRIAEYAMRHSDKALLQTLEDEVISESKLLLSERKLYVGERAKYRTQLKDLGGFVEKSIFKERSKRLKRHVALLTKSIEEIDRTIKELFSTEILLAHQSKILTSIPGVGDQVAIHTIVATNGFTKFKNGRKFACHVGVAPFSFHSGTSQRSRNKVSHRANKELKTLFHMAALSAIKMKGEFHDYFKRKVAEGKNKMTVINAVRAKIINRIFTLIKENRKYEKNYNLPLVNP

SEQ ID NO: 16388 - protein, 342 aa, unidentified
  source 1..342: note = protein_171b8a0
  REGION 7..149: note = RuvC_domain
  SITE 10: note = RuvC_P1
  SITE 53: note = RuvC_P2
  SITE 88: note = RuvC_P3
  SITE 90: note = RuvC_P4
  SITE 93: note = RuvC_P5
  REGION 212..304: note = Tnp_domain
  SITE 219: note = Tnp_P1
  SITE 249: note = Tnp_P2
  SITE 257: note = Tnp_P3
  SITE 258: note = Tnp_P4
  SITE 270: note = Tnp_P5
MEEVSIIGVDLAKNVFQLHGAAADGAVVFRKKLSRLQFGRFMSDHPACEVAMEACPSAHHWARELAGHGHRVRLIAPHYVKPFLKRQKNDAADAEAIAEAALRPTMRFVEPKSAEQQARAVVFRAREQLLKQRTEAINALRGHLYEFGHIAPEGIGYVPRLAQVVEDPGSGLPNLARDICRMVLEQVEFLTVRLAALTAKIAALSRQAAMPRQLQTMPGVGPIGALAIETFAPPMDQFRRGRDFAAWLGLVPRQHSSGGKQRLGKTSKMGQRDIRRLLVTGAMAVLRWALRRGAPGNPWLARLLERKPPMVAAFALANKMARGIWAMLTRKEDYRDPVTVGA

SEQ ID NO: 16389 - protein, 341 aa, unidentified
  source 1..341: note = protein_b9f1b03
  REGION 6..146: note = RuvC_domain
  SITE 9: note = RuvC_P1
  SITE 52: note = RuvC_P2
  SITE 87: note = RuvC_P3
  SITE 89: note = RuvC_P4
  SITE 92: note = RuvC_P5
  REGION 211..296: note = Tnp_domain
  SITE 219: note = Tnp_P1
  SITE 249: note = Tnp_P2
  SITE 257: note = Tnp_P3
  SITE 258: note = Tnp_P4
  SITE 270: note = Tnp_P5
MQIQSVGIDLGKTTFHLVALGAAGKLLVKKKFSKKQLLAYTANLQSSLIGLEACSGAHFLGRALRSQGHDVRLIAAQFVKPFVKSNKNDFVDAEAIAEAVDRKNMRFVPIKTDDQLDLQAIHRVRDRLISRRTAVINQLRAFLLERGLVFAKTPAKLKAAMADILENAEAGLTPLMRNLINTLWDEWKTVERQVEELNDELERISAADAGCTRIRQIPGIGPVVATAIVAAIGNGAAFRKGREFAAWLGVVPRQYSTGGKAKLLGISKRGNVYLRKILIHGARAAVLRIRRDRAPIGAWLDKLDARAHKNVVVVAMANKLARVAWAVLSSGNEYRSTTVPA

SEQ ID NO: 16390 - protein, 411 aa, unidentified
  source 1..411: note = protein_1b3d345
  REGION 5..164: note = RuvC_domain
  SITE 8: note = RuvC_P1
  SITE 61: note = RuvC_P2
  SITE 101: note = RuvC_P3
  SITE 103: note = RuvC_P4
  SITE 106: note = RuvC_P5
  REGION 272..358: note = Tnp_domain
  SITE 280: note = Tnp_P1
  SITE 311: note = Tnp_P2
  SITE 319: note = Tnp_P3
  SITE 320: note = Tnp_P4
MRLLVGDDWAQDHHDIEVMDEAGNVLVRRRVPEGVAGIAQLHELISRFLPEQGTDVEVQVGIETGRGPWVAALIAAGYTVFAVNPLQASRYRSRHSVSGAKSDAGDAHMLADVVRTDAHQLRPAAGDSPAAGAVKVLARTHKTLIWERAAVTQRLRAQLLEYFPAAVTAFDDLDAPDNLELLAKAPDPARAKKLTRAQISAVLRHAGRYKIAARTDAILAALRSPQLGQPPALTAAYAATVRSLIAVIATLNEQVAVLQGQVEAHFGQHPDAEIYRSQPGLGAITGARVLGEFGDDPHRYACAKARRNYAATSPITRASGKKKIVAARFVHNDRLIDALMIQAFAALRVSPGARTFYDGLRARGIEHNDALRRLANRLVGILHGCLKTRTRYDEATAWGHRETTGQSPVAA

SEQ ID NO: 16391 - protein, 392 aa, unidentified
  source 1..392: note = protein_f21bd6d
  REGION 10..163: note = RuvC_domain
  SITE 13: note = RuvC_P1
  SITE 61: note = RuvC_P2
  SITE 102: note = RuvC_P3
  SITE 104: note = RuvC_P4
  SITE 107: note = RuvC_P5
  REGION 225..310: note = Tnp_domain
  SITE 233: note = Tnp_P1
  SITE 263: note = Tnp_P2
  SITE 271: note = Tnp_P3
  SITE 272: note = Tnp_P4
  SITE 283: note = Tnp_P5
MDVETRRVVIGMDPHKRSVTIEVMTADESIVGGGRFSTDAGGYAQLLGYARAWPDREWAVEGCAGIGKHIADRLVADGESVVDVPAKLSARVRVFATGQGRKTDATDAHSIALVGVRMSGLRPVVADEQLEVLRLCVDRRASLGREHTRKVSQLHKLLLELIPGGANRSLSAAQAKELLAKVRPSTAAGKVRKAHASELVADLATIYARSKAADKELKALVRATGTTLLDLHGIGPSGAARLLAEVADITRFPDRNHFASWNGTAPIDASSGDHTRHRLSRKGNRAINRVLHIMAVVQLRNATEGRAYYDRKKAAGKTSMEAMRCLKRRLSDLVYKSLLDDLAGHATTGPGGHSGDDSDSSVTGSQPTAGSSDKPLPGPATTKPRTTLPAAS

SEQ ID NO: 16392 - protein, 310 aa, unidentified
  source 1..310: note = protein_9841423
  REGION 5..153: note = RuvC_domain
  SITE 8: note = RuvC_P1
  SITE 52: note = RuvC_P2
  SITE 91: note = RuvC_P3
  SITE 93: note = RuvC_P4
  SITE 96: note = RuvC_P5
  REGION 187..271: note = Tnp_domain
  SITE 195: note = Tnp_P1
  SITE 224: note = Tnp_P2
  SITE 232: note = Tnp_P3
  SITE 233: note = Tnp_P4
  SITE 244: note = Tnp_P5
MKDTIGIDISKDTLDAHRQINNQARQFANTPAGLRALRRWIGATVPDLVVYEATGAYHATIERSFGGVLPLVKVNPLQARRFAQALGTRAKTDAVDARVLAMMGSALDLVPDVPADKNQPALKELQIARMALIKERTRLLNRSKTQSLAILKRQSKARLGQIKRQISELEEALLDLARQCPKRARAFDILCSIPGLGRITAVAILVECPEIGTMTRKQIASLAGLAPMTRQSGQWRGTAFIQGGRKFLRDALYMPALVAARYNPDLRQKYLAMISHGKPAKVALTALMRKLIELTNTLVQKDREWSPKSA

SEQ ID NO: 16393 - protein, 383 aa, unidentified
  source 1..383: note = protein_9bf4076
  REGION 38..181: note = RuvC_domain
  SITE 41: note = RuvC_P1
  SITE 86: note = RuvC_P2
  SITE 121: note = RuvC_P3
  SITE 123: note = RuvC_P4
  SITE 126: note = RuvC_P5
  REGION 245..334: note = Tnp_domain
  SITE 253: note = Tnp_P1
  SITE 283: note = Tnp_P2
  SITE 291: note = Tnp_P3
  SITE 292: note = Tnp_P4
  SITE 304: note = Tnp_P5
MRRGGILIEANDSEGEAMKKHTMFNQSLSADESACTTVAVDLAKKVFQVAGEDALGQVKFEDRIKSREAFQVFLHKLPESVTVLVETGPGAQAWARLLQIQGNPVRILPAQLVAKHRCGPKNDHNDAFAILRAGRDSTISAVPVKSPAALAMQALHRARQGYIRRRTAVGNQMRGLLLEHGVALAQGEMAISQLVPRILEDVTQPLPDLLRELIAELLGEWSQLGERVNVLTGRLETAAKESEIARRLMTVRGVGPIIATALLAKQTEPERFANARQFAAYFGLVPNQHSSGDKIRLGKMCKHGDAYLRSLTIQGAHAVLRQIRSDSQQPDDQRLQRWISRLGRKEAAVRLANRNLRILWVLLQNDQTYHRRPGNGPEVAMSH

SEQ ID NO: 16394 - protein, 308 aa, unidentified
  source 1..308: note = protein_d4644ea
  REGION 3..106: note = RuvC_domain
  SITE 12: note = RuvC_P2
  SITE 47: note = RuvC_P3
  SITE 49: note = RuvC_P4
  SITE 52: note = RuvC_P5
  REGION 169..253: note = Tnp_domain
  SITE 177: note = Tnp_P1
  SITE 207: note = Tnp_P2
  SITE 215: note = Tnp_P3
  SITE 216: note = Tnp_P4
  SITE 228: note = Tnp_P5
MPKLPPTVVVIEACGAAHVLARELGKLGHTAKLIAPQLVKPYVTRNKNDGRDAEGLCEAASRPRMRYVPVKTAEQQAALMLLGLREQLVVRRTQLSNMIRGYAAEFGLIEAKGLDKLISFLAAIKHDESVPTLARELFATLARQYDQVQVELKALEAKLLAWHRANALSRRLAQIPGIGPVTAAALVMKAPDPHAFRSGRLFAAWLGLTPKDHSTAGKTRLGKITRAGDETLRQLLVVGATSVVKIAKSKARGPSWLIELLKRKTPKLAAVALANKMARIAWKLMTTGEQYESTRLEVRTEAQMAAAV

SEQ ID NO: 16395 - protein, 387 aa, unidentified
  source 1..387: note = protein_c518264
  REGION 5..158: note = RuvC_domain
  SITE 8: note = RuvC_P1
  SITE 56: note = RuvC_P2
  SITE 97: note = RuvC_P3
  SITE 99: note = RuvC_P4
  SITE 102: note = RuvC_P5
  REGION 221..305: note = Tnp_domain
  SITE 228: note = Tnp_P1
  SITE 258: note = Tnp_P2
  SITE 266: note = Tnp_P3
  SITE 267: note = Tnp_P4
  SITE 278: note = Tnp_P5
MTVIIGMDPHKRSATIEVIDERGRALAVGRYGTDKAGYAEMLAAGRRFTDRVWAIEGCNGIGKHIAHRLVHDGETVLDVPPKLSAQVRVFATGNGRKSDPVDAHSVAMVALRTPNLVQVQVDPDLVVMGMLADRRDELGRARTNTVNRLHGVLLELCPGGAKPFLSAAQARALISTIKPRDLVGKTRRRLAAELIGELAGIDKKIKAAEKELTELVRARGCTLMELTGIGPSGAARLLADVGDIRRFRDRNRFASYNGTAPLDASSGQQQRHRLSRAGNRRINRTLHIMAIVQLRNPTKGRAYFDTKKAAGKTSMEAMRALKRRLSNVVYTRMIADQKRREAADPGGHSGTTLQSSVTDLTPDIGPSDKPLPESATNHPKPSLPTAS

SEQ ID NO: 16396 - protein, 343 aa, unidentified
  source 1..343: note = protein_3a93939
  REGION 6..146: note = RuvC_domain
  SITE 9: note = RuvC_P1
  SITE 52: note = RuvC_P2
  SITE 87: note = RuvC_P3
  SITE 89: note = RuvC_P4
  SITE 92: note = RuvC_P5
  REGION 211..298: note = Tnp_domain
  SITE 219: note = Tnp_P1
  SITE 249: note = Tnp_P2
  SITE 257: note = Tnp_P3
  SITE 258: note = Tnp_P4
  SITE 270: note = Tnp_P5
MKLHVVGIDLGKTVFHLVGLDSTGRVVIRKRCSRTQLLVFTANLQVQLIGMEACSGSHFLGRALREQGHEVRLMPAQYVKPYVQTNKSDYLDAEAIAEAVQRPRMRFVPIKTEEQLDLQALHRVRERWVMRRTAVVNQIRSLLLERGLTVPKGRSHLEEQLPRILEDAELNLSDSFRVLLAQLKLELEQLAARIEEMDRVIQKTARENEACQRLTEIPGVGPVTATALIAAVGNASAFGKGRNLSAWMGIVPGEYSTGGKQKLLGISKRGNKYLRRLFVQGARSVLQQRHKQVPGLREWLAQLLARTHQNVVVVALANKLVRMAWAVLCKNERYRAPVFVGTN

SEQ ID NO: 16397 - protein, 346 aa, unidentified
  source 1..346: note = protein_920f6f2
  REGION 7..147: note = RuvC_domain
  SITE 10: note = RuvC_P1
  SITE 53: note = RuvC_P2
  SITE 88: note = RuvC_P3
  SITE 90: note = RuvC_P4
  SITE 93: note = RuvC_P5
  REGION 210..298: note = Tnp_domain
  SITE 218: note = Tnp_P1
  SITE 248: note = Tnp_P2
  SITE 256: note = Tnp_P3
  SITE 257: note = Tnp_P4
  SITE 269: note = Tnp_P5
MDKIIRIGMDTSKNVFQLHGVNEAEQPVLRKKLRRNQVLAFFAGLPPLKIGMEACGSAHYWARELRALGHEVVLLPPQYVKPYVKRSKSDAADAQAICEAMSRPDMRFVPTKSAAQQGSQMLAKLRAQFIGRRTQLANSIRGFAAEFGLVAPKGLSRLGDLLADIRADATIPDTARDMFETLARDYAHIGTEVATLDEKLLELHRQSEMSRRLAAIPAIGPVGATLLAIKVTDAHGFKSGRDFAAWLGLTPKNHSTAGKNRLGVITRAGDEMLRSVLVVGATALIQHMRRGSKRVWPWLSALIARKAPKLAAVALANKLARIAWKLMISGEQYRPVDATCPAPVQP

SEQ ID NO: 16398 - protein, 344 aa, unidentified
  source 1..344: note = protein_2bac004
  REGION 6..148: note = RuvC_domain
  SITE 9: note = RuvC_P1
  SITE 52: note = RuvC_P2
  SITE 87: note = RuvC_P3
  SITE 89: note = RuvC_P4
  SITE 92: note = RuvC_P5
  REGION 212..298: note = Tnp_domain
  SITE 219: note = Tnp_P1
  SITE 249: note = Tnp_P2
  SITE 257: note = Tnp_P3
  SITE 258: note = Tnp_P4
  SITE 270: note = Tnp_P5
MKATTIGIDLAKNVFQVHAVNEYGKTVLKKQLKRDQMTEFFANLPAALIGMEACSGAHYWARKLTGMGHDVRLMAPQFVKPYVKTNKNDAADAEAICEAVARPNMRFVPIKNIEQQAVLSWHRVRQGFISARTAQANQIRGLLSEYGIILPQGISNITKLVPDLLEDASNELPGMFRLLVDRLMDHFKELYRQVAEIDVQIKAWHRQSQLSCKLEKIPGVGPVTATALVATIGDAKNFDNGRQVAAWLGLVPRQHSSGGKSNLLGISKRGDSYLRMLLIHCARAVIFAAKRKGVQEGWVHELVKRRNHNIAAVALANKIARTVWALWAHDREFRPGYTTTAVAV

SEQ ID NO: 16399 - protein, 287 aa, unidentified
  source 1..287: note = protein_c5b2ede
  REGION 6..148: note = RuvC_domain
  SITE 9: note = RuvC_P1
  SITE 52: note = RuvC_P2
  SITE 87: note = RuvC_P3
  SITE 89: note = RuvC_P4
  SITE 92: note = RuvC_P5
  REGION 211..287: note = Tnp_domain
  SITE 219: note = Tnp_P1
  SITE 249: note = Tnp_P2
  SITE 257: note = Tnp_P3
  SITE 258: note = Tnp_P4
  SITE 270: note = Tnp_P5
MSAAFIGLDLAKSVFQVHGVDGQGKVVVTKRLRRDAVLAFFANLAPCVVGMEACAGSHFWARELTRLGHTVRLMAPQYVKPYVKRQKNDRADAEAICEAVQRPSMRFVAVKSEEQQSTLAIHRVRETLVAQKTQLINALRAHLAEFGIIAPQGAGKVVQLTAVVADLEDTRVPVLARSVLQSLVDQLRDTERRIEELDARLAEQAQADEVCQRLMTVPGIGPITATALTATVGDATVFESGRHLAAWLGLVPRQNSSGGKERLGGISKAGDGYLRRLLVHGARAVMR

SEQ ID NO: 16400 - protein, 346 aa, unidentified
  source 1..346: note = protein_3800fbb
  REGION 5..152: note = RuvC_domain
  SITE 8: note = RuvC_P1
  SITE 55: note = RuvC_P2
  SITE 92: note = RuvC_P3
  SITE 94: note = RuvC_P4
  SITE 97: note = RuvC_P5
  REGION 212..296: note = Tnp_domain
  SITE 220: note = Tnp_P1
  SITE 250: note = Tnp_P2
  SITE 258: note = Tnp_P3
  SITE 259: note = Tnp_P4
  SITE 271: note = Tnp_P5
MTYYAGIDVSLEYASLCVVDASGGIVREGKVASEPEALLAWFAALGLDLKRIGLEAGPLSQWLYAAMRDAGLAVELLETRHVRDAFRAMPVKTDRNDARGIAQLMRLGWFRPVHCKSLEAQETRAVLTARKLVQSKLHDVEMSLRGILRGFGLKVGKTTARRFAARITELVAGHPTLETIAQSLLAVHAVLLREFAGFEKRVRGLARSSPRASLLMTTPAVGPIVALSYACAIDDPGRFKSSKAAGAHFGLTPKRYQSGETDRSGRISKVGDASVREALYLAAHVMLTKPVKGCSSLKSWAMRIAGRAGMRKAKVALARKLAVIMHRMLADAAPFKPAAKASTAVA

SEQ ID NO: 16401 - protein, 342 aa, unidentified
  source 1..342: note = protein_2ae0546
  REGION 5..152: note = RuvC_domain
  SITE 8: note = RuvC_P1
  SITE 55: note = RuvC_P2
  SITE 92: note = RuvC_P3
  SITE 94: note = RuvC_P4
  SITE 97: note = RuvC_P5
  REGION 212..294: note = Tnp_domain
  SITE 220: note = Tnp_P1
  SITE 250: note = Tnp_P2
  SITE 258: note = Tnp_P3
  SITE 259: note = Tnp_P4
  SITE 271: note = Tnp_P5
MYHYAGIDVSLECSSVCLVDGTGKILRETKVASEPAALIAWFRSLGLVLERIGLEAGPLSQWLYAGLRDAGLAVELLETRHVREAFKSMPVKTDRNDARRIAQLMRLGWFRPVHCKSVAAQETRAILTARKLLQSKLRDVENSLRGILRGFGLKVGATTERTFAGRIRELVTGHPGLELVAAALLQAHAVLLREFKSLDKHTQKLARTHPSAKLLMTTPSVGPIVALTYAAAIDDPKRFRSSKATGAHFGLTPKKYQSGETDYTGRISKIGDASVREALYQAAHVMLTKPVKNCSALKSWAMRIARRAGMRKAKVALARKLAVILHRMLADTKPFNPMTKAI

SEQ ID NO: 16402 - protein, 352 aa, unidentified
  source 1..352: note = protein_b82ebeb
  REGION 10..158: note = RuvC_domain
  SITE 13: note = RuvC_P1
  SITE 62: note = RuvC_P2
  SITE 98: note = RuvC_P3
  SITE 100: note = RuvC_P4
  SITE 103: note = RuvC_P5
  REGION 228..314: note = Tnp_domain
  SITE 236: note = Tnp_P1
  SITE 267: note = Tnp_P2
  SITE 275: note = Tnp_P3
  SITE 276: note = Tnp_P4
  SITE 287: note = Tnp_P5
MPKRTRVVIGGVDTHGRTHHAAVIDQQGRLLGDREFAATSHGYRQLLGWLGRHGRLDAVGVEGTGSYGAGLTRYLLGQHVAVVEVDRPDRRTRRQRGKSDPIDAEAAARAVLAGTATAPAKRRDGIVEAIRALRVVRSGAIKARTAAINQLKGLLVTAPTPLREDLDQRSVAALVATCARLRPDEAALADPVQAIKAALRAVAWRIHQLDEEIGLADQRLAKLVGRAAPRLLKLHAIGVDHAGQLLTTAGDNPERLRGEAAFAHLCGTAPVPASSGKTHRHRLHRGGDRDANRALHLAVVVRMRWCPRTRAYAERRTKDGLSKPEIMRCVKRYLAREVYHALVADFEALHAT

SEQ ID NO: 16403 - protein, 309 aa, unidentified
  source 1..309: note = protein_d6792c0
  REGION 8..159: note = RuvC_domain
  SITE 11: note = RuvC_P1
  SITE 54: note = RuvC_P2
  SITE 94: note = RuvC_P3
  SITE 96: note = RuvC_P4
  SITE 99: note = RuvC_P5
  REGION 190..274: note = Tnp_domain
  SITE 198: note = Tnp_P1
  SITE 227: note = Tnp_P2
  SITE 235: note = Tnp_P3
  SITE 236: note = Tnp_P4
  SITE 247: note = Tnp_P5
MNSTVVYVGVDVAKAHLDVAWAERSRRFANGKSGWGALIKWIKQSALPVHLICEASGGYERGLLDAAEQSGIKLSLVQASRVRQYARAAGILAKTDQVDARVLCAFGSAMQPEPTVPLSVQQKQLRELETQRRHLSRMLVAEQNRLAQLNDKELRRLTRCLLASLKKQMALIDARLAALIAQDPTLREKAQRLTAIAGVGRRTAVLLLAQMPELGTLNRAQTAALAGLAPFNRDSGTLRGKRTIFGGRRALRCGLYMAALVAARHNLVLRNFYQRLRSNGKPHKVALTAVMRKLILALNQALKPNACFA

SEQ ID NO: 16404 - protein, 343 aa, unidentified
  source 1..343: note = protein_dd3d237
  REGION 5..152: note = RuvC_domain
  SITE 8: note = RuvC_P1
  SITE 55: note = RuvC_P2
  SITE 92: note = RuvC_P3
  SITE 94: note = RuvC_P4
  SITE 97: note = RuvC_P5
  REGION 212..300: note = Tnp_domain
  SITE 220: note = Tnp_P1
  SITE 250: note = Tnp_P2
  SITE 258: note = Tnp_P3
  SITE 259: note = Tnp_P4
  SITE 271: note = Tnp_P5
MDHFAGLDVSVKETSVCIVDDTGRILREVKVASEPEALLQVLRNRAYRFKRIGLEAGPLSQWLFSALAEAGLPVICVETRHMQAVLKAQINKTDRNDARGIAQMIRVGLYRPVHVKTQRSQKLRMLLTHRKLLQSKAIAIENDLRGTLRNFGLKVGMVGKVKFEARIKELVENLPDLAELVEPLLIVRRALSEQTVILHRRLLAIVRDDEVCRRLMTVPGVGPVVALTYRATVDVPARFRNSKAVGAVFGLTPSKYQSGEIDRSGRISRCGDEMMRMMLYEAAQVMLLRSAKWSWLKAWAMKIARHRGMKKAIVALARRLAVIMHRIWVDGTEFRWTRELAVP

SEQ ID NO: 16405 - protein, 410 aa, unidentified
  source 1..410: note = protein_f6fb869
  REGION 13..169: note = RuvC_domain
  SITE 16: note = RuvC_P1
  SITE 65: note = RuvC_P2
  SITE 106: note = RuvC_P3
  SITE 108: note = RuvC_P4
  SITE 111: note = RuvC_P5
  REGION 276..360: note = Tnp_domain
  SITE 284: note = Tnp_P1
  SITE 313: note = Tnp_P2
  SITE 321: note = Tnp_P3
  SITE 322: note = Tnp_P4
  SITE 334: note = Tnp_P5
MTAFDLVSFALFIGLDVGKSEHHATALTSSGERVYDKALPNDESKLRSLLDELTSAHGAALLVVDQPATIGALPVAVARAVEAVEVAYLPGLTMRRMADLHAGSAKTDARDAFIIAETARTMPSALRQVAASDEQVAELAVLAGFDDDLLGQTTAARNRLRGLLTQIHPGLERTIGPKLHHRGVLDALTRWPTPHALQKAGRAHVRNRIAKHNPRLARPVSEAIFDALDAQTVVVAGTGAAATIVPILAGQLTELYTQRETVTAQVEALVEAHPLHQVLTSMPGVGVRTTARILTEVIGKDFKTPGHLASYAGIAPTTRRSGSSIRGEFANRGGNKRLKSTLFNSAFASLSHPPSRAYYDKKRAEHKTHKQAIIALARRRLDTLYAMLRDGTFYQEPDNARGSTDHRLAA

SEQ ID NO: 16406 - protein, 349 aa, unidentified
  source 1..349: note = protein_de83e8d
  REGION 12..158: note = RuvC_domain
  SITE 15: note = RuvC_P1
  SITE 64: note = RuvC_P2
  SITE 100: note = RuvC_P3
  SITE 102: note = RuvC_P4
  SITE 105: note = RuvC_P5
  REGION 229..314: note = Tnp_domain
  SITE 236: note = Tnp_P1
  SITE 267: note = Tnp_P2
  SITE 275: note = Tnp_P3
  SITE 276: note = Tnp_P4
  SITE 287: note = Tnp_P5
MTIVEKTCPVTAGVDTHADVHVAAVVDGVGGVLGIESFTTTEAGCVQLIGWLRAHGSVNLVGVEGTGSYGAGLTRQLERAGIAVVEVDRPNRQVRRREGKSDPVDAVVAARAALSGQALGLPKARTGDVEAIRVLMVARRSATSERIAALCQLRHLCFTADDQVRRRFERLSVAQLTAAAAALRPRPGDTVRYSTLLAMRTLARRVAYLDDELDNLAVVVRPLVERSSPGLLAMHGVGYDVAAKLLVAAGDNPERLRSEAAFAHLCGVAPLEASSGKTRRHRLNRGGDRQANNALYRIVITRMASHPPTKIYLARRRAEGKSTGEIVRILKRYVAREAFKHLRAGAVTD

SEQ ID NO: 16407 - protein, 356 aa, unidentified
  source 1..356: note = protein_d991035
  REGION 25..167: note = RuvC_domain
  SITE 28: note = RuvC_P1
  SITE 71: note = RuvC_P2
  SITE 106: note = RuvC_P3
  SITE 108: note = RuvC_P4
  SITE 111: note = RuvC_P5
  REGION 229..315: note = Tnp_domain
  SITE 237: note = Tnp_P1
  SITE 267: note = Tnp_P2
  SITE 275: note = Tnp_P3
  SITE 276: note = Tnp_P4
  SITE 288: note = Tnp_P5
MVRPTPTLNSAMSLNFGRCHHIKTIGIDLGKSTFHVVGHDYAGQQRYRHKFSRSKLLQFISVHEPVLIAMEACCGAHWLARKCQEYGHQVKLIPPQYVKPYVKSHKNDFIDADAIAEAATRPRMRFVSPKTEQAQLGVVIRRIRTGYIRERTAVMNRIGSILTEFGFSFPRGHANMKRLFQWLADTGQQVPPLLIFELRNQLDHYNELNNKIKEQDKKLETLNSGNELFTILQTVPGVGPMTAACCISSVSDPEDFSNGRNFAAWLGLVPFQYSTGGKPRMLGISKRGNKELRELFIHAARAVLWRDGTAEKYFGKWLIELKHRKPFNVALVALANKLARIAWSVMATKKPFEIRR

SEQ ID NO: 16408 - protein, 348 aa, unidentified
  source 1..348: note = protein_bd138c7
  REGION 12..154: note = RuvC_domain
  SITE 15: note = RuvC_P1
  SITE 58: note = RuvC_P2
  SITE 93: note = RuvC_P3
  SITE 95: note = RuvC_P4
  SITE 98: note = RuvC_P5
  REGION 217..303: note = Tnp_domain
  SITE 225: note = Tnp_P1
  SITE 255: note = Tnp_P2
  SITE 263: note = Tnp_P3
  SITE 264: note = Tnp_P4
  SITE 276: note = Tnp_P5
MRGAVHMQISTIGLDIAKNVFQVHGIDSSEEVVVRKQLRRSQVLAFFKALPPCLVGIEACATAHYWARELTKLGHRVRLMPAKDVKAYVKRNKNDAADAEAICEAVRRPTMRFVQVKSVEQQGQLMLHRTRDLLMRQRTQVINALRAHMAELGIVAAQGREGIKELLKIIASEADARLPVDAHTSLVVLAAGLQALQTMIRSIEKRIVVQHRSNEASKRLETIPGIGVIGATAIAATVPDPKVFRSGRDLAAWIGLVPREGSTGGKQKLGPISKQGDQYLRRILVVGAHAVLKRARQQPEKYPWLTGLLARKPFRVVAVALANKMARIAWALLTKGGIYRAPALAAAA

SEQ ID NO: 16409 - protein, 387 aa, unidentified
  source 1..387: note = protein_45dfb2d
  REGION 5..158: note = RuvC_domain
  SITE 8: note = RuvC_P1
  SITE 56: note = RuvC_P2
  SITE 97: note = RuvC_P3
  SITE 99: note = RuvC_P4
  SITE 102: note = RuvC_P5
  REGION 220..305: note = Tnp_domain
  SITE 228: note = Tnp_P1
  SITE 258: note = Tnp_P2
  SITE 266: note = Tnp_P3
  SITE 267: note = Tnp_P4
  SITE 278: note = Tnp_P5
MAVIIGMDPHKRSATIEIIDPTGKILATGRYGTDNTGYTEMLTAAQRYTERVWAIEGCNGIGRHIAHRLVHDGETVIDVPAKLSAQVRVFATGNGRKTDPVDAHSVAMAALRAPDLRRVQADSELIALGMLADRRDELGRARTDTVNRLHRLLLELFPGGAKKFLTATQARKLVATVKPRDPAGKVRRRLVVELIGELATIDRKIKAADKELRQLVTDRGSTLADLRGIGPAGAARLLADVADIHRFRDRNRFASWNGTAPLDASSGQQQRHRLSRAGNRKINRVLHTMAMVQLRRPSAGRTYYDRRRADGKTSMEAMRALKRRLSNVVYTRMLADQQKWEKVSPRGQSGAATDSSATGSTPHTGTSDKPQPGLTTNQNNVDLQPAP

SEQ ID NO: 16410 - protein, 341 aa, unidentified
  source 1..341: note = protein_f94c89a
  REGION 6..148: note = RuvC_domain
  SITE 9: note = RuvC_P1
  SITE 52: note = RuvC_P2
  SITE 87: note = RuvC_P3
  SITE 89: note = RuvC_P4
  SITE 92: note = RuvC_P5
  REGION 210..295: note = Tnp_domain
  SITE 218: note = Tnp_P1
  SITE 248: note = Tnp_P2
  SITE 256: note = Tnp_P3
  SITE 257: note = Tnp_P4
  SITE 269: note = Tnp_P5
MQIITVGLDIAKNVFQVHGIDDQGRAVLRRKVRRDQLLKVFGGLEPCLVGMEACATAHHWARELRALGHDVRLMPPAYVKAYVKRNKNDAADAEAICEAVTRPTMRFVPIKSAEVQSVLMLHRARHLLVRQRTAQVSAMRAHLAEYGVVAAKGISRLRDLLPVLDAGAGILPELARQTLLLIAQLIEALTLQIRKIETELLAWHRSNPASQRLETIPGVGVITATALAATVLDARAFRSGRQFAAWLGLVPRQNSSGGKERLGGISKMGDRYLRHLLVVGATAVVRYTRRKATTISIWANRLLDRKPARLVTVAVANKMARIAWAVMAREENYRATPTAAA

SEQ ID NO: 16411 - protein, 339 aa, unidentified
  source 1..339: note = protein_22a6bb4
  REGION 6..148: note = RuvC_domain
  SITE 9: note = RuvC_P1
  SITE 52: note = RuvC_P2
  SITE 87: note = RuvC_P3
  SITE 89: note = RuvC_P4
  SITE 92: note = RuvC_P5
  REGION 209..295: note = Tnp_domain
  SITE 217: note = Tnp_P1
  SITE 247: note = Tnp_P2
  SITE 255: note = Tnp_P3
  SITE 256: note = Tnp_P4
  SITE 268: note = Tnp_P5
MNVKTIGIDLAKEVFQVHGIDEHGKRLFNKQLKRAKMLSFFANIPPCLIGMEACASAHFWAGKLMSMGHNVKLMAPQFVNPYVKTNKHDAADAEAICEAVTRPNMRFVPVKPPEQQAVLALHRSRQSFIKQRTAQANQTRGILAEFGIIVPRGIQQLHLPEILEDADNSLPSLFCVQLSLLQHHMVYLFDVIATLDKQIEQCYRQNALCQRISKIPGIVPITATALIATIGNASNFENGRQLAAWSGMVPRQHSSGGKHVLPGISKRGDIYLRTLLIHGARAVLQSVKRKQDAISGWASRLLARRNNNIASGALANKNARIVWALLAKDQEYYAPIMNV

SEQ ID NO: 16412 - protein, 341 aa, unidentified
  source 1..341: note = protein_40605de
  REGION 7..149: note = RuvC_domain
  SITE 10: note = RuvC_P1
  SITE 53: note = RuvC_P2
  SITE 88: note = RuvC_P3
  SITE 90: note = RuvC_P4
  SITE 93: note = RuvC_P5
  REGION 211..297: note = Tnp_domain
  SITE 219: note = Tnp_P1
  SITE 249: note = Tnp_P2
  SITE 257: note = Tnp_P3
  SITE 258: note = Tnp_P4
  SITE 270: note = Tnp_P5
MGEVITIGLDLAKSVFQAHGADGAGGVVFRKKLRRDQLLAFFSSQPRCLVAMEACASAHYWAREIGALGHEIRLIPPAYVKPFVKRQKNDMADAEAICEAGQRPTMRFVAPKSADAQGSAVVFRTRDLLVRQRTQLINALRGHLAEFGFVVRQGAGHTAKLIQVVEDPSTDLPAEARPVLTIIVESLRALQDKVAQLDAEIAARAKRDPVARRLMTVPGIGPVVATALVALAPAACTFRRGRDFAAWVGLTPRQHSSGGKERLGRTTKMGERSLRRLLILGASSAAKAAARDGSRASPWLTGMLARKPRMLVTVALANKMARIVWALMAHGGTYRAPAVAV

SEQ ID NO: 16413 - protein, 323 aa, unidentified
  source 1..323: note = protein_9de8a92
  REGION 8..153: note = RuvC_domain
  SITE 11: note = RuvC_P1
  SITE 55: note = RuvC_P2
  SITE 95: note = RuvC_P3
  SITE 97: note = RuvC_P4
  SITE 100: note = RuvC_P5
  REGION 194..281: note = Tnp_domain
  SITE 202: note = Tnp_P1
  SITE 232: note = Tnp_P2
  SITE 240: note = Tnp_P3
  SITE 241: note = Tnp_P4
  SITE 254: note = Tnp_P5
MTKVKKIAGFDVSKTFFDVCLCNQGVLSQKRFTNDSTGFGQLSAMLPAETHCVMEATGPYYLQLAFFLHAQAMKVSVVNPLVVRRFSQMRLTRAKTDKSDAKIILDYGIKEEPSAWEPPKVYVVQLQQLQALSAQLQKHYRALSNQQEAFFISGLMQKELGKFFKKELARIQAQLDTIEKQMHEIITQYHGELMTQLTSIPGLGKKTAMTLIVLSGGFKKFSNYKQLSAYVGLSPRIYESGSSVKGRTRICKMGMGRIRALLYVCAWSAKRCNSGCKELYDRLVANGKNKRLALIAVANKLIKQAFAIATSNCVYDKNYSKNI

SEQ ID NO: 16414 - protein, 387 aa, unidentified
  source 1..387: note = protein_beddf7c
  REGION 4..159: note = RuvC_domain
  SITE 7: note = RuvC_P1
  SITE 57: note = RuvC_P2
  SITE 98: note = RuvC_P3
  SITE 100: note = RuvC_P4
  SITE 103: note = RuvC_P5
  REGION 262..347: note = Tnp_domain
  SITE 269: note = Tnp_P1
  SITE 299: note = Tnp_P2
  SITE 307: note = Tnp_P3
  SITE 308: note = Tnp_P4
  SITE 320: note = Tnp_P5
MYCIGIDISKYKHDCTVIDDLGDTVTPSWSFTNDREGFSLFKQFLNSLEGEKKIELESTGHYGQNLKLFLESNGLTFMEFNPLLISRFVHSKSLRNTKTDSIDALSIARYVMTVEYKPYPPSFYHLDKLKSLTRFRDSLVRQRSRQLVELTNVLDRVFPEFKSFFKGRLSATALYILAHYQNPEKIANMNARSYEPLRKLSRGRFTMSNFVELKALAKNTVGVSSDYLLDQMNIRLEIYSQLDSKVDELDCQIKECVQGINPPILSLPGIGELSAAVILSEFGDFSKFDSPSKMLSFAGLEPGYYQSGQSEHTGHMVKHGSSQLRYALMNCCLPLVTNEPTFAEYYAKKRAEGKPHRVAITHVAKKLLRVIFTLQTRNILYDPSMIR

SEQ ID NO: 16415 - protein, 424 aa, unidentified
  source 1..424: note = protein_dcd62dc
  REGION 4..157: note = RuvC_domain
  SITE 7: note = RuvC_P1
  SITE 59: note = RuvC_P2
  SITE 94: note = RuvC_P3
  SITE 96: note = RuvC_P4
  SITE 99: note = RuvC_P5
  REGION 287..373: note = Tnp_domain
  SITE 294: note = Tnp_P1
  SITE 325: note = Tnp_P2
  SITE 333: note = Tnp_P3
  SITE 334: note = Tnp_P4
  SITE 346: note = Tnp_P5
MLGVGIDWAEAFHLVALGRPGEEVIQIRRVEHTPAAVAGLLAHIATLEPDPAEVRVVLETRHGALVERLVDTGFTVLPVNPDLVARRRGPARKKDDAEDARICCVLALDRYTSLRPLIPHGELAAELRAIARDDERAARDQRRLLNRLRADLLATFPAALQVAGDDLGAPTILKLLERWPTHQTLATASWEELLDFARAAHHGWPERFADQVAQALAADHFTPRDYLVRAKADTIRLAAVQLLAIGTQRRAWERRMGALLLGAPRRGRANAPRPEELDQGQAFPGGKVYLSFPGLGDRLAARVAGEIGDHPNQFGSPNALACYAGKAPVTRRSGKSELVVACRLACNRYLAGAVQQWAFCSLQESVWAREFYDAQRTRGKTHQAALRALGNRWLEILWHCLMRGQLYDEPLHIANRNRALGRAA

SEQ ID NO: 16416 - protein, 407 aa, unidentified
  source 1..407: note = protein_9a1a623
  REGION 11..165: note = RuvC_domain
  SITE 14: note = RuvC_P1
  SITE 62: note = RuvC_P2
  SITE 102: note = RuvC_P3
  SITE 104: note = RuvC_P4
  SITE 107: note = RuvC_P5
  REGION 273..359: note = Tnp_domain
  SITE 281: note = Tnp_P1
  SITE 311: note = Tnp_P2
  SITE 319: note = Tnp_P3
  SITE 320: note = Tnp_P4
  SITE 332: note = Tnp_P5
MEDTTGYDVYLGLDVGKTAHHGCALLADGTRLYGKGLPQDEAHLTALFNELKEHGRVLLIVDQPNTIGALPVAVARATGCGVAYLPGLAMRKAADLYPGQAKTDPRDAFIIADTARTMPHTLRVVDRNDEVLSALKMLSGLDDDIARDCTRTINRLRSILVQIYPSLERVFAGEVLQRAFVLDLLIHYGGPTKLKKSGKARVLAWARNHAKKDPEALVDDIFQALGAQTVTVPGTGAAEIAIPMLATNIKSLKAQRESIAGQVEEMLDDFPLAEVLMSMPGVGIKTAANILLAVGDCSDFPDAAHLAAYAGIAPVTRRSGTSIRGEFPARSGNKRLKNALFRSAWVASNCHEASRAYYAKKRAEGKRHNAAVMCLARRRCNVIFAMLTRGEFFRELPARTPQEVPAA

SEQ ID NO: 16417 - protein, 432 aa, unidentified
  source 1..432: note = protein_aabcef7
  REGION 26..184: note = RuvC_domain
  SITE 29: note = RuvC_P1
  SITE 83: note = RuvC_P2
  SITE 123: note = RuvC_P3
  SITE 125: note = RuvC_P4
  SITE 128: note = RuvC_P5
  REGION 294..394: note = Tnp_domain
  SITE 302: note = Tnp_P1
  SITE 332: note = Tnp_P2
  SITE 340: note = Tnp_P3
  SITE 341: note = Tnp_P4
  SITE 354: note = Tnp_P5
MILQEGLGVPVNFIIGGGDLKMNPVVGLDVAKGESQVQAYLEKKKPYKTSFKVTHTLEGLENLHQFLREIESLTGVKLPIVLEATGHYHTPVVQYFEEKDYLLIIVNPLISYRAKSSSLRKVKTDIIDANHLCELYYKEDLEPYKKRGIQLLNLRNLTRQHENLTGIYVQAKLQFQAVLDQVFPEYRGVFGDLYSVVSLLTLLEYPTSNDVLEAEEERIAAKIKEHCKSRSRKWAATKAKELIVAAARNPFRKTLYQSHILTLKMYINMLLEYQKHLSVFEVEIDALAKELIEYKIIQSIPGIGEKIAATIISEIGEIDRFNHPKKLVAFAGIDPSIFESGRFKGTVNRITKRGSSRLRRALYLAVKCAIRDCRKKKTTKDIIPRNKRLREFYDKKREEGKLYKVAVIACANKLLQWIYAILKNNSTFQDIA

SEQ ID NO: 16418 - protein, 343 aa, unidentified
  source 1..343: note = protein_b21f7cc
  REGION 7..149: note = RuvC_domain
  SITE 10: note = RuvC_P1
  SITE 53: note = RuvC_P2
  SITE 88: note = RuvC_P3
  SITE 90: note = RuvC_P4
  SITE 93: note = RuvC_P5
  REGION 211..298: note = Tnp_domain
  SITE 219: note = Tnp_P1
  SITE 249: note = Tnp_P2
  SITE 257: note = Tnp_P3
  SITE 258: note = Tnp_P4
  SITE 270: note = Tnp_P5
MSEVTMIGVDLAKRVFQIHGARADGSVAYQKKLSRSQLLEFLAQQPKCCVAMEACATAHGWGREIQKMGHQVKLIPPIYVKPFVKRQKNDANDAHAIVEAASRPTMRSVAVKTQEQQARAMVFRTRELLVGQRTQLINGLRAHLAEFGIVAPTGPAHLKRLQDALSDESLSLPQDVRELGALYLEQIQHLVTRIDGLEHRLKAASDQSDTARRLKTMPGIGPITAMAIETFAPNMEGFRRGRDFAAWLGLVPRQHSSGGKQVMGRTSKMGQRDIRRLLIISAMAVVTAATRYGKTTTKWLMAMLERKPRLLVGIALANKMARAVWAMLTRQHDYLKPEAILAA

SEQ ID NO: 16419 - protein, 342 aa, unidentified
  source 1..342: note = protein_2262fc2
  REGION 7..148: note = RuvC_domain
  SITE 10: note = RuvC_P1
  SITE 53: note = RuvC_P2
  SITE 88: note = RuvC_P3
  SITE 90: note = RuvC_P4
  SITE 93: note = RuvC_P5
  REGION 212..302: note = Tnp_domain
  SITE 220: note = Tnp_P1
  SITE 250: note = Tnp_P2
  SITE 258: note = Tnp_P3
  SITE 259: note = Tnp_P4
  SITE 271: note = Tnp_P5
MGEVSTIGLDIAKSIFQIHGVDADGAVVMRKRIRRAKLLEFFAALPACLVGIEACPTAHYWSRRLQALGHTVKLMPPSYVKAYLKRSKNDANDAAAICEAVTRPSMRFVATKSEQQQSGVMLHRSRQLLVCQRTMLSNAIRGHMAELGLICAKGRNGTAELLKIIADEHDDRIPAAARFSLGVLARQYAAIREEIVAIEKRIHAWHRSCEESRRLEEIPGVGPIVATALVAEVGDWKEFTSGRSLAAWIGLVPRQHSTGGKERLGRISKQGNRHLRWLLVAGAMAVIRYARQHGTKRPWLARLMDRRPIKVAAVALANKIARMAWAMMVRGERFKEPKLLPA

SEQ ID NO: 16420 - protein, 270 aa, unidentified
  source 1..270: note = protein_eb044d2
  REGION 6..147: note = RuvC_domain
  SITE 9: note = RuvC_P1
  SITE 52: note = RuvC_P2
  SITE 87: note = RuvC_P3
  SITE 89: note = RuvC_P4
  SITE 92: note = RuvC_P5
  REGION 212..256: note = Tnp_domain
  SITE 220: note = Tnp_P1
  SITE 250: note = Tnp_P2
MQVSAIGVDLAKNVFQVHGVDSAGKVVITRQLRRKQVIDFFSKIPACLVGMEACGTAHHWAREVSKLGHTVRLMPPSSVKGYVKRSKNDAADAAAICEAVTRPSMRFVPIKSADQQALLMLHRTRDLLVRQRTQLINALRAHLAEFGLVAATGREGLAQLAAIITDESNREALPFAMKQALQTIIDQLAALELQSGTLDRAIHAHHRDNDMSCRLETVPGIGVIGATAIASTVADAGAFKTGRDFAAWIGLVPRPLFDKPGSIRKSIPGS

SEQ ID NO: 16421 - protein, 311 aa, unidentified
  source 1..311: note = protein_e72051b
  REGION 6..154: note = RuvC_domain
  SITE 9: note = RuvC_P1
  SITE 52: note = RuvC_P2
  SITE 92: note = RuvC_P3
  SITE 94: note = RuvC_P4
  SITE 97: note = RuvC_P5
  REGION 188..272: note = Tnp_domain
  SITE 196: note = Tnp_P1
  SITE 225: note = Tnp_P2
  SITE 233: note = Tnp_P3
  SITE 234: note = Tnp_P4
  SITE 245: note = Tnp_P5
MTNDTIGVDISKDHLDAHRLSDGASRRFANDNPGHRAFVTWLGEPDAHIVYEPTGPYHRALEGRLAAASFAPVKVNPRQARRFAEATGRRAKTDRLDAAMLARMGALLDLEARQPRSPLLNDLKDLHMAREALVKNRIAARNRAKTLTLPILKRHNAQQLRQIERQMAAVEKAIMALIQADSDLSRRFAILVSIPGVSAITAFALLIDMPELGTLGQAQAASLAGLAPLTRQSGQWTGRAFIRGGRANVRQALYMPALVALRFNPNLKTKYDQLRAAGKAAKVAITAIMRRLILLANALLRDGRNWTPSLP

SEQ ID NO: 16422 - protein, 325 aa, unidentified
  source 1..325: note = protein_fd29a8f
  REGION 6..149: note = RuvC_domain
  SITE 9: note = RuvC_P1
  SITE 54: note = RuvC_P2
  SITE 92: note = RuvC_P3
  SITE 94: note = RuvC_P4
  SITE 97: note = RuvC_P5
  REGION 197..284: note = Tnp_domain
  SITE 205: note = Tnp_P1
  SITE 235: note = Tnp_P2
  SITE 243: note = Tnp_P3
  SITE 244: note = Tnp_P4
  SITE 257: note = Tnp_P5
MKNIFIGIDISSKTLDICEKVGQDVTYSKIKNNQQQIRKFLKAYQGQKVVVSMENTGRYNWELYDVLPEFDFKVYVLNPISLSKSLGLVRGKDDRTDAYRIVWFTEKNMDDLKPWRQSSTAIRKLKVLMTERNARIKSKRRLSKQKHDYKKMKPLGLTENLSNWNQQQVNQLNKQIDKIEQLIQEIINQEPSLKNQQKLMLSIPGVGKIVSWTLLAKTEGFVKIQEPRKMACYSGVVPFEHQSGTSIYRRPKVSVYADKQVKSILHLAAMSAIRFNNDLGIYYQRKVKEGKNKMLVINAVRNKIIHIIFALMKSGNKYQNRLVLS

SEQ ID NO: 16423 - protein, 307 aa, unidentified
  source 1..307: note = protein_f5d7349
  REGION 4..147: note = RuvC_domain
  SITE 7: note = RuvC_P1
  SITE 50: note = RuvC_P2
  SITE 89: note = RuvC_P3
  SITE 91: note = RuvC_P4
  SITE 94: note = RuvC_P5
  REGION 185..269: note = Tnp_domain
  SITE 193: note = Tnp_P1
  SITE 222: note = Tnp_P2
  SITE 230: note = Tnp_P3
  SITE 231: note = Tnp_P4
  SITE 242: note = Tnp_P5
MSGIGIDVCKKYLDVAVFQGQARQFTNTAAGHCKLVRWLNTMSVKQVVLEATGGYELAALDALHQAALPVARANAQRARSLANTLGKAKIDRLDAAMLAYMAEKIDLHPYVPLEPWQRHLGEHVRARRQVIELLKMAKQQLLPVADKPLRKMLQGNIKQLVRSVARLDVLIAEQLKTLLIQHPHLAALKTLKGVGPVLLAVLMCRLPELGTLGGKQIARLVGVAPLSHDSGTVRGKRGIKGGRADVRKALYMAAMSAARHEPRLRDFYRSLRARGKEGKVALVAVMRKMLVILNARVRDERAAMRPA

SEQ ID NO: 16424 - protein, 325 aa, unidentified
  source 1..325: note = protein_7aa9232
  REGION 6..156: note = RuvC_domain
  SITE 9: note = RuvC_P1
  SITE 55: note = RuvC_P2
  SITE 93: note = RuvC_P3
  SITE 95: note = RuvC_P4
  SITE 98: note = RuvC_P5
  REGION 197..284: note = Tnp_domain
  SITE 205: note = Tnp_P1
  SITE 235: note = Tnp_P2
  SITE 243: note = Tnp_P3
  SITE 244: note = Tnp_P4
  SITE 257: note = Tnp_P5
MEKVFIGIDISKLTLDIFVKGYCKTQHYQIENTSKAIKKFFKSFPNNANTVVGMENTGRYNFELYEVLSNMDLLVFVINPLHLKKSIGLLRGKNDKLDSQRICVFLEKNHMDLEPWISKSSDIQKISLLNTERRHRVKIRAGLSRQMKDLSFLKNHTDKETVKLNKQLILLLDKQIKTIEKKIVEIIESNIELRDQYERIQTVPGVGKVLATMFIVKTNGFTEIQSARKMACYSGVVPFDHRSGSSIYYKPRVSTMADKELKKILHLAALSSIRLKNDLALYFQRKVLEEKNKMSVLNAIRNKIIHRVYALIKNNSVYENKLHMS

SEQ ID NO: 16425 - protein, 404 aa, unidentified
  source 1..404: note = protein_1589681
  REGION 5..161: note = RuvC_domain
  SITE 8: note = RuvC_P1
  SITE 98: note = RuvC_P3
  SITE 100: note = RuvC_P4
  SITE 103: note = RuvC_P5
  REGION 270..356: note = Tnp_domain
  SITE 278: note = Tnp_P1
  SITE 309: note = Tnp_P2
  SITE 317: note = Tnp_P3
  SITE 318: note = Tnp_P4
MRVFVGHDWAEAHHDVFIEDESGNRLAAARVSEGIEGVARFHALVADHIEDPSEVTVATETDRGLFVGALVAAGYRVLAVNPMSVARYRERHVTSGAKSDAGDAWMLAELARVDGHHHQPIRGDTDLADAVKALARAHQMMIWSRQRHTLQLRSTLREFYPAALEAFDDLASGDALAVLSIAPTSKMGRRLSSQRIVSALRRGGRQRRIDERAAEIRAALRVEHLTAPDVVADAMGATVTALVGVIREMVTQIRRLEAELADRFEQHPDAKIIRSLPGLGTILGARVLAEFGDDPNRFDSAKSRKNYAATSPITRASGKHHIVLARYARNRRLANTCHQWAFTAISASPGARAFYDHRRRSGDTHNQALRVLANRLVGILHGCLRHQTPYDEHTAWAHRNDKAA

SEQ ID NO: 16426 - protein, 343 aa, unidentified
  source 1..343: note = protein_a987e75
  REGION 7..149: note = RuvC_domain
  SITE 10: note = RuvC_P1
  SITE 53: note = RuvC_P2
  SITE 88: note = RuvC_P3
  SITE 90: note = RuvC_P4
  SITE 93: note = RuvC_P5
  REGION 212..304: note = Tnp_domain
  SITE 220: note = Tnp_P1
  SITE 250: note = Tnp_P2
  SITE 258: note = Tnp_P3
  SITE 259: note = Tnp_P4
  SITE 271: note = Tnp_P5
MQGVTTIGLDIAKSVFQVHGVDGEGKVIIRRQLKRRYVLAFFEKLPPCLVGIEACATPHHWSRQLTALGHTVRLMPPAYVKPYVKRQKNDAADAEAICEAVTRANMRFVETKTPEQQSCLMLHRTRQLFIRQQTSVINAIRAHMAEFGIVAPVGRKGVVALLEVVADASDQRVPEVARACLAALGAQLRMLKVQILEFDRRIMAWRRSNEISRRLDAIPGIGPALATALVASVANPKAFRSGRNFSAWVGLVPKQHSSGGKDKLGSISKQGDRYLRSLFTAGALAVIRYAKIHGSQNRPWLTALLARRPTKVAAIALANKLARMAWAMMARGERYKEPVALAA

SEQ ID NO: 16427 - protein, 289 aa, unidentified
  source 1..289: note = protein_04a3066
  REGION 13..95: note = RuvC_domain
  SITE 34: note = RuvC_P3
  SITE 36: note = RuvC_P4
  SITE 39: note = RuvC_P5
  REGION 157..245: note = Tnp_domain
  SITE 165: note = Tnp_P1
  SITE 195: note = Tnp_P2
  SITE 203: note = Tnp_P3
  SITE 204: note = Tnp_P4
  SITE 216: note = Tnp_P5
MAAPTIGRGRWPALGHEVKLIAPQYVRPFVKRQKNDAADAEAIVIAARQPEMRFVEPKTPDQQARAILFRARERIVHQRTELVNALRAMLYEYGHVVPVGIGHIKRLEAALNDVANNLPDLVREEGLDLLAQIGEMTAKIDSKTQKLASLAKQTDVARRLQTMPGIGPMTAVAVEAFAPAMESFKSGRDFAAWLGLVPRQFSSGGKERLGKVSKAGQADIRRLLIIGAMARVNWASCKEASADPWMMRMLGRKPRMLVAIALANKMARMIWAMLMRQEDYRNPTLTTAA

SEQ ID NO: 16428 - protein, 339 aa, unidentified
  source 1..339: note = protein_19fc1ec
  REGION 9..151: note = RuvC_domain
  SITE 12: note = RuvC_P1
  SITE 55: note = RuvC_P2
  SITE 90: note = RuvC_P3
  SITE 92: note = RuvC_P4
  SITE 95: note = RuvC_P5
  REGION 214..300: note = Tnp_domain
  SITE 222: note = Tnp_P1
  SITE 252: note = Tnp_P2
  SITE 260: note = Tnp_P3
  SITE 261: note = Tnp_P4
  SITE 273: note = Tnp_P5
MNATTKAVFGVDVAKLVFQIHTVVQATGEVISKQIKRAAFLEYFANLAPCLIGMEACGGSQHWARRLKEMGHEVKLMAGKQVKAFVSGNKNDVADARAIWLAVQQSAIRPVAIKTEAQQAVLAMHRMRQQLVKFRTAQSNNLRGLMGEYGEVMKVGFKALNEAMPGVLARLGDRLPAPLIDTWREQWAMISTLDAQIQQIERRLQEWMRLDPASKAIEAIPGVGLLTATAAVATMGDPKAFQSGREFAAWLGLVPAQTGTGGRVRLLGISKRGDTYLRTLLIHGARAVLLHSKQKSKWVEELGKRRPPNVVVVALANKMARTIWAMLAHDRAYDRDYAR

SEQ ID NO: 16429 - protein, 343 aa, unidentified
  source 1..343: note = protein_5625ffa
  REGION 6..147: note = RuvC_domain
  SITE 9: note = RuvC_P1
  SITE 52: note = RuvC_P2
  SITE 87: note = RuvC_P3
  SITE 89: note = RuvC_P4
  SITE 92: note = RuvC_P5
  REGION 211..296: note = Tnp_domain
  SITE 219: note = Tnp_P1
  SITE 249: note = Tnp_P2
  SITE 257: note = Tnp_P3
  SITE 258: note = Tnp_P4
  SITE 270: note = Tnp_P5
MQIRSVGIDLGKTTFHLVALGDNGKVLMKKKFTQKQLINFTVNMQTSLIGMEACSGAHFLGRALRAQGHDVKLIPAQFVKPFVKSNKNDFIDAEAIAEAVDRRNMRFVPIKTDDQLDLQALHRVRDRLMVRRTSVINQLRAFLLERGMVFAKSPIRLREAIPEVLENANENLPPRLRNLVAMLWSEWKHVELQIQEMNEEIERIASSDAGCCRLRQIPGIGPLVATAIVASIGNGAAFHKGREFAAWMGLVPKQHSTGGKAKLYGISKRGNRYLRKILVHGARAVVLRSKRDRIAMGPWLTSLEMRVPRNVLIIAMANKLARIAWAVLSSGQDYRAIPGAIPA

SEQ ID NO: 16430 - protein, 351 aa, unidentified
  source 1..351: note = protein_502f696
  REGION 18..183: note = RuvC_domain
  SITE 21: note = RuvC_P1
  SITE 64: note = RuvC_P2
  SITE 99: note = RuvC_P3
  SITE 101: note = RuvC_P4
  SITE 104: note = RuvC_P5
  REGION 222..309: note = Tnp_domain
  SITE 230: note = Tnp_P1
  SITE 260: note = Tnp_P2
  SITE 268: note = Tnp_P3
  SITE 269: note = Tnp_P4
  SITE 281: note = Tnp_P5
MHKASSDWRLHIMKYTPVGVDIAKHLIQIHFIDEHSGEVVDRQLRSKDFLMFFSNREPCLVGMEACGGSQHWARELEKLGHKVRLMQGRFVKAFVMGNKNDVMDARAIWMAVQQPGKTIAVKTEEQQSVLVLHRSRRQLVKFRTAQINALHGTLLEFGETIHKGRTAMDRELPAALDRLKTTLPPYLIAVLEDQYRRLSELDKLIDGLEKQLHSVAKQNEACRRLMEIPGVGPLIATAAVATMGEASAFKSGREFAAYIGLVPKQTGSGGKVRLLGISKRGDTYLRTLFIHGARAASMCTKEPGPWITELRKRRPTAVAIVAMANKLARTVWAITAHDRRYEKNHTSIRPY

SEQ ID NO: 16431 - protein, 411 aa, unidentified
  source 1..411: note = protein_bb991d6
  REGION 4..163: note = RuvC_domain
  SITE 7: note = RuvC_P1
  SITE 60: note = RuvC_P2
  SITE 100: note = RuvC_P3
  SITE 102: note = RuvC_P4
  SITE 105: note = RuvC_P5
  REGION 273..359: note = Tnp_domain
  SITE 281: note = Tnp_P1
  SITE 312: note = Tnp_P2
  SITE 320: note = Tnp_P3
  SITE 321: note = Tnp_P4
MLFVGDDWAEDHHDIAIIDGAGRLLARRRLPEGVVGIEKFHRTVADHLSEDGEAGQVLVAIETDRGPWVQALLAGGYTVYAINPLQAARYRERHGTSGAKSDKGDALALAEILRTDAAHHRPITGDSPIAEQAKVLARAHQSLIWARQRQVNVLRSNLREYYPAALVAFGSDLADRDALAVLGAAPGPATGAKLTQSRVETLLRRAGRRRYLAKRAQEIVAALRSEQLPTRSGIEAAYTATTTALVAVITELSAQITALQGKVEACFGQHPDAEIYLSQPGLGGVLGARVLAEFGDDSDRYTDARARKNYSGMSPITRASGKKQIVIARYARNRRLGDALLLQAFAALNASPGARAYYDVRRARGATHYQALRAVANRLVGILHGCLRDHALYDEQTAWHASAAARQDHAA

SEQ ID NO: 16432 - protein, 266 aa, unidentified
  source 1..266: note = protein_894450c
  REGION 4..78: note = RuvC_domain
  SITE 17: note = RuvC_P3
  SITE 19: note = RuvC_P4
  SITE 22: note = RuvC_P5
  REGION 137..224: note = Tnp_domain
  SITE 145: note = Tnp_P1
  SITE 175: note = Tnp_P2
  SITE 183: note = Tnp_P3
  SITE 184: note = Tnp_P4
  SITE 196: note = Tnp_P5
MAAKFVSPYHMAGKSGKNDAADAQAICEAVRRPHMRFVPVKDESQQAMQCLHRTRQGFIEEKTATYNRLRGLISEFGVIAPQSTDALRRMVSEQKNSLPFQVQQCIDDLLEHVDRIEANIADYDRILSRMAKTDHRSQRLMELKGVGPTTACALVASIGNAHDFKNGRQLAAWLGLTPSQYSSGGKSKLGRITKAGDSYLRTLLVQGARSVLIGADKRTDSFSRWVCTLVERRGYWRAVVAIAAKNARLCWASLHYGDDFRLYSAS

SEQ ID NO: 16433 - protein, 353 aa, unidentified
  source 1..353: note = protein_1d937c2
  REGION 4..158: note = RuvC_domain
  SITE 7: note = RuvC_P1
  SITE 56: note = RuvC_P2
  SITE 97: note = RuvC_P3
  SITE 99: note = RuvC_P4
  SITE 102: note = RuvC_P5
  REGION 220..306: note = Tnp_domain
  SITE 228: note = Tnp_P1
  SITE 258: note = Tnp_P2
  SITE 266: note = Tnp_P3
  SITE 267: note = Tnp_P4
  SITE 278: note = Tnp_P5
MIVIGIDPHKSTHTATAVDPATNTDLGSIRIDATLTGYKTLIAWAKSWPHRQWAVENAYGLGHHLAQWLLVLGEVVLDIPTTSTARVRELSRGGRRKNDRIDAAAAACVAALQGDARPVDPEGPTDVLALLDERRTNLSNSRTRIVNQLHALLRQLFAGGAPTSLTAAAATALLRGFRARSEVDRARVGLCRDLIADIRRLDSQLAANEKQMAKTLDEHGTRLREVDGIGAVTAARLIGRTGRASRFPTTAAYANYNGSAPVQIASADTNRHRLSRYGDRQLNSALYTIAVVQIRMPASAGRGYYDKKIAEGKTPAAARRTLKRHLSDHVWRIMLADEKRRYRLYEADSASAA

SEQ ID NO: 16434 - protein, 327 aa, unidentified
  source 1..327: note = protein_6be3042
  REGION 23..135: note = RuvC_domain
  SITE 39: note = RuvC_P2
  SITE 74: note = RuvC_P3
  SITE 76: note = RuvC_P4
  SITE 79: note = RuvC_P5
  REGION 197..281: note = Tnp_domain
  SITE 205: note = Tnp_P1
  SITE 235: note = Tnp_P2
  SITE 243: note = Tnp_P3
  SITE 244: note = Tnp_P4
  SITE 256: note = Tnp_P5
MFQLHGANDIGAVVFRKQLRRGQVLKFFGGLPRCLVAMEACGSSHFWAREIGCLRHDVRMIPPAYVKPFVKRQKNDMADAEAICEAAQRPTMRFVAVKSEETQGAAVVLHTRDLLIRQRTQTINALRSHLAEFGEVVPKGSTYASKLIAMIEDPQTALPDTARTALRFLTASLSQVNDQIRALDAQIARRAREEETVGRLMTIPGVGPLIATALVALAPSPETFKRGRDFAAWLGLVPRQHSTGGKQRLGSTTKMGERSLRRLLIIGANSELVWRARKGATPGTWLAKMLAHKPPMLVRVALANKMARIVWAIMAKGGIYRAPVTAA

SEQ ID NO: 16435 - protein, 349 aa, unidentified
  source 1..349: note = protein_0bb783a
  REGION 6..161: note = RuvC_domain
  SITE 9: note = RuvC_P1
  SITE 67: note = RuvC_P2
  SITE 105: note = RuvC_P3
  SITE 107: note = RuvC_P4
  SITE 110: note = RuvC_P5
  REGION 210..296: note = Tnp_domain
  SITE 218: note = Tnp_P1
  SITE 248: note = Tnp_P2
  SITE 256: note = Tnp_P3
  SITE 257: note = Tnp_P4
  SITE 269: note = Tnp_P5
MLRFIIGADISKDKINFALRFLNDYLLEKEVENTTSALNKFIKQVQSLVKNIAKEKKAEYSIEFIMEHTGIYGNLLIECLAGHKVTTYVVAGLEIKNSTGISRGKNDKIDAKRIADYGVRFADKMKPYTFCDQTLTELKGLNTLRSQLVRIKAQLTQAKDDNKKFQSKSLQKKLENINKPIVNELDKSIEKIEFQMLELIKSDESIYDNYKIAQSVPGVGKIVAVAFICATNNFTKFQSAKALGSYCGVVPFGKESGRYKGKDKVSPIANKALKTLLHLGAVASIGGKNAFAAYYQRKVMDDKKNKMLALNNVRNKIVKTLFACIKNKTKYTADYVFLLLPNLRMLITL

SEQ ID NO: 16436 - protein, 396 aa, unidentified
  source 1..396: note = protein_4805c89
  REGION 19..167: note = RuvC_domain
  SITE 22: note = RuvC_P1
  SITE 73: note = RuvC_P2
  SITE 106: note = RuvC_P3
  SITE 108: note = RuvC_P4
  SITE 111: note = RuvC_P5
  REGION 234..319: note = Tnp_domain
  SITE 241: note = Tnp_P1
  SITE 271: note = Tnp_P2
  SITE 279: note = Tnp_P3
  SITE 280: note = Tnp_P4
  SITE 292: note = Tnp_P5
MPTTNLQKTNDFTGQNFHVGLDVHKTSWAVTIRSLGIEVAHFTQPPGAEALSNYLNREFPGGTYHSAYEAGFCGTGTHEQLCKLGIKNILVHAADIPSTDKQKKNKTDLHDSRAIAVHLERGNLHGIYVLSQEQQELRSLFRLRECKVIDTTRANNRLKSFLMYYGIIIPETVSKRGDLTGRALAWLDIELGSAAGTIVLQQYIAELKYQRKQLFQLTKTLREQVMAHDKQTYINLISIPGMGCITAIGLMTEIGDFSRFADPDDYSSYLGFCPWEDSSGDCIKTKGMQPRCNSHLRPLLIEASWHSIRKSRKLFAYYSKHAGGKNGKKAIVKVARKLAMIARGVATSGQPYQEDYQMKGYNQEPAKQVKVERFSSGITKQHINKQPDYGRMPMPG

SEQ ID NO: 16437 - protein, 282 aa, unidentified
  source 1..282: note = protein_783e583
  REGION 2..135: note = RuvC_domain
  SITE 39: note = RuvC_P2
  SITE 74: note = RuvC_P3
  SITE 76: note = RuvC_P4
  SITE 79: note = RuvC_P5
  REGION 195..280: note = Tnp_domain
  SITE 203: note = Tnp_P1
  SITE 233: note = Tnp_P2
  SITE 241: note = Tnp_P3
  SITE 242: note = Tnp_P4
  SITE 254: note = Tnp_P5
MFQVHAADKAGRTLAQVRLRRGQVLDYFRELPSCLIGMEACATAHYWARELIALGHDVRLMAPAYVKPYVKRNKTDATDAEAIAEAVTRPTMRFVAVKSSEQQAALMLHRVRELLVRQRTMLATALRAHLAEFGIIAPQGIHRVEKLAVEVNSSSVPPLARQALTLLIEELADVWRRVEAIEARLITLHRANEVSRRLATIPGVGPITATAIAGSVSDPSMFRSGREFAAWLGLTPKSHSSGGKDRLGRISKRGDRYIRHLLYVGAGNAIRFAKAQAATGEA

SEQ ID NO: 16438 - protein, 347 aa, unidentified
  source 1..347: note = protein_d8310c6
  REGION 7..147: note = RuvC_domain
  SITE 10: note = RuvC_P1
  SITE 53: note = RuvC_P2
  SITE 88: note = RuvC_P3
  SITE 90: note = RuvC_P4
  SITE 93: note = RuvC_P5
  REGION 210..296: note = Tnp_domain
  SITE 218: note = Tnp_P1
  SITE 248: note = Tnp_P2
  SITE 256: note = Tnp_P3
  SITE 257: note = Tnp_P4
  SITE 269: note = Tnp_P5
MDQIIRIGMDTSKHVFQLHGVNAGEQPILRKKMRRREMVDFFAKCPPTVIAIEACAASHHWARLLTGFGHDVKLIAPQLVKPYVKRGKNDAADAEALCEAMSPPTMRFVPVKSADQQAALMLVGLRERAVTAHTQLANTIRGYAAEFGLTAAKGMSHIPLLLERMLINDIIPALARDLFASLAEEFAQLGERLKEVEAKLMAWYRDNECCRRLANIPGVGPIGAVLLVMKAPAPEQFTSGRQFAAWMGLTPKYHSTAGKVRLGVITRAGDEALRKTLIVGATSSLRQVRAGRGRNASLWLIELLKRKPPKLAAVALANKIARIAWKMMVTGEVYKGNAARSAMACAA

SEQ ID NO: 16439 - protein, 294 aa, unidentified
  source 1..294: note = protein_0e45074
  REGION 5..95: note = RuvC_domain
  SITE 34: note = RuvC_P3
  SITE 36: note = RuvC_P4
  SITE 39: note = RuvC_P5
  REGION 158..241: note = Tnp_domain
  SITE 166: note = Tnp_P1
  SITE 196: note = Tnp_P2
  SITE 204: note = Tnp_P3
  SITE 205: note = Tnp_P4
  SITE 217: note = Tnp_P5
MRHCPLLERELSALGHDVRLMPPAYVKPYVKRQKNDVADAEAICEAVMRPTMRFVPIKSVEQQSAAMLHRSRALLVKQRTMLMHSIRSHLAELGISTGAGISQIARVVRELAQGERSELPELARFVLEALARLVCDLAQRLQAIEKKLISWHYRNDLSNRLETIPGVGFVTASALASIVPDAEVFSSGRHFAAWLGLVPRQNSSGGKSRLGRISKQGNRYIRQLLILGATSVLRYVRRDGDGGSSWVSGLLRRRPPKVVAVALANKMARIAWSIMRRGGEYEINELRAVQHTSS

SEQ ID NO: 16440 - protein, 268 aa, unidentified
  source 1..268: note = protein_033975c
  REGION 2..75: note = RuvC_domain
  SITE 14: note = RuvC_P3
  SITE 16: note = RuvC_P4
  SITE 19: note = RuvC_P5
  REGION 138..231: note = Tnp_domain
  SITE 146: note = Tnp_P1
  SITE 176: note = Tnp_P2
  SITE 184: note = Tnp_P3
  SITE 185: note = Tnp_P4
  SITE 197: note = Tnp_P5
MPPRYVKPYVKRNKNDAADAAAICEAVTRPTMRFVAVKSAEQQSVLMLHRTRALLVRQRTMLVNAIRAHMAELGIVARVGLPQVKALLAVIADEADGRLPPLARSCLQGLAVQLMSLEHEIAAAGERIHAWHRSNEVSRQLESIPGIGPITASALAATITDPSLFRSGRELAAWIGLVPRQNSSGGKERLGRISKQGDPYLRWLLVVGAMTVIRHAKRRGTANPWLAELIARKPTKVAAVALANKLARIAWALLQHGGTYQTPMAAAA

SEQ ID NO: 16441 - protein, 351 aa, unidentified
  source 1..351: note = protein_c80b741
  REGION 17..166: note = RuvC_domain
  SITE 20: note = RuvC_P1
  SITE 69: note = RuvC_P2
  SITE 105: note = RuvC_P3
  SITE 107: note = RuvC_P4
  SITE 110: note = RuvC_P5
  REGION 232..318: note = Tnp_domain
  SITE 240: note = Tnp_P1
  SITE 271: note = Tnp_P2
  SITE 279: note = Tnp_P3
  SITE 280: note = Tnp_P4
  SITE 291: note = Tnp_P5
MPKARMESKPSSMIVVGGVDTHADTHTVAALDQVGRRLGCAVFPAHRAGYRALADWLAGHGEISAVGVEGTGSYGAGLTRWLSAHQITVVEVNRPNRAERRRRGKSDPVDAEHAAAAVLANTATAVPKARTGLVESIRLIHATRAGAVKARTAARNTFTNTLRTSPDAVREQLQPLTRARQLTAATGYRATGDDPDSTVKRCLRRLAVRISQLSEEINAADHELDRLTRELAPTMRSRPGFGPETTAQLLITAGDNPDRIGSEAALAGLCGVSPVSASSGRTRYHRLNRGGDRQANRALHMIILNRLRHHPPTRAYLASHSLQGQATPHLRRVLKRYLVREVYQLLSQLQR

SEQ ID NO: 16442 - protein, 392 aa, unidentified
  source 1..392: note = protein_0bb88f8
  REGION 10..163: note = RuvC_domain
  SITE 13: note = RuvC_P1
  SITE 61: note = RuvC_P2
  SITE 102: note = RuvC_P3
  SITE 104: note = RuvC_P4
  SITE 107: note = RuvC_P5
  REGION 225..310: note = Tnp_domain
  SITE 233: note = Tnp_P1
  SITE 263: note = Tnp_P2
  SITE 271: note = Tnp_P3
  SITE 272: note = Tnp_P4
  SITE 283: note = Tnp_P5
MKARDARVVIGMDPHKRSVTIEVMAADEEVLGGGRFGTDAAGFTSMLEYVTRWPDRVWAIEGCNGIGRHVAMRLIAEGHEVVDVPPKLSARARVFATGQGRKTDATDAHSVALVGTRMAGLRPVVHDEQLAVLRLLVDRRSSLGDDHTRMISQLHQLLLELIPGGAKKDLSAAQAKALLAKVRPRDTVGKARRRVAAELIADLERVYARKKAADKELKELLAATGTTLMDLHGIGPSGAARLLVEVGDITRFPNREHFASWNGTAPIDASSGDQVRHRLSRAGNRQINRVLHIMATVQLRNDTEGRAYFDRRKRDGKTSMEAMRALKRRLSNIVYRTMLDDAMRAKATGPGGQRGSDSDSSATGSQPPHRLFGQATPGPVSDQPRTPLPKVS

SEQ ID NO: 16443 - protein, 325 aa, unidentified
  source 1..325: note = protein_25399f5
  REGION 8..152: note = RuvC_domain
  SITE 11: note = RuvC_P1
  SITE 55: note = RuvC_P2
  SITE 95: note = RuvC_P3
  SITE 97: note = RuvC_P4
  SITE 100: note = RuvC_P5
  REGION 193..278: note = Tnp_domain
  SITE 201: note = Tnp_P1
  SITE 230: note = Tnp_P2
  SITE 238: note = Tnp_P3
  SITE 239: note = Tnp_P4
  SITE 250: note = Tnp_P5
MAHSHDVVGIDVSKGNLDVYVLVHQQLRTVTNTAAKHAELASWLKSLGVRVAVMEASGGYEQAVAGALRRAGFEVRVVDPKRVRHFAKAAGRLAKNDRIDARMIAEFGAVFAVVEQCEVPTDPAREHLASLVGARQALIEHEIGLRNQISAAPAGAARLALAAVLKPIAGAIKKLDRLIAATIAAHPPFAALAARLDTVPGLGPVAIAGLIAWLPELGRLDRRALAALVGVAPFDDDSGKRTGRRSIQGGRRKLRNIVYMAGMGAATRHNPVLNAYYTALINRGKPPKVAIVACLRKLLTMVNAMVAQQKDWEPRLATGPSACAV

SEQ ID NO: 16444 - protein, 438 aa, unidentified
  source 1..438: note = protein_3a24c56
  REGION 16..175: note = RuvC_domain
  SITE 19: note = RuvC_P1
  SITE 74: note = RuvC_P2
  SITE 114: note = RuvC_P3
  SITE 116: note = RuvC_P4
  SITE 119: note = RuvC_P5
  REGION 290..384: note = Tnp_domain
  SITE 298: note = Tnp_P1
  SITE 328: note = Tnp_P2
  SITE 336: note = Tnp_P3
  SITE 337: note = Tnp_P4
  SITE 350: note = Tnp_P5
MTSNIVFNSDDLFISVGIDVGADFSWMSIALPNQQFIGKPYKIIHNCMESLESAVFKIKEAEKLYSLETRIFLESTGIYHYPLFCYLRDKGFNCSVINPIITKNSTNINIRKVHNDRFDSKKAALVGLKPDLKVSIMPSELALNCRNLCREYYSLMDSRSAYVNKLQGELRMAFPQYIGVFSKVTVNTSLVLLETYTSPKAFIEADEQEVIGIIKSTARFGLIYAKDKYNAIIKAANDANKFGCISCSNTIRIRLYISFIRKYDEEISRLLETMKQLVKANEDTEFVRQLKLIETFKGAGFLSAISLMSEIGDFSAFKKPKQLFAYFGLDPAVKQSGKFEGTKVKMSKRGSAIARRVIHVLTLQSISPARNGNAKNPVLREYYLKKCESKPKLVAMGAVSHKVCNMIFAILRDGKPFEIITPQEHIRQYNSSKSNTAA

SEQ ID NO: 16445 - protein, 342 aa, unidentified
  source 1..342: note = protein_1fed8cd
  REGION 6..148: note = RuvC_domain
  SITE 9: note = RuvC_P1
  SITE 52: note = RuvC_P2
  SITE 87: note = RuvC_P3
  SITE 89: note = RuvC_P4
  SITE 92: note = RuvC_P5
  REGION 211..299: note = Tnp_domain
  SITE 219: note = Tnp_P1
  SITE 249: note = Tnp_P2
  SITE 257: note = Tnp_P3
  SITE 258: note = Tnp_P4
  SITE 270: note = Tnp_P5
MEITTIGIDLSKNVFQIHGVDHRGKTALKKQLKREQMLPYFANFPSCLIGIEACGSAHYWARKLTALGHTVKLIAPQFVKPYVKTNKNDAADAEAICEAVSRPNMRFVPIKNGEQQAILAQHRARQGFVKARTAQANQIRGLLAEYGIVIPKGIGHIGKRLPEILEDGENELPGIFRQLIDRLGSNLKELDRQVKELEAQIQTWHRNSVDSKKLAQIPGIGPISASALVASIGDAKNFKDGRQLAAWLGLVPRQHSTGGKPTLLGISKRGDCYLRTLLIHGARSVVRVVEQQANHANQWLAGLMRRRNKNVAAVALANKNARIIWALLTQNREYSAAYGLAV

SEQ ID NO: 16446 - protein, 292 aa, unidentified
  source 1..292: note = protein_70b6d8c
  REGION 1..98: note = RuvC_domain
  SITE 2: note = RuvC_P2
  SITE 37: note = RuvC_P3
  SITE 39: note = RuvC_P4
  SITE 42: note = RuvC_P5
  REGION 160..244: note = Tnp_domain
  SITE 168: note = Tnp_P1
  SITE 198: note = Tnp_P2
  SITE 206: note = Tnp_P3
  SITE 207: note = Tnp_P4
  SITE 219: note = Tnp_P5
MESCGSAHYWARQMMELGHKVRLIAPQYVRPFVKRQKNDAADAEAIVIAAQRPEMRFVEPKSELQQAKAVLFRARERLVHQRTELVNALRAVLYEYGHTIPQGMVHLKRIEALLDESNSDLPSLVREECRDLLAQIGEKTVRIEAKMKKIKEVAAETDATRRLQTMPGVGPITALAVEAFAPAMASIKRGRDFAAWLGLVPRQHSTGGKERLGRVSKAGQVDIRQLLIIGAMSRLTWLGRKAIPEGSWLARMLGRKPKMLVAIALANKMARAIWAMLTKKEDYRDPALATAA

SEQ ID NO: 16447 - protein, 339 aa, unidentified
  source 1..339: note = protein_0041c38
  REGION 6..148: note = RuvC_domain
  SITE 9: note = RuvC_P1
  SITE 52: note = RuvC_P2
  SITE 87: note = RuvC_P3
  SITE 89: note = RuvC_P4
  SITE 92: note = RuvC_P5
  REGION 211..304: note = Tnp_domain
  SITE 219: note = Tnp_P1
  SITE 249: note = Tnp_P2
  SITE 257: note = Tnp_P3
  SITE 258: note = Tnp_P4
  SITE 270: note = Tnp_P5
MQVTTVGLDLAKNIFQVHGVSENGEVAFNQALRRAQLFAFFEKLPPCLVGMEACGSSHYWARQLSKLGHDVRLIPAMYVKPYVKRGKSDAVDAAAICEAVTRPTMRFVSIKSEEQQGVLFLHRARDLIVRQRTQLSNMLRGLLGEFGIVIAQGIGSAIKFAKNVLDGDKPGIPEVAVDVLNNLSNQLVALHLRVRWYEMRMQLQAKQDPRVMLLRTIPGVGPVTASAIVATAGDASQFRNGREFAAWLGLTPLNRSSGGKEKLGRITKMGDRYIRRLLVTGMTSRLRQMKTHPERVDPWSRALLERKPIRLATVAMANKTARIIWAVLTKNEYYRPHTV

SEQ ID NO: 16448 - protein, 331 aa, unidentified
  source 1..331: note = protein_e6f4430
  REGION 8..154: note = RuvC_domain
  SITE 11: note = RuvC_P1
  SITE 59: note = RuvC_P2
  SITE 97: note = RuvC_P3
  SITE 99: note = RuvC_P4
  SITE 102: note = RuvC_P5
  REGION 203..289: note = Tnp_domain
  SITE 210: note = Tnp_P1
  SITE 240: note = Tnp_P2
  SITE 248: note = Tnp_P3
  SITE 249: note = Tnp_P4
  SITE 262: note = Tnp_P5
MKNYLNSVGVDISKSFFDAVLFLSGEHEKFTNEKKGFIHFEKWLKKHGSNSNNVLVCFENTGYFSTNLAIYLTEKHYDYVQEHPLQIKRSIGLRRGKSDKADATDIARYAWLNRENLRLSKAPSKTLLTLQQTKTARDLLVKQAVAIKNQLKGLEVVGDRQIYGIACKSLNRVLSTIKKQILKLEGEIREKINQDEELSAKFKLCRSVTGVGLILALEMIIHTQNFTGFSEWRKFAAYSGTVPYPYQSGTSIKGRARIHPSSNQRMKSLLTMAAIAAIRVDPELRQYYKRRVEEGKPKMSVINMIRNKMLARIFSTVQRGTPFVTMSKFAA

SEQ ID NO: 16449 - protein, 338 aa, unidentified
  source 1..338: note = protein_363212a
  REGION 7..149: note = RuvC_domain
  SITE 10: note = RuvC_P1
  SITE 53: note = RuvC_P2
  SITE 88: note = RuvC_P3
  SITE 90: note = RuvC_P4
  SITE 93: note = RuvC_P5
  REGION 211..296: note = Tnp_domain
  SITE 219: note = Tnp_P1
  SITE 249: note = Tnp_P2
  SITE 257: note = Tnp_P3
  SITE 258: note = Tnp_P4
  SITE 270: note = Tnp_P5
MSAIKVIGIDLGKSVFHLIGHDYSGHEVCRHKLTRVKLIQFISLQESTTIAMEACCGAHWLARKCQEYGHKVKLIPAQYVKPYVKSHKNDFIDADAIAEAATRPKMRFVSPKSEQAQISTVIRKIRTGYIRERTSCMNRVGSILLEFGISFPRGHANMKKLFQWLADKEAIVPPQLILELRDLLDYYNQLNEKVAAQDQKLIELNKENELYALLQTIPGIGPMTASCCLSSVGDPKDFANGRNFAAWIGLVPFQYTTGGKPRLLGISKRGNKELRELFVHAARAVMWRDASAERYFGSWLIDLKCRKPFNVAVVALANKLARIAWSVMNARKAFEVKA

SEQ ID NO: 16450 - protein, 394 aa, unidentified
  source 1..394: note = protein_a98f2e9
  REGION 4..162: note = RuvC_domain
  SITE 7: note = RuvC_P1
  SITE 60: note = RuvC_P2
  SITE 101: note = RuvC_P3
  SITE 103: note = RuvC_P4
  SITE 106: note = RuvC_P5
  REGION 267..354: note = Tnp_domain
  SITE 275: note = Tnp_P1
  SITE 305: note = Tnp_P2
  SITE 313: note = Tnp_P3
  SITE 314: note = Tnp_P4
  SITE 327: note = Tnp_P5
MLYLGIDIAKNNHVASLINENGKTFFKAFSFSNTSDGGEALLSKLNSFSHNVSDFVIGMEATGHYWLALYSFLYDNGFTIHVINPIQTDGWRKGTEIRKRKTDSIDSLLIADLIRYGSFVETSLSHEDIFSLRNLTRFRSYLVQSIADLKRKVISVLDQVFPEYQSIFSNVFGKTSKELLLQFSSLIDFEDISTDSLAELINKLSRKKLGDIKAELIKSKAENSFGITFSKDSFTFQLKALIQQMNFIESQVQDTENEINRLMSLIDSPVTTIPGIGNIIGATILGEIGDIDKFDSPRKLVAYAGIDAVVSSSGEFQATHTVMSKRGSPYLRKALFQAALVASFNDPVLNAYYLKKRGEGKHHLTCVGAVSRKLCNIIYAVLKNQSPYEVRLNE

SEQ ID NO: 16451 - protein, 397 aa, unidentified
  source 1..397: note = protein_f1586ee
  REGION 4..160: note = RuvC_domain
  SITE 7: note = RuvC_P1
  SITE 57: note = RuvC_P2
  SITE 97: note = RuvC_P3
  SITE 99: note = RuvC_P4
  SITE 102: note = RuvC_P5
  REGION 274..361: note = Tnp_domain
  SITE 282: note = Tnp_P1
  SITE 312: note = Tnp_P2
  SITE 320: note = Tnp_P3
  SITE 321: note = Tnp_P4
  SITE 334: note = Tnp_P5
MIAVGIDVSKSKSTVAILSSDGEILAKPFSIRHVESDIDNLITYLRSLQDDVKVVMEATGHYHLPILKKLHDSDLFVCVMNPYLMKKYGDNEIRRGKTDKKDAMRMAYYALEKSYALTRYSSLEQKYLDLKFLSRQYNQRVATKVVNRVHLGNLLDEAMPGIETILMSKTTNPENNMLYNFIVKYKNFDVIKSMGKKRFLNSYTKLAEKNGCRNYARKALQIYELAVDSIVTRGSDPYTELAIEQCLNILKQSEIAAKAIMVQMQNIACTLPEYPIVRSMNGVGDNLAPRLIAEIGDVRRFTSGKALNAYAGNDAPPFQSGQYESQNRHISKRGAPALRKACYEVMQCLKMHKPQDDSVYLFMIKKEQEGKPLNVAKMAAINKFLRIYYARVMEIYK

SEQ ID NO: 16452 - protein, 263 aa, unidentified
  source 1..263: note = protein_71bece9
  REGION 4..71: note = RuvC_domain
  SITE 11: note = RuvC_P3
  SITE 13: note = RuvC_P4
  SITE 16: note = RuvC_P5
  REGION 135..225: note = Tnp_domain
  SITE 143: note = Tnp_P1
  SITE 173: note = Tnp_P2
  SITE 181: note = Tnp_P3
  SITE 182: note = Tnp_P4
  SITE 194: note = Tnp_P5
MYVKPCVKRGKSDAVDAEAICKAVTRPTMRFVEIKSEDQQALLSLHRARDFVVRQRTQLINMLRSLAAEFGIAIARGVARAIDFAKGIIEGKQPGLPELARDVLRVLSRQLVDLHNRLGWYEITMRIQARLSRQAQLLQTIPGVGPVTASAVAATIGSGRQFRSGREFAAWLGLTPRNHSSGGKERLGKITKMGDRSLRQLIVVGMTSRVRQVANHPERADPWLTKLLQRKPARLATVAMANKTARIMWAVLTRDAPCKPHAA

SEQ ID NO: 16453 - protein, 342 aa, unidentified
  source 1..342: note = protein_bf39afd
  REGION 7..147: note = RuvC_domain
  SITE 10: note = RuvC_P1
  SITE 53: note = RuvC_P2
  SITE 88: note = RuvC_P3
  SITE 90: note = RuvC_P4
  SITE 93: note = RuvC_P5
  REGION 210..297: note = Tnp_domain
  SITE 218: note = Tnp_P1
  SITE 248: note = Tnp_P2
  SITE 256: note = Tnp_P3
  SITE 257: note = Tnp_P4
  SITE 269: note = Tnp_P5
MNTPVRIGMDTSKSAFQLHGVDEDEVVVVRRQFRRTEMIRYFEKLPPALVAIESCGSSHHWARLLQSFGHEVKLIPPQYVKAYVKRGKNDAADAEALCEAVTRPSMRFVPVKSKERQAACMLMTVRERLVSVKSQLSNAFRSYAAEFGIIGAAGRQNVNALIERVLEDDTLPEMARDLFRFQAKEYAAVEARLEEIEAKLMKWHREDDLSRRIATIPGVGPIGSTMLSMKAPPPETFRSGRDFAAWIGLTPRNHSTGGRQRLGGITKAGDSALRSVLIVGATALLRHVRKGRHKPTAWLAALLERKPPKLVAVALANKFARIAWRLMVSGGVYNRPMVAMPG

SEQ ID NO: 16454 - protein, 305 aa, unidentified
  source 1..305: note = protein_f5a739b
  REGION 5..152: note = RuvC_domain
  SITE 8: note = RuvC_P1
  SITE 52: note = RuvC_P2
  SITE 92: note = RuvC_P3
  SITE 94: note = RuvC_P4
  SITE 97: note = RuvC_P5
  REGION 186..270: note = Tnp_domain
  SITE 194: note = Tnp_P1
  SITE 223: note = Tnp_P2
  SITE 231: note = Tnp_P3
  SITE 232: note = Tnp_P4
  SITE 243: note = Tnp_P5
MISWVGIDISKTNLVVWVQPQNEGFDVSNTSQGFVELIEHLSCYEVCRVLLEATGGYERRVMAALQDANFNVLRINPRRARAFAVAMGKNAKTDPIDAAVLADFAEVLHASRDKVISPEREALRELVQLREHFVQQRDDNKRRLQQAQLPTAITAIKEHIRYLQTQIKQLEKAINQSMRDLDAEKAERLISVKGIGTVATASLLVYLPELGELDRREIAALAGIAPYNDDSGNHSGKRQIFGGRARVRRALYMSCWVVIRHQADFKARYEALRERGKSAKVALIACMRILLIRLNAMLRDGTEWR

SEQ ID NO: 16455 - protein, 345 aa, unidentified
  source 1..345: note = protein_d9a061e
  REGION 5..152: note = RuvC_domain
  SITE 8: note = RuvC_P1
  SITE 55: note = RuvC_P2
  SITE 92: note = RuvC_P3
  SITE 94: note = RuvC_P4
  SITE 97: note = RuvC_P5
  REGION 212..300: note = Tnp_domain
  SITE 220: note = Tnp_P1
  SITE 250: note = Tnp_P2
  SITE 258: note = Tnp_P3
  SITE 259: note = Tnp_P4
  SITE 271: note = Tnp_P5
MKHFVGLDVSVKETAICIVDELGKICREVKVHSHPEDLLVIMKDPGWKIERVGLEAGPLSQWLFEGLARAGLPVICIETRHVKAFLKAQPNKTDRNDARGIAQMMRVNLYRPVHVKTLTSQKRRALLTARKLLQGKAIAIENDIRGLLRNFGLKVGVVGTVKFEVRIRELIEGMPDLEEFMEPLLAARNKLRAEFARLHKKVLTLAEEDAICKRLMTIPGVGAVTALAYTATIDISQRFKSSKAVGPILGLTPKLNESGESRRVGRISLCGDSMMRTLLYEAAQTLLTRVTKWSWLKAWAMNVAKRRGMRKAIVALARRLAVILHRMWLDGTGFRWTREATAPTI

SEQ ID NO: 16456 - protein, 305 aa, unidentified
  source 1..305: note = protein_107f99a
  REGION 1..72: note = RuvC_domain
  SITE 10: note = RuvC_P3
  SITE 12: note = RuvC_P4
  SITE 15: note = RuvC_P5
  REGION 178..264: note = Tnp_domain
  SITE 186: note = Tnp_P1
  SITE 216: note = Tnp_P2
  SITE 224: note = Tnp_P3
  SITE 225: note = Tnp_P4
  SITE 237: note = Tnp_P5
MAGAYRGEAKTDGRDAFVIAETSRLRRDFVVVDVPAQLVADLALLVAHRTDLVADRVRMINRLRDVLTGIFPALERAFDWSNHKGALTLLTHCQTPAGIRRIGRSRLESWLRRRGVRGAEQVAVKALEVAQAQSSMLPGENIAAGIVADLATQLLALDERIKRLERQIRDTFHAHPQAHIIESMPGIGPILGAELVVAAGDLSAYADAGRLASAAGLVPVPRDSGRRTGNLHRPKRYSRRLRRVFYMSAQTSIIQDGPNRDFYRKKRAEGCGHVQALIALERRRVNVLWALLRDGREFTPAQPTA

SEQ ID NO: 16457 - protein, 404 aa, unidentified
  source 1..404: note = protein_e150f8e
  REGION 4..160: note = RuvC_domain
  SITE 7: note = RuvC_P1
  SITE 57: note = RuvC_P2
  SITE 97: note = RuvC_P3
  SITE 99: note = RuvC_P4
  SITE 102: note = RuvC_P5
  REGION 270..356: note = Tnp_domain
  SITE 278: note = Tnp_P1
  SITE 309: note = Tnp_P2
  SITE 317: note = Tnp_P3
  SITE 318: note = Tnp_P4
MLFVGIDWAEDHHDICILDESGDVLRRRRIEDGLSGLETLQALLAEFAADPTQVIVGIETDRGLLVRGLLASDYEVYAINPKAVSRYRDRHAVSGAKSDAGDAKLLADLVRTDRHNHRPIQGDSELTDAVKVLARAHRSLIWTRQRQANQLRHLLREFYPGAIAAFGSDLTSTDALALLMAAPTPIRGRTLSQAQIGSALRRAGRQRQIEARAAQIQAALRQPQLQASARVADAYGATVAATVPILLELNAQIAHLEQELKKAFEEHPDAEIYQSLPGLGIVLGGRVLAEFGDDRTRFQHAKARKNYAGTAPITKASGKSQIVLARVARNRHLADACYLWAFSSITRSPGARRYYTALRQRGKTHPQALRSLANRLVGIVHGCLAHRQRFNEAVAWPSAATLAA

SEQ ID NO: 16458 - protein, 406 aa, unidentified
  source 1..406: note = protein_8a54a62
  REGION 15..169: note = RuvC_domain
  SITE 18: note = RuvC_P1
  SITE 66: note = RuvC_P2
  SITE 106: note = RuvC_P3
  SITE 108: note = RuvC_P4
  SITE 111: note = RuvC_P5
  REGION 276..360: note = Tnp_domain
  SITE 284: note = Tnp_P1
  SITE 313: note = Tnp_P2
  SITE 321: note = Tnp_P3
  SITE 322: note = Tnp_P4
  SITE 334: note = Tnp_P5
METSIIGHDSVDVFIGVDVGKGEHHAVAIDCAGERLFDKALPNDEGKLRALIDGLKGHGTLLFVVDQPATIGALPIAVAQAAGVLVGYLPGLAMRRIADLHAGEAKTDARDAAIIAEAARSLPHALRSIQLADEQVAELSMLCGFDDDLTGQVTATSNRIRGLLTQIHPALERVLGPHLDHPAVVDLLQRHPAPADLAKMGPARLASRLVKLAPRMGKPLAAEIMQALSEQTVVVVGTNAASLVLPRLAKQLEDLRTQRAEIAVEVERLVDAHPLQPVLTSMPGVGDRTAARLLTEVAGKSFASAGHLASYAGLAPVTRRSGSSIRGEHASRRGNKILQRALFLSAFAALRDPVSRSYYDRKRAQGKRHNQALIALARRRCDVLYAMLRDGTIYQPPLALAACQEP

SEQ ID NO: 16459 - protein, 319 aa, unidentified
  source 1..319: note = protein_55d484a
  REGION 3..147: note = RuvC_domain
  SITE 6: note = RuvC_P1
  SITE 50: note = RuvC_P2
  SITE 90: note = RuvC_P3
  SITE 92: note = RuvC_P4
  SITE 95: note = RuvC_P5
  REGION 189..273: note = Tnp_domain
  SITE 197: note = Tnp_P1
  SITE 226: note = Tnp_P2
  SITE 234: note = Tnp_P3
  SITE 235: note = Tnp_P4
  SITE 246: note = Tnp_P5
MFVGIDVAKAELVVSILPAAERFTVANDERGVHTLVERLRGIAPTLIVLEATGGYELLGVAALAAATLPVVVVNPRQVRDFAKATGQLAKTDRIDADILARFADVVRPAVRPIADDAAHELEALLTRRRQLLEMLQAERNRTGQVFGRGKRAVKKSLKNHISYLERELRMTDTDLGDMIKASPVWRERDALLQSVPGVGPVLSRTLLADLPELGQLSRRAIAKLVGVAPLSRDSGTLRGRRFVQGGRATVRAVLYMAALVATKRNAVIRAFYQRLVASGKPKKLALVACMRKLLTILNVMVRTAQPWAADPTAVTHTAA

SEQ ID NO: 16460 - protein, 341 aa, unidentified
  source 1..341: note = protein_07b6051
  REGION 7..149: note = RuvC_domain
  SITE 10: note = RuvC_P1
  SITE 53: note = RuvC_P2
  SITE 88: note = RuvC_P3
  SITE 90: note = RuvC_P4
  SITE 93: note = RuvC_P5
  REGION 209..293: note = Tnp_domain
  SITE 217: note = Tnp_P1
  SITE 247: note = Tnp_P2
  SITE 255: note = Tnp_P3
  SITE 256: note = Tnp_P4
  SITE 268: note = Tnp_P5
MDTVSLVGIDLGKHCFHLHAQDASGRMVFRKKLTRSQMFALLGNFPSCTVVMEACAGAHWIARRLQALGHEAKLISPHFVKPFRQGNKNDFADAQAICEAASRPSMRFVSPRNEAQQVVSALHRVREALVRERTGTINQIHAFLLEFGISLPRGMAVIRRLPAVLETQALPPRLVAVLERLQAHFKYLDEQIGQLEHELLTQLHEDERSERLLEIPGIGPITASVLMSELGDAHQYGSARQFAASIGLVPRQYSTGGKPTLLGISKRGDKGLRRLLVQCARVIMLGIERRTDSLGVWVRSLLARRHSNVVACALANKLARIAWAILAKGTHYRSAPTALPA

SEQ ID NO: 16461 - protein, 388 aa, unidentified
  source 1..388: note = protein_dd6282e
  REGION 4..160: note = RuvC_domain
  SITE 7: note = RuvC_P1
  SITE 58: note = RuvC_P2
  SITE 98: note = RuvC_P3
  SITE 100: note = RuvC_P4
  SITE 103: note = RuvC_P5
  REGION 264..351: note = Tnp_domain
  SITE 272: note = Tnp_P1
  SITE 302: note = Tnp_P2
  SITE 310: note = Tnp_P3
  SITE 311: note = Tnp_P4
  SITE 324: note = Tnp_P5
MIYLGIDIAKLNHFAAAVSSQGEILIEPFKFTNDYDGFYLLLSKLVPLDQDSIIIGLESTAHYGDILVRFLISKDFKVCVLNPIKTSAMRKNNVRKTKTDKVDTFVIAKTLMMQDSLRFLTLKDLDYIELKELGRFRQKTVKQRTRLKIQLTSYMDQVFPELQYFFKSGVHQNSVYALLKEAPTPNAIASMHMTHLAHILECASHGHFKKDTARDLRVLAQKSVGINDSALSIQITQTIEQIELLDSQLFHTELEMANLVTCLHSVIMTIPGIGTTNGGMILGEIGDIHLFSTPGKLLAFAGLDPSVYQSGNLQAKKTRMSKRGSRVLRYALVNAAHNVVMNNATFKAYYDAKRAEGRTHYNALGHCAGKLVRVIWKMLTDEVEFNLE

SEQ ID NO: 16462 - protein, 341 aa, unidentified
  source 1..341: note = protein_d9bc340
  REGION 7..148: note = RuvC_domain
  SITE 10: note = RuvC_P1
  SITE 53: note = RuvC_P2
  SITE 88: note = RuvC_P3
  SITE 90: note = RuvC_P4
  SITE 93: note = RuvC_P5
  REGION 209..295: note = Tnp_domain
  SITE 217: note = Tnp_P1
  SITE 247: note = Tnp_P2
  SITE 255: note = Tnp_P3
  SITE 256: note = Tnp_P4
  SITE 268: note = Tnp_P5
MQRATLVGIDLGKHAFHLHGQDQHGNAVFRKKVSRKQLVEFFATLQACTVVMEACAGAHHMARTLASFRHHVRLISPQFVRPFVKSNKNDFVDAEAICEAASRPSMRFVSPKTESQQTLSALHRVRDSLVRDRVKAVNQVHGFLLEFGVSLPVGKTVMTRLPAALAEHALPPRLVAILERLHEHYKYLSDQIDELEKEMYRQLADDELGQRLLSIPCVGPITASVLAAEMGDGKQYGSSRDFAASIGLVPRQYSTGGKANLLGISKRGDKNIRRLLVQCARVYMQRLDRQVGRLADWVRSMLTRRHSNVVACALANKLARTAWALATHNATFDAGAIVMSA

SEQ ID NO: 16463 - protein, 407 aa, unidentified
  source 1..407: note = protein_2e963d2
  REGION 4..162: note = RuvC_domain
  SITE 7: note = RuvC_P1
  SITE 59: note = RuvC_P2
  SITE 99: note = RuvC_P3
  SITE 101: note = RuvC_P4
  SITE 104: note = RuvC_P5
  REGION 272..358: note = Tnp_domain
  SITE 280: note = Tnp_P1
  SITE 311: note = Tnp_P2
  SITE 319: note = Tnp_P3
  SITE 320: note = Tnp_P4
MLLIGDDWAEDHHDVELQDETGRRLAAANLPEGVAGIARLHELIARHGGELDPGDVVVGIETDRGSWVQALIASGYQVYAINPRQVARFKERYASSGAKSDKGDAHALADMVRIDRDRLRPVAGDSDQAQAVKVVARAHQTLIWERTRTFQRLRSTLREYFPAALTAYADLTLTGTDALELLIKAPTPATGAKLTRTQVTTVLARHRRRNREAKAATVQAALHERQPALPEQVTTAYAAAATAHARLIIALNEQIAAMEEQVKAHFLKHPDAEIYLSMPGIAEITGARVLAEFGDDPTRYASAKARKNYAGTSPVTRASGKSHTVQARYVRNNRLADALQTQAFCALRASPGARRYYDKQRAREAGYNPALRQLGNRLVGILHGCLKTRTTYDEATAWSHHAYPQPA

SEQ ID NO: 16464 - protein, 399 aa, unidentified
  source 1..399: note = protein_22d5403
  REGION 12..166: note = RuvC_domain
  SITE 15: note = RuvC_P1
  SITE 63: note = RuvC_P2
  SITE 103: note = RuvC_P3
  SITE 105: note = RuvC_P4
  SITE 108: note = RuvC_P5
  REGION 273..357: note = Tnp_domain
  SITE 281: note = Tnp_P1
  SITE 310: note = Tnp_P2
  SITE 318: note = Tnp_P3
  SITE 319: note = Tnp_P4
  SITE 331: note = Tnp_P5
MIKNHEDVDIFIGVDVGKSNHHAVAIDRTGKKILDRALPQDEAKLRAIIKAVAGKGTVLLVVDQPSTIGALPVAVAQAEGILVGYIPGLAMRRIADLHPGEAKTDARDAAIIAEAARSLPHTLRSIVVADEQAAELSMLCGFDDDLAKQATATSNRIRGLLTQIHPALERVVGKHLDHPAMAELLIKYPSPDKLRKAGQNRVTALLLKYAPRAGKRWATEIFTALDEQTVVVAGTGAASIVLPQLAAMLKQLRTARDELLVQVETLVEDHPLHAVLTSMPAVGVRTEARIITEVAGKEFQTSGHLASYAGLAPVTWRSGTSIRGDHPSKKGNKSLKRAFFLSAFAALKDPLSRAYYDRKRAEGKRHNQALIALARRRCDVLFAMLRDGTFYEAPTPKTA

SEQ ID NO: 16465 - protein, 407 aa, unidentified
  source 1..407: note = protein_1d7ea49
  REGION 6..159: note = RuvC_domain
  SITE 9: note = RuvC_P1
  SITE 57: note = RuvC_P2
  SITE 98: note = RuvC_P3
  SITE 100: note = RuvC_P4
  SITE 103: note = RuvC_P5
  REGION 221..306: note = Tnp_domain
  SITE 229: note = Tnp_P1
  SITE 259: note = Tnp_P2
  SITE 267: note = Tnp_P3
  SITE 268: note = Tnp_P4
  SITE 279: note = Tnp_P5
MAKVIIGVDPHKLSATIEVVDSHEKLLGSGRFSTDQPGYTAMRAYAKTWPERIWAIEGSNGAGRPLAQRLLEAGEHVVDVPAKLAARVRLFDTGHNRKTDALDAHSIAIVAVRTKTLRVLRPDGELEALRMLCDRREELTRLRVQTVNRLHRLLAELVPGKAKKDLTALQAKAILATVRPRDIAGKTRRKIAAEELADLLTVEAKMKKATAELKVLVKARDSRLMDLHGVGPVVAARTLADVGDIARFADRNRFASWTGTAPLDASSGEQNRHRLSRAGNRRMNHMIHIAAVSQIRLDTEGRAYYRRKQAAGKTKLEALRCLKRRISDALYRQLLADAEQAQLLCAAEPVDTGPGGHCGASQESSAVDLPPHIDTSDQPLPGPATQTLQPAGPTGKTSQPRTPQTTG

SEQ ID NO: 16466 - protein, 352 aa, unidentified
  source 1..352: note = protein_de018ba
  REGION 6..162: note = RuvC_domain
  SITE 9: note = RuvC_P1
  SITE 60: note = RuvC_P2
  SITE 100: note = RuvC_P3
  SITE 102: note = RuvC_P4
  SITE 105: note = RuvC_P5
  REGION 267..352: note = Tnp_domain
  SITE 275: note = Tnp_P1
  SITE 306: note = Tnp_P2
  SITE 314: note = Tnp_P3
  SITE 315: note = Tnp_P4
  SITE 327: note = Tnp_P5
MSRIWAGIDSGKGHHHGLALDEDGKTLLSRRVANDEPELLKLIGDVLDLADGRQVTWAIDMTGGEPALLLTLLVGHGQEVLYMPGRLVNRASDGYRGEGKTDARDAYVIADQARMRRDLRPIRPSDEAAIELKLLTGRRADLVEDRTRAVNRLRGTLLSMFPALERALDMTNTGPLRPLTGYQTPAAIRRAGTARLTKWLANRKVRSARALAEAAVEAAERQHTAVPGEKTIAKLVHTLAEEVMALNEQISEMDKLIEGRFREHELADIVLSVPGIGTVLGAEFLAAVGGSLDEFDSPDALAAFAGVAPAPRDSGNVSGNLHRPLVYHRRLQRVFYTSALVSIRYDPNSRKF

SEQ ID NO: 16467 - protein, 349 aa, unidentified
  source 1..349: note = protein_cdc3af6
  REGION 12..153: note = RuvC_domain
  SITE 15: note = RuvC_P1
  SITE 58: note = RuvC_P2
  SITE 93: note = RuvC_P3
  SITE 95: note = RuvC_P4
  SITE 98: note = RuvC_P5
  REGION 217..302: note = Tnp_domain
  SITE 225: note = Tnp_P1
  SITE 255: note = Tnp_P2
  SITE 263: note = Tnp_P3
  SITE 264: note = Tnp_P4
  SITE 276: note = Tnp_P5
MASKLDSEIAVIGIDIGKNSFHIVGLDRRGAIVLRQKWSRGQVETRLANLPPCLIGMEACVGAHHLSRKLISLGHDARLMPAKYVRPYSRGQKNDFRDAEAIAEAVQRPTMKFVATKTAEQLDLQALHRVRERLVSQRTGIINQIRAFLLERGIAVRQGLRFLRAELPRILATPRDVLSPRMVHVIEDLAGDWRRLDERIEGLSSEIEALARRDVSCERLMSVPGIGPIISSAMVAAIGAGDAFSKGRDFAAWLGLVPKQISTGDRTILGKISKRGNRYLRVLFVQAAWVVLIKPKSWDRHGLKPWLEAAKKRLHHNVLAIVLANKLARIAWSVLAHGRAFEAIRIQAS

SEQ ID NO: 16468 - protein, 416 aa, unidentified
  source 1..416: note = protein_66676b2
  REGION 12..167: note = RuvC_domain
  SITE 15: note = RuvC_P1
  SITE 64: note = RuvC_P2
  SITE 104: note = RuvC_P3
  SITE 106: note = RuvC_P4
  SITE 109: note = RuvC_P5
  REGION 275..361: note = Tnp_domain
  SITE 283: note = Tnp_P1
  SITE 314: note = Tnp_P2
  SITE 322: note = Tnp_P3
  SITE 323: note = Tnp_P4
MPFALPDALFFTGIDWAAETHAVCVLDAGGKIAAAFTIEHSADGIAALIRRLARYGEAGGMPVAIERPDGRLVDLLLEAGHPVVPVKPNAIKAWRDGEVLSGAKSDAGDAAVIAEYLRLRAHKLAIAAPYSDQTRALRAVVRARGDLVELRVAATNQLSALLDAHWPGARAIFADVESPVSLEFLTRYPTPAAAAHLGEKRMAAFCIKHGYSGRRSPAELLARLRAAPAGTGLESLTEALRDAVLAAVSVLQALNAAVKNLDRSAAAHLREHPDGKIFTSLPRSGQINAAQVLAEWGDCREAYAAPDSVAALAGVTPVTTQSGKHRSVHFRWACNMRFRAAITTFADNSRHASPWAAQIYASAIAGGKDHPHAIRILARAWIRVIYRCWLDGIPYDPARHAAAAALAEHPAKQIAA

SEQ ID NO: 16469 - protein, 342 aa, unidentified
  source 1..342: note = protein_57d93df
  REGION 7..148: note = RuvC_domain
  SITE 10: note = RuvC_P1
  SITE 53: note = RuvC_P2
  SITE 88: note = RuvC_P3
  SITE 90: note = RuvC_P4
  SITE 93: note = RuvC_P5
  REGION 211..296: note = Tnp_domain
  SITE 219: note = Tnp_P1
  SITE 249: note = Tnp_P2
  SITE 257: note = Tnp_P3
  SITE 258: note = Tnp_P4
  SITE 270: note = Tnp_P5
MEKVTIIGVDLAKNVFQLHGAAADGSVVFRKKLSRLQFCKFMASQPACVVAMEACGSSHYWARQMARLGHEPRLIAPAYVKPFVKRQKNDVADAEAIVEAAQRPTMRFVEPKTKEQQSRAIVFRTREQFVNQRTELVNALRAHLYEFGYVAPQGIGHLPRLAEIVEDESADLPDLVRDICSALLDQIDQLSSRLAALKKTIDTLSKQAATSRRLQTMPGVGPIAALAIETFAPPMEAFKCGRDFAAWLGLVPRQKSSGGKQRLGKVSKMGQRDIRRLLIIGAMAVVRWASRRRAPDGSWLARLMLKKPRMLVAIALANKMARGIWAMLTKQEDYRDPATVLA

SEQ ID NO: 16470 - protein, 413 aa, unidentified
  source 1..413: note = protein_07700a6
  REGION 26..179: note = RuvC_domain
  SITE 29: note = RuvC_P1
  SITE 78: note = RuvC_P2
  SITE 118: note = RuvC_P3
  SITE 120: note = RuvC_P4
  SITE 123: note = RuvC_P5
  REGION 283..370: note = Tnp_domain
  SITE 291: note = Tnp_P1
  SITE 321: note = Tnp_P2
  SITE 329: note = Tnp_P3
  SITE 330: note = Tnp_P4
  SITE 343: note = Tnp_P5
MDKREQGHRARGLPAVPSERAGMRFVGIDIGAERHVVAWVDEQGTILQRPTAFREDREGYQQLLTQLGSRAETLIVMEATGHYWQNLFATLAAEGFAIALINPLRTRRFAEEDLVRTKTDAIDALGLARFGQQKRPPATELPDLATRDLRELVRLRVRFLQDFGDRTRQLHRAVDLSFPEFTRFVVELDSPRATAVLHAFPTAAAVRAASERQLAAVRGGQRTVGRELARALKAAAGTSVGQHHTEVYARQVRFFCEDLDLLRRRLAEIERDIEQLLTKHHVGRLLTTIDGIGPQTAARLVAELGDPAKFRSAGALTAYVGAIPGLRHSGKQNWDRAGLARCGHAKLRAALWMPTLVAVRCNPWLRAYYERLRARGKLPQVALMAAMRKLLVAIYAVAKHRRPFVPLVTMRAP

SEQ ID NO: 16471 - protein, 338 aa, unidentified
  source 1..338: note = protein_c85ae1e
  REGION 7..149: note = RuvC_domain
  SITE 10: note = RuvC_P1
  SITE 53: note = RuvC_P2
  SITE 88: note = RuvC_P3
  SITE 90: note = RuvC_P4
  SITE 93: note = RuvC_P5
  REGION 212..299: note = Tnp_domain
  SITE 220: note = Tnp_P1
  SITE 250: note = Tnp_P2
  SITE 258: note = Tnp_P3
  SITE 259: note = Tnp_P4
  SITE 271: note = Tnp_P5
MSKITTIGLDLAKNVFHAVCCDARGKVIRKKMLKRSQVLTYFANLPQFLIGMEACASAHHWARKLSALGHQVKLIPPQYVKPYLRGNKNDYNDAQAIAEAIKHPEMRFVSVKTTDEQDIQALYRLRERRLQERTALCNQLRGLLAEYGLILPRGTHVLRRHLPELLADGENGLNPLFRRLLAQSYRQLQELDEHIEFYTQEMKRHSQQNEACQRLQTIPGFGEIIAGVFYSAVGQGDAYRRGRDVSASLGLVPKQHSSGGKEHLLGISKRGDRYLRSLLVHGARSVVSRSANKTDRLSRWINKIRAARGFNKAVVALANKMARIGWAVLSNNTVYQPA

SEQ ID NO: 16472 - protein, 391 aa, unidentified
  source 1..391: note = protein_7d846d9
  REGION 4..163: note = RuvC_domain
  SITE 7: note = RuvC_P1
  SITE 60: note = RuvC_P2
  SITE 101: note = RuvC_P3
  SITE 103: note = RuvC_P4
  SITE 106: note = RuvC_P5
  REGION 266..353: note = Tnp_domain
  SITE 274: note = Tnp_P1
  SITE 304: note = Tnp_P2
  SITE 312: note = Tnp_P3
  SITE 313: note = Tnp_P4
  SITE 326: note = Tnp_P5
MIYVGIDVAKDKHDCFIINSDGKVLFKAFTISNNLDGFDELYQKILSVTDNFSNVKVGLEATGHYSYNLLGFLIDKGFPTYIINPLHTNLYRKSLSLRQTKTDKVDAHTIASMMMSDVNLKSYTDISYHNEELKSLTRYRFDKVKERAKLKQSVSRLVCILFPELEKLVPTLHMASVYAMLSEFPGAKQISNAHLTRLSNLLSQASKGRYGKETAIAFREAARSSIGSNMPAKSLELKHTIKLIQELNLEIDEIETEIKRIMDEINSPILSIPGINYRMGAMIIAEIGDFSRFNSPDKILAYSGLSPSTYQSGKLESSHSHMEKRGSRYLRYALFNATKLVCKWDPTFAQYLAKKRSEGKHYNVAISHAARKLVRVIYQLEKSGQRYIKAS

SEQ ID NO: 16473 - protein, 403 aa, unidentified
  source 1..403: note = protein_ced61ee
  REGION 4..160: note = RuvC_domain
  SITE 7: note = RuvC_P1
  SITE 57: note = RuvC_P2
  SITE 97: note = RuvC_P3
  SITE 99: note = RuvC_P4
  SITE 102: note = RuvC_P5
  REGION 274..360: note = Tnp_domain
  SITE 282: note = Tnp_P1
  SITE 312: note = Tnp_P2
  SITE 320: note = Tnp_P3
  SITE 321: note = Tnp_P4
  SITE 334: note = Tnp_P5
MNSVGIDISKGRSTIAVMRPFGEVVISPFEVRHTDSELSKLARRLKSLNGETRVVMEATGNYHAPVAKLLHDAGLYVSVVNAKLVHGYGNNDLRRVKTDRKDAVKLANYGLDRWLTLPRYIPEENTRLLLKNCYRQYRQYSKVQTILKNNLISLLDTVFPNVNRLFSSPARADGSEKWVDFVAEFWHCRCVSEKSEKVFTNKYQRWCRKHGYNFSEEKAHTIYVEASGHIGVMPKSETTKLLVEQAVAQLRATSAALAALKHEMQSLASMLPEYPVVMDMFGVGPTLGPQLIAEIGDVRRFYSKKALVAYAGLDAPPNDSGDVTGRHKSMSKVGASSLRRTLFLVMGVYLQKSPLDEPVYLFMDRKRAEGKPYRVYMMASANKFLRIYYATVKAYLESLELTA

SEQ ID NO: 16474 - protein, 280 aa, unidentified
  source 1..280: note = protein_113f5a2
  REGION 2..104: note = RuvC_domain
  SITE 42: note = RuvC_P2
  SITE 77: note = RuvC_P3
  SITE 79: note = RuvC_P4
  SITE 82: note = RuvC_P5
  REGION 153..242: note = Tnp_domain
  SITE 161: note = Tnp_P1
  SITE 191: note = Tnp_P2
  SITE 199: note = Tnp_P3
  SITE 200: note = Tnp_P4
  SITE 213: note = Tnp_P5
MSYSTTVGVVSGRGKELSNRSLTRKKFAEFLGKQKPSLVAFESCATAHYWARAAKRHGHEARITPAKAVAPFRQGHKTDSNDALAVAEAARRPKIKEAPMKTVPEILEDGENELPDLYRPTLHRMYNRLLELREDIGAMTKEVERLAKAHPICNKLMALEGVGPISALLLYATMGSGAAFSGSREFAAYLGLAPKQYSSGGKTNIVGLSKKIGNSQLRSVLILGARAYVYKLKEPKSSKDKWLQANVERNGESRATVALANKNVRTAWAMVTQGTEYQRR

SEQ ID NO: 16475 - protein, 272 aa, unidentified
  source 1..272: note = protein_98567d5
  REGION 3..111: note = RuvC_domain
  SITE 16: note = RuvC_P2
  SITE 56: note = RuvC_P3
  SITE 58: note = RuvC_P4
  SITE 61: note = RuvC_P5
  REGION 156..242: note = Tnp_domain
  SITE 163: note = Tnp_P1
  SITE 193: note = Tnp_P2
  SITE 201: note = Tnp_P3
  SITE 202: note = Tnp_P4
  SITE 215: note = Tnp_P5
MFLEYLNVSESTCVMEASGPYYLKLATFLSDQAIDVCVINPLIIRRFSQMRMSRAKTDKKDAMLIAEYGKTEKPDLWQPEAAYVLELKQMQAYLEQLNKNRTGFTVQKEAFDQNPIKSEVLEKSLNSVIETIDQEIKQIEKRMELIIKTHHQEMFNQLKSIPGMGSKTSLLLIVISGGFSKFNNHKQLASYVEISPRIFESGTSVKGKSKICKMGMSKIRALLYMCAWSAKRCNETCKALYDRLVEKGKSKKLALIAVVNKLLKQAFAIATK

SEQ ID NO: 16476 - protein, 313 aa, unidentified
  source 1..313: note = protein_a620c7f
  REGION 7..152: note = RuvC_domain
  SITE 10: note = RuvC_P1
  SITE 51: note = RuvC_P2
  SITE 91: note = RuvC_P3
  SITE 93: note = RuvC_P4
  SITE 96: note = RuvC_P5
  REGION 186..270: note = Tnp_domain
  SITE 194: note = Tnp_P1
  SITE 223: note = Tnp_P2
  SITE 231: note = Tnp_P3
  SITE 232: note = Tnp_P4
  SITE 244: note = Tnp_P5
MMATHRIGVDVGKAELWISIDGETAQPCPNELPAIRRWVRGLEGPADFALEATNDYHLALALEAHHQGHRVYLINGYRLNRYRESIGGRAKTDAGDARLLVRYLQREQDELRPWTPPPEGYRTLQKLLRRRATLVRARVMLEQSLRGVPELQSNLKDLLREIGRLDAVLQRVLRETVGSAGWSDHARRCQQIEGVGPLTATGLTMAFHRGAFRSGDAFVAFLGLDVRIRDSGTKRGQRKLTKQGDPELRRLLYLAAMQAKSKAAWSDYYQRCLDRGLATTQALNALARKLARVAFALMKNQTDYQPKIPCGET

SEQ ID NO: 16477 - protein, 316 aa, unidentified
  source 1..316: note = protein_0243c78
  REGION 5..152: note = RuvC_domain
  SITE 8: note = RuvC_P1
  SITE 52: note = RuvC_P2
  SITE 92: note = RuvC_P3
  SITE 94: note = RuvC_P4
  SITE 97: note = RuvC_P5
  REGION 188..274: note = Tnp_domain
  SITE 196: note = Tnp_P1
  SITE 226: note = Tnp_P2
  SITE 234: note = Tnp_P3
  SITE 235: note = Tnp_P4
  SITE 247: note = Tnp_P5
MATYIGIDISKDTFDAATSEQKQSIIFKNTVAGYKKFKTWVSKFNEPHVCMEATGKYYLGLATSLYQQGVSVSVVNPLRIKRYAQSGLNRVKTDSEDAKVIAQFCKTEKLVLWAPDKPVIQELQEWYKLKELLTRQQTQFKNQLKSGLNSRVRKVQEKQIQQIEKSIQTVIAKIKECIQSDKELCQSVKLLESITSIGEKTAMDLITFIKDIKRFDKAKNLASFAGLTPQIIQSGTSVNSSRLSKMGNANLRKCLYMPAINAMAYNVPLKRFADGLRAKGVASGKIKVAVMRKLIHIVFAVLNSGKPFDPEYKMCV

SEQ ID NO: 16478 - protein, 338 aa, unidentified
  source 1..338: note = protein_f8b5c34
  REGION 6..152: note = RuvC_domain
  SITE 9: note = RuvC_P1
  SITE 53: note = RuvC_P2
  SITE 91: note = RuvC_P3
  SITE 93: note = RuvC_P4
  SITE 96: note = RuvC_P5
  REGION 211..298: note = Tnp_domain
  SITE 219: note = Tnp_P1
  SITE 249: note = Tnp_P2
  SITE 257: note = Tnp_P3
  SITE 258: note = Tnp_P4
  SITE 270: note = Tnp_P5
MTILTVGIDLAKNVFAVHGINEAGKPELVKPNVARDKLGELIAALPPCVIGMEACSGAHHWARQFEALGHTVRLIAPKFVTPYRMSGKRGKNDAADAAAICEAVQRPHMRFVPAKSLEQQSRLMVHRARQGFVEQRTATLNRIRGLLSEFGIVLPLKAATVRRKACECLEDLPGYANTVIGDLLSEVTRLDERVAQYDQHIKAMARDDERAKRLMQLSGVGETTATCLLAMIGNGHDFDCGRQFAAWLGLAPGQYSSGGKTRLGRITKAGDAYLRSLLVLGARALLAAAKNKTDSVSKWAVALAERRGYWKAVVAIAAKNARMAWAVLRKGEAFAMPA

SEQ ID NO: 16479 - protein, 341 aa, unidentified
  source 1..341: note = protein_8162e68
  REGION 7..149: note = RuvC_domain
  SITE 10: note = RuvC_P1
  SITE 53: note = RuvC_P2
  SITE 88: note = RuvC_P3
  SITE 90: note = RuvC_P4
  SITE 93: note = RuvC_P5
  REGION 209..295: note = Tnp_domain
  SITE 217: note = Tnp_P1
  SITE 247: note = Tnp_P2
  SITE 255: note = Tnp_P3
  SITE 256: note = Tnp_P4
  SITE 268: note = Tnp_P5
MSELALVGIDLGKNTFHLHGQDKPGRELFHKKLSRQQMMKFFCNLPACTVVMEACAGSHFVARELMAMGHKAKLISPQFVRPFVKSNKNDFVDAEAICEAAARPTMRFVTPKTEVQQLLSMMHRMRESLVHDRTKVVNQMHGFLLEFGISLPKGPTMMKRLASILSEHELPIRLTVLLQRLHKHFSYLDEQIKEMDKELIGQLADDDLGSRLLSIPCVGPITASLLAAEMGDGKQYGCSRDFAASVGLVPRQHSTGGKATLLGISKRGDKNLRRLLVQCARVYMLRLKYQHGALADWVRSMLCRRHSNVVACALANKLARIAWAIAAHHTQFESGPEALAA

SEQ ID NO: 16480 - protein, 294 aa, unidentified
  source 1..294: note = protein_10e4d01
  REGION 1..53: note = RuvC_domain
  REGION 164..253: note = Tnp_domain
  SITE 172: note = Tnp_P1
  SITE 202: note = Tnp_P2
  SITE 210: note = Tnp_P3
  SITE 211: note = Tnp_P4
  SITE 224: note = Tnp_P5
MGELYYKEEFDPYKQRGIQLFNLRQLTRQHESMTTMYVQAKLQFQAVLDQLFPQYVGIFGDLYAEISLRLLQAYPTPQAVQEAGLEQLIELIQSGTTRCRSRMWAEEKAKKIMTAAQNSPFKEAVYESHVISIQMLITLLLQYREHLSTLEQQIDALAEKRKEYDLLRSIPGVGNKIAATILSEIGEIGRFDHPKKLVAFAGVDPSIYASGKFTATSNRITKRGSKRLRRALFLAVQCGLQRSRNQRLRAFYDLKREEGKPYKVALIACVNKLLRWIYAILKREEPYRSDCLQA

SEQ ID NO: 16481 - protein, 369 aa, unidentified
  source 1..369: note = protein_6986fd3
  REGION 7..148: note = RuvC_domain
  SITE 10: note = RuvC_P1
  SITE 53: note = RuvC_P2
  SITE 88: note = RuvC_P3
  SITE 90: note = RuvC_P4
  SITE 93: note = RuvC_P5
  REGION 212..301: note = Tnp_domain
  SITE 220: note = Tnp_P1
  SITE 250: note = Tnp_P2
  SITE 258: note = Tnp_P3
  SITE 259: note = Tnp_P4
  SITE 271: note = Tnp_P5
MKQVTTIGLDLAKKVFQVHGVDAAGVVVLRRSLRRRQVLAFFAKLPSCLVGIEACATAHYWAREITKLEHQVRLIAPAYAKAYVRRNKNDPADAAAICEAVSRPSMRFVTIKTEAQQAAAGVHKVREMLVKQRTMLINTLRGLMAEFGVVVAERPRHVSELMAILADPTDRRIPTPLHEGLSALVKTLGGLERRIEIVDKQIVGWGRDNATCRHLITIPGYGPVLSSAMAAMVVAPAVFAGARHFSASLGLVPRQDGTGGKIKLGPISKRGNGYLRRLLVNGAMAVLCSKRAKEDPWLAQLLESKPRKVAACALANKMARIGWAVMMRQEDFSRRQHDQPRPTPSQPGTVLPAVKTAARAPAAVAFGQS

SEQ ID NO: 16482 - protein, 340 aa, unidentified
  source 1..340: note = protein_cd7c4ba
  REGION 6..151: note = RuvC_domain
  SITE 9: note = RuvC_P1
  SITE 53: note = RuvC_P2
  SITE 91: note = RuvC_P3
  SITE 93: note = RuvC_P4
  SITE 96: note = RuvC_P5
  REGION 211..298: note = Tnp_domain
  SITE 219: note = Tnp_P1
  SITE 249: note = Tnp_P2
  SITE 257: note = Tnp_P3
  SITE 258: note = Tnp_P4
  SITE 270: note = Tnp_P5
MTITTIGIDLAKNVFAVHGVDQNGKNVLVKSRVIRAALPGLIAGLPLCVIGMEACSGAHYWARLFRQYGNEPRLMAAKFVSPYRMAGKSGKNDAADAQAICEAVRLPHMRFVPVKDESRQAMQCLHRPRQGFIEEKIATYNRLRGLISEFGVIAPQGTDALRHIVSAQKNSLPLQVQQCVDDLLEHVDRIEANITEYDQILPRIAKTDHRSQRLMKLKGVGPTTTCTLVACIGNAHDFKNGRQLAAWLGLIPSQYSSGRKSKPGRITKAGDSYLRTLLVQGARSVLIGAEKRTDSFSRWVCSLVERRGYWRAVVAIAAKNARLCWASLHYGDDFRLYSAS

SEQ ID NO: 16483 - protein, 340 aa, unidentified
  source 1..340: note = protein_7a5d159
  REGION 7..149: note = RuvC_domain
  SITE 10: note = RuvC_P1
  SITE 53: note = RuvC_P2
  SITE 88: note = RuvC_P3
  SITE 90: note = RuvC_P4
  SITE 93: note = RuvC_P5
  REGION 212..298: note = Tnp_domain
  SITE 220: note = Tnp_P1
  SITE 250: note = Tnp_P2
  SITE 258: note = Tnp_P3
  SITE 259: note = Tnp_P4
  SITE 271: note = Tnp_P5
MNEITTVGLDLAKHVFQVHAVDAEGDTVLRKQLRRGQVLAFFSRLPRCLVGMEACATAHYWARELRALGHEVRLMPAQYVKAYVKRNKNDAADAEAICEAVGRPTMRFVPVKTAEQQAAVLLHRGRERLVRQRTMLVNALRAHLAEFGVIAPQGLRNVGRLIAIIRDDDDARLPGLARQVLQVLAVQIEQLEAAIAALEKRLMGWHKSNPVSQRLATIPGIGPIIATAIAAMVAEPSGFRSGREFAAWLGLVPRQNSTGGKNRLGGISKRGNQYLRRLLINGASANLLRSKATNADPWVIGLRRRRPSLVVAVALANKTARIAWAVMHRQENYQRMATAA

SEQ ID NO: 16484 - protein, 338 aa, unidentified
  source 1..338: note = protein_6fdab1e
  REGION 6..148: note = RuvC_domain
  SITE 9: note = RuvC_P1
  SITE 52: note = RuvC_P2
  SITE 87: note = RuvC_P3
  SITE 89: note = RuvC_P4
  SITE 92: note = RuvC_P5
  REGION 211..299: note = Tnp_domain
  SITE 219: note = Tnp_P1
  SITE 249: note = Tnp_P2
  SITE 257: note = Tnp_P3
  SITE 258: note = Tnp_P4
  SITE 270: note = Tnp_P5
MDVTCIGIDLAKQVFQIHGVDHHGKAVVKKQLRRGQMLSYFRKLAPTLIGMEACGSAHYWARELGEMGHDARLMSPQFVKPYVKSGKNDAHDAEAICEAVSRPSMRFVQVKSVEQQVMQAEHRIRARLIKARTALSNEIRGLLGEFGIVLPASLTRLRRAIPELLEDGENGLLSDFRRLLCLLGEELRKLDDNIKEYDARIAQRAREDERIQRLLRVEGIGPVVASALVSAVGNGKQFCKGRDMAAWLGLTPSQHSSGGKSQLGRISKRGDKYVRMLLIHGARAALKAAENKEDARSRWVTGLAKRRNKNIATVALANKNARIAWSILSREETYRTAV

SEQ ID NO: 16485 - protein, 358 aa, unidentified
  source 1..358: note = protein_6412b76
  REGION 22..165: note = RuvC_domain
  SITE 25: note = RuvC_P1
  SITE 70: note = RuvC_P2
  SITE 105: note = RuvC_P3
  SITE 107: note = RuvC_P4
  SITE 110: note = RuvC_P5
  REGION 229..319: note = Tnp_domain
  SITE 237: note = Tnp_P1
  SITE 267: note = Tnp_P2
  SITE 275: note = Tnp_P3
  SITE 276: note = Tnp_P4
  SITE 288: note = Tnp_P5
MKKNTTLKQSLSSTDLSTCTTVAVDLAKQVFQVVGEDALGQVLYEERIKSRESFHAFLRKLPANIVVLMETGPGAQAWARQLQAQGNLARVLPAQLVADHRSGAKNDRNDALAILRAGRDTKITAVPIKSAAALAMQALHRARQGYVRRRTATSNQMRGLLMEHGVALAQGDVAISQTLPRILEDATQPLPDILRELIDELLGEWRQLGERINVLTGRLEIAANQDQTARRLMTVRGVGPIIATAMLAKQTEPERFADARQFAAYFGMVPDQNSSGQKVRLGKMSKRGDGYIRSLMVQGAHAVLRHLRPDSEQPDDRRLQRWLSRLGRKEAAVRLANRNLRIIWVLLQNDQTYHSQPA

SEQ ID NO: 16486 - protein, 344 aa, unidentified
  source 1..344: note = protein_1824463
  REGION 7..149: note = RuvC_domain
  SITE 10: note = RuvC_P1
  SITE 53: note = RuvC_P2
  SITE 88: note = RuvC_P3
  SITE 90: note = RuvC_P4
  SITE 93: note = RuvC_P5
  REGION 212..298: note = Tnp_domain
  SITE 220: note = Tnp_P1
  SITE 250: note = Tnp_P2
  SITE 258: note = Tnp_P3
  SITE 259: note = Tnp_P4
  SITE 271: note = Tnp_P5
MGEVSTIGLDIAKSVFQVHGVDADSAVVIRKRISRVKVLEFFAALSPCLVGIEACPSAHHWSRKLQALGHTVKLMPPSYVKAYLKRSKNDANDAAAICEAVTRPSMRFVPTKSEQQQSGLMLHRSRQLLVRQRTMLSNAIRGHMAELGIISAKGRNGTAELLEVIANADDDRIPAVARLSLDALARQYANATAEIRAIEKHIHAWHRSCEESRRLGDVPGIGPIVATALVAEVGDWKAFSSGRNLAAWIGLVPKQHSTGGKDRLGGISKQGNRYLRWLLVTGAMAVIRYARQHGTKRLWLARIMERRPIRVAAVALANKIARMAWAMMVRGERFKEPRLISEAA

SEQ ID NO: 16487 - protein, 328 aa, unidentified
  source 1..328: note = protein_e100017
  REGION 4..155: note = RuvC_domain
  SITE 7: note = RuvC_P1
  SITE 60: note = RuvC_P2
  SITE 100: note = RuvC_P3
  SITE 102: note = RuvC_P4
  SITE 105: note = RuvC_P5
  REGION 200..286: note = Tnp_domain
  SITE 208: note = Tnp_P1
  SITE 237: note = Tnp_P2
  SITE 245: note = Tnp_P3
  SITE 246: note = Tnp_P4
  SITE 259: note = Tnp_P5
MFYIGIDVSKAKLDCSLLMDVTNNKRKAKVVINSKTGISDLLVWTNKQHVPNDQLHAILEGTGVYHERAAQALHDAGVLVSIVNPAQVRSFAFGLAIRNKTDDMDSFVLARYGALVQPQIWIPPTQEARTLQALLKRREAISHDLLREKNRLEKADSTDTPTLCRKSITDSIQFLNEQLAKIQTDIDEHTNSHANFKEDLELLQSIPAVGPQVSNHLLAIVHNHHFEDADKLTAYLGLVPVQRQSGSSVLGRSCISKAGPPHMRAILYMAAISATRYNPHVKSLYLRLLERGKSKRSALCAAMKKLVQLCFGVLKTRQPYQENYAQVS

SEQ ID NO: 16488 - protein, 324 aa, unidentified
  source 1..324: note = protein_0e6963a
  REGION 4..154: note = RuvC_domain
  SITE 7: note = RuvC_P1
  SITE 59: note = RuvC_P2
  SITE 99: note = RuvC_P3
  SITE 101: note = RuvC_P4
  SITE 104: note = RuvC_P5
  REGION 199..285: note = Tnp_domain
  SITE 207: note = Tnp_P1
  SITE 236: note = Tnp_P2
  SITE 244: note = Tnp_P3
  SITE 245: note = Tnp_P4
  SITE 258: note = Tnp_P5
MFFLGIDVSKAKLDCTLLGSDANKRKAKVVPNSIAGVQTLLQWCDKQGAEPAQLHAVLEPTGQYHEQAATALHDASVSVSLVNPARVRDFAGALAVRSKTDGIDSYVLARYGQALKPELWRPAPLHARQLRALLARRDALAKDLQRELNRQEKTQFSDSPVLVEGSIAKTIAFLREEIKRLDHAINDHIDRHPDLKEDRELLTSIPGIGDRAGNSILSIMHNRPIKSAEGLASYLGVVPVQRQSGTSLNSRPRLSKTGPSTVRATLYMAAIVSKRFNPHVGALYARLLATGKSKMAALGAAMRKLVHLCFGVLKTRTPYRPDYA

SEQ ID NO: 16489 - protein, 344 aa, unidentified
  source 1..344: note = protein_8724cf0
  REGION 6..148: note = RuvC_domain
  SITE 9: note = RuvC_P1
  SITE 52: note = RuvC_P2
  SITE 87: note = RuvC_P3
  SITE 89: note = RuvC_P4
  SITE 92: note = RuvC_P5
  REGION 211..297: note = Tnp_domain
  SITE 219: note = Tnp_P1
  SITE 249: note = Tnp_P2
  SITE 257: note = Tnp_P3
  SITE 258: note = Tnp_P4
  SITE 270: note = Tnp_P5
MEITTIGLDIAKRVFQAHGVDATGHAVLRRRLGRAEVLDFFRALRPCLVGIEACGTAHHWAREIRALGHEVRLIPAAYVKPYVKRGKTDAADAEAICEAVTRPTMRFVPMKTADQQAVLMLHRTRDLLVRQRTALVNALRGHLAEFGIVAPQGISRVAELLAVLLGEDEATLPPLARQALRGLAAELEALGKRVEEIEAAIVAWHKENEASRRLAAVPGIGPITASAVVATVGDVSNFASARHFAAWIGLVPKQNSTGGKPRQGGISKAGDHYLRRLLVLGATAVIRHTRIKAREGWLAELIERRPTMVAAVAQANKTARIVWALLARGESYRPQRGFPQHAGA

SEQ ID NO: 16490 - protein, 287 aa, unidentified
  source 1..287: note = protein_b5fb022
  REGION 10..156: note = RuvC_domain
  SITE 13: note = RuvC_P1
  SITE 55: note = RuvC_P2
  SITE 95: note = RuvC_P3
  SITE 97: note = RuvC_P4
  SITE 100: note = RuvC_P5
  REGION 191..268: note = Tnp_domain
  SITE 198: note = Tnp_P1
  SITE 227: note = Tnp_P2
  SITE 235: note = Tnp_P3
  SITE 236: note = Tnp_P4
  SITE 248: note = Tnp_P5
MTILTSPTVVGIDVAKAEIVAYREDLNATQAIANDRDALGRWLNTLPANSSIALEATSTYHLDTAELAHEIGHRVYVVDAYRLSHYRESIGQRAKTDPCDARLLARYLSSEQKRLRLWSPPPQAYKLLKSLLHRRAELINLRVSLTLSWSGEPLLKDELAQQLKSFKQAEQVIQKLLHKVSKEAGITENIKRCKAIEGVGDLTATGLATAFMRGQFANGDAFIAFLGMDLRPKDSGKKAGPRHLSKRAIQSCGALLTTQRWPLADLRPGNRTTSPTWPEDWQRPKPW

SEQ ID NO: 16491 - protein, 339 aa, unidentified
  source 1..339: note = protein_2b0c1a6
  REGION 4..160: note = RuvC_domain
  SITE 7: note = RuvC_P1
  SITE 57: note = RuvC_P2
  SITE 97: note = RuvC_P3
  SITE 99: note = RuvC_P4
  SITE 102: note = RuvC_P5
  REGION 274..339: note = Tnp_domain
  SITE 282: note = Tnp_P1
  SITE 312: note = Tnp_P2
  SITE 320: note = Tnp_P3
  SITE 321: note = Tnp_P4
  SITE 334: note = Tnp_P5
MNAVDIDVSKGKSTVTIRRPGDVVLMPPCDIPHTQSDINALIKRIKGLDGETKAWMEHTGRYYEPVANWLSDAGIFVSAVNPILISDFGDDSLHSQKTDKADSKKIARYTLDRWAKLKQYGSMDKTRNQFKTMNRQFGFYMNQKTAMKNNLISLLDQAYPGANDFFDSPARSDGSQKWVDFVYTYWHVDCVRSKSLKSFTEHYQKWCKRNRYNFSPSKAEKIYQLSSDLIAVFPKDDGTKTLIRQAVTILNTASQTVESLRLKMDQTAAVLPEYPVVMAMHGVGPSLGPQLMAEIGDVTRFTHREALTAFAGVDPGKNDSSNHSQKSVRTSKKDSPSLR

SEQ ID NO: 16492 - protein, 341 aa, unidentified
  source 1..341: note = protein_35d3ff5
  REGION 6..148: note = RuvC_domain
  SITE 9: note = RuvC_P1
  SITE 52: note = RuvC_P2
  SITE 87: note = RuvC_P3
  SITE 89: note = RuvC_P4
  SITE 92: note = RuvC_P5
  REGION 211..298: note = Tnp_domain
  SITE 219: note = Tnp_P1
  SITE 249: note = Tnp_P2
  SITE 257: note = Tnp_P3
  SITE 258: note = Tnp_P4
  SITE 270: note = Tnp_P5
MQITTIGIDLAKTVFQVHGVYEDGSVAFNKPLRRSQMLDFFARLDPCLIGIEACGSSHYWARELTALGHEVKLMPANYVKAYVKRGKSDAADAAAICEAVTRPTMRFVAIKSEDQQAILSLHRVRQSLINQRTQLANMIRGLLAEFGIVLPRGVNHLRRFAFEVQAGEVLDMPETAEDVIALLCDQLIDLDRRISSLDKRIATEARKDERIELLQTIPGIGPITASAIVATIDTGRQFRSARDFAAWIGLTPLNKSSGGKEVLGRISRMGDRYIRRLLVNGMASRVRYAKQKPHRADPWLLNLLERKPAKLAAVAMANKTARIVWAVLTNGEPYREVDAAR

SEQ ID NO: 16493 - protein, 324 aa, unidentified
  source 1..324: note = protein_c0442e8
  REGION 9..160: note = RuvC_domain
  SITE 12: note = RuvC_P1
  SITE 58: note = RuvC_P2
  SITE 98: note = RuvC_P3
  SITE 100: note = RuvC_P4
  SITE 103: note = RuvC_P5
  REGION 197..281: note = Tnp_domain
  SITE 205: note = Tnp_P1
  SITE 234: note = Tnp_P2
  SITE 242: note = Tnp_P3
  SITE 243: note = Tnp_P4
  SITE 254: note = Tnp_P5
MSQPNPLCVGIDVSKATLDIAANGDGDIAQFTVSNDSDGFDAIIDELRKHSLALILMEATGGLESAVACQLQAEGFDVTVINPRQARDFARAMGYLAKTDRIDARVLAQMAEVINRHPERERFIRTLPDTERQVLAAMVVRRRQLITMQVAERNRLYTAHPQSRKSINIIIKALEDELARIDEDMKNHIRNHFKDLAARLSSIKGVGTMTVAALLAEVPELGNLSRRAISALVGVAPINRDSGTMRGRRTIFGGRDGVRTSLYMAALVATRFNPVIKTFYIRLLAAGKPKKVALVACMRKLLTILNAMLRKNEEWNESYHYVAP

SEQ ID NO: 16494 - protein, 326 aa, unidentified
  source 1..326: note = protein_e21d7cf
  REGION 6..159: note = RuvC_domain
  SITE 9: note = RuvC_P1
  SITE 57: note = RuvC_P2
  SITE 95: note = RuvC_P3
  SITE 97: note = RuvC_P4
  SITE 100: note = RuvC_P5
  REGION 200..287: note = Tnp_domain
  SITE 208: note = Tnp_P1
  SITE 238: note = Tnp_P2
  SITE 246: note = Tnp_P3
  SITE 247: note = Tnp_P4
  SITE 260: note = Tnp_P5
MKNFIIGIDVSKDTLDFCILQKDSRGKIQQGVIANKEREILTWLKNLDKENVVVALEHTGHYGALLSWLLEEQMFTYYLINPLDLQRSLGLQRGKSDIVDAYRIADYTITNNHKLSPFKLPCESLRKLKALMTARERYVKMSVQIQNSLKAEMILSKKVVLKQLIKLEQKQLKSIQNTIQDLEKQMMEIVKSSQDLNTTYTKISSVIGVGTITAIKCIIETDNFTRFTDARKFNCHCGLAPFPYQSGSSIKGRTKTHFLRDKTLKSILFKAAGSAIQHDPQLKKYYQQKLEKGKHKLTALNAVANKIVLRIFAVAKRNEPFVKLIA

SEQ ID NO: 16495 - protein, 464 aa, unidentified
  source 1..464: note = protein_98c7769
  REGION 5..161: note = RuvC_domain
  SITE 8: note = RuvC_P1
  SITE 59: note = RuvC_P2
  SITE 99: note = RuvC_P3
  SITE 101: note = RuvC_P4
  SITE 104: note = RuvC_P5
  REGION 272..358: note = Tnp_domain
  SITE 280: note = Tnp_P1
  SITE 310: note = Tnp_P2
  SITE 318: note = Tnp_P3
  SITE 319: note = Tnp_P4
  SITE 331: note = Tnp_P5
MAVTLGIDVAVRAAHQATLARDGATVWRGRKFCTRPADFERLWADLNLADPSELTVVIEPTRNAWIVVAEWFRRRGARVVMVPTTQSADLRKYYSKHTKNDRIDSELLARLPLLHPEGLREYSGQGPADALRRLVKQRSTMVKRRVAVYARLDALVELLGPSWYAVLGSNYGMAALEFLARYADPNTVIRLGQARLSRFLIARSRGAWREDHAAGLTDAAKETLLLWGTDGMDFAELAQDIAHEAEQALFLTRQIKQIDERVANLYADADPQGIVASAPGVGPVISAVIAGRIGNPHRFTSLAAIRAYTGLVPKVSQSGVSKVESSITKAGDPLLREMLCTAADQARKIDPQIAAKYQRLMAGDRHHDSAICHLATLMVTRIATCMRTGQHYALRDVDGTPITEAEGRAIVKERYQLDPRGRDNVRHKRMRDRRNQAAGQEPQKSLSAPTSRPANTQPTSPRVA

SEQ ID NO: 16496 - protein, 314 aa, unidentified
  source 1..314: note = protein_b29b535
  REGION 7..150: note = RuvC_domain
  SITE 10: note = RuvC_P1
  SITE 53: note = RuvC_P2
  SITE 93: note = RuvC_P3
  SITE 95: note = RuvC_P4
  SITE 98: note = RuvC_P5
  REGION 188..272: note = Tnp_domain
  SITE 196: note = Tnp_P1
  SITE 225: note = Tnp_P2
  SITE 233: note = Tnp_P3
  SITE 234: note = Tnp_P4
  SITE 245: note = Tnp_P5
MRSLVFVGIDVSQARLDIAIRPGTSFSITHGESAIAALVQQLCALSPTLIVLEATGGMEIPLTSALATAGLPVVVINPRQVRDFAKASGHLAKTDALDAQVLAQFAEVMHPQPRPLPDAETRTLAALLTRRRQLVEMLTAEKNRLLSTAAPIRKRLRTHITWLERELQSTNTALAGAIRQSPVWREKDELLQSVPGVGPVVTSTLLASLPELGTLTNKQIAALVGVAPLNRDSGTLRGRRTVWGGRAQVRAVLYMGTIVAARFNPVIRVFYQRLQQAGKAKKVALTACMRKLLSILNAMLKHRTLWREVEVSHA

SEQ ID NO: 16497 - protein, 354 aa, unidentified
  source 1..354: note = protein_97f9cf9
  REGION 14..155: note = RuvC_domain
  SITE 17: note = RuvC_P1
  SITE 60: note = RuvC_P2
  SITE 95: note = RuvC_P3
  SITE 97: note = RuvC_P4
  SITE 100: note = RuvC_P5
  REGION 218..303: note = Tnp_domain
  SITE 226: note = Tnp_P1
  SITE 256: note = Tnp_P2
  SITE 264: note = Tnp_P3
  SITE 265: note = Tnp_P4
  SITE 277: note = Tnp_P5
MSRKTTNLEAVATIGIDIGKNTFHLIGLDEKGAIVLRQKLLRGQVVTRLANMPLCLIGMEACVGAHHLGRQLKALGHDARLMPARYVRPYSKGQKNDFRDAEAIAEAVLRPTMKFVAIKTVEQLDLQALHRVRERLVSQRTSVINQIRAFLLERGIAVRQGLRALRTEIPIVLAMTDKLSPRMIRMIEDLCTDWHYLDERIETVSDEIATLSEEDEGAKRLMTVPGIGPIISTATVAAIGRGDVFSKGRDFGAWLGLVPRQMSTGGRTVLGPISKRGNRCLRMLFVQAANAVLLHPQSWEKHGLKSWIEAAARRLNRFKLAIALANKLARIAWGVLQGGRNFEVRSMKSAAQAA

SEQ ID NO: 16498 - protein, 325 aa, unidentified
  source 1..325: note = protein_5e436b2
  REGION 5..156: note = RuvC_domain
  SITE 8: note = RuvC_P1
  SITE 58: note = RuvC_P2
  SITE 98: note = RuvC_P3
  SITE 100: note = RuvC_P4
  SITE 103: note = RuvC_P5
  REGION 197..283: note = Tnp_domain
  SITE 205: note = Tnp_P1
  SITE 235: note = Tnp_P2
  SITE 243: note = Tnp_P3
  SITE 244: note = Tnp_P4
  SITE 256: note = Tnp_P5
MVCFVGIDIAKNTIDVATHLPNGKHRTRGKLANNPAGFVELDSWLLKHAEPGAVVVMEATSVYHEAVAEHLYNQGYHVHVVNPKAVYHYRKSEMTGVKTDKVDAKLIADFAKDKHQRKPLRAWKPEPVARRRLRALLRRLEDLQQMLQMERNRLDVSDNTVHASICSVINHIEQQIKETQQAIKDHIDDDPDLRGKRDLMVSIDGIGEKTAAVILGELGDPLDYDGPRSLVKFAGLNPELAESGNYRGPSPISRAGSPRLRSALYLPCVTAITYNPVMAAMAKRLKANGKVGKQVVCAVMRKMLHIIYGVLKSGQPFDPKLALAR

SEQ ID NO: 16499 - protein, 338 aa, unidentified
  source 1..338: note = protein_792bcc6
  REGION 7..148: note = RuvC_domain
  SITE 10: note = RuvC_P1
  SITE 53: note = RuvC_P2
  SITE 88: note = RuvC_P3
  SITE 90: note = RuvC_P4
  SITE 93: note = RuvC_P5
  REGION 209..295: note = Tnp_domain
  SITE 217: note = Tnp_P1
  SITE 247: note = Tnp_P2
  SITE 255: note = Tnp_P3
  SITE 256: note = Tnp_P4
  SITE 268: note = Tnp_P5
MSELALIGIDLGKHTFHLHGQDKSGREVFRKKCSRAQMMQFFASSQSCVVAMEACAGSHCVARQLAAIGHTAKLISPQFVKPFVKGNKNDFVDAEAICEAASRPSMRFVTPKTESQQTLSVLHRMRESLVRDRTRTANQMHGFLLEFGVSLPRGLTIMKRLAVVLAEHELPVRLTVLLQRLHNHFIYLDEQIKAMDKELACQVADDDLGSRLLSIPCVGPITASLLAVEMGDGKQYRCSRDFAASVGLVPKQYSTGGKANLLGISKRGDKHLRQLLVQCSRVYMQRLDHQKGALADWVRSLLSRRHSNVVACALANKLARIAWAIAAHHTQYEAGPGA

SEQ ID NO: 16500 - protein, 424 aa, unidentified
  source 1..424: note = protein_b5ae6cc
  REGION 25..184: note = RuvC_domain
  SITE 28: note = RuvC_P1
  SITE 80: note = RuvC_P2
  SITE 121: note = RuvC_P3
  SITE 123: note = RuvC_P4
  SITE 126: note = RuvC_P5
  REGION 298..385: note = Tnp_domain
  SITE 306: note = Tnp_P1
  SITE 336: note = Tnp_P2
  SITE 344: note = Tnp_P3
  SITE 345: note = Tnp_P4
  SITE 358: note = Tnp_P5
MIKDKCGRPPITAKGKETVFIMISIGIDVSKLKSTFCILNEYGEVLQTAREISHTETDLNELIRQVKSFGGKDDVRVIMEATGAYSKPVLYSLIEEGIFVAEINPLAMKKYRSNINFRGVKNDPIDALAIASYGIDKWHRLKEYQKADKEYAAMKALSRQYLSYMKPHVSLTQNLDHLIDQVMPGIKDEFDGYDPATGKDRLTDFLEEFVHYDCIRSLGPKRFDERFKRWAKKKGYRPRQGKSGKIYSLAKEGIPTLAYDPISRLLVKQAAQALRSMNHVLNEILSQLRSLAKQRPEYPIIRAMSGVGDVLAPLLIAEVGDPRRYYSGSALIACVGIDVPPYESGQFKASERGITRKGSKQLRKLGYLMVKNLRKIKPVKDTAVYDYYLKKKSESKKDKQAIVAAMNKFFRIYYARAMEAYKTE

SEQ ID NO: 16501 - protein, 341 aa, unidentified
  source 1..341: note = protein_257ec1a
  REGION 5..151: note = RuvC_domain
  SITE 8: note = RuvC_P1
  SITE 53: note = RuvC_P2
  SITE 91: note = RuvC_P3
  SITE 93: note = RuvC_P4
  SITE 96: note = RuvC_P5
  REGION 211..297: note = Tnp_domain
  SITE 219: note = Tnp_P1
  SITE 249: note = Tnp_P2
  SITE 257: note = Tnp_P3
  SITE 258: note = Tnp_P4
  SITE 270: note = Tnp_P5
MKDYIGLDVSQKETAISIRREGKRIWRGKCLSDPKTIAEIVRKHAPFVERVVFETGPLSVWFYHALKEEGLPAICIDARHAKAALDMAANKTDANDADGLAHLAEVGFFREVRIKGFDSMLTRTLVAARTRLVSITIELSNQIRGVMKTFGLIVPPGKGSIFDTNVRQMLADQDALASIVLPLLEVWRSVRLKASALERRMLAHARQRQECRILMSIPGIGVITATSFLSAIEDPDNFKKSRSVGAWLGLTTRRYQSGEVDYDGHISRRGDRHLRGLLFEAATVILTRTSAESSLRAWGVTLRERVGFKRAAVAVARKLAVTMHAMLKTVEFFDRKVGAAA

SEQ ID NO: 16502 - protein, 334 aa, unidentified
  source 1..334: note = protein_5b4878b
  REGION 7..149: note = RuvC_domain
  SITE 10: note = RuvC_P1
  SITE 53: note = RuvC_P2
  SITE 88: note = RuvC_P3
  SITE 90: note = RuvC_P4
  SITE 93: note = RuvC_P5
  REGION 208..295: note = Tnp_domain
  SITE 216: note = Tnp_P1
  SITE 246: note = Tnp_P2
  SITE 254: note = Tnp_P3
  SITE 255: note = Tnp_P4
  SITE 267: note = Tnp_P5
MAQITTVGIDLAKSVFSLHGVDGAGRVVLRRSVRRDQLLEVVTGLSPCLIGMEACSGAHEWGRRFQELGHTVRLMAPKFVAPYRKSGKNDGNDAEAICEAVTRPSMRFVPVKSAEQQALLAMHRVRQGFVVERTATINRLRGLLSEFGVVLPLRSVTVRRQAAAAAENLPELARRAIGDLLEQLRVLDERIGGYDREIEAQARLCEPAQRLMKIRGIGPTTALAIVATVGNAREFKNGRQFAAWIGLTPSQYSTGGKPRLGHISKRGDAYLRNLLVQGARSVLNSAGMHQDRMSRWILELQPRRGYYRTLVAIANKNARIAWALLAKNESLRTA

SEQ ID NO: 16503 - protein, 394 aa, unidentified
  source 1..394: note = protein_7e9c819
  REGION 4..164: note = RuvC_domain
  SITE 7: note = RuvC_P1
  SITE 59: note = RuvC_P2
  SITE 99: note = RuvC_P3
  SITE 101: note = RuvC_P4
  SITE 104: note = RuvC_P5
  REGION 267..354: note = Tnp_domain
  SITE 275: note = Tnp_P1
  SITE 305: note = Tnp_P2
  SITE 313: note = Tnp_P3
  SITE 314: note = Tnp_P4
  SITE 327: note = Tnp_P5
MILVGIDIGKLNHTFSIISRDDGEILLEPTDFTNDKTGFDFLYEKIKTHKKPDMLIGMEDTGHYHLALMKYLLDTGFTVALINPTVTDMTRKMQGSISKNDKLDSLTICDILGSSSRKKLYRISKVTSFELYEQRQLTRHHHNLKEELNVYANRLQKCIDIVFPEFNSLFKSKYGTVYMEILKKFASADAIANTDIRTLRKCFNRKGSGRTISLTAEELKDAAVHSIGISSVAEEIQIKHLVSQIELINAQIAEIDKKIEEFSSQTNSPILSIPGISHFSGTSILSELGDIGNYSSAAKVIKFAGVAPYEYQSSQYKAEHLPITKKGSKYLRKTLYQIILPVISNNPAFLDYYHLKRSQGKSHRCAQGHCVRKLLRVIYHLLSTNQQFNPALLR

SEQ ID NO: 16504 - protein, 349 aa, unidentified
  source 1..349: note = protein_8318439
  REGION 8..162: note = RuvC_domain
  SITE 11: note = RuvC_P1
  SITE 67: note = RuvC_P2
  SITE 107: note = RuvC_P3
  SITE 109: note = RuvC_P4
  SITE 112: note = RuvC_P5
  REGION 208..295: note = Tnp_domain
  SITE 216: note = Tnp_P1
  SITE 246: note = Tnp_P2
  SITE 254: note = Tnp_P3
  SITE 255: note = Tnp_P4
  SITE 268: note = Tnp_P5
MEVLKQVLGIDVAQKELVVSLGRMVEDLSIDLYAYKVFRNNEKGFLSLLEWVKKQTNDTKKVRFVMEATGVYHQKFAYYLDEKGYEVCVVLPNKISNYMRTLDNKTITDKTCSEAIAQFGLERKLDLWHRPRSIYKNLQQLTRERDQIVFERSMVKNHLHAEQSEAEPNESSILRINTRINFLSGQEKEIKKEIENWVNKDSALKQEIENICTIPGIGEFTAVIILAETNGFELIRNKRQLTSYAGLDVKEKQSGTSVKGKPRISKIGNRHLRKAMHLPSLTAVRWDDNYRDLYARIISKQGIKMKALIAVQRKLLEMVYTIFKNKCPYDKEYETKRIQKENSVHAQMA

SEQ ID NO: 16505 - protein, 358 aa, unidentified
  source 1..358: note = protein_38399c1
  REGION 16..164: note = RuvC_domain
  SITE 19: note = RuvC_P1
  SITE 68: note = RuvC_P2
  SITE 104: note = RuvC_P3
  SITE 106: note = RuvC_P4
  SITE 109: note = RuvC_P5
  REGION 235..320: note = Tnp_domain
  SITE 242: note = Tnp_P1
  SITE 273: note = Tnp_P2
  SITE 281: note = Tnp_P3
  SITE 282: note = Tnp_P4
  SITE 293: note = Tnp_P5
MTSITPDSTPLTEVAGGVDTHQDTHTAAVIDGVGRVLGTEQFPATPAGYTALLAWMRAFGQLSRVGVEGTGAYGAGLTRLLQAEHINVIEIDRPDRKSRRFHGKSDPIDAIAAAKAALAGDRTGTPKRRDGRIEALRALRIARRSAIDQRADTQRQIKALIVTAPDALRQSLRGLSSTKLIATCAALTSDREAAADPTTATQLALRSLARRHQQLSAEIADLDELLDVLVMAINPRLIAAHGVGTEIAGQLLVTAGENHDRIGSEAAFAMLCGVAPIPASSGKTTRHRLNRGGDRQANAALYRVVLCRLRWDARTRAYMDRRTQDGLSKKEIIRCLKRYVARELYGLITTTNDQERSD

SEQ ID NO: 16506 - protein, 340 aa, unidentified
  source 1..340: note = protein_6111e8d
  REGION 6..148: note = RuvC_domain
  SITE 9: note = RuvC_P1
  SITE 52: note = RuvC_P2
  SITE 87: note = RuvC_P3
  SITE 89: note = RuvC_P4
  SITE 92: note = RuvC_P5
  REGION 210..295: note = Tnp_domain
  SITE 218: note = Tnp_P1
  SITE 248: note = Tnp_P2
  SITE 256: note = Tnp_P3
  SITE 257: note = Tnp_P4
  SITE 269: note = Tnp_P5
MEVSTIGLDLAKNVFQAHGANASGAVVFRKQLRRGKVLEFFARQPACLVAMEACGGSHYWAREIGKLGHTVRLIPPSYVKPFVKRSKNDAADAAAICEAAQRPTMRFVTVKSEKQQASTIVFRARDLLVRQRTQVINALRGHLAEYGLVVAHGPSHVAKLIDQVEDPHSNLPSPARLVLGLLIETLKTLNERIACLDVEIARRAREDENARRLATIPGIGPVTATALVALAPEATTFKRGRDFAAWLGLTPLQQSSGGKQKLGKTSKMGERTLQRLLIIGASAVVRQARKRGAPAGSWLDRMISRKPPMLVIVALANKMARIIWAMMTKGGVYRAPAAAA

SEQ ID NO: 16507 - protein, 369 aa, unidentified
  source 1..369: note = protein_3e40b9c
  REGION 5..164: note = RuvC_domain
  SITE 8: note = RuvC_P1
  SITE 62: note = RuvC_P2
  SITE 103: note = RuvC_P3
  SITE 105: note = RuvC_P4
  SITE 108: note = RuvC_P5
  REGION 274..360: note = Tnp_domain
  SITE 282: note = Tnp_P1
  SITE 312: note = Tnp_P2
  SITE 320: note = Tnp_P3
  SITE 321: note = Tnp_P4
  SITE 334: note = Tnp_P5
MNPVIGLDIAKGESQGRAFLDKGQPYGKSFTVHHTHEGLDAFHSFLKLIEEETGQKPMVILESTGHYHLPITRFLEDHNCLFVVVNPILSYQAKKLSSLRKVKTDAVDAYALCELFYKEDFEHHKTRGVQLLNLRNLSRQHDAITGSYIQIKLQFQAILDQVFPEFKGVFGDLHSAVSLKTLLEFPTSEAVLSAGKTKISEKIASLCTRRSDRWATEKAEALMAAADRNPYRKAPFQSHLISLEMYVSMLLHYREHLTALEKQLDALANEIEEYQIIQSIPGIGEKIAATIISEIGEIDRFNHPKKLVAFAGVDPSVHISGKFTATINRITKRGSSRLRHTLFLAVLCGLRRSGTKGLLRQENHGRKAS

SEQ ID NO: 16508 - protein, 393 aa, unidentified
  source 1..393: note = protein_4b7f49b
  REGION 4..161: note = RuvC_domain
  SITE 7: note = RuvC_P1
  SITE 60: note = RuvC_P2
  SITE 100: note = RuvC_P3
  SITE 102: note = RuvC_P4
  SITE 105: note = RuvC_P5
  REGION 266..353: note = Tnp_domain
  SITE 274: note = Tnp_P1
  SITE 304: note = Tnp_P2
  SITE 312: note = Tnp_P3
  SITE 313: note = Tnp_P4
  SITE 326: note = Tnp_P5
MFIVGVDVAKRSHEAIVLDDSGGIVRKAFNFKNDSTGFRKLTAVLDSVSTDPSDFIVGMESTAHYWLALYSALRKRGYTVHVLNPIQSNALRGMYIRQVKNDERDSFIIAEVIRFGRYTEGGLPPSELYELRELCRARSFIVDMTADLKRKVIALLDQAFPEYETVFSNIFGLTSSELLLNCSTPEEILAIDTEQLARIIEVPSRKRFSTPKAEQIKEVASNSFGIVLEYGSMGLLIKQYMEHIRYTEKQIAELEEKITELYAHFDTQLTTIPGIGTTLAATILSEIGDISRFSSAAKLAAFAGIDPTVKQSGEFTATHNHMSKRGSPYLRRAIWQASTLAVIHDPALKAFFEKKRAEGKPYMNAIGHVTRKLTNIIFAVLRDNKPYYCRSDI

SEQ ID NO: 16509 - protein, 388 aa, unidentified
  source 1..388: note = protein_209d6c4
  REGION 5..163: note = RuvC_domain
  SITE 8: note = RuvC_P1
  SITE 62: note = RuvC_P2
  SITE 102: note = RuvC_P3
  SITE 104: note = RuvC_P4
  SITE 107: note = RuvC_P5
  REGION 273..357: note = Tnp_domain
  SITE 281: note = Tnp_P1
  SITE 311: note = Tnp_P2
  SITE 319: note = Tnp_P3
  SITE 320: note = Tnp_P4
  SITE 333: note = Tnp_P5
MNPVVGLDVAKGETEGQVFLDKEKPHGRHFSIVHTTDGFEKFREVLEGVEALTGAKPTVILESTGHYHVPVVQFLEEYSYVYIVVNPLISHQAKKSSLRKVKTDAIDAYRLFELFYKEEFEPLRKRGMHLLDLRSLTGQRDAVTSLFIQTKLQFHAVLDLVFLEYRGIFGDLFSQVSLKTLLAFPTPEAVFQVSEAELAEKIKTLCKSRSESWAARMAQDIIQAANRSPFRTVLLSSHLFSLKMYIQMILEYKEHLSDLENQIDALAEQIEECQIVQSIPGIGDTIAATIIAEIGEIERFNHPKKLVAFAGVDPSVHSSGKFTATINRITKRGSSRLRHALYLAVLAYGKPEARDDRRSTKPSEKMAKLTRSPLSPALTSYCTGFMQC

SEQ ID NO: 16510 - protein, 304 aa, unidentified
  source 1..304: note = protein_6e790f1
  REGION 1..76: note = RuvC_domain
  SITE 15: note = RuvC_P3
  SITE 17: note = RuvC_P4
  SITE 20: note = RuvC_P5
  REGION 179..266: note = Tnp_domain
  SITE 187: note = Tnp_P1
  SITE 217: note = Tnp_P2
  SITE 225: note = Tnp_P3
  SITE 226: note = Tnp_P4
  SITE 239: note = Tnp_P5
MHTSHLRKANIRDSKNDRLDSINIAKALLFGEHRYVTQKNLTNFVLKKLTPFRRNLIKQKTKFKIQLVYLLDIIFPELQYFFKSGIHSNAVYTLLKKYPSTEKIAALREKTLFSILNKASKGHYKEEHASQLKSLAKSSVGIKDTSVSMHIPQLIKLIEMLDSQINSIKEEIESSIDKESVVLSISGINFVAAASILGEINDIDNFDLPSKLLAFSRLDPKVRQSGNFNASSCRMSKKGSPYLRYALIITAWNLVRNSETFNKYYLSKRAQGKSHYSALGHTAHKLVRIIYTLLKKNILYQEIN

SEQ ID NO: 16511 - protein, 324 aa, unidentified
  source 1..324: note = protein_2c3d419
  REGION 7..149: note = RuvC_domain
  SITE 10: note = RuvC_P1
  SITE 53: note = RuvC_P2
  SITE 88: note = RuvC_P3
  SITE 90: note = RuvC_P4
  SITE 93: note = RuvC_P5
  REGION 211..295: note = Tnp_domain
  SITE 219: note = Tnp_P1
  SITE 249: note = Tnp_P2
  SITE 257: note = Tnp_P3
  SITE 258: note = Tnp_P4
  SITE 270: note = Tnp_P5
MKQVHIIGIDLAKHGFQLHGARPDGSVAFRKKLTRGKVLGFLESQPQCRVAMEACGSAHYWGREIGELGHEVKIMPPLYVKAYAKRQKNDASDAEAICEAASRPTMRFVAVKTEEQQARGMLYRTRDLLVRQRTQTVNALRGHLAEFGVIAPKGTAHVVRLASAVAAPDSGLPETVREPGRLLLGQIADLNRKVGELESRIRSGAYEDEEARRLMSIPGIGPICASAILAFAPPMASFRSGRDFSAWLGLVPRQNSTGGKTRLGRISKMGQRDIRRLLIIGAMTVVRWADRRGAPPGSWLARMLARKPRMLVAVALANRMARIA

SEQ ID NO: 16512 - protein, 387 aa, unidentified
  source 1..387: note = protein_210d265
  REGION 4..159: note = RuvC_domain
  SITE 7: note = RuvC_P1
  SITE 57: note = RuvC_P2
  SITE 98: note = RuvC_P3
  SITE 100: note = RuvC_P4
  SITE 103: note = RuvC_P5
  REGION 264..347: note = Tnp_domain
  SITE 269: note = Tnp_P1
  SITE 299: note = Tnp_P2
  SITE 307: note = Tnp_P3
  SITE 308: note = Tnp_P4
  SITE 320: note = Tnp_P5
MYYIRIDISKFKHDCAVIDGDGVTVTPSWSFYCDREGFDQLKRLLDSLEGEKRIGFEATGHYGETLKLYLESNSFTFMEFNPLLVKRFVAGKSLRRTKSDPIDALYIAQYLMSVEYKPYPVSFYHIKALKSLTRFRSSLIKQRSRQLVAMTTVLDVMFPEFKPFFGGKFSETALYILDNYTTPQRIANMNAKSFDILRRRSRGHFTADKFARLKELAKKTIGHSSEYLESELKITLDIYTQMDARVEQIEEEIEKLVSDMNPMSLSVPGIGVMTIAEIIGECGDFKKFENPSKILAFAGMEPGYHQSGTVEHSGKMVKHGSPYLRNALMCCVMPVIHNNLVFAEYYDKKIKEGKSHNTALSHCAKKLLRVIYALETKQIPFDASKLR

SEQ ID NO: 16513 - protein, 349 aa, unidentified
  source 1..349: note = protein_4ce0868
  REGION 6..146: note = RuvC_domain
  SITE 9: note = RuvC_P1
  SITE 52: note = RuvC_P2
  SITE 87: note = RuvC_P3
  SITE 89: note = RuvC_P4
  SITE 92: note = RuvC_P5
  REGION 217..300: note = Tnp_domain
  SITE 225: note = Tnp_P1
  SITE 255: note = Tnp_P2
  SITE 263: note = Tnp_P3
  SITE 264: note = Tnp_P4
  SITE 276: note = Tnp_P5
MTIVILGVDLGKTSCSVVGVDATGAVVARRTMRRQTLIDYVTKLPACVVAMEACCGAHHLGRLFATRGHEIRLMSPEYVRPYIKAQKNDDRDAEGIAEAASRPTMRFVDLKSQEQLDIQTLHRVRSRLVAERRNLINQLRAILLERGLIFAVGRRKFEIGMDALLAESNEILSPRMRRLVGDLRVGWKELVNRSSLDTKIEALNTEFIQLARGDAAMRRLTSIPGIGVLNATALVAAVGDASSFTKARDLGAWLGLVPRQYSTGGKPRLLGISKRGNTYLRTLLNHGARAALPSLSTSDTPLGRWLNAMIERGIHRNAVVVALANKLARIAWAALRKEIGFDRCHPVAA

SEQ ID NO: 16514 - protein, 405 aa, unidentified
  source 1..405: note = protein_2aab41a
  REGION 4..160: note = RuvC_domain
  SITE 7: note = RuvC_P1
  SITE 57: note = RuvC_P2
  SITE 97: note = RuvC_P3
  SITE 99: note = RuvC_P4
  SITE 102: note = RuvC_P5
  REGION 274..361: note = Tnp_domain
  SITE 282: note = Tnp_P1
  SITE 312: note = Tnp_P2
  SITE 320: note = Tnp_P3
  SITE 321: note = Tnp_P4
  SITE 334: note = Tnp_P5
MNAVGIDVSKGKSTITIRRPGDVVLMSPCDIPHTQSGINGLIEKLRSLDGETKVCMEHTGRYYEPLATWLTDAGIFVSAVNPILIRDFGDDSLRSPKTDKADAKKIARYTLDRWTYLRQYGNMDKTRNQLKTMNRQFGFYMDQKTAMKNNLIALLDQTYPGANTFFVSPSRCDGSQKWVDFVHTYWHVDCVRNQSLKAFIAHYHNWCKRKGYHFSIDKAEHIYHLSSDLIAVFPKDDNTKMLIRQAVTMLHTASVTIESLRQKMNAAASTLPEYSIVTAMNGVGPTLGPQLMAEIGDVTRFTHRGALTAFAGVDPGKNDSGQRTQKSVRTSKKGSPILRKTLFQIMDSLIKRSPIDDPVYAFMDKKRAQGKPYYVYMTAGANKFLRIYYGRVKEYLSTLSKNEES

SEQ ID NO: 16515 - protein, 368 aa, unidentified
  source 1..368: note = protein_899288e
  REGION 4..160: note = RuvC_domain
  SITE 7: note = RuvC_P1
  SITE 57: note = RuvC_P2
  SITE 97: note = RuvC_P3
  SITE 99: note = RuvC_P4
  SITE 102: note = RuvC_P5
  REGION 274..361: note = Tnp_domain
  SITE 282: note = Tnp_P1
  SITE 312: note = Tnp_P2
  SITE 320: note = Tnp_P3
  SITE 321: note = Tnp_P4
  SITE 334: note = Tnp_P5
MNAVGIDVSKGKSMVTILRPFGEIVSSPFEIKHTSSDIHSLIKLIHSIEGESRVVMEHTGRYYEALAHQLSAADLFVSAVNPKLVKDFNNDSLRKIKSDKADSVKIARYALDKWQSLEPYSITDELRAQLKVMNRQFHFYVKQKTAMKNNLINLIDQTYPNANTYFNSPPRSDGSQKWVDFVYTYWHVDCVRKMSLNSFVKHYQNWCKQKKYIFNKSKAEEIYTQSTELVPVFPKNEITKRIIRQAIAQLNSTSATVETIRILMNETASKLPEYPIVMQFKGIGPSLGPQLMAEIGDITRFTHKGALTAFAGVDPGVNESGSYAQKSVPTSKRGSSNLRKTLFQVMDVLIKTMPQDDPVYQFMDRKRA

SEQ ID NO: 16516 - protein, 340 aa, unidentified
  source 1..340: note = protein_eec1cf2
  REGION 7..149: note = RuvC_domain
  SITE 10: note = RuvC_P1
  SITE 53: note = RuvC_P2
  SITE 88: note = RuvC_P3
  SITE 90: note = RuvC_P4
  SITE 93: note = RuvC_P5
  REGION 211..296: note = Tnp_domain
  SITE 219: note = Tnp_P1
  SITE 249: note = Tnp_P2
  SITE 257: note = Tnp_P3
  SITE 258: note = Tnp_P4
  SITE 270: note = Tnp_P5
MEKISIVGVDLAKNIFQVHGATADGRPVFSKKVRRSKLLSLLAGIPTCTVAMEACASSHHWGREIGKLGHTVKMIPPIYVKPYVKRQKNDANDAEAIAEAASRPTMRFVTVKSAEKQASGMALRTRDLLVRQKTQTINALRGHLAEYGLVAPSGTVHLNRLQAAISDPETELPAAVIDHAQLLLDHIEMLACKIDKLGAELRAGARQDPAAKRLMTIPGIGPITAMALTALSPDPSTFRKGRDFAAWTGLTPKQFSSGGKERIGPTSKMGQRDLRRLLIIGAASVVRWAIRRGADQGGWLGQMLARKPRMLVTVALANKMARTAWALMTKNENYKNPALA

SEQ ID NO: 16517 - protein, 307 aa, unidentified
  source 1..307: note = protein_8401394
  REGION 6..150: note = RuvC_domain
  SITE 9: note = RuvC_P1
  SITE 53: note = RuvC_P2
  SITE 93: note = RuvC_P3
  SITE 95: note = RuvC_P4
  SITE 98: note = RuvC_P5
  REGION 185..269: note = Tnp_domain
  SITE 193: note = Tnp_P1
  SITE 222: note = Tnp_P2
  SITE 230: note = Tnp_P3
  SITE 231: note = Tnp_P4
  SITE 242: note = Tnp_P5
MNGIGAGVDVSKAYLDVAVFQQNEVRRFDNGAAGWRALVTWLKPYGPGQVVLEATGGYEQRALGALHEAGLPMRRINPRQVRSFARATGQLAKTDRIDARILAHVASVIDLVPFQPLDADAAKLRQYKARRDHLVQNIATEKQRRRQLDDPILRADLDAHIAYMEQALHRIEQVIADLIKDTPQARIARTIKGVGPAMVATMICDLPELGHLSRKAIAKLVGVAPLNRDSGFFVGQRSTWGGRAGPRSALYMSALTAAHHDPQLKAFYAALIGRGKPKKLALVAVMRKLIVILNARMREAIAAAPTP

SEQ ID NO: 16518 - protein, 395 aa, unidentified
  source 1..395: note = protein_0cd7188
  REGION 4..160: note = RuvC_domain
  SITE 7: note = RuvC_P1
  SITE 59: note = RuvC_P2
  SITE 99: note = RuvC_P3
  SITE 101: note = RuvC_P4
  SITE 104: note = RuvC_P5
  REGION 263..350: note = Tnp_domain
  SITE 271: note = Tnp_P1
  SITE 301: note = Tnp_P2
  SITE 309: note = Tnp_P3
  SITE 310: note = Tnp_P4
  SITE 323: note = Tnp_P5
MLILGVDIAKLNHVASLVDSNSNEIIFSNFKFQNNFNGFSSLKLELEKFNIDEVFILLESTGHYGENFTAFFHNLGFKLGIINPLQTASLRKAKIRDSKNDRLDSITIAQSYLINKPRVISQKDILCNTLKYLNRSRNDRVKERSKYKIKLTGCIDIVFPELQFFFNGIHHKGVYALLKHYNTKEAIAAIRIDKLSNTIYKASHGRFDRDKATALKSLAKTSVGIDSKALSIEITQIIQLIEFLDKQINDLEDEIKTVLKTLNSTIQSIPGISHNASAAIIGEIGIIDKYSHPSKLIALAGIDPKVRQSGNFNASSTRMSKRGSRYLRYALIFTAWNLVRHSPNINAYYQKKRAQGKSHYNALGHVAGKLCRIIFKLLKNDMVYNEDKIKVLLDS

SEQ ID NO: 16519 - protein, 277 aa, unidentified
  source 1..277: note = protein_39b2934
  REGION 6..147: note = RuvC_domain
  SITE 9: note = RuvC_P1
  SITE 52: note = RuvC_P2
  SITE 87: note = RuvC_P3
  SITE 89: note = RuvC_P4
  SITE 92: note = RuvC_P5
  REGION 211..255: note = Tnp_domain
  SITE 219: note = Tnp_P1
  SITE 249: note = Tnp_P2
MQVTTYGLDLAKRVMQLHWVNLETGEIHRKQLKRRALLEFFANRQPGIVAMEACGSAHYWGRELRKLGHEVRLIAAQFVRPFVKTNKNDAADAAAIWEAVQRPDMRFVAVKSEEQQSVLSLHRMREQLIKMRTMQVNQIRGLLYEFGADLPQGRQRGLKEVPDALADLEKSISPMLRDTVRQQLKRLEEMDKDIADIEKRLTLWKKGQEAVTRLMAIPGVGLLTATAIIATVGDMKSFRSGRSLRRFWGWFPARVGPVARSDYWGSANGGIPISEHC

SEQ ID NO: 16520 - protein, 263 aa, unidentified
  source 1..263: note = protein_e4f7ac7
  REGION 4..62: note = RuvC_domain
  SITE 7: note = RuvC_P1
  SITE 57: note = RuvC_P2
  REGION 199..263: note = Tnp_domain
  SITE 207: note = Tnp_P1
  SITE 237: note = Tnp_P2
  SITE 245: note = Tnp_P3
  SITE 246: note = Tnp_P4
  SITE 258: note = Tnp_P5
MLYVGIDIAKNKHDVTALNVPGKTVLKPLTFSNNKAGFELLDLSLRQLNQDCLIALKLLSDPNREQFQHDNRQVDLKILARHIHRLKKKQSDWKVQYTRCLDIIFPELDKIVGKHSEYTYQLLTRYPNPQKRIEAGFDKLIEIKRLTASKIQDILSVAPRSIGTTSPAREFEIIEIIKHYKRLIDKAETCVNDLMAEFNSVITTVTGIGGRLGAVILAEIRNIHAFDNPAQLQAFAGLDSSIYQSGQIDLAGRMIKRGSPHLR

SEQ ID NO: 16521 - protein, 323 aa, unidentified
  source 1..323: note = protein_f3f9d9e
  REGION 4..148: note = RuvC_domain
  SITE 7: note = RuvC_P1
  SITE 52: note = RuvC_P2
  SITE 92: note = RuvC_P3
  SITE 94: note = RuvC_P4
  SITE 97: note = RuvC_P5
  REGION 191..278: note = Tnp_domain
  SITE 199: note = Tnp_P1
  SITE 229: note = Tnp_P2
  SITE 237: note = Tnp_P3
  SITE 238: note = Tnp_P4
  SITE 251: note = Tnp_P5
MTYIGIDISKDSFVAAFPKVSGYQTRTYPNTIKGIKKFIGSLSVAEHQCVMEATGNYGFLLLYLLDRQGIATSMVNPKQIKHFSRMMMTVTKTDTKDACMIAMYGEKINPPLYKMPSETVMLLKQKKTIIRQLKKQLIAIKNLKGSLIVLPYQDRNGINVLDKTISFLASQIESLESELADLASSEFDKQIKLLTSIKGIGITLATALIIATGGFSYFDNAKQVSRFIGICPTYQQSGTSVHIKGGINRNGDANLRSLLYVASWSALRGNTACKECYTRLKANGKPSKVALIAVANKLVRQAFAVVKSGNSYMDGFVSTRLTK

SEQ ID NO: 16522 - protein, 338 aa, unidentified
  source 1..338: note = protein_181dc08
  REGION 6..148: note = RuvC_domain
  SITE 9: note = RuvC_P1
  SITE 52: note = RuvC_P2
  SITE 87: note = RuvC_P3
  SITE 89: note = RuvC_P4
  SITE 92: note = RuvC_P5
  REGION 211..298: note = Tnp_domain
  SITE 219: note = Tnp_P1
  SITE 249: note = Tnp_P2
  SITE 257: note = Tnp_P3
  SITE 258: note = Tnp_P4
  SITE 270: note = Tnp_P5
MCLTILGIDLAKNVFQLHGTDARGRAVFSRRVKRSQLLDAVASLPPCVIGMEACGSAHHWGRAFEQLGHTVKLMSPKYVRPYVKTNKNDGRDAEAICEAVSRPTMRFVSIKTVEQADRQALHRTRSLFVKHRTAVINQIRGLLAGYGLVIAQSPEKVRPAVVRFLDDAESGLTAFARDTFSELYEQLKDLDSRIERVTHRVERVYRAHPVCRKLAVVPGIGPLTATALLATVGQPEAFHNGRHLAAWLGLVPRQYSSGGKERLGGISKRGSRYVRTLLIHGARAVVQRAERRTDMQGRWRCALKRRKGTNVAAVALANKNARVIWALLAHDELYRPPA

SEQ ID NO: 16523 - protein, 405 aa, unidentified
  source 1..405: note = protein_bb94c95
  REGION 4..160: note = RuvC_domain
  SITE 7: note = RuvC_P1
  SITE 57: note = RuvC_P2
  SITE 97: note = RuvC_P3
  SITE 99: note = RuvC_P4
  SITE 102: note = RuvC_P5
  REGION 274..361: note = Tnp_domain
  SITE 282: note = Tnp_P1
  SITE 312: note = Tnp_P2
  SITE 320: note = Tnp_P3
  SITE 321: note = Tnp_P4
  SITE 334: note = Tnp_P5
MNAVGIDVSKGKSTVTIRRPGDIVLMPPCDIPHTQSAINGLINEIKALDGETKVCMEHTGRYYEPVATWLTNAGIFVSAVNPILIRDFGDDSLRTPKTDKADSKKIARYTLDRWTKLKQYGNMDKTRNQLKTMNRQFGFYMAQKTAMKNNLISILDQTYPGANDFFDSPARSDGSQKWVDFVHTYWHVECVRGKSLNAFTEHYQNWCRRKGYNFSAEKAAKVYCLSSDLIAVFPKDDNTKMLVRQAVAMLNVSSETVESLRQEMNKLASTLPEYPVVMAMNGVGTSLGPQLIAEIGDVTRFTHREALTAFAGVDPGKNDSGQHIQKSVRTSKKGSPSLRKALFQIMDSLIKRSPADDPVYAFMDKKRKQGKPYYVYMTAGANKFLRIYYGRVKEYLSSLPEAEEL

SEQ ID NO: 16524 - protein, 350 aa, unidentified
  source 1..350: note = protein_35554f0
  REGION 13..155: note = RuvC_domain
  SITE 16: note = RuvC_P1
  SITE 59: note = RuvC_P2
  SITE 94: note = RuvC_P3
  SITE 96: note = RuvC_P4
  SITE 99: note = RuvC_P5
  REGION 218..303: note = Tnp_domain
  SITE 226: note = Tnp_P1
  SITE 256: note = Tnp_P2
  SITE 264: note = Tnp_P3
  SITE 265: note = Tnp_P4
  SITE 277: note = Tnp_P5
MTIRNKPRDAAVFGIDLGKNLFHVCGLDAAGAPIQRATFRRDTLLQFFERATPTIVGMEACPGSQWLARKLQTMGHTVRIVPAKFVKPYVKSNKNDLIDAEAIAEAVSRPTMRFVEVRSPEQVDLQALHRVRDRLVAQRTRVICQMRAFCLEYGIAMHQGAGRFKADLPRVLADEENDLTPAMRRLLTRLSEDVRALEARIAEVTAEIEDIAAADDTTRRLMTIPGIGPLAATGLLAAAGKATQFRKARHMAAWLGLTPREHSTGGKTTLLGISKRGSSYLRRLFIHGARSCLLHLDRSRDRLGGWLDGLPKRMHNNKAVVALAAKMVRVAWVVITKPGAIYERRVQAPA

SEQ ID NO: 16525 - protein, 336 aa, unidentified
  source 1..336: note = protein_6f6c762
  REGION 6..147: note = RuvC_domain
  SITE 9: note = RuvC_P1
  SITE 52: note = RuvC_P2
  SITE 87: note = RuvC_P3
  SITE 89: note = RuvC_P4
  SITE 92: note = RuvC_P5
  REGION 211..298: note = Tnp_domain
  SITE 219: note = Tnp_P1
  SITE 249: note = Tnp_P2
  SITE 257: note = Tnp_P3
  SITE 258: note = Tnp_P4
  SITE 270: note = Tnp_P5
MEPTTIAIDLAKRVFQIHYVEPETGAIHSKVLKRAQLVPFFANRPASRVVMEACGSAHHWARVLARLGHDVRLIAAQFVRPFVKSNKNDAADAAAIWEAAQRPGMRFVAVKTEDQQAMLAMHRIRRQLVRIRVMQVNQLRGLLYEFGVVLPQGRRASIEAAKAALASLADQLPCMLADSLQDQFSRLRTLDEQIARIEQRILEWRRNDDACRRISEIPGVGVLTATAGVSVIGQAKTFRSGREFAAYLGLVPRQNSSGGKVKLGGISKRGDVYLRTLLIHGARSVIVSSRHLPERLRQMLSRRPTNVVAVALANKMARTIWALLAYGRTYEAAPSR

SEQ ID NO: 16526 - protein, 401 aa, unidentified
  source 1..401: note = protein_51a562f
  REGION 9..163: note = RuvC_domain
  SITE 12: note = RuvC_P1
  SITE 60: note = RuvC_P2
  SITE 100: note = RuvC_P3
  SITE 102: note = RuvC_P4
  SITE 105: note = RuvC_P5
  REGION 270..355: note = Tnp_domain
  SITE 278: note = Tnp_P1
  SITE 308: note = Tnp_P2
  SITE 316: note = Tnp_P3
  SITE 317: note = Tnp_P4
  SITE 329: note = Tnp_P5
MNSNFGVFLGLDVGKGEHHAVALDAGGKRLHDGPLPNSELKLRTLFDKLTVHGSLLVVVDQPATIGALPVAVARAAGHQVAYLPGLAMRRIADLYPGRAKTDARDAFIIADAARSLPHTLRQVDVGDYALAELDVLVGFDDDLAAEATRLSNRLRGLLTGIHPALERALGPRIAHPAVLEILSRCGGPAGLGKAGHRKLTAIATVYAPRMGHKLVDAIMAALDEQTVTVPGATAADTVLPRLANSLKAVSQQRKQVATEVEEILDAHPLAGVLTSMPGIGVRTSARILLEIGDASAFKTSAHLAAYAGIAPVTRSSGSSIKGEHPARTGNRRLKRAFFLAAFAALSDPTSRTYYDRKRAEGKKHNAALICLARRRCDVLHAMLRNKTHYRTTEPVPTPAAA

SEQ ID NO: 16527 - protein, 383 aa, unidentified
  source 1..383: note = protein_b8c7db2
  REGION 2..141: note = RuvC_domain
  SITE 39: note = RuvC_P2
  SITE 80: note = RuvC_P3
  SITE 82: note = RuvC_P4
  SITE 85: note = RuvC_P5
  REGION 248..334: note = Tnp_domain
  SITE 256: note = Tnp_P1
  SITE 286: note = Tnp_P2
  SITE 294: note = Tnp_P3
  SITE 295: note = Tnp_P4
  SITE 307: note = Tnp_P5
MIGNPLSFENNEVGFTRLLEWINGLKALKNYNKAIVGMEPTGHYWINLSKWLYEQNIDVVTVNPHLVKKNKENRDNTQSKSDKKDALVIADMVKNGYYAFIRPSSEPFEKLRVLMANRDVIVKRLVSSINQINRWVDVVFPELRQVFKDVKGKGSIATLRLFPTPMELRSMEAQDIVKGWKTVMKRHAGLKKAQLLIELAKHSVGSHQAHDAYKLHLEQLLEEFDLATAQLERVEKEVTGVLKQIPFARKLLAIKGISEITLAGILGEAGDLSGFAHGNSLLRHGGLHLAEASSGKWKGQIVISKRGRSRLRRFLYLATMSLVKNNPEFKELHSNNVKVKKMKKMKSIMKLIGKLARILVGIARRNESYCPEKVQPLTPSIAA

SEQ ID NO: 16528 - protein, 312 aa, unidentified
  source 1..312: note = protein_3515782
  REGION 6..176: note = RuvC_domain
  SITE 9: note = RuvC_P1
  SITE 53: note = RuvC_P2
  SITE 93: note = RuvC_P3
  SITE 95: note = RuvC_P4
  SITE 98: note = RuvC_P5
  REGION 189..273: note = Tnp_domain
  SITE 197: note = Tnp_P1
  SITE 226: note = Tnp_P2
  SITE 234: note = Tnp_P3
  SITE 235: note = Tnp_P4
  SITE 246: note = Tnp_P5
MSEITIGADISKDHIDLHRLPDGDRMRVTNDRKGFAAILGWIGDTPVARVVYEPTGAYHKPFERFMLTRGLPLSKVNPRQARRFAEATGKLAKTDRADAAMLAQFGMVLNPRLLSPYAVSFAELKELHAARLALVKDRTAAKNRAKNITQPLLKRQNLARLKQIEAQLVQVEQVMTDHIATDESLKVRFDILVSIPGLSRITAFTLLIEMPELGEIDEKAAGKLSGLAPNDRQSGGWTGRAFIAGGRAIVRQALYMPALVAIRFNPDLKAKYDALRTAGKPPKVAITAIMRKLVVLANALLRKQQIWTPKPA

SEQ ID NO: 16529 - protein, 299 aa, unidentified
  source 1..299: note = protein_cb2c168
  REGION 6..147: note = RuvC_domain
  SITE 9: note = RuvC_P1
  SITE 52: note = RuvC_P2
  SITE 87: note = RuvC_P3
  SITE 89: note = RuvC_P4
  SITE 92: note = RuvC_P5
  REGION 211..294: note = Tnp_domain
  SITE 219: note = Tnp_P1
  SITE 249: note = Tnp_P2
  SITE 257: note = Tnp_P3
  SITE 258: note = Tnp_P4
  SITE 270: note = Tnp_P5
MSIAILGIDLGKNSCSVVGVDAAGAVVVRRTMRRQTLIDYVVKLPACVVAMEACCGAHHLGRLFAEQGHQIRLMSPEYVRPYIKAQKNDDRDAEGIAEAASRPTMRFVELKSQKQLDIQTLHRVRSRLVAERTTLLNQMRAILLERGVIFPAGRRRFELELDSMLSEGSETLSQRMLQLIKGLRSEWKELDAKIGTLNEEFTRLARDDAATRRLTSIPGIGVLNATALVAAVGNASSFAKARDLGSWLGLVPRQYSTGGKPRLLGISKRGNTYLRTLLIHGARAALPSLSKSDTPLGDG

SEQ ID NO: 16530 - protein, 344 aa, unidentified
  source 1..344: note = protein_3baec39
  REGION 7..149: note = RuvC_domain
  SITE 10: note = RuvC_P1
  SITE 53: note = RuvC_P2
  SITE 88: note = RuvC_P3
  SITE 90: note = RuvC_P4
  SITE 93: note = RuvC_P5
  REGION 212..297: note = Tnp_domain
  SITE 220: note = Tnp_P1
  SITE 250: note = Tnp_P2
  SITE 258: note = Tnp_P3
  SITE 259: note = Tnp_P4
  SITE 271: note = Tnp_P5
MKEVITIGLDLAKNVFQVHGVDGSGDTVMRRQLRRSQLLPFFKKQRPCLVGMEACATSHHWARQLIELGHGVKLMPARYVKPYVKRNKNDAADAEAICEAVTRPTMRFVAVKSAQQQSVLMLHRTRELLVRQRTMLVNAIRSHMAEFGIVAPVGVPRVKELFAVIADADDDRLPAIARACLEGLANQFLSLHEEIATAERRIHAWHRSNEASRRLETIPGIGPITATALAATITDPSVFTSGRELAAWIGLVPRQSSTGGKERLGRISKQGDQYLRWLLVAGAMSVIRQAKRRGTTSLPWLANLITNKPTKVAAVALANKMARIAWAVLRQGGTYQKPATAAAA

SEQ ID NO: 16531 - protein, 399 aa, unidentified
  source 1..399: note = protein_f74f041
  REGION 12..166: note = RuvC_domain
  SITE 15: note = RuvC_P1
  SITE 63: note = RuvC_P2
  SITE 103: note = RuvC_P3
  SITE 105: note = RuvC_P4
  SITE 108: note = RuvC_P5
  REGION 273..357: note = Tnp_domain
  SITE 281: note = Tnp_P1
  SITE 310: note = Tnp_P2
  SITE 318: note = Tnp_P3
  SITE 319: note = Tnp_P4
  SITE 331: note = Tnp_P5
MIKNHDEVDIFIGVDVGKSNHHAVAIDRAGKRILDRALPQDEAKIRAIIKAVADKGTVLLVVDQPSTIGALPVAVARAEGILVGYIPGLAMRRIADLHPGEAKTDARDAAIIAEAARSLPHTLRSIVFADEQAAELSMLCGFDDDLAKQATATSNRIRGLLTQIHPALERVIGEHLDHPAMAELLIKYPSPEKLRKAGQARVTTLLAKHAPRAGKRWAADIITALGEQTVVVSGTGAAGIVLAQLAPMLKQLRTARDELLTQVEALVEAHPLDQVLTSMPAVGVRTAARIITEVAGKEFQSSGHLASYAGLAPVTWRSGTSIRGDHPSRKGNKTLKRAFFLSAFAALKDPLSRAYYDRKRAEGKKHNQALIALARRRCDVLFAMLRDGTLYDAPTPKTT

SEQ ID NO: 16532 - protein, 401 aa, unidentified
  source 1..401: note = protein_e9c475e
  REGION 7..172: note = RuvC_domain
  SITE 10: note = RuvC_P1
  SITE 63: note = RuvC_P2
  SITE 103: note = RuvC_P3
  SITE 105: note = RuvC_P4
  SITE 108: note = RuvC_P5
  REGION 272..357: note = Tnp_domain
  SITE 280: note = Tnp_P1
  SITE 310: note = Tnp_P2
  SITE 318: note = Tnp_P3
  SITE 319: note = Tnp_P4
  SITE 330: note = Tnp_P5
MDPHLCVGVDVGYRSHRVGIAHPNGSILEEFDISHTDAGFNEFFRRVEERRHQLSLPVAVAMEGFNGYARPLDRLVQEKGYRLYNVNNLKLARYKEVFPGAAKTDPIDTRKILELFRLKDQLPLAKDAIQEVVIAPAVNEKLKRLSRRRRHLVIEKMRVLNRMQADLQAVCPELLAATHDADNLWFLRFITFRDDLRQLARLRRATVLQIPGVGRKYAGIIHDWQRRAVFSSEVEYVGPMIIQDAKRILELRKQIDVLDNALAELSEQSEIARRLSSIPGFGKTTIVELAGEIGTLDRFSGEASLALYLGMCPLTHQSGEVSRARIPRQVNTRCKAAMMTAVARHIGCVPQSKTYYDRKRTQGKTHNQAIRALGRHMVRVIWAILRDGRDYTIREDSHPAT

SEQ ID NO: 16533 - protein, 365 aa, unidentified
  source 1..365: note = protein_6459037
  REGION 22..165: note = RuvC_domain
  SITE 25: note = RuvC_P1
  SITE 70: note = RuvC_P2
  SITE 105: note = RuvC_P3
  SITE 107: note = RuvC_P4
  SITE 110: note = RuvC_P5
  REGION 229..315: note = Tnp_domain
  SITE 237: note = Tnp_P1
  SITE 267: note = Tnp_P2
  SITE 275: note = Tnp_P3
  SITE 276: note = Tnp_P4
  SITE 288: note = Tnp_P5
MKQRTTKHSVQPLSEVPGCKTVAVDLAKRVFQVAGEDALGQVVYEQRIKSRDTFQAFLQQLPEGVTVLVETGPGAQAWARQVQQRGNAVRILPAQHVGKHRSGPKNDRNDALAILRAGHDRRIASVPVKNVAALAMQALHRARQGYIRRRTALSNQMRGLLLEQGIALAKGDVAINRRIPEILEDASQPIPDPLRELIDELLAEWRQLGERISVLSGRLEAQARADQTAQRLMSVRGVGPIIATALLAKQTQPERFANARQFAAYFGLVPEQHSSGEKVRLGKMGKRGDGYIRSLAIQGAQAVLQQLRPDSEQPDDRRLLRWQQRLGRKGAAVRLANRQPCASSGCCCRTSKPITVSPPAVRRRP

SEQ ID NO: 16534 - protein, 400 aa, unidentified
  source 1..400: note = protein_7080f4a
  REGION 4..161: note = RuvC_domain
  SITE 7: note = RuvC_P1
  SITE 57: note = RuvC_P2
  SITE 98: note = RuvC_P3
  SITE 100: note = RuvC_P4
  SITE 103: note = RuvC_P5
  REGION 276..364: note = Tnp_domain
  SITE 284: note = Tnp_P1
  SITE 314: note = Tnp_P2
  SITE 322: note = Tnp_P3
  SITE 323: note = Tnp_P4
  SITE 336: note = Tnp_P5
MISVGIDVSKEKSTVCILKPYGEIMCSPFEMLHGEKELNALDDLLNKLDGEIRIVMEATGIYHLPILTFFHEKGYFVSVINPFAMKKYAKDSSIRGAKTDKLDSIMIANYGIEKWFKLQRYKGDEEIYAELKLLGRRYRHYMELHVKALQELTHILDYVMPGIKKMFNSWNEANGKDKLSDFVEQFWHFDLITAMSLEKFTEEYLDWAKEKKYHRSRSKAEAVYELASNGISTLSSGTPSTKMLVQEAISVLRTVDSSLFLILTRMQELAKTLPEYSTVREMGGVGDVLAVKLIAEIGDIRRLHSAKALIAWAGIDPPPYESGQFIGSKRKITKRGSSTLRKVGYEVMRVLKSHPAPKDDAVYNYILKKESEGKSKKHAKIAGLNKFLRIYYARVMAIYQ

SEQ ID NO: 16535 - protein, 368 aa, unidentified
  source 1..368: note = protein_7815827
  REGION 28..176: note = RuvC_domain
  SITE 31: note = RuvC_P1
  SITE 80: note = RuvC_P2
  SITE 116: note = RuvC_P3
  SITE 118: note = RuvC_P4
  SITE 121: note = RuvC_P5
  REGION 244..331: note = Tnp_domain
  SITE 252: note = Tnp_P1
  SITE 283: note = Tnp_P2
  SITE 291: note = Tnp_P3
  SITE 292: note = Tnp_P4
  SITE 303: note = Tnp_P5
MPSTTRICRAGGTAIPTIAHTQPARLTVGVDTHKDVHVACAKDQLGRRLATTLVATTSAGYAELLGWAGTLGQVEAFGIEGTGCYGAELARFLRSRGQRVVEVNRPDRAARRRHGKSDPVDAEAAARAVQAGEATGLPKAGDGAVEMLRVLRVARQTAMRARTQTINALKALVVTAPDPLRRQLRDLPTRQLVATTAAFQPDTPATPTMATMVALGALARRYQALDGEITMLSKQLHRLVGLAAPALLAVFGVGPETASALLITAGDNPQRLHSDAAFAALCGASPVEVSSGKTVRHRLNRGGDRQANNALWRIVLVRLRAGHPPTVAYLQRRTAQGKSKREVIRCLKRYVAREIFAVLQTMAVQAAA

SEQ ID NO: 16536 - protein, 342 aa, unidentified
  source 1..342: note = protein_01fcdbf
  REGION 6..148: note = RuvC_domain
  SITE 9: note = RuvC_P1
  SITE 52: note = RuvC_P2
  SITE 87: note = RuvC_P3
  SITE 89: note = RuvC_P4
  SITE 92: note = RuvC_P5
  REGION 211..298: note = Tnp_domain
  SITE 219: note = Tnp_P1
  SITE 249: note = Tnp_P2
  SITE 257: note = Tnp_P3
  SITE 258: note = Tnp_P4
  SITE 270: note = Tnp_P5
MKITTIGIDLAKNVLQVHGIDEAGKAVVKKALKRDQVLSYFVRLAPCLIGMEACGSAHYWARKLGAMGHSVKLMAPQFVKPYVKSNKNDAADAEAICEAVSRPNMRFVPIKTGEQQAALSLHRARQGFVTARTAQANQIRGLLAEYGIIIPQGISHIAQRLPDILEDGENQLPGTFRQLLQRLGDHLKELGRQAGELEMLIQSEHRENELSRKLADIPGIGPITASALVASIGDARHFENGRQLAAWIGLVPKQHSSGGKATLLGISKRGDTYLRTLLIHGARSVIRVTENKVNQTDRWLQGVVQRRNKNIAAVALANKNARIVWALLVHDRRYQADYRLAA

SEQ ID NO: 16537 - protein, 313 aa, unidentified
  source 1..313: note = protein_70f090c
  REGION 1..76: note = RuvC_domain
  SITE 13: note = RuvC_P3
  SITE 15: note = RuvC_P4
  SITE 18: note = RuvC_P5
  REGION 183..267: note = Tnp_domain
  SITE 191: note = Tnp_P1
  SITE 220: note = Tnp_P2
  SITE 228: note = Tnp_P3
  SITE 229: note = Tnp_P4
  SITE 241: note = Tnp_P5
MRRIADLHPGQAKTDARDAAIIAEAARSMPHTLRSVELDDESLAGLGVLCGFDDDLAAQITATSNRIRGLLTQIHPALERALGPHLDHPAVADLITRYPTPQALKTAGRGHVRARLKKHAPRAADRLTEAIFNALGEQTVVVVGTGAAGIVLPKLAEQLLALRRQRDEIASQVEALVEAHPLYEVLTSMPGIGVRTCARILTEVTGKHFASAAHLASYAGIAPVTRRSGTSIRGEHPSRRGNKKLKRALFLSAFAALHHPPSRAYYDRKRAEGKRHNQAIIALARRRSDALFAMLRDGTLYEDPALKNLPSAA

SEQ ID NO: 16538 - protein, 377 aa, unidentified
  source 1..377: note = protein_8acdb4e
  REGION 18..166: note = RuvC_domain
  SITE 21: note = RuvC_P1
  SITE 70: note = RuvC_P2
  SITE 106: note = RuvC_P3
  SITE 108: note = RuvC_P4
  SITE 111: note = RuvC_P5
  REGION 252..339: note = Tnp_domain
  SITE 260: note = Tnp_P1
  SITE 291: note = Tnp_P2
  SITE 299: note = Tnp_P3
  SITE 300: note = Tnp_P4
  SITE 312: note = Tnp_P5
MTIVADPPAPVDTLEVTLGIDTHADTHVAAVIDPLGRHLGHATFETTLSGFKALLAWAAGFGTIALAGVEGTGAYGAGLTRFLTTETVPVVEVDRPDRKTRRDQGKSDPIDAYAAARAAASGRASGTPKARTGDVESVRALRVARNSAVKARATALTQLKSLIVTAPDTLRAQLVDLDGAELVTTCARLRPARSPNPTPPPSTKRAPRPGPLADPTAATKRSLASIATRIKTLSTEITELDDDLDALITPLAPNLLGLLGVGLDVAGQLLVTAGDNPDRIHNESAFAHLCGVAPIPATSGKTVNRHRLNRGGDRAANAALYRIAICRLRWDPDTRAYVERRTKEGLSKKDIIRCLKRFIAREVLAAIRTDLNPRNPA

SEQ ID NO: 16539 - protein, 310 aa, unidentified
  source 1..310: note = protein_e5b5d24
  REGION 5..149: note = RuvC_domain
  SITE 8: note = RuvC_P1
  SITE 52: note = RuvC_P2
  SITE 92: note = RuvC_P3
  SITE 94: note = RuvC_P4
  SITE 97: note = RuvC_P5
  REGION 184..269: note = Tnp_domain
  SITE 192: note = Tnp_P1
  SITE 221: note = Tnp_P2
  SITE 229: note = Tnp_P3
  SITE 230: note = Tnp_P4
  SITE 241: note = Tnp_P5
MNIFAGIDVGKSTLDLGLQPSGRCERFPNTPQGHRALLHALAPLKVEHIALEATGGYERGILDALVQAGYCVTRLASHRATAYARALGFFAKSDAMDAQVLARMAATVPRRPYETPPPERAELAELLRCRLQLIGQRDDNRRRLKQTQLPPARRALQAMIDAAKDQIVDLDRRIAASATHVDPTSRLREIPGVGPVTEATLLAYLPELGQLSRQQIAALVGVAPYVDQSGRRDGPRRVRAGRWIVRRALYMATCAAIRVKDGAIAERYRALRARGKLAKVAIVACMRHLITAINAMVRDRAGWRCDVAAS

SEQ ID NO: 16540 - protein, 419 aa, unidentified
  source 1..419: note = protein_4b482bb
  REGION 4..162: note = RuvC_domain
  SITE 7: note = RuvC_P1
  SITE 60: note = RuvC_P2
  SITE 101: note = RuvC_P3
  SITE 103: note = RuvC_P4
  SITE 106: note = RuvC_P5
  REGION 268..355: note = Tnp_domain
  SITE 276: note = Tnp_P1
  SITE 306: note = Tnp_P2
  SITE 314: note = Tnp_P3
  SITE 315: note = Tnp_P4
  SITE 328: note = Tnp_P5
MIYAGVDVAKADHVIGAVDERGSEICGPMGFKNSAAGFERCEAWLEGVAETPVDALVGMEATGHYWMALYAFLVSRGYEVVVIDPAQVRAVRRLKGLDRVKNDRVDAGLIAETLRIGQYDPTRLATDEVQSLRSLTRYRQSLKAELAEVKTQCICLLDSYFPEYASAWSDVFGAASRAVLSRSPLPSELARRRADSLQRDISEAARGSRRMDGKAAELKALAKGSVGIRLGEAAASMQVRSLVRQMDFLDAECARFDALIRELLERVEPLVLTIPGVSYATGAQIVAEIGDVGRFRNAPALVSYAGLNSGVNQSGKFDSGGGPITKHGSPYLRRALWLAANRARQYDPSLRAFYERKRAEGKCHRVAVTAVARKLCHIVFAVMRDGAPYDPARPGRDPSKHSVSGSQGAGSDKCRDGKS

SEQ ID NO: 16541 - protein, 360 aa, unidentified
  source 1..360: note = protein_b9b22dc
  REGION 7..152: note = RuvC_domain
  SITE 10: note = RuvC_P1
  SITE 54: note = RuvC_P2
  SITE 92: note = RuvC_P3
  SITE 94: note = RuvC_P4
  SITE 97: note = RuvC_P5
  REGION 216..303: note = Tnp_domain
  SITE 224: note = Tnp_P1
  SITE 254: note = Tnp_P2
  SITE 262: note = Tnp_P3
  SITE 263: note = Tnp_P4
  SITE 275: note = Tnp_P5
MGEITRVGVDLAKRVIQVHAVDATGRVVVAKQLQRDGFTAWCAQLPPGCLVAMEACSGSHHWGRRLRAMGMEVRLLAPHFVSPYRLSGKTGKNDAADAAAICEAASRPTMRFVPVKSVEQQSMMALHRLREGYKEERTACINRIRGLLAEFGLVFAQRPEVLRAVLSEVVEDAGNELGAVARMALQRAHLHWIELECHIAWCDERIALHVRNDEQAKAAAQLCGIGPVTASALVATVDDFKQFKNGRQFSAWMGLVPRQNSSGGKAVLGEITKRGDEYLRTLLIQGAKSAVFTAHRRSDRLSRWIVQLRDRVGWQKAAVALANKHARILWSILVNGQGFDPEHVPTKHLMRAPAALPAAG

SEQ ID NO: 16542 - protein, 339 aa, unidentified
  source 1..339: note = protein_753e1a3
  REGION 7..149: note = RuvC_domain
  SITE 10: note = RuvC_P1
  SITE 53: note = RuvC_P2
  SITE 88: note = RuvC_P3
  SITE 90: note = RuvC_P4
  SITE 93: note = RuvC_P5
  REGION 211..298: note = Tnp_domain
  SITE 219: note = Tnp_P1
  SITE 249: note = Tnp_P2
  SITE 257: note = Tnp_P3
  SITE 258: note = Tnp_P4
  SITE 270: note = Tnp_P5
MEKVTTVGLDLAKSVFQVHGVNAAGGVVVRRKLRRSALLDFFAALPPTLVGMEACGGAHYWARELTRLGHTVRLMPPAYVKPYVKRGKTDAADAEAICEAVTRPTMRFVPVKTEAQQASLVELKVRDMLVRQRTQTINALRSHLAEYGIVAAQGRKVAELIAVVRDGDDARLPHLAREALGELVAQIEALEERIERLDRRMVRHAREDETARRLASIPGVRAVGATALVAMVPNPHGFASARHFAASLGLTPQPHSSGGKERLGRISRQRNAMLRRLLVLGATSRLRYARRNPEAADWATRLLARRPFKVVAVALANKMARIAWALLARGGTYTTTATA

SEQ ID NO: 16543 - protein, 352 aa, unidentified
  source 1..352: note = protein_3374b86
  REGION 12..153: note = RuvC_domain
  SITE 15: note = RuvC_P1
  SITE 58: note = RuvC_P2
  SITE 93: note = RuvC_P3
  SITE 95: note = RuvC_P4
  SITE 98: note = RuvC_P5
  REGION 217..302: note = Tnp_domain
  SITE 225: note = Tnp_P1
  SITE 255: note = Tnp_P2
  SITE 263: note = Tnp_P3
  SITE 264: note = Tnp_P4
  SITE 276: note = Tnp_P5
MSQQLNATIAVIGIDIGKNSFHFVGLDARGSIVLRQKWSRGQVEARLANLPPCLIGMEACVGAHHLSRKLKAFGHDARLMPAKYVRPYSKGQKNDFRDAEAIAEAVQRPTMKFVATKTADQLDLQALHRVRERLVSQRTGIINQIRAFLLERGIAVRQGLRFLRAELPRILATPSTVLSPRMARIIEGLSEDWRRLDERIDHLSSEIAAVARQDAGCERLMSVPGIGPIISSAMVAAIGTGDVFSKGRDFAAWLGLVPKQISTGDRTILGKISKRGNRYLRVLFVQAAWVVLIKPKTWERHGLKPWIEAAKKRLHRNVLAALANKLARIAWSVLAHGRNFEARKIDEVAEPV

SEQ ID NO: 16544 - protein, 406 aa, unidentified
  source 1..406: note = protein_e9db980
  REGION 6..164: note = RuvC_domain
  SITE 9: note = RuvC_P1
  SITE 59: note = RuvC_P2
  SITE 101: note = RuvC_P3
  SITE 103: note = RuvC_P4
  SITE 106: note = RuvC_P5
  REGION 278..364: note = Tnp_domain
  SITE 286: note = Tnp_P1
  SITE 316: note = Tnp_P2
  SITE 324: note = Tnp_P3
  SITE 325: note = Tnp_P4
  SITE 338: note = Tnp_P5
MNMNAVGIDVSKRKSTVAILRPGGKAVGKPFDVPHLSADFQSLIKRIRELDGETRIVMECTGRYYEPVARELSQAGFFVSAVNPQIIRNFQGQDNPLRKVKTDKADSVKIARYTLDSWANLKQYSLMDELRSQLKTMNRQFDFYMKHKTAMKNNLIGLTDQTYPGANAYFDSPAREDGSQKWVDFIDTYWHVDCVRKLSLTAFINHYQKWCSRKKYNFSKSKAEEIYGKAKELIPVLPKDSFTKHIIKQAVGQLNVSSQTVEQLRSLMNETASKLPEYPAVMAMKGVGPSLGPQLMAEIGDVTRFTHKGAITAFAGVDPGVNDSGDYSQKSVHASKHGSPALRKTLFQIMDVLIKTKPDDAVYLFMDKKRAQGKPYYVYMTAGANKFLRIYYGRVKEYLAALPTSN

SEQ ID NO: 16545 - protein, 403 aa, unidentified
  source 1..403: note = protein_c95f2de
  REGION 4..160: note = RuvC_domain
  SITE 7: note = RuvC_P1
  SITE 57: note = RuvC_P2
  SITE 97: note = RuvC_P3
  SITE 99: note = RuvC_P4
  SITE 102: note = RuvC_P5
  REGION 275..361: note = Tnp_domain
  SITE 282: note = Tnp_P1
  SITE 312: note = Tnp_P2
  SITE 320: note = Tnp_P3
  SITE 321: note = Tnp_P4
  SITE 334: note = Tnp_P5
MNSVGIDISKGRSTIAVMRPFGEVVISPFEVRHTGSELSKLAKQLKSLDGETRVVMEATGNYHASVAKLLHNAGLYVSVINAKLVHGYGNNELRRVKTDRKDAVKLANYGLDRWLTLPRYIPEEDTRLLLKNCYRQYRQYSKVQTVLKNNLISLLDTVFPNANRLFSSPIRGDGSEKWVDFVAEFWHCRCASEKSERAFTSKYLRWCRKHGYNFREAKAHTIYAEASGHIGVMPKSETTKLLVKQAVSQLRATSTALAALKQEMQSLASVLPEYPVVMDLFDVGPTLGPQLIAEIGDVRRFYSKKALVAYAGLDAPPNDSGDVTGRHKSMSKIGASSLRRTLFLVMSVYLQNAPLDEPVYQFMDKKRAEGKPYRVYMMASANKFLRIYYATVKAYLESLEHTA

SEQ ID NO: 16546 - protein, 341 aa, unidentified
  source 1..341: note = protein_9de3743
  REGION 6..160: note = RuvC_domain
  SITE 9: note = RuvC_P1
  SITE 67: note = RuvC_P2
  SITE 105: note = RuvC_P3
  SITE 107: note = RuvC_P4
  SITE 110: note = RuvC_P5
  REGION 211..299: note = Tnp_domain
  SITE 219: note = Tnp_P1
  SITE 250: note = Tnp_P2
  SITE 258: note = Tnp_P3
  SITE 259: note = Tnp_P4
  SITE 272: note = Tnp_P5
MKNLFIGIDFSKEKLDVAVITAVGLSETAQRECYEFKNSVSGFRQLVKWVERNSNGIATSSWLFSGENTGDYSKPLCNFLYGKGYDIWLENAKSIKDASGIRRLKSDRADALMIAEYAMRNYDKAFMYEPLSASLSQLRELFLYRQMVIRHRCSFQVRRGEKRLAMEKSPVKTIISQSGRHIVSELNKEIEKIDKRIAELIDSEEELKEIYHIVTSVPGIGCQNAVCLMVYTDNFRRFNYDARKIACYYGIAPFGKNSGASVHTDPHVHYLANRQIKAMLTQAALAAINHNPVLSQYYLRLVERGKKKQVAMNNVKNKLIHLVTAMVRNRQVFSPEYKISA

SEQ ID NO: 16547 - protein, 307 aa, unidentified
  source 1..307: note = protein_4068d91
  REGION 2..112: note = RuvC_domain
  SITE 16: note = RuvC_P2
  SITE 51: note = RuvC_P3
  SITE 53: note = RuvC_P4
  SITE 56: note = RuvC_P5
  REGION 175..262: note = Tnp_domain
  SITE 183: note = Tnp_P1
  SITE 213: note = Tnp_P2
  SITE 221: note = Tnp_P3
  SITE 222: note = Tnp_P4
  SITE 234: note = Tnp_P5
MAGFFANLPACLVGMEASNGAHYWARVLTELGHQVRLISPQFVTPYVKSNKNDQNDAEAICEAVGRPSMRFVPPKSTDQLAVQAVHRIRRRLVADRVRLVNQIRGLLSEHGIVIARDIAQLRRGLAVIVGNINDGLSEMLRTLMRELQEELSELDNRIAAYDRRIREIFRTSEQCQRLGKIEGIGPVTATALIAAVGDRSCFKNGRQFAAWLGLVPKQRSSGGRARLFGISKRGDRYLRTLMIHGARAALSRATGKQDPRSLWLGKLRQRRHPNVAAVALANKNARIVWAMLTGDAAYEPALSVKAA

SEQ ID NO: 16548 - protein, 349 aa, unidentified
  source 1..349: note = protein_614617f
  REGION 16..158: note = RuvC_domain
  SITE 19: note = RuvC_P1
  SITE 62: note = RuvC_P2
  SITE 97: note = RuvC_P3
  SITE 99: note = RuvC_P4
  SITE 102: note = RuvC_P5
  REGION 221..309: note = Tnp_domain
  SITE 229: note = Tnp_P1
  SITE 259: note = Tnp_P2
  SITE 267: note = Tnp_P3
  SITE 268: note = Tnp_P4
  SITE 280: note = Tnp_P5
MKENNATNEAREIKVLGIDLAKQSFQLHGVDGQGRVVLTKKLGRNQLSAFIANLPPCLIGLEACGGAHYWVRQFTQLGHCVRMIAPQFVKPYVKSNKNDAVDAEAICEAVQRPAMRFVPTKSLSQQDLRSLHRIRSQLVARRTAQANQVRGLLLEYGIVIPKGISYVRKAIPSILEDAENVLSALFRELLSELYDELVHLDKRIHALEQRLVTLSAGHDDCQFLLTIPGVGLLTATALVAAIGDVSVFKNGRELAAWLGLVPKQRSTGGKQTLLGISKRGDSYLRTLLIHGGRSVVRVAHKHPDKRNRWIGDIKQRRGENISNVAVANKNARIAWALLTRKENYQAKQA

SEQ ID NO: 16549 - protein, 308 aa, unidentified
  source 1..308: note = protein_9d034ca
  REGION 8..150: note = RuvC_domain
  SITE 50: note = RuvC_P2
  SITE 90: note = RuvC_P3
  SITE 92: note = RuvC_P4
  SITE 95: note = RuvC_P5
  REGION 182..266: note = Tnp_domain
  SITE 190: note = Tnp_P1
  SITE 219: note = Tnp_P2
  SITE 227: note = Tnp_P3
  SITE 228: note = Tnp_P4
  SITE 240: note = Tnp_P5
MEHSLPIGADISKGWIDIWSGNEHIRIDNTQRAILKFLRKLPEGTVVAMEATNDYHMRLADLAYEKGLRVYVINPRVTRHYMEALGLRGSTDPLAARAIASFIEHHQADQRPYVPADPQTKRARTLLRRRAKLVESRVQLQQSVAEVPEISRDVRAVIQKLEAAVRKIDGIVEELLGGNELRERLQTIVGVGPVTSAVITTELEANEFATSDAFVAFCGLDPRPRDSGKHKGKRVVSKRGSRSLRSAFFLAAFSASSSKLWRPYYESLVARGLAKIQALIVLARKLARIAWSIQRHNTIFDPARVPTG

SEQ ID NO: 16550 - protein, 323 aa, unidentified
  source 1..323: note = protein_117bf5b
  REGION 8..150: note = RuvC_domain
  SITE 11: note = RuvC_P1
  SITE 52: note = RuvC_P2
  SITE 92: note = RuvC_P3
  SITE 94: note = RuvC_P4
  SITE 97: note = RuvC_P5
  REGION 191..278: note = Tnp_domain
  SITE 199: note = Tnp_P1
  SITE 229: note = Tnp_P2
  SITE 237: note = Tnp_P3
  SITE 238: note = Tnp_P4
  SITE 251: note = Tnp_P5
MNKDIKYFGIDISHLVFDVTDSDGSYYQFKNNVTGFKKFLKHLDINSHCVMEATGYYHYQLAYYLQENSIKVSVENPLAVKRFIQMKLSKIKTDKSDSKLICAYAKQVGLKLWQGNSKHQLECLQMIRLLSVYTKQSTMLKNKLHGESVLGNPSKAVVSSLNRSLKQVKKELDRLEEKLLVLVKQVHQDVLTRIKSIPGIGSKTAVMLVVLTDGFDRFKSGSELCSYAGLTPVIRQSGSSVNGRPRISKIGNQKLRNLLFMCSFNACKYNKACREIYERIVAKGKSKKLALIAVCNKLLKQAFAIAKSGLNYDDTYRSTLVKN

SEQ ID NO: 16551 - protein, 343 aa, unidentified
  source 1..343: note = protein_ec98cbb
  REGION 7..149: note = RuvC_domain
  SITE 10: note = RuvC_P1
  SITE 53: note = RuvC_P2
  SITE 88: note = RuvC_P3
  SITE 90: note = RuvC_P4
  SITE 93: note = RuvC_P5
  REGION 211..295: note = Tnp_domain
  SITE 219: note = Tnp_P1
  SITE 249: note = Tnp_P2
  SITE 257: note = Tnp_P3
  SITE 258: note = Tnp_P4
  SITE 270: note = Tnp_P5
MTKDTMIGVDLAKSVFQLHGASMTGDVRFKKKLSRDGFLKFMTGKAPAVVVMEACGSAHYWAREMVRLGHEVRLIAPQYVKPFLKRQKNDAADAEAIVIAAQRPEMRFVEPKSPEQQSRGILFRARERLVHQRTELVNAVRACLYEYGHVVPQGIHQINRIEEILNEPNSDLPDLMREECQDLLKQIAEKTARIDARTHKIKALAEETDVARRLQTIPGVGPLTALAVEAFAPPMESFECGRDFSAWLGLVPRQFSSGGKERLGKISKAGQSDIRRLLIIGAMSRLNWLGRKSVPEGSWLARMMARKPRMLVAIALANKMARTIWALLTKNEEYRVPAQVAAS

SEQ ID NO: 16552 - protein, 313 aa, unidentified
  source 1..313: note = protein_5ab1693
  REGION 6..148: note = RuvC_domain
  SITE 9: note = RuvC_P1
  SITE 53: note = RuvC_P2
  SITE 93: note = RuvC_P3
  SITE 95: note = RuvC_P4
  SITE 98: note = RuvC_P5
  REGION 189..273: note = Tnp_domain
  SITE 197: note = Tnp_P1
  SITE 226: note = Tnp_P2
  SITE 234: note = Tnp_P3
  SITE 235: note = Tnp_P4
  SITE 246: note = Tnp_P5
MAKIICGVDVSSFSLEAGIGRSGPNRSFANTAEGVTEFIAFCRQHHVEMLAMEASGGYEKQPFALLWAQGWPVALLNPRAVRRFAEGRGLLEKTDRIDAGIIAWFVAVKGSVPSVPASAEQERLKALVTRLRQLTELQAAQRNQRLLVSAATVQCSFSEVLAVVAAQMRILQAAIAALIAADPLWQKLDQAFRSIKGVADRTVARLMAEVPEIGMASNKAVSKLVGLAPLARASGKHQGKRVVRGGRRNVRAILYVVAAVVRRHDADFAAFHQRLTAAGKPKKVIRIALAHKLLVRLNAKAREVRSEFAMLTS

SEQ ID NO: 16553 - protein, 405 aa, unidentified
  source 1..405: note = protein_202c74b
  REGION 4..160: note = RuvC_domain
  SITE 7: note = RuvC_P1
  SITE 57: note = RuvC_P2
  SITE 97: note = RuvC_P3
  SITE 99: note = RuvC_P4
  SITE 102: note = RuvC_P5
  REGION 274..361: note = Tnp_domain
  SITE 282: note = Tnp_P1
  SITE 312: note = Tnp_P2
  SITE 320: note = Tnp_P3
  SITE 321: note = Tnp_P4
  SITE 334: note = Tnp_P5
MNAVGIDISRGKSTVAVLRPFGEVVMLPFEVKHNNAELLALAEQLKSIDGETRVVMEHTGRYYEPVANALHNSGLFVSSVNPLLIKEYGGNSLRKVKTDKADAQKIARYTLDNWAELRDYTPMDTVRYDLKTLNRQFNLASKQKTASANNLIALLEQTFPGIRKCFNSPVRNDGSQKWVDFVITFWHADCVRKYSKEAFAERYRKWCKRHRYLVRSNTVQEVYTLAQNAVVLVPKSQTAKVIIVEAAKQLTAISRSVELYRSEMNRLAEMLPEYPVVMQMFGVGSTFGPQLIAEIGDVRRFARKQSLVAFAGIDPAPNDSGDKYGRNSGTTKRGSPYLRKTLFNIMKCYLQNAPEDEPVYQFIDKKRSEGKPYFVYMTAAANKFLRRYYAKANEYLASSENTISE

SEQ ID NO: 16554 - protein, 343 aa, unidentified
  source 1..343: note = protein_9c65090
  REGION 6..147: note = RuvC_domain
  SITE 9: note = RuvC_P1
  SITE 52: note = RuvC_P2
  SITE 87: note = RuvC_P3
  SITE 89: note = RuvC_P4
  SITE 92: note = RuvC_P5
  REGION 211..295: note = Tnp_domain
  SITE 219: note = Tnp_P1
  SITE 249: note = Tnp_P2
  SITE 257: note = Tnp_P3
  SITE 258: note = Tnp_P4
  SITE 270: note = Tnp_P5
MQIRSVGIDLGKTTFHLVALGASGKVLVKKRFTQKQLLAFTANMQTSLIGLEACSGAHFLGRALKQQGHDVRLIAAQFVKPFVKSNKNDFVDAEAIAEAVERKNMRFVPIKTDDQLDLQAIHRVRDRLVSRRTAVINQIRAFLLERGMVFAQKPAKLKAAMPDVLENAENDLTPMMRTLMDKLWAEWKLVEEQLKELGDELERISAADAGCTRIRQIPGIGPVVATAIVAAIGNGAAFRKGREFSAWLGIVPRQYSTGGKAKLLGISKRGNVYLRKILIHGARAAVLRIKRDRVPIGAWLDRLDSRAPKNVVVVAMANKLARIAWAVLSSGEEYKPANVAIAA

SEQ ID NO: 16555 - protein, 409 aa, unidentified
  source 1..409: note = protein_acc84e4
  REGION 4..162: note = RuvC_domain
  SITE 7: note = RuvC_P1
  SITE 59: note = RuvC_P2
  SITE 99: note = RuvC_P3
  SITE 101: note = RuvC_P4
  SITE 104: note = RuvC_P5
  REGION 271..357: note = Tnp_domain
  SITE 279: note = Tnp_P1
  SITE 310: note = Tnp_P2
  SITE 318: note = Tnp_P3
  SITE 319: note = Tnp_P4
MLFIGDDWAEAHHDVEIQDEAGRRLTRRRLPEGVAGMAGLHALVADLLGDGEPGEVVVGIETDRGPWVQALVAAGYRVYAINPLSVARYRERHVVSGAKSDAGDAHVLADLVRTDRQHHRPIAGDSDLAEAVKVLARAHQNLIWSRRRQANMLRSTLREFYPAALAAFDEIAGRDALAVLQIAPTPALGRALSRAKIAAALRRAGRQRNIDARADQIQAVLRNDQLAALPAVELAFGHTVTALVRVLAELSRQIDTLEGELVAHFDRHPDAEILRSQPGLGAILAARVLAEFGDDPTRFADARARRNYAATSPITRASGTRRVVLTRVACNKRLRDALYLQAFAALTSSPGARAYYDTHRARGHTHHQALRALANRLVGVLHGCLRHRQTYNETTAWPDTTEPRLPTAA

SEQ ID NO: 16556 - protein, 326 aa, unidentified
  source 1..326: note = protein_e8a6d51
  REGION 19..191: note = RuvC_domain
  SITE 22: note = RuvC_P1
  SITE 67: note = RuvC_P2
  SITE 107: note = RuvC_P3
  SITE 109: note = RuvC_P4
  SITE 112: note = RuvC_P5
  REGION 203..287: note = Tnp_domain
  SITE 211: note = Tnp_P1
  SITE 240: note = Tnp_P2
  SITE 248: note = Tnp_P3
  SITE 249: note = Tnp_P4
  SITE 260: note = Tnp_P5
MTHPTAASKPEATTVSITIGIDVSKDHLDAARHPGGDTVRVANTRKGQTALLRWIGDIKAVARVVFEPTGPYHRTLEERLASVALPMIKVNPRQTRRFAEATGRLAKTDRVDALMLARYGALLEPIARPVRSEMQNRLAELVAARRSLMRDRTATLNRLKTLTIDLLKRHARHRLRQIEAQITSLDAAIDALVVEDVHLSRRRDVLASIPGLGTVTAHTLLADMPELGTMEEGQAASLAGLAPITRQSGTWRGRSFIQGGRATLRQALYMPAIVAMRFNPDLKRVYDRLIARGKHAKIAITAIMRKLVVLANALLRKDRLWTSKPA

SEQ ID NO: 16557 - protein, 391 aa, unidentified
  source 1..391: note = protein_e117762
  REGION 4..163: note = RuvC_domain
  SITE 7: note = RuvC_P1
  SITE 60: note = RuvC_P2
  SITE 101: note = RuvC_P3
  SITE 103: note = RuvC_P4
  SITE 106: note = RuvC_P5
  REGION 266..353: note = Tnp_domain
  SITE 274: note = Tnp_P1
  SITE 304: note = Tnp_P2
  SITE 312: note = Tnp_P3
  SITE 313: note = Tnp_P4
  SITE 326: note = Tnp_P5
MILTGIDVAKDKHDCFIMNSDGEILVKAFTFSNNLEGFNFLYEKIRSVTKPKDKIKVGLEATGHYSYNLLGFLLNKGLPTFVINPLHTNLFRKSLTLRKTKTDKVDSRTIAMMLMSDVALKPYTDTSYHNEELKSLSRYRFTKVQERSKLKTSVSRLVQILFPELEKIVCTIHMSSIYHLLEEYPGASYIASVHLTKLTNLLMEASHGRYNRNTAIKFREAARNSIGSILPAKSLELKHTIKLIRELTVEIDEIDAEIKKMMDSIASPITTIPGIGYSMGAMIISEIGDFSRFSSPDKILAYAGLSPSTYQSGQLNNCYSHMEKRGSRYLRYALFTVAQKVCIWDNTFAEYLSKKRAEGKHYYVAISHAVKKLVRVIFHLERTGQAYLKAA

SEQ ID NO: 16558 - protein, 349 aa, unidentified
  source 1..349: note = protein_397d4dd
  REGION 7..147: note = RuvC_domain
  SITE 10: note = RuvC_P1
  SITE 53: note = RuvC_P2
  SITE 88: note = RuvC_P3
  SITE 90: note = RuvC_P4
  SITE 93: note = RuvC_P5
  REGION 210..296: note = Tnp_domain
  SITE 218: note = Tnp_P1
  SITE 248: note = Tnp_P2
  SITE 256: note = Tnp_P3
  SITE 257: note = Tnp_P4
  SITE 269: note = Tnp_P5
MEDIIRIGMDTSKHIFQLHGVNAAEELVLRKKLRRKEMMKFFEVLPATQVAIEACGSSHHWARLLQSFGHAVKLIPPQFVKPYVKRNKNDAADAEALCEAMDRPTMRFVPVKTAEQQAALMLVGMRERLVRNRTQLSNAIRGYAAEFGITASRGLIRIEQLLERVATDETLPALARELFGLHAKEYEQLKARIEEVDAKLMAWHRADDCSQRLAQIPGIGPIGASMLVMKTPAPETFRSGRHFAAWLGLTPKDHSTAGKSRLGGISRAGDEALRSVLVMGSTSALQKVRRQQGGACSPWLMELLKRKPPKLVAVALANKNARIAWKLMVSGERYRPAKPITGFNSTQAA

SEQ ID NO: 16559 - protein, 305 aa, unidentified
  source 1..305: note = protein_cf5de33
  REGION 5..153: note = RuvC_domain
  SITE 8: note = RuvC_P1
  SITE 52: note = RuvC_P2
  SITE 92: note = RuvC_P3
  SITE 94: note = RuvC_P4
  SITE 97: note = RuvC_P5
  REGION 186..270: note = Tnp_domain
  SITE 194: note = Tnp_P1
  SITE 223: note = Tnp_P2
  SITE 231: note = Tnp_P3
  SITE 232: note = Tnp_P4
  SITE 243: note = Tnp_P5
MISWVGIDISKSNLVVWVQPDGEGFELSNTSEGCAELLQRLSQYEVGRVLLEATGGYERKVMAALLGASFNVLRINPRRARAFAVAMGKSAKTDLIDAAVLADFAEVLKMDGDKIISPEREALRELVQQREHFVQQRDDNKRRLQQAQLPTVVAAIKGHIHYLQIQIKQLDKTIHQSMHELDAEKTERLISVKGIGTVATASLLVYLPELGKLGRREIAALAGVAPCNDDSGNHSGKRQIHGGRARLRRALYMSCWVVIRFQADFKARYDALRARGKSAKVALIACMRILLIRLNAMLRDGTEWR

SEQ ID NO: 16560 - protein, 304 aa, unidentified
  source 1..304: note = protein_ec4220e
  REGION 25..171: note = RuvC_domain
  SITE 28: note = RuvC_P1
  SITE 72: note = RuvC_P2
  SITE 112: note = RuvC_P3
  SITE 114: note = RuvC_P4
  SITE 117: note = RuvC_P5
  REGION 207..292: note = Tnp_domain
  SITE 215: note = Tnp_P1
  SITE 244: note = Tnp_P2
  SITE 252: note = Tnp_P3
  SITE 253: note = Tnp_P4
  SITE 264: note = Tnp_P5
MVDGTKGSHRKEGTTKMNENNINAAGIDTGKAKLDVALAGGKARLQIDNALSGWRELATWVKRHNVDRIGIEASGGYERGVVAYLREKGFTVILFQPLQIRAYAGFRLQRAKNDRIDADLIAACTAATTTVRQAPDPRFQAFCEHLTLIEQIEEDIVRAKTRLEAFRDSRHREILASEIKRLKAWRTAELKRLIAALRRHDDLANRLTLIESVPGIGPRTALALLIRMPELGSLSREEAAALAGLAPYDDDSGKHQGLRHIAGGRERLRRSLFAAALPAAFQWNPSLVALYVRLTGAGSRTRSP

SEQ ID NO: 16561 - protein, 340 aa, unidentified
  source 1..340: note = protein_4940c73
  REGION 5..151: note = RuvC_domain
  SITE 8: note = RuvC_P1
  SITE 53: note = RuvC_P2
  SITE 91: note = RuvC_P3
  SITE 93: note = RuvC_P4
  SITE 96: note = RuvC_P5
  REGION 211..297: note = Tnp_domain
  SITE 219: note = Tnp_P1
  SITE 249: note = Tnp_P2
  SITE 257: note = Tnp_P3
  SITE 258: note = Tnp_P4
  SITE 270: note = Tnp_P5
MGEYIGLDVSLKETAVAIRRDGKRIWRGKCASDPQLLSALIRKHAPTAERVVFETGPLSVWFFHALTAEGIPAICIDARHAKAALDMAANKTDANDADGLAHLAEVGFFREVRVKGFDSMRSRTVVAARTKLVRTTLDVANQVRGLMKTFGLIVPRSMGGKFEANVRSLLADDADLSRIILPLLEAWRNLRFQAARLTQQLLAEARRNQQCQLLMSIPSVGAITATAYLTAVEDPENFKRSRSVGAWLGLTTRRYQSGEVDYDGHISRRGDAHLRSLLYEAAVVILTRSQADSALRNWGMKLREKIGFKRSAIAVARKLAVIMHAMLRSGELFNRETASA

SEQ ID NO: 16562 - protein, 306 aa, unidentified
  source 1..306: note = protein_a0e45c6
  REGION 5..164: note = RuvC_domain
  SITE 8: note = RuvC_P1
  SITE 61: note = RuvC_P2
  SITE 102: note = RuvC_P3
  SITE 104: note = RuvC_P4
  SITE 107: note = RuvC_P5
  REGION 267..306: note = Tnp_domain
  SITE 275: note = Tnp_P1
  SITE 305: note = Tnp_P2
MVISVGIDVAKDKHDCFILNSEGVVLADVFTIPNNMDGFTCLLQRIRDCTTPQDKIKVGLEATGHYSYNILGFLLGNGLATYVLNPLRTNLYRKSLSLRKTKTDRVDARTIAAMLLSDVGLKPYTDTAYHNEELKSLTRYRFNKVKERAKLKSSVSRLVCILFPELEKLVPTLHGASIYALLEEFPGAVQTAGAHLTRLKSLLSDASRGHYGRDMAVEIRNAARNSIGSRMPAKSLELQHTIRLIRELDAEIEEIEAEIQDIMDEMHSPITTIPGIGYRMGAMILAEVGNFSRFESPDKLLAYAGL

SEQ ID NO: 16563 - protein, 337 aa, unidentified
  source 1..337: note = protein_b7994c6
  REGION 6..146: note = RuvC_domain
  SITE 9: note = RuvC_P1
  SITE 51: note = RuvC_P2
  SITE 86: note = RuvC_P3
  SITE 88: note = RuvC_P4
  SITE 91: note = RuvC_P5
  REGION 210..296: note = Tnp_domain
  SITE 218: note = Tnp_P1
  SITE 248: note = Tnp_P2
  SITE 256: note = Tnp_P3
  SITE 257: note = Tnp_P4
  SITE 269: note = Tnp_P5
MEPTTIAIDLAKRVFQIHFVDPDGTIHSKVLKRVQMLPFFANRPAARIVMEACGSAHHWARQLTALGHEVRLIAAQFVRPFVKSNKNDAADAAAIWEASQRPGMRFVAVKSADQQAMLALHRMRQQLVRIRVMQVNQLRGLLYEFGVVLPQGRRPSIQAAQVAIATLADQLPGMLIDSLRDQLSRLHLLDDQIQRIEQRIIEWRRGDEACRRISEIPGVGPLTATAAVSVIGEARTFRSGREFAAYLGLVPRQNGTGGKVKLGGISKRGDVYLRTLLIHGARAVISSSKHLPTHMRDLLARRPTNVVAVALANKMARTIWALLAYGRTYQPAAALPS

SEQ ID NO: 16564 - protein, 342 aa, unidentified
  source 1..342: note = protein_1bc4f08
  REGION 7..148: note = RuvC_domain
  SITE 10: note = RuvC_P1
  SITE 53: note = RuvC_P2
  SITE 88: note = RuvC_P3
  SITE 90: note = RuvC_P4
  SITE 93: note = RuvC_P5
  REGION 211..294: note = Tnp_domain
  SITE 219: note = Tnp_P1
  SITE 249: note = Tnp_P2
  SITE 257: note = Tnp_P3
  SITE 258: note = Tnp_P4
  SITE 270: note = Tnp_P5
MTEATLIGIDLAKRVFQLHGARGDGSVVFRKKLSRTQLAAFVAQHPRCVIAMEACATAHGWGREFEKLGHEVRLIPPIYVKPFVKRQKNDAADAEAITEAASRPTMRFVAVKDEMQQARAMLFRTRDLLVRQRTQTINALRGHLAEHGVVAAQGAVQVKRLAEAVNDEASQLPTMVEDLSRIYLEQIDVLTVRITDLDKRLRAAAAEAETTRRLQSMPGIGPVTAVAVETFAPPMEDFHRSRDFAAWLGLVPRQHSTGGKARLGKTSKMGQRDIRRLLIIGAMAVIQGAAKRGAPEGSWLERMLKKKPRMLVAIALANKMARGLWAMMTKRQDYRNPAAIAA

SEQ ID NO: 16565 - protein, 317 aa, unidentified
  source 1..317: note = protein_8b87cca
  REGION 7..150: note = RuvC_domain
  SITE 10: note = RuvC_P1
  SITE 50: note = RuvC_P2
  SITE 90: note = RuvC_P3
  SITE 92: note = RuvC_P4
  SITE 95: note = RuvC_P5
  REGION 186..270: note = Tnp_domain
  SITE 194: note = Tnp_P1
  SITE 223: note = Tnp_P2
  SITE 231: note = Tnp_P3
  SITE 232: note = Tnp_P4
  SITE 244: note = Tnp_P5
MTSEMLIGIDVAKDELVIDSGQGLVSIANTTEAIDAWLKTLPTVSYIGLEATGAYHQLLADRAVSLGQIVYVLNPRDMRHYALGLGRRGKTDRVDAQMIRRFITAERSHLRPYQPATAVQHQLALLQRRRATVVKHRQALQKALRSVNELEEPLHETLLALDTLLTRIDQQLNELLTLQPALKANARRLESIPGIGRQTSTQLAVLFDRVPLNRSDAAVAFVGLDPRACDSGLKRGRRRVSKRGPGELRRLLYNCAQAAAKTAVWKLYYQALRAREFSATQALVILARKLLRIAFSLWQQDEATFDAQKIGCLKNAV

SEQ ID NO: 16566 - protein, 345 aa, unidentified
  source 1..345: note = protein_7450fe5
  REGION 9..157: note = RuvC_domain
  SITE 12: note = RuvC_P1
  SITE 63: note = RuvC_P2
  SITE 97: note = RuvC_P3
  SITE 99: note = RuvC_P4
  SITE 102: note = RuvC_P5
  REGION 259..344: note = Tnp_domain
  SITE 267: note = Tnp_P1
  SITE 298: note = Tnp_P2
  SITE 306: note = Tnp_P3
  SITE 307: note = Tnp_P4
  SITE 318: note = Tnp_P5
MKVTYKTCCGVDVHKSFLVATIITTTGGIEPSYQKKRYSTFNNSILEFKQWLLDNDCHDLCMESTGKYWIPVFNLLEDEINVTIANPKWVKAVKGNKDDTKDSKWIGDLFRLGLVKGSYIPCKKIRILREFTRYRYKIVSCRSSEKNRYQNALTVCNVALDSVVSDIFGKSSTSIIDYLLEQSGNSINHEEIASKLLKSLKSKEDAVIESIEGYQMTDSQKYRMHLVRAHMDYITAEINDIDSMIESMISSDPDYENAIQFLMTIPGVKRDSAITIISETGIDMSQFCSSKRLCCWAGLVPGRNESGGKKKSVRIARAGVYLKPALVQCAHAAVKSEKSPYYKKK

SEQ ID NO: 16567 - protein, 342 aa, unidentified
  source 1..342: note = protein_eda62de
  REGION 6..148: note = RuvC_domain
  SITE 9: note = RuvC_P1
  SITE 52: note = RuvC_P2
  SITE 87: note = RuvC_P3
  SITE 89: note = RuvC_P4
  SITE 92: note = RuvC_P5
  REGION 211..298: note = Tnp_domain
  SITE 219: note = Tnp_P1
  SITE 249: note = Tnp_P2
  SITE 257: note = Tnp_P3
  SITE 258: note = Tnp_P4
  SITE 270: note = Tnp_P5
MNATTIGLDIAKNVFQVHGVDKGGKVVLRKQLKRAQVLTFFANLSPCLIGLEACAGAHYWARELGKQGHEARLISPQFVKPYVKGNKNDRNDAEAICEAVGRPNMRFVPVKSVESQDILALHRVRRGLVKERTAKVNQLRGLLGECGIVIGQGLAQVRKRLPEILEDGENGLSSLGRELFADLYRQVLELDRQVDAYGVKLQRLYAASAVCRKMGRVPGVGPITASAMAASLGGGQAFESGRQVSAWLGLVPRQESSGGKPKLLGISKRGDTYLRTLLIHGARAVVKTAARKSDAQSRWINDLVRRRNKNIAAVALANKNARTLWALLRRGEDYRAPVLHNA

SEQ ID NO: 16568 - protein, 342 aa, unidentified
  source 1..342: note = protein_56844da
  REGION 6..147: note = RuvC_domain
  SITE 9: note = RuvC_P1
  SITE 52: note = RuvC_P2
  SITE 87: note = RuvC_P3
  SITE 89: note = RuvC_P4
  SITE 92: note = RuvC_P5
  REGION 211..300: note = Tnp_domain
  SITE 219: note = Tnp_P1
  SITE 249: note = Tnp_P2
  SITE 257: note = Tnp_P3
  SITE 258: note = Tnp_P4
  SITE 270: note = Tnp_P5
MDSTIYGLDLAKRVMQLHWVDMGTGEIHRKQLQRRALLEFFANREPGIVAMEACGSAHHWARELRKLGHEVRLIAAQFVRPFVKTNKTDAADAAAIWEAAQRPDMRFVTVKSVEQQSVLALHRMREQLVKIRTMQINAIRGLLYEFGADIPQGRQKGEQTIPQVLEQLEEQISKMTLDAMRGQLERLKALDQNIADIEKSLTFWKKDQEAVSRLMAIPGVGLLTATAIVATVGDMKTFRSGREFASFLGLVPRQSGTGGRVRLLGISKRGDTYLRSLLTHGARAVVNRQIHNRNPWIDRLLSRRPHNVAVVALANKMARTIWALLTRDRSYDPLHQRSVTAA

SEQ ID NO: 16569 - protein, 260 aa, unidentified
  source 1..260: note = protein_d7a8aa9
  REGION 1..91: note = RuvC_domain
  SITE 31: note = RuvC_P3
  SITE 33: note = RuvC_P4
  SITE 36: note = RuvC_P5
  REGION 125..209: note = Tnp_domain
  SITE 133: note = Tnp_P1
  SITE 162: note = Tnp_P2
  SITE 170: note = Tnp_P3
  SITE 171: note = Tnp_P4
  SITE 182: note = Tnp_P5
MRFLQDAGYKVIRVNPLRARNFADSMGVKAKTDAIDAEVLAHYAEVIPDQPALKISPDRALLRELLQQRDRLVQQRDDDRRRLKQAQSLVVADFLKANLQYFRSQIKLVEQAIRQQAEKLNDERVAQLTQVKGIGVVTASKLVALLPELGRVESKEIASLVGVAPFNYDSGKSVGKRSISGGRFEVRPALYMALLVAVRYNPALKDRYEALRGRGKVAKVALACMRTFIVRLNAMLKTGTPWRDLILPQPADATQIGKAA

SEQ ID NO: 16570 - protein, 311 aa, unidentified
  source 1..311: note = protein_9449eda
  REGION 6..182: note = RuvC_domain
  SITE 9: note = RuvC_P1
  SITE 53: note = RuvC_P2
  SITE 92: note = RuvC_P3
  SITE 94: note = RuvC_P4
  SITE 97: note = RuvC_P5
  REGION 188..272: note = Tnp_domain
  SITE 196: note = Tnp_P1
  SITE 225: note = Tnp_P2
  SITE 233: note = Tnp_P3
  SITE 234: note = Tnp_P4
  SITE 245: note = Tnp_P5
MTDDSIGIDISKDKLDCHRLSDGVFEQFANTKSGFRKLRCWIGPDQPARVVYEPTGPYHGAFEAALADHLPLVKVNPKHARRFAESKGQLAKTDRADARVLAQMGAAHALEPDAPVAKDRPILRELQAARWALIKDKVRLQNQLDRQQQRLTQKLTKRRLRQVVDDIAELDQAIRAQLETCPNRKRALRVIQSIKGIGAVAATTILIEMPEIGSLRKKAVASLAGIAPITRQSGRWRGQSFIQGGRKPLRDALYLPAIVATQYKPDLKAQYQRMKTAGKPSKVAITAIMRKLLILANTLVKEDREWVEIRA

SEQ ID NO: 16571 - protein, 401 aa, unidentified
  source 1..401: note = protein_36af25f
  REGION 33..192: note = RuvC_domain
  SITE 36: note = RuvC_P1
  SITE 89: note = RuvC_P2
  SITE 130: note = RuvC_P3
  SITE 132: note = RuvC_P4
  SITE 135: note = RuvC_P5
  REGION 295..382: note = Tnp_domain
  SITE 303: note = Tnp_P1
  SITE 333: note = Tnp_P2
  SITE 341: note = Tnp_P3
  SITE 342: note = Tnp_P4
  SITE 355: note = Tnp_P5
MVYLERGYNLKELPWSKTVSNSFLFKEACMILVGVDVAKDKHDCYIMTSEGEVLFKSFTIANNMEGFNQLYEKILSVIDNFDNVKIGLEATGHYSYNILGYLLDKGLTPYVINPLHSNLYRKSLSLRKTKTDKVDSRIIASMLMSDVSLKPYSNTLYHNEELKSLTRYRFTKVQERAKLKISISRLVTILFPELEKLVPTLQMNSIYALLYEFPSAHAISKAHLTRLTNLLNTTSKGHYTKDKAVLIREAAKNSIGSNMPAKSLELKHTIKLIKELTSEINEIEEEIKIIMNKINSPILTIPGIGLSTGAQILAEIGDFKNFSSPDKLLAFAGLSPSTYQSGNMYSSNAKMEKRGSKYLRFALFNAAIYVSYWEPTFSQYLKKKRVEGKHYYVAISHVVKN

SEQ ID NO: 16572 - protein, 311 aa, unidentified
  source 1..311: note = protein_ead92f0
  REGION 7..150: note = RuvC_domain
  SITE 10: note = RuvC_P1
  SITE 54: note = RuvC_P2
  SITE 94: note = RuvC_P3
  SITE 96: note = RuvC_P4
  SITE 99: note = RuvC_P5
  REGION 190..274: note = Tnp_domain
  SITE 198: note = Tnp_P1
  SITE 227: note = Tnp_P2
  SITE 235: note = Tnp_P3
  SITE 236: note = Tnp_P4
  SITE 247: note = Tnp_P5
MTEYSVIGIDIAKETFDVYIDTSCTYLHLDNSPDGHQQLLSVLSALRVKLVVMEATSRYHSLLAAMLTLQGFAVAVVNPRLVKNFARATGTLHKTDPNDARLICEFGRRMEPEVRATPDEQTQRLAGMVTRRRQLVENRAMEINRHKSCDDVAISASLKRHIDWLKAEIKDADDDIDRQIRTMPLWKEKVKLLEEVKGIGPTTMAVLLSMLPELGALSRHKISALVGVCPYAHDSGKMKGKRCIWGGRSAVRSVLYMATLTAVRYNPTIKAFFERLTGRGKVFKVAITACVRKLITILNAMLRDNKEWRPA

SEQ ID NO: 16573 - protein, 392 aa, unidentified
  source 1..392: note = protein_98a5db0
  REGION 10..163: note = RuvC_domain
  SITE 13: note = RuvC_P1
  SITE 61: note = RuvC_P2
  SITE 102: note = RuvC_P3
  SITE 104: note = RuvC_P4
  SITE 107: note = RuvC_P5
  REGION 225..310: note = Tnp_domain
  SITE 233: note = Tnp_P1
  SITE 263: note = Tnp_P2
  SITE 271: note = Tnp_P3
  SITE 272: note = Tnp_P4
  SITE 283: note = Tnp_P5
MSSTPERVVIGMDPHKRSATIEVMTGDETIVGGGRFGTDRDGYAAMKNYAKQWPDRVWAIEGCQGIGRHIANRLLADGEEVVDVPPKLSARARVFATGQGRRTDATDAHSVALVGTRMSGLRPVVNDEQLALLRILVDRRRSLGEDHTRMISQLHQLLLELIPGGAKKYLSAAQAKVLLAKVRPRDVAGKARRRVAAELIADLERVYRRSKEADKELKELVAATGTTLMDLHGIGPSGAARLLVEVADITRFPTKAHFASWNGTAPIDASSGDQVRHRLSRAGNRQINRVLHIMATVQLRTPTEGRAYFDRKKASGKTSMEAMRCLKRRLSDLVYRRMVDDAIARAATGPGGQRGHDSDSSATGSHPHTGSSDKPLPGPATSQPKTPLRKAG

SEQ ID NO: 16574 - protein, 273 aa, unidentified
  source 1..273: note = protein_8156bb2
  REGION 6..146: note = RuvC_domain
  SITE 9: note = RuvC_P1
  SITE 52: note = RuvC_P2
  SITE 87: note = RuvC_P3
  SITE 89: note = RuvC_P4
  SITE 92: note = RuvC_P5
  REGION 211..273: note = Tnp_domain
  SITE 219: note = Tnp_P1
  SITE 249: note = Tnp_P2
  SITE 257: note = Tnp_P3
  SITE 258: note = Tnp_P4
  SITE 270: note = Tnp_P5
MELHTIGIDLGKTVFHLVGLNLRGEVLVRKKVSRKQLLQFTANLHVDLIGMEACGGAHFLGRALREQGHEVRLMPAQYVKPYVKTNKNDYIDAEAIAEAVARPTMRFVPIKTDDQLDMQSLHRVRECWVMRRTAIVNQIRGLLFERGITLRKGRRHVDGALPDILEDADSKLSGALRVLLAQLKLELDQMAIRIDEADAVLNKTAHENEACQRLVAIPGIGPITATALIAAIGNGAAFRKGREFAAWMGVVPREHSTGGKQKLLGISNMGTPT

SEQ ID NO: 16575 - protein, 342 aa, unidentified
  source 1..342: note = protein_8a46010
  REGION 6..146: note = RuvC_domain
  SITE 9: note = RuvC_P1
  SITE 52: note = RuvC_P2
  SITE 87: note = RuvC_P3
  SITE 89: note = RuvC_P4
  SITE 92: note = RuvC_P5
  REGION 211..296: note = Tnp_domain
  SITE 219: note = Tnp_P1
  SITE 249: note = Tnp_P2
  SITE 257: note = Tnp_P3
  SITE 258: note = Tnp_P4
  SITE 270: note = Tnp_P5
MSIVTIGIDLGKNSCSLAGLDERGAVVLRRRMQPATVVSFASKLAPCTIAMEACCGAHHLGRMLTAQGHTVKLMSPEYVRPYVKAQKNDDRDAEAIAEAATRPTMRFVELKSQEQLDIQTLHRVRSRLVTARTTLINQLRAILLERGATFAQGRRKFETGLDAMLADAERLPPGRIRQLILDMREEWSALDRRIVALDEEFAVLARTDEAARRLTSIPGVGALNATALVAAVGRAESFDHARDLGAFLGLVPRQHTTGGKPRLLGISKRGNAYLRTLLIHGARAALPSLAKSETALGAWLRSLLARCHHNTVVVALANKLARIAWALLRREETFSIGRATMV

SEQ ID NO: 16576 - protein, 341 aa, unidentified
  source 1..341: note = protein_b76f27e
  REGION 6..146: note = RuvC_domain
  SITE 9: note = RuvC_P1
  SITE 52: note = RuvC_P2
  SITE 87: note = RuvC_P3
  SITE 89: note = RuvC_P4
  SITE 92: note = RuvC_P5
  REGION 209..295: note = Tnp_domain
  SITE 217: note = Tnp_P1
  SITE 246: note = Tnp_P2
  SITE 254: note = Tnp_P3
  SITE 255: note = Tnp_P4
  SITE 267: note = Tnp_P5
MELKRIAIDTSKHVFTLHGVDPQDRVVLRRELKRAQLEPFFRKLLPTEVVLEACGGSHHWGRFLSELGHTVKLIPPQYVKPFVKRGKNDRNDAEAINEAASRPTMRFVPVKSAVQQAGIMILKTRDLLVRQRTQLINAVRGHAGEFGVIAATGTARVEALLERVAGDETLPEAARDMIALLGEQIKDLDIRITALETRMKQAHKANPVSQLLETIPGVGPIGALSLALTVDPAQFRSARHFAAWLGLTPRERSTGGKQRMGGISRAGDERLRHLLVTGATAVIRHVKPGSRNASAWLLSLLGRRPRKVAAVALANKMARVAWAMMTSGEAYRGTPAVPVSA

SEQ ID NO: 16577 - protein, 342 aa, unidentified
  source 1..342: note = protein_ee0cc80
  REGION 7..149: note = RuvC_domain
  SITE 10: note = RuvC_P1
  SITE 53: note = RuvC_P2
  SITE 88: note = RuvC_P3
  SITE 90: note = RuvC_P4
  SITE 93: note = RuvC_P5
  REGION 211..298: note = Tnp_domain
  SITE 219: note = Tnp_P1
  SITE 249: note = Tnp_P2
  SITE 257: note = Tnp_P3
  SITE 258: note = Tnp_P4
  SITE 270: note = Tnp_P5
MSEITTVGLDLAKNVFQLHGADASGRAVLRRKLRRGQVLEVLAGLPRCTVAMEACGGAHFWGREIGKLGHDVRLIPPAYVKPFVRRQKNDAADAEAICEAAQRPNMRFVPVKSEEKQGAAAVFRVRELLIRQRTQTINALRGHLTEFGEVVPQGAWNARRLAERVEAEDDALPATARATLQVLVDGLRDLDKGIAGLDAEIARRAREDEVARRLMTIPGIGPLVATALATLAPPTEHFHRARDFAAWLGLTPRQHSTGGKQRLGATTRMGERSLRRLLILGANSVVIKRRTNPMAREGTWLEGLLARKPGMLVRVALANKMARIVWALTARGGVYKAPVAAA

SEQ ID NO: 16578 - protein, 346 aa, unidentified
  source 1..346: note = protein_cf2a979
  REGION 6..159: note = RuvC_domain
  SITE 9: note = RuvC_P1
  SITE 67: note = RuvC_P2
  SITE 105: note = RuvC_P3
  SITE 107: note = RuvC_P4
  SITE 110: note = RuvC_P5
  REGION 211..299: note = Tnp_domain
  SITE 219: note = Tnp_P1
  SITE 250: note = Tnp_P2
  SITE 258: note = Tnp_P3
  SITE 259: note = Tnp_P4
  SITE 272: note = Tnp_P5
MKKIFIGIDFSKEKFDVVIIMAENLEEKAPRVHEQFANDKAGYRKFLKWVKVNSHGVDMSLWLFCGENTGDYSKGLANFLYGKGCDMWLENAKCIKDSCGIRRLKSDRADAAMIAEYAMRNHDRMTLYEPLSGPLAQLRELFLFRQMNVRKRSGYIVRKGEKGRTLDSSPAKSFMARKCKHMIAELDKTIKECDKMIEALIASDRDLQETYEIVTSVPGIGTQNAVCMMVYTDNFKRFDCNPRKIACYYGIAPFGHDSGTSVHCDPHVHYMANKTIKGILTQAALCAINHCPPVAHYYARLIERGKKTMVALNNVKNKLVRIVTALVRTKQKFIPEYEFAKRYAMD

SEQ ID NO: 16579 - protein, 330 aa, unidentified
  source 1..330: note = protein_7953fb2
  REGION 8..154: note = RuvC_domain
  SITE 11: note = RuvC_P1
  SITE 59: note = RuvC_P2
  SITE 97: note = RuvC_P3
  SITE 99: note = RuvC_P4
  SITE 102: note = RuvC_P5
  REGION 202..289: note = Tnp_domain
  SITE 210: note = Tnp_P1
  SITE 240: note = Tnp_P2
  SITE 248: note = Tnp_P3
  SITE 249: note = Tnp_P4
  SITE 262: note = Tnp_P5
MEKFAFYIGVDVSKNTLDVHCSEVNKHITIPNSSEGFRMFHSFCRENGIDLKITFVALEYTGGYEYRFIQHLHEKQIAFARIPGIAIKHSLGISRGKSDKVDAKRIATYAEEKHKQLSIEKPVDKAIIELKALLAFRKRLVRENAGYKSSIKERKHMYGLSNKDFMISILLKKEAHNTKLIEKIEQQITMLLTMNPAVNHSFKLLTSIKGIGKVNAWMTIAYTENFTSFPNARSYAVYVGVIPFDHSSGTSIRGRKRVSHLANKELKQELAQAARSAIEWDTEMRLYAERKLKNKQYGIVVNNVKFKLILRMFAVIKRGEKYVDKLANVA

SEQ ID NO: 16580 - protein, 411 aa, unidentified
  source 1..411: note = protein_f7fd3bd
  REGION 5..163: note = RuvC_domain
  SITE 8: note = RuvC_P1
  SITE 62: note = RuvC_P2
  SITE 102: note = RuvC_P3
  SITE 104: note = RuvC_P4
  SITE 107: note = RuvC_P5
  REGION 273..373: note = Tnp_domain
  SITE 281: note = Tnp_P1
  SITE 311: note = Tnp_P2
  SITE 319: note = Tnp_P3
  SITE 320: note = Tnp_P4
  SITE 333: note = Tnp_P5
MNPVVGLDVAKGESQIQMFLDKKMPYKNSVKVAHTIEGLEELHSYLLDLERQTGMKPPIVLEATGHYHAPVVQFLEAREYIVIIVNPLVSYRAKSSNLRKTKTDAIDAFHLGEMYYKEDLEPQKKRGIQLLNLRHLTRQHENMTGIMVQTKLQFQAVLDQVFPEYKGVFGDLYAEISLKTLQAYPTSEAVRGTGVEEIAGFIDEHCKARSFNWAHEKAEELILAAERNPFQSTLYQSLLVSLNMYIDLLQAYRQQLSTLEREIDQLAAQLEEYELLQTIPGVGEKIAATIISEIGEIDRFSHPKKLVAFAGLDPSVFESGRFKGTNNHITKRGSARLRHMLFTAVRCSIRDSRKKKTTDETIARNKRLRDFYDVKREEGKPYKVAIIACANKLLHWIYAMLKTKTPFQVTI

SEQ ID NO: 16581 - protein, 340 aa, unidentified
  source 1..340: note = protein_5f8724d
  REGION 6..156: note = RuvC_domain
  SITE 9: note = RuvC_P1
  SITE 63: note = RuvC_P2
  SITE 101: note = RuvC_P3
  SITE 103: note = RuvC_P4
  SITE 106: note = RuvC_P5
  REGION 207..294: note = Tnp_domain
  SITE 215: note = Tnp_P1
  SITE 245: note = Tnp_P2
  SITE 253: note = Tnp_P3
  SITE 254: note = Tnp_P4
  SITE 267: note = Tnp_P5
MKKIFIGIDFSKLKFDVAIYNGEMNQKMGSQEFDNKLSGFKELLKWIILIAGSKYNEWIFCGEHTGLYSYALPVFLSEKHIDICLESGLQIKRTLGIQRGKTDSVDAIRIAEYAYRHKDKLQLFNPLSDVLDGLKDLLAYRERLIKAKKMFQISSKELKSVKKKGVISEYIVLDSNSEMVSLETKLKSCEIQIKELIKSKLCLLENYEFLTSIKGIGMVNAAAVLVITANFTLFTDPRKFGCYCGVVPFKHSSGTSVKGRTKISNFANKKIKSLLTQAARTCVMHDLEMKTYYQRKIAEGKKDRIVINNVRNKLIHKMFAVISNRTMYNPNYMNPLKQAS

SEQ ID NO: 16582 - protein, 343 aa, unidentified
  source 1..343: note = protein_5f15c2c
  REGION 7..149: note = RuvC_domain
  SITE 10: note = RuvC_P1
  SITE 53: note = RuvC_P2
  SITE 88: note = RuvC_P3
  SITE 90: note = RuvC_P4
  SITE 93: note = RuvC_P5
  REGION 212..303: note = Tnp_domain
  SITE 220: note = Tnp_P1
  SITE 250: note = Tnp_P2
  SITE 258: note = Tnp_P3
  SITE 259: note = Tnp_P4
  SITE 271: note = Tnp_P5
MQAITTIGLDIAKSVFQVHGVDGAGQVVIRRQLKRRHVLAFFQKLRPCLVGIEACASSHHWSRELSALGHTVRLMPPGYVKPYVKRQKNDATDAEAICEAVGRANMRFVPTKTPEQQSGLVLHRTRHLFIRQQTSVINAIRAHLAEFGIVAPVGRQGVEQLLEAVANPNDQLIPEIARGCLLALGAQLRRIKQQVLEFDRMIRAWHQSNQTCRRLDDCPGVGPALATAIVASVADPKVFRSGRDFSAWIGLVPRQHSSGGKERLGGISKQGDRYLRGLFVVGALAVIRYAKIHGTKHRPWLTALLARRPTKVAAIALANKIARMVWAMMAKGERYKEPVALAA

SEQ ID NO: 16583 - protein, 343 aa, unidentified
  source 1..343: note = protein_0970db8
  REGION 6..147: note = RuvC_domain
  SITE 9: note = RuvC_P1
  SITE 52: note = RuvC_P2
  SITE 87: note = RuvC_P3
  SITE 89: note = RuvC_P4
  SITE 92: note = RuvC_P5
  REGION 211..294: note = Tnp_domain
  SITE 219: note = Tnp_P1
  SITE 249: note = Tnp_P2
  SITE 257: note = Tnp_P3
  SITE 258: note = Tnp_P4
  SITE 270: note = Tnp_P5
MSIVILGVDLGKNACSVVGVDAAGAVVVRRSMRRQTLVDYVAKLPVCVVAMEACCGAHYLGRLFAAHGHEIRLMSPEYVRPYVKAQKNDDRDAEGIAEAASRPTMRFVELKTQEQLDIQTLHRVRSRLVAERRSLTNQLRAILLERGTIFPVGRRKLELGIDALLADEDTTLSPRLRQLVAELRAEWRELDTRVEALNGEFVELARNDAAARRLTSIPGVGVLNATALIAAVGDASSFAKARDLGAWLGLVPRQHTTGGKPRLLGISKRGNTYLRTLLIHGARAALPSLARSETPLGRWLTGMIERGVHRNAIVVALANKLARIAWAALRKDATFERGYPVAA

SEQ ID NO: 16584 - protein, 400 aa, unidentified
  source 1..400: note = protein_68e490e
  REGION 5..163: note = RuvC_domain
  SITE 8: note = RuvC_P1
  SITE 62: note = RuvC_P2
  SITE 102: note = RuvC_P3
  SITE 104: note = RuvC_P4
  SITE 107: note = RuvC_P5
  REGION 273..362: note = Tnp_domain
  SITE 281: note = Tnp_P1
  SITE 311: note = Tnp_P2
  SITE 319: note = Tnp_P3
  SITE 320: note = Tnp_P4
  SITE 333: note = Tnp_P5
MNPVVGLDVAKGESQVQAFLDKSKPFGKSFSVKHTREELHRFIGFLKEIEKMTGQMPMVILESTGHYHTPVVQFMEEHDVIYILLNPIISYQAKKSSLRKVKTDAIDAYQLCVLYYKEDFEPHKNRGLQLLDLRNLSRQQEIVTNMYVEAKLQFHTILDQVFPEYRKVFGDLYSKVSLLMLEEFPTSEAVLSAGESKIAVRVAEYCPSRSVQWAREKAKKIMDAAMRNPFQKVVYQSHLINLQMYIEMLFQYQGHLSILENRIVTLANELEDYKIVQSIPGIGEKIAATIISEIGEIDRFSHPKKLVAFAGVDPRVYSSGKFTATTNRITKRGSSRLRHALYLAVLCGIRSSRNKKLKEFYDKKKSEGKPAKEAIVACINKLLHWIYALLNRKESFLDIA

SEQ ID NO: 16585 - protein, 311 aa, unidentified
  source 1..311: note = protein_41192ac
  REGION 5..154: note = RuvC_domain
  SITE 8: note = RuvC_P1
  SITE 52: note = RuvC_P2
  SITE 92: note = RuvC_P3
  SITE 94: note = RuvC_P4
  SITE 97: note = RuvC_P5
  REGION 188..272: note = Tnp_domain
  SITE 196: note = Tnp_P1
  SITE 225: note = Tnp_P2
  SITE 233: note = Tnp_P3
  SITE 234: note = Tnp_P4
  SITE 245: note = Tnp_P5
MRQTIGIDVSMDTLDAYRLSDGEHIQVGNDKLGHRTLIRWLGKDRGPLVVFEATGAYHRQMETALAARTIPFVKVNPRQARRFAEATGRLAKTDRVDAIMLARMGAVLELEAQKPRSENLHELKELMTARRALIKDQTAARTRLATTTLSLIKRQINARLLQITEHVQQIDAAMTKKLAHDDAMSQQLAILVSIPGIAATTALAMLIEMPELGTLDGKQAASLAGLAPISRQSGKWQGKEHIRGGRPLLRRAIYMPALVAVRFNPALKVKYDQLIQAGKPAKVALTAIMRKLIVMANALLRDRRKWTEINP

SEQ ID NO: 16586 - protein, 364 aa, unidentified
  source 1..364: note = protein_77366cb
  REGION 33..192: note = RuvC_domain
  SITE 36: note = RuvC_P1
  SITE 89: note = RuvC_P2
  SITE 130: note = RuvC_P3
  SITE 132: note = RuvC_P4
  SITE 135: note = RuvC_P5
  REGION 295..364: note = Tnp_domain
  SITE 303: note = Tnp_P1
  SITE 333: note = Tnp_P2
  SITE 341: note = Tnp_P3
  SITE 342: note = Tnp_P4
  SITE 355: note = Tnp_P5
MVYLERGYNLKELPWSKTVSNSFLFKEACMILVGVDVAKDKHDCYIMTSEGEVLFKSFTIANNMEGFNQLYEKILSVIDNFDNVKIGLEATGHYSYNILGYLLDKGLTPYVINPLHSNLYRKSLSLRKTKTDKVDSRIIASMLMSDVSLKPYSNTLYHNEELKSLTRYRFTKVQERAKLKISISRLVTILFPELEKLVPTLQMNSIYALLYEFPSAHAISKAHLTRLTNLLNTTSKGHYTKDKAVLIREAAKNSIGSNMPAKSLELKHTIKLIKELTSEINEIEEEIKIIMNKINSPILTIPGIGLSTGAQILAEIGDFKNFSSPDKLLAFAGLSPSTYQSGNMYSSNAKMEKRGSKYLRFALF

SEQ ID NO: 16587 - protein, 344 aa, unidentified
  source 1..344: note = protein_39f8bff
  REGION 7..149: note = RuvC_domain
  SITE 10: note = RuvC_P1
  SITE 53: note = RuvC_P2
  SITE 88: note = RuvC_P3
  SITE 90: note = RuvC_P4
  SITE 93: note = RuvC_P5
  REGION 212..299: note = Tnp_domain
  SITE 220: note = Tnp_P1
  SITE 250: note = Tnp_P2
  SITE 258: note = Tnp_P3
  SITE 259: note = Tnp_P4
  SITE 271: note = Tnp_P5
MAKLTTIGIDLAKNTFALYGLGPKGQCGWKRKVRRKQLLEQLVRLEPCKVALEACGSSHYWARQIQALGHHVELLPPQHVKGYLRGQKNDYNDAQAIAEASEHGRIRPVPIKGAEQQDERMLHKLRQGASKDRTRISNQLRGLLAEYGVILPQGIAALRRELPLALGDAENGLTDRARQLLNRQYQRFLEVEKELAWYDQQVQQMAKQDETCQRLQAIPGIGEVVASLLKGWMGDGRQFRKGRDAAAALGLVPRQNSTGGKDVLLGISKRGDPYVRAQLVHGARSVVARADGKTDRLSRWVQRLKAERGFNKATVALANKLVRIAWVIIARGECYQPLGQRLAG

SEQ ID NO: 16588 - protein, 372 aa, unidentified
  source 1..372: note = protein_aaa7a87
  REGION 9..159: note = RuvC_domain
  SITE 12: note = RuvC_P1
  SITE 63: note = RuvC_P2
  SITE 99: note = RuvC_P3
  SITE 101: note = RuvC_P4
  SITE 104: note = RuvC_P5
  REGION 225..309: note = Tnp_domain
  SITE 232: note = Tnp_P1
  SITE 262: note = Tnp_P2
  SITE 270: note = Tnp_P3
  SITE 271: note = Tnp_P4
  SITE 283: note = Tnp_P5
MGEHSEVYVAFDTAKRKHAVAIAEGGRAGEIRFVGEIENRPATIERLIKKLARRYKKLQVCFEAGPTGYGLYRQMQALGHDCLVVAPALIPRRSGERVKTNRRDALTLARLFRAGELSGVWVPDEVHEAVRDLVRGRTTAAEDARRKRQQLLSFLLRHGRIFTGGDHWTRAHRRWLAEQSFDHPAQQIVFQDAVASIEDAVERQRRLEEQLASLVPKWSMAPVIAAYQAMRGVSFLVAVTFAAEIGDVRRFDTPRQLMAFLGLVPAERSTGETVRRTGLTLAGNRRARRVLVEAAWSYRHPARVSETLRVRLEALPKTVRDIAWKAQVRLCGRYRRLNAAGKKLPVIIAAIAREMAAFLWAIGRQITPAAGT

SEQ ID NO: 16589 - protein, 400 aa, unidentified
  source 1..400: note = protein_101866f
  REGION 8..163: note = RuvC_domain
  SITE 11: note = RuvC_P1
  SITE 60: note = RuvC_P2
  SITE 101: note = RuvC_P3
  SITE 103: note = RuvC_P4
  SITE 106: note = RuvC_P5
  REGION 269..355: note = Tnp_domain
  SITE 277: note = Tnp_P1
  SITE 307: note = Tnp_P2
  SITE 315: note = Tnp_P3
  SITE 316: note = Tnp_P4
  SITE 328: note = Tnp_P5
MTGSRLWAGIDVGKEHHWICVLDTSGAVVLSRRCDNDEATIRAVITEIDALGEVVSWTVDLTTVYVTLLLTVLADAGKPVRYLSGRSVWQASSVYRGGEAKTDARDARVIADQSRMRSDLPVLHPDDELIRELQMLTGHRTDLVADRTRTINRLRQQLVAICPGLERVAQISSDRGWVVLLARYQRPRAIRRAGVARLATMLAGSGVRHAETIARAAVTAAKAQTVRLPGEDVAAELVAELAQGVIDLDARINAADAEIEARFRRHRLAEAIVSLPGIGFRLGAEFLAAVGDPSLIGSADQLAAWAGLAPRPKDSGKRIGRLHTPQRYSRRLRRVMYISALTAARCDPVSRAYYQRKRAEGKRPVQATLCLARRRVDVLYALIRDNRTWQPSLPGTAVAA

SEQ ID NO: 16590 - protein, 402 aa, unidentified
  source 1..402: note = protein_1a1a586
  REGION 5..163: note = RuvC_domain
  SITE 8: note = RuvC_P1
  SITE 62: note = RuvC_P2
  SITE 102: note = RuvC_P3
  SITE 104: note = RuvC_P4
  SITE 107: note = RuvC_P5
  REGION 276..365: note = Tnp_domain
  SITE 284: note = Tnp_P1
  SITE 314: note = Tnp_P2
  SITE 322: note = Tnp_P3
  SITE 323: note = Tnp_P4
  SITE 336: note = Tnp_P5
MNPVIGLDISKEESHGQAFLDRGKPYRGTFHFEHTREGLEILLQVIRDVEHASGHRPTLILEATGHYQSPVVQFLEEHHYVFIVINPLISNRLRKSNLRKVKTDAADAYLLGELHYREEFEPFKKRGVQLLNLRYLTRQYEAFSKMCVQTKLQFQAVLDQVFPAYKGVFGAMYSSVSLRFLNEFPTSHSVLQTDTSTLKSKISTLLSSKRSRSEDWINERVQRLLDAAKANPFQQTMYSSHLINLKILITLILQYQEHLAELEQNIDALAKEIEEYDLIQSIPGIGPKIAATILSEIGEVDRFDHPKKLVAFAGIDPSVFASGKFTATRNRITKRGSRQLRYALVMAVQCGLIRSRNTRIKDFYDRKRAEGKPHKVALIACANKLVHWLYAILISKKSFRPA

SEQ ID NO: 16591 - protein, 342 aa, unidentified
  source 1..342: note = protein_9e393ed
  REGION 7..147: note = RuvC_domain
  SITE 10: note = RuvC_P1
  SITE 53: note = RuvC_P2
  SITE 88: note = RuvC_P3
  SITE 90: note = RuvC_P4
  SITE 93: note = RuvC_P5
  REGION 210..302: note = Tnp_domain
  SITE 218: note = Tnp_P1
  SITE 248: note = Tnp_P2
  SITE 256: note = Tnp_P3
  SITE 257: note = Tnp_P4
  SITE 269: note = Tnp_P5
MKIPVRIGMDTAKSVFQLHGVDENEVVVVRRQFRRSEMIGYFERLPPVLVAIESCGSSHHWARLLQSLGHEVKLIPPQYVKPYVKRGKNDAADAEALCEAVTRPSMRFVPVKSQERQAACMLMSVRERLVSVKSQLSNAFRSYAAEFGIVGPAGRQNVNALIQQVLENDALPKMARELFAFQAQEYAAVEARLNEIESKLMKWHREDDVSRRIASIPGVGPIGSTMLSMKTPPPEAFRSGRDFAAWIGLTPRDHSTGGRQRLGGITKAGDSALRSVLIVGATALLRHVRAGRHKPSPWLAALLERKPPKLVAVALANKFARIAWRLMVSGGVYTRPPVAMAA

SEQ ID NO: 16592 - protein, 354 aa, unidentified
  source 1..354: note = protein_2a97c80
  REGION 4..163: note = RuvC_domain
  SITE 7: note = RuvC_P1
  SITE 60: note = RuvC_P2
  SITE 101: note = RuvC_P3
  SITE 103: note = RuvC_P4
  SITE 106: note = RuvC_P5
  REGION 266..307: note = Tnp_domain
  SITE 274: note = Tnp_P1
MICVGIDVAKDKHDCFILSSEGEVLADVFTIQNNAEGFDTLLQTIRRCVCPGDKIKVGLEATGHYSYNILGFLLDKGLDTYVINPLHTNLYRKSLSLRKTKTDRVDARTIAAMLMSDVDLKSYTDTVYHNEELKSLTRYRFDKVRERAKLKQSVSRLVTILFPELEKLVPSLHMASVYALLGEFPGAKQVAGAHLTHLKAVLYDASKGRYGRDMATTLREAARCSVGSVMPAKSLELQHTIRLIRELDAEIEDIEAAIQPMMDEMQSPITTIPGIGVRMGAMILAEIGDFSRFDSPDKIRLCRYVSLYLPVRAAFSVWSLLAHGKARLSVSALRTLQRHQICLPLGSCLCRLPC

SEQ ID NO: 16593 - protein, 414 aa, unidentified
  source 1..414: note = protein_044923c
  REGION 5..168: note = RuvC_domain
  SITE 8: note = RuvC_P1
  SITE 65: note = RuvC_P2
  SITE 105: note = RuvC_P3
  SITE 107: note = RuvC_P4
  SITE 110: note = RuvC_P5
  REGION 276..362: note = Tnp_domain
  SITE 284: note = Tnp_P1
  SITE 315: note = Tnp_P2
  SITE 323: note = Tnp_P3
  SITE 324: note = Tnp_P4
MKLFVGDDWAEGDHDVELMDAGGRRLAKARLPDGVAGIARLHAMIGEQLGQDADEEDDAGQVAVGIETDRGPWVAALVAAGYTVFAVNPLQASRYRARHGVSGAKSDAADAHVLADMVRTDSHQFRPVAGDTAQAAAVKVVTRTHKTLIWERTRCTQRLRHALRDYFPAALEAFEDLDAPDVLELLARAPDPASAAALTTAQISAALKRAGRRHVAGKAAQIRAVLRAPHPGQPELVTAAYAVSVRALIAVLSALDEQVKALQGQVEAYFGQHPDAEIILSQPGMGQVLGARVLAESGDDPARYPSAKARKNYAGTSPITRASGKKKAVLARYVHNDRLVDALMAQAFSALRTSPGARACYDRQRARGAGHNAALRQLANRLTGILHGCLKARTRYDEATAWPQHAAHAGKTAA

SEQ ID NO: 16594 - protein, 344 aa, unidentified
  source 1..344: note = protein_6386c98
  REGION 6..148: note = RuvC_domain
  SITE 9: note = RuvC_P1
  SITE 52: note = RuvC_P2
  SITE 87: note = RuvC_P3
  SITE 89: note = RuvC_P4
  SITE 92: note = RuvC_P5
  REGION 211..298: note = Tnp_domain
  SITE 219: note = Tnp_P1
  SITE 249: note = Tnp_P2
  SITE 257: note = Tnp_P3
  SITE 258: note = Tnp_P4
  SITE 270: note = Tnp_P5
MTVTTVGIDLAKNIFQVHGIDATGEVVQRRSLRRRQVISFFAKLAPCLVGIEACGTSHYWARELSELGHDVKLMPPAYVKPYVKRGKTDAGDAEAICEAVTRSTMRFVAIKSPEQQSILALHRTRDLLIRQRTQLVNMIRAQLAEFGIVLAKGIQHALRLAGQLVEGAVPDIPPLAVEVIVTLAEQLRDLQVRIGGLDKGLKTWSRDNEVVKRLQTIPGIGIVTASALAASVTDPHQFTSGRQFAAWLGLTPRANSSGGRERMGRISKMGDRYLRRLLVSGMTSQSQSIRRNPDAHPWVTSLLRRKPAKLVAVAMANKAARIAWVVMTRDEIYRAPKPATERAA

SEQ ID NO: 16595 - protein, 343 aa, unidentified
  source 1..343: note = protein_efd64e0
  REGION 7..149: note = RuvC_domain
  SITE 10: note = RuvC_P1
  SITE 53: note = RuvC_P2
  SITE 88: note = RuvC_P3
  SITE 90: note = RuvC_P4
  SITE 93: note = RuvC_P5
  REGION 211..300: note = Tnp_domain
  SITE 219: note = Tnp_P1
  SITE 249: note = Tnp_P2
  SITE 257: note = Tnp_P3
  SITE 258: note = Tnp_P4
  SITE 271: note = Tnp_P5
MLTKNVIAIDLAKNVLQACHISIHGELMSNKPLSRQKMKEFLAKAKPSIVAMEGCCGCHYWGQLAEKLGHEVRIINPKKVKGYLEGHKTDHNDALAIANAAIQIGIKYSRPKSLEQQAMHSLETSRRFLSRSVVSLALHIRGTILGYGIANPRGEKGLKASVQTVLDGDTPIPSNVVSVLSMLWEQYKELKAKLIAFEKEKNALTRQIEPCQRLMGIEGVGETTAAMLYTTLGDGKQFKNGRQASAFVGLTPKQHSSGGKVFMIGIDKCGGVKELRSLLYLGAMSYVGRLPEKPKTQKDAWLRSIIDRIGFKKACIALANKVVRTAWAMLRYETEYKPVLLTH

SEQ ID NO: 16596 - protein, 342 aa, unidentified
  source 1..342: note = protein_a8721ab
  REGION 8..149: note = RuvC_domain
  SITE 11: note = RuvC_P1
  SITE 54: note = RuvC_P2
  SITE 89: note = RuvC_P3
  SITE 91: note = RuvC_P4
  SITE 94: note = RuvC_P5
  REGION 213..298: note = Tnp_domain
  SITE 221: note = Tnp_P1
  SITE 251: note = Tnp_P2
  SITE 259: note = Tnp_P3
  SITE 260: note = Tnp_P4
  SITE 272: note = Tnp_P5
MSQLLCFCGVDLAKHHFTLHAVDANGKVILHKAVSRAKLLATVALLPTSRIGIEACSGSHHWARQFNKLGHDARIIAAKYVTPYRTKGKNDLNDAVAICEAVQRPNTRFIPIKSPERQAILAIHRMREHWVRERTALINRLRAMLAEFGLIMPVGRAAVQRMIPEYLEDADNELPDIARAIVADGYQHLHVLNQRIDETEQSFELVLSASPQAQRIHKVRGVGPQTATAIIAAIGKGDQFDKSRDFAAWLGLVPKQYSTGGKPRLGRISKRGDKYLRTLLVHGARAVITNLGEKEDKLSTWCRELLAGRGMNRAIVALAAKNARIIWSLLHNQTEYQDYAAS

SEQ ID NO: 16597 - protein, 346 aa, unidentified
  source 1..346: note = protein_89b05db
  REGION 6..143: note = RuvC_domain
  SITE 9: note = RuvC_P1
  SITE 52: note = RuvC_P2
  SITE 83: note = RuvC_P3
  SITE 85: note = RuvC_P4
  SITE 88: note = RuvC_P5
  REGION 207..293: note = Tnp_domain
  SITE 215: note = Tnp_P1
  SITE 245: note = Tnp_P2
  SITE 253: note = Tnp_P3
  SITE 254: note = Tnp_P4
  SITE 266: note = Tnp_P5
MELHTIGIDLGKTVFHLVGLSRRGEVVVRKKFSRKQLLQFTANLQVELIGMEACGGAHFLGRALRGQGHAVRLIPAQYVKTNKTDSIDAEAIAEAVGRPTMRFVPIKTEAQLDLQSLHRVRERWVMRRTAIVNQIRSLLLERGITLRQGRHYVDAALPRILEDADLNLSGALRMLLAQLKLELEQMTLRIDEADTMLNQTVQENEDCQRLVAIPGVGPVTATALIAAIGNGAVFRKGREFAAWMGVVPREHSTGGKQKLLGISKRGNAYLRRLFIQSARAVLQHRTKQSSGLSAWLSQLALRSHPNVVAVALANKLARIAWAVLAKQEAYRPTVLDSVATAWLDCR

SEQ ID NO: 16598 - protein, 392 aa, unidentified
  source 1..392: note = protein_3fe0d8e
  REGION 4..164: note = RuvC_domain
  SITE 7: note = RuvC_P1
  SITE 62: note = RuvC_P2
  SITE 103: note = RuvC_P3
  SITE 105: note = RuvC_P4
  SITE 108: note = RuvC_P5
  REGION 267..354: note = Tnp_domain
  SITE 275: note = Tnp_P1
  SITE 305: note = Tnp_P2
  SITE 313: note = Tnp_P3
  SITE 314: note = Tnp_P4
  SITE 327: note = Tnp_P5
MIYVGIDVAKDKHDCCIVDSNGTILKDSLRIPNTRQGFEILYTSILSFLPNKTISNVKIGLESTGHYSANIQNYLYAKGFHLSVLNPLATSLFRKAQTLRKTKTDKTDALVIAKMLFSDDTKSYSPVSYQIQELKSLTRHHYRLVGYRSKLKVSVTRLLDIIFPELATYVWSIHQPSVYALLSEFPNPKEISNCHLTKLTNLLYKATKGRYGREKADEIRKAASSSIGTSTKSLSLELQQTIRLIKSVQNEIVILDEQIKELMIEIDSPIMSIPGISYNLASIILSEIGDVHRFTNPAKLLAFAGLDPSTYQSGKYNATYTPMVKRGSAYLRWAILMASRTVSMQDLTFSNYLAKKQGEGKHYYIAMSHVAKKLIRVIFYLLTTNTTFIPQI

SEQ ID NO: 16599 - protein, 354 aa, unidentified
  source 1..354: note = protein_636fb89
  REGION 12..152: note = RuvC_domain
  SITE 15: note = RuvC_P1
  SITE 58: note = RuvC_P2
  SITE 93: note = RuvC_P3
  SITE 95: note = RuvC_P4
  SITE 98: note = RuvC_P5
  REGION 217..302: note = Tnp_domain
  SITE 225: note = Tnp_P1
  SITE 255: note = Tnp_P2
  SITE 263: note = Tnp_P3
  SITE 264: note = Tnp_P4
  SITE 276: note = Tnp_P5
MSNKSIATIATMGIDIGKNSFHVIGLDRRGAIVLRQKWSRGQVDARLANMSPCLIGMEACVGAHHLSRKLQAHGHDARLMPAKYVRPYSKGQKNDYRDAEAIAEAVQRPTMKFVATKTADQLDLQALHRVRERLVGQRTGIINQIRAFLLERGVAVRKGLGFLRKELPAILATRVDVLSPRMMRIIEDLAGDWHRLDERIEGLSTEIETLAHQDPACERLMTVPGIGPIISSAMVAAIGNGAVFAKGRDFGAWLGLVPKQISTGDRTILGAISRRGNRYLRVLFVQAAWVVLVRIKDWDRYGLKAWIDGAKKRLHHNVLAIALANKLARIAWAVLNKERKFEVTRTTAPSSQPA

SEQ ID NO: 16600 - protein, 320 aa, unidentified
  source 1..320: note = protein_3fffa8a
  REGION 5..149: note = RuvC_domain
  SITE 8: note = RuvC_P1
  SITE 53: note = RuvC_P2
  SITE 91: note = RuvC_P3
  SITE 93: note = RuvC_P4
  SITE 96: note = RuvC_P5
  REGION 196..283: note = Tnp_domain
  SITE 204: note = Tnp_P1
  SITE 234: note = Tnp_P2
  SITE 242: note = Tnp_P3
  SITE 243: note = Tnp_P4
  SITE 256: note = Tnp_P5
MKKNVSIDISSKTLDICIRENGSNTFYTIENKVKSIQSFLRPLDLEDTVISMENTGRYNWQLYEVLATFSCPVYVISPIHLKRSLGLIRGKNDKIDAQRIGAFLEKNISELTPWKPSSKNIRKIKILLTERSSRLKMVKQLSSSKHDYKLMKSLGLECSLTTLNEALVLEIRNQIKDLEEKIATVIKSDTELKKQDKLVQSVPGVGKILTWNFIAKTEGFTIINNPRKFACYSGVVPFEHQSGTSIRGRNKVSQYADKNMKSILHLGAMSAIQHENDLAEYYKRKVNEGKNKMTVLNAVRNKIIHRVFAVIKTQKLYVYN

SEQ ID NO: 16601 - protein, 408 aa, unidentified
  source 1..408: note = protein_93b7ab6
  REGION 18..178: note = RuvC_domain
  SITE 21: note = RuvC_P1
  SITE 73: note = RuvC_P2
  SITE 113: note = RuvC_P3
  SITE 115: note = RuvC_P4
  SITE 118: note = RuvC_P5
  REGION 281..368: note = Tnp_domain
  SITE 289: note = Tnp_P1
  SITE 319: note = Tnp_P2
  SITE 327: note = Tnp_P3
  SITE 328: note = Tnp_P4
  SITE 341: note = Tnp_P5
MDNTLQFLRKECITMILVGIDIGKNKHTFSIVDKGTGEILSNPAIFDNNLAGFLYLIKKLRGYVKSELLIGMKDTGHYHLALLKYLLDNRYTVSLINPTTTDLTRKIQGGIAKNDTLDSITICDVISSNRRKKPYRITKVNRFELYEQKQLTRHHHDLKEELNIYKNRLQKCIDIVFPEFNSLFNSKYGIVYMRVLKTFSSANAIANADIRSIRKCFEFKGRGGRISLSAEQLKMSAKISVGIPSVAEEIQIRHLVCQIELLEEQLSEIDKRIEEFSIKNNSTILSIPGISHFSGTSIIAELGDICNFQKSSQIIKFAGVAPYHYESGQFTAQHTSITKKGSRYLRKTLYQIILPVINNNEVFRTYYNKKLAEGKGHRCAHGHCIRKLLRVIYHLLTTGQQFNPEFLA

SEQ ID NO: 16602 - protein, 344 aa, unidentified
  source 1..344: note = protein_c238a68
  REGION 6..149: note = RuvC_domain
  SITE 9: note = RuvC_P1
  SITE 53: note = RuvC_P2
  SITE 88: note = RuvC_P3
  SITE 90: note = RuvC_P4
  SITE 93: note = RuvC_P5
  REGION 212..298: note = Tnp_domain
  SITE 220: note = Tnp_P1
  SITE 250: note = Tnp_P2
  SITE 258: note = Tnp_P3
  SITE 259: note = Tnp_P4
  SITE 271: note = Tnp_P5
MSIKVVGIDIAKNLFQVCVLSTDGQILSNRKIKRDKLLDTIRQLPEQTALAMESCATSHHWGRIFQELGYTVALIPAQHVKPFVGRQKNDANDARAICEAFSRPDIYFVPVKSVEQQDLKAIRSVRKRLVENRTALANQIRGLAAEYGVVFPISIKALRCHLPLALEDAENELSPVIRNLLQTLYYDFISLSEEIDEMTQSVTMLSQQNPRYEAIRNIPGFGPILTAALISEVGAGNQFQNGRQFSAWCGLVPKQNSTGGKSTLGSLSKNGNRELRTLLIHGARAVVRCGAKKSDAMGAWLRGLIARRGKAKAIVALANKLGRVTWHILAKNSEYDINQAFKPV

SEQ ID NO: 16603 - protein, 354 aa, unidentified
  source 1..354: note = protein_20a23d6
  REGION 6..147: note = RuvC_domain
  SITE 9: note = RuvC_P1
  SITE 52: note = RuvC_P2
  SITE 87: note = RuvC_P3
  SITE 89: note = RuvC_P4
  SITE 92: note = RuvC_P5
  REGION 211..297: note = Tnp_domain
  SITE 219: note = Tnp_P1
  SITE 249: note = Tnp_P2
  SITE 257: note = Tnp_P3
  SITE 258: note = Tnp_P4
  SITE 270: note = Tnp_P5
MQIRTIGIDLGKTVFHLVGLNLRGEAVVRKKCSRTQLLQFTANIQVDLIGMEACAGAHFLSRALREQGHEVRIIPAQYVKPYVKTNKSDYIDAEAIAEAVGRPTMRFVPIKTDDQLDMQSLHRVRERWVIRRTAVVNQIRGLLLERGITLRQGRRHLEAALPGILEDATAKLSGALRMLISQLKHELEELANFIGEADGSMERASRENESCRRLLSVPGIGPVTATALIAAIGNGAAFRKGREFSAWVGMVPRESSTGGKQKLLGISKRGNPYLRKLFIQGARAVMLRGTKQSPGLRTWIEGVALRKHHNVAAVALANKMARIAWAVLAKEQAYRPSLLAEAGPDLSSLQMTPS

SEQ ID NO: 16604 - protein, 278 aa, unidentified
  source 1..278: note = protein_040eb4f
  REGION 1..95: note = RuvC_domain
  SITE 32: note = RuvC_P3
  SITE 34: note = RuvC_P4
  SITE 37: note = RuvC_P5
  REGION 209..254: note = Tnp_domain
  SITE 217: note = Tnp_P1
  SITE 247: note = Tnp_P2
MAQWLSDAGLFVSAINPKLIKDFGNNTLRKVKTDKADAIKIARYTLDNWCELKPYNNTDELRRQLKNMNRQFDFYMKQKTAMKNNLIALLDETFPGINTFFDSPARNDGSQKWVDFVTIFWHVDCVRRHSISSFSERYQSWCKKKNNNFQSQKPNDIYEFSHDLIATLSKDNVTKLLIQQAVDQLNIASKNVESLRLLMNQTAAKLPEYPIVLDMAGVGTTLGPQLIAEIGDVSRFSHKGALTAYAGLIQVPINLVTMSNKVFEHQSEELHNSEKPYF

SEQ ID NO: 16605 - protein, 315 aa, unidentified
  source 1..315: note = protein_6f7d07a
  REGION 6..159: note = RuvC_domain
  SITE 9: note = RuvC_P1
  SITE 56: note = RuvC_P2
  SITE 96: note = RuvC_P3
  SITE 98: note = RuvC_P4
  SITE 101: note = RuvC_P5
  REGION 192..276: note = Tnp_domain
  SITE 200: note = Tnp_P1
  SITE 229: note = Tnp_P2
  SITE 237: note = Tnp_P3
  SITE 238: note = Tnp_P4
  SITE 249: note = Tnp_P5
MTKDTIGVDISKDHLDAHRMSDGAIRRFANDSVGHGAFMSWLGQLETIHDTRIVYEPTGPYHRAFERRLAAAGAALVKVNPRQARRFAEATGKLAKTDRLDAAMLARMGALLELEARPARSPILNDLKDLHMAREALVKNRTAAKNRAKNLTLTVLKRHNAEQLRQIERQMAAIEREIMMLIKDNLVLARRFESLISIPGISATTAFALLIDMPELGTLAHGQAASLAGLAPVARQSGTWTGRAFIRGGRAKLRQALYMPALVAMRFNPDLKAKYDQLKAAGKAPKVAITAIMRKLIVLANALLRDGREWTATPT

SEQ ID NO: 16606 - protein, 343 aa, unidentified
  source 1..343: note = protein_124a0d8
  REGION 7..148: note = RuvC_domain
  SITE 10: note = RuvC_P1
  SITE 53: note = RuvC_P2
  SITE 88: note = RuvC_P3
  SITE 90: note = RuvC_P4
  SITE 93: note = RuvC_P5
  REGION 211..295: note = Tnp_domain
  SITE 219: note = Tnp_P1
  SITE 249: note = Tnp_P2
  SITE 257: note = Tnp_P3
  SITE 258: note = Tnp_P4
  SITE 270: note = Tnp_P5
MDKNTMIGVDLAKNIFQLHITTMTGALLSKKKLSRDRFKEFMKSHEPAIVVLEACGSAHYWAETLGEMGHDVKLIAPQYVKPFVKRQKNDAADAEAIVVAAQRPEMRFVATKTKEQRAKVVLFRSRERLVHQRTEQVNALRAVLYEHGYVIPQGIASISRVEDILAAPKCDLPDLVYDECRELLEHISNNTKLINAKTDLIKQLAKQTDMARQLQTIPGVGPMTAMAIEAFAPPMDLFRNGRDLSAWLGLVPRQYSSGGKERLGRVSKAGQADIRRLLIIGAMSRLTWLGKKSIPEGSWLAQMMARKPKMLVAIALANKMARIIWAMLTRGTDYRDPMKTATA

SEQ ID NO: 16607 - protein, 351 aa, unidentified
  source 1..351: note = protein_6393d25
  REGION 10..158: note = RuvC_domain
  SITE 13: note = RuvC_P1
  SITE 62: note = RuvC_P2
  SITE 98: note = RuvC_P3
  SITE 100: note = RuvC_P4
  SITE 103: note = RuvC_P5
  REGION 230..314: note = Tnp_domain
  SITE 236: note = Tnp_P1
  SITE 267: note = Tnp_P2
  SITE 275: note = Tnp_P3
  SITE 276: note = Tnp_P4
  SITE 287: note = Tnp_P5
MAARKRSVIGGVDTHRDTHHAAVIDSTGGLLADAEFPATTAGYTDLLAWMRSFGRVTAVGVEGTGSYGAGLARYLTSKKITVREVDRPDRRARRAQGKSDPIDAIAAARATLAGTAMGTPKTRTGPVEAIRALRVARRGAVKARTAALNQMRGLVAAAPEPLRAQLTKLSAAVLVSRCAALTYNPAKLHEPEHATAAALAGLARRVTALTDEITTLDRQVAPIVQKAAPRTTALFGVGPEVAAQLLTTAGDNPDRLHSEAALAHLCGAAPIPASSGRVRRHRLHRGGDRGANHALHTIALCRMRYDQRTQAYVHRRITEGLSKQEILRCLKRYIVRDVYTALLADFIALTT

SEQ ID NO: 16608 - protein, 311 aa, unidentified
  source 1..311: note = protein_45e47d8
  REGION 5..154: note = RuvC_domain
  SITE 8: note = RuvC_P1
  SITE 52: note = RuvC_P2
  SITE 92: note = RuvC_P3
  SITE 94: note = RuvC_P4
  SITE 97: note = RuvC_P5
  REGION 188..272: note = Tnp_domain
  SITE 196: note = Tnp_P1
  SITE 225: note = Tnp_P2
  SITE 233: note = Tnp_P3
  SITE 234: note = Tnp_P4
  SITE 245: note = Tnp_P5
MEDTIGIDISKDTLDAYWLSSREHRQFCNDKAGAKALAFRARKTEVSRVIFEAKGIYHRCIETGLAQNGISFARVNPRQARRFCEGTGQLAKTDRVDAALLAKMGALLELRADQPKSETLHDLKQLATARLALIKDRTAAKARLTATTHRMLSQQIKRRLKQIERDLSQVTEAIDTIVAADKDLAVRTEILTSIPGIAKITACAILTERPELGHLSGKQAAALAGLATISRQSGKWQGKERIQGDRASVRRAIYLPDIVDTRFNPDMKAKYEQLISAGKCKKLAITAVMRKLIVTANALLQDQRKWGEYPA

SEQ ID NO: 16609 - protein, 329 aa, unidentified
  source 1..329: note = protein_8b5f155
  REGION 16..162: note = RuvC_domain
  SITE 19: note = RuvC_P1
  SITE 65: note = RuvC_P2
  SITE 105: note = RuvC_P3
  SITE 107: note = RuvC_P4
  SITE 110: note = RuvC_P5
  REGION 204..290: note = Tnp_domain
  SITE 212: note = Tnp_P1
  SITE 242: note = Tnp_P2
  SITE 250: note = Tnp_P3
  SITE 251: note = Tnp_P4
  SITE 263: note = Tnp_P5
MKDKNFSMVNLSKKVIGVDVSSNVLVMSFMNKEGKQTILNVYNNKTDIERCLKKIDVNCYKIVVEATGSYSSKVLYYAYLLGFEVYQVSGLSVKKYGEAKNQISKTDEEDARLIRNFGETMKMLPYEPKKENIELLDQELTLWHDLEQEKARFSLKLKSLRQKPVLNKEVIKHYESIIKRIGKDIEKLQERLPKLEDEELKDTKELLESITGIGKKTALLLLVSTNNFKNFKSAKALSKYFGVAPRMYHSGNKKITIGKCRTSKGLIRSVLYVCSWSAIRYNKHCKALFERILQKGKCKKLALIAVCNKLLRLVFGIVNNKRKYQPDYI

SEQ ID NO: 16610 - protein, 343 aa, unidentified
  source 1..343: note = protein_0881c0b
  REGION 9..169: note = RuvC_domain
  SITE 12: note = RuvC_P1
  SITE 68: note = RuvC_P2
  SITE 108: note = RuvC_P3
  SITE 110: note = RuvC_P4
  SITE 113: note = RuvC_P5
  REGION 209..295: note = Tnp_domain
  SITE 217: note = Tnp_P1
  SITE 247: note = Tnp_P2
  SITE 255: note = Tnp_P3
  SITE 256: note = Tnp_P4
  SITE 269: note = Tnp_P5
MTKILKQVVGIDVAQNELVVSLGRMDQSLDKDVYAYKTFANKASWFGALLVWLKKHSDHTVGVRYVMEATGVYHEKLAYYLSDQGFEVSIVLPNKISSYMKTLEIKTVTDKTASQAICQFGLERSLELWQPPKKLIRDLKQLTRERDQIVADRTIAKNQLHAEQAEAFPNDRSIYRANQRVKLLVEQEREIKKEIAEFVRTDRELHKKIDLVTTIPGVGSLTAVIAIAETNGFELIRSKKQLVSFAGLDVVGKDSGTSVKGKPRISKKGNRHLRRAMHMPALTAIRNDERFKAIFVRLVSKHGIKMKAAVAVQRKLLEMIYTIWMTEKPYDKQYLQKANTAVA

SEQ ID NO: 16611 - protein, 330 aa, unidentified
  source 1..330: note = protein_472dd94
  REGION 7..144: note = RuvC_domain
  SITE 10: note = RuvC_P1
  SITE 53: note = RuvC_P2
  SITE 80: note = RuvC_P3
  SITE 82: note = RuvC_P4
  SITE 85: note = RuvC_P5
  REGION 203..289: note = Tnp_domain
  SITE 211: note = Tnp_P1
  SITE 241: note = Tnp_P2
  SITE 249: note = Tnp_P3
  SITE 250: note = Tnp_P4
  SITE 262: note = Tnp_P5
MSAIKTIGIDLGKSTFHLVGHDHSGQELYRHKFSRAKLIQFISAHEPVTIVMEACCGANWLARRCQEFGHNVKPYVKSHKDDFIDADAITEAATRPKMRFVTPKSEQAQLGSVIRRIRTCYIRERTAVMNRISSILVEFGFSFPRGHANMKRLFQWLADTGQSLPPLLVFELREQLDHYNELNDKIKKQDKKIETLNHENELFTLLQSIPGVGPMTAACCLSAVSDPKDFSNGRNFAAWIGVVPFQYSTGGKPRLLGISKRGNKELRELFVHAARSVLWRDATAEKYFGTWLLDLKRRKPFNVALVALANKLAKIAWSVMATHKTFEIRT

SEQ ID NO: 16612 - protein, 406 aa, unidentified
  source 1..406: note = protein_672ea7b
  REGION 6..159: note = RuvC_domain
  SITE 9: note = RuvC_P1
  SITE 57: note = RuvC_P2
  SITE 98: note = RuvC_P3
  SITE 100: note = RuvC_P4
  SITE 103: note = RuvC_P5
  REGION 221..307: note = Tnp_domain
  SITE 229: note = Tnp_P1
  SITE 259: note = Tnp_P2
  SITE 267: note = Tnp_P3
  SITE 268: note = Tnp_P4
  SITE 279: note = Tnp_P5
MTAVMIGVDPHKGSHTAVAIDGTEEPLGEVRVRASAAQAERLVTWAAGWPERTWAVEGAGGLGHLLAQQLVAAGERVLDVQPKLGARVRLLATGASNKNDPNDARSVAIAALRSKGPRAVAADDHPAVLKVWAKRHRDLGRSRNQVACRLHAVLCDLIPGGIAQEISAAQAARVLESITPSGAVETARCELAAEFLADLRHLDTQIRDTKKKLATAVRASGTTLTEIFGVGPVIAGTVIGDVADVSRFPGRDQFAAYNGTAPVEVSSGNRKIYRLSLRGNRRINHAIHMAAVTQIRHRHSDGRAYYDKKVAEGKTHKEALRCLKRRISDAIFARLLADARRAAGAPPIAGPGGQPGNDSDSSAAGSHPGNRLFGQATPEPGTTLRPAAPHRRTAPKPTPKKTPETP

SEQ ID NO: 16613 - protein, 314 aa, unidentified
  source 1..314: note = protein_a1f1dd0
  REGION 1..66: note = RuvC_domain
  SITE 5: note = RuvC_P3
  SITE 7: note = RuvC_P4
  SITE 10: note = RuvC_P5
  REGION 176..276: note = Tnp_domain
  SITE 184: note = Tnp_P1
  SITE 214: note = Tnp_P2
  SITE 222: note = Tnp_P3
  SITE 223: note = Tnp_P4
  SITE 236: note = Tnp_P5
MRKVKTDAIDAYLLCELFYKEELEPYKKRGVQLLNLRNLTRQHENITGVMIQTKLQFQAVLEQVFPEYKGVFGDLYSNVSLLTLSEFPSSEDILKASEESITDKIYELCKSRSIRWANEKALQLKAAAARNPFEKTVYQSHILSLDMYIKILLQYKEHLSKLESEIDALAKEIEEYSIIKSIPGIGEKIAATIISEIGEIDRFNNPKKLVAFAGVDPSVFESGKFSATKNRITKRGSSRLRHALFMAVRCAIRDCRKTKTDDTIIPRNKKIREFYDKKREEGKPFKVAIIACVNKLLHWIFALLKNKTTYQDLA

SEQ ID NO: 16614 - protein, 349 aa, unidentified
  source 1..349: note = protein_4ae73ce
  REGION 6..163: note = RuvC_domain
  SITE 9: note = RuvC_P1
  SITE 68: note = RuvC_P2
  SITE 106: note = RuvC_P3
  SITE 108: note = RuvC_P4
  SITE 111: note = RuvC_P5
  REGION 212..299: note = Tnp_domain
  SITE 220: note = Tnp_P1
  SITE 250: note = Tnp_P2
  SITE 258: note = Tnp_P3
  SITE 259: note = Tnp_P4
  SITE 272: note = Tnp_P5
MKKIIVGIDVSKEKIDASAILVTGNQLGMQKLDYQTFENRPMGFRRMVVWAKHLVKGITLDDVMFCCETTGAYDHKLCDYLFAKGLDIWRESALQIKKSSGLRKGKDDKADSLAIAEYAMRHADKAVYYVSPSQDIRELKELLLYRHKLEQEKASTTVRVTGLKATAGKSPSRNFILRDAQKRIKQLEKSIKECEKQILEIYGRNEEMKKSYTHITSIKGVSIVNATAMIAYTNNFKNITSSRKLASYYGVAPFREKSGTSIDKKAKVNCYSNTMLRSYLTMAAKHTIKANGIYFDYYNRMIAAGKCYGIAINNVKNKLLNLSISLVKNDMDYEACHEYKRLQGKAELA

SEQ ID NO: 16615 - protein, 328 aa, unidentified
  source 1..328: note = protein_3c241f5
  REGION 4..152: note = RuvC_domain
  SITE 7: note = RuvC_P1
  SITE 52: note = RuvC_P2
  SITE 92: note = RuvC_P3
  SITE 94: note = RuvC_P4
  SITE 97: note = RuvC_P5
  REGION 191..278: note = Tnp_domain
  SITE 199: note = Tnp_P1
  SITE 229: note = Tnp_P2
  SITE 237: note = Tnp_P3
  SITE 238: note = Tnp_P4
  SITE 251: note = Tnp_P5
MSYVGIDISKDSFVVAFSSASKSKTITYQNDDKGIEKFINTLDKEQHHCVMEATGNYGVNLLYHLCEQEIKVSLINPKQSNFLSKMKLSTAKTDNKDARLLVEYGEKINPEVYKMPSDKIILLKQKQTVLTHLIKQRTASKNQLKSLELLNKKDNLAIDMLKNNIDNLDKLIDNLEKDIVSITEEEFEKQVQLLTSIKGIGKKVATTLVIITNGFSFFENPKQLSRYIGICPTYQQSGKSLNYNGHINRNGHSTLRGQLFIASWSATKYNSSCKALFERLREEGKPWKLAQIAVCNKLIRQAFAVIKSGVAYIDGHIPTLSAPMQTAI

SEQ ID NO: 16616 - protein, 379 aa, unidentified
  source 1..379: note = protein_315e817
  REGION 7..154: note = RuvC_domain
  SITE 10: note = RuvC_P1
  SITE 58: note = RuvC_P2
  SITE 94: note = RuvC_P3
  SITE 96: note = RuvC_P4
  SITE 99: note = RuvC_P5
  REGION 223..309: note = Tnp_domain
  SITE 231: note = Tnp_P1
  SITE 261: note = Tnp_P2
  SITE 269: note = Tnp_P3
  SITE 270: note = Tnp_P4
  SITE 282: note = Tnp_P5
MERIKFVGLDVHAETIAVAVAEQGGEVRSLGIIPNREDSVRKLVKKLRPVEQLRFCYEAGPTGYALYWQLTRMGAKCEVVAPTLVPVKAGDRVKTDRRDALKLARNCRAGELTPVWVPDAAHEALRDLVRAREAAKQDELRARHRLSKFLLRHGRRPPMGVKPWTIKYLEWVRREVHFDQMAQEATLLDYLHEVEHGAARIARLDSAITEAAKSAPPQMRAVIEALQALRGIAQVSAVTVVAELGELSRFVGAKQLMAYGGIVPSEDSSGERTQRGNITKTGNAHLRRVVVEAAWAYRHRPSVGAKLRRRQENVSEEVKEIAWKAQQRLHQRYRKLQAKGKNHGVVITAVGRELLGFIWAIGMKVETAQKDAAAARGLE

SEQ ID NO: 16617 - protein, 351 aa, unidentified
  source 1..351: note = protein_b661377
  REGION 12..153: note = RuvC_domain
  SITE 15: note = RuvC_P1
  SITE 58: note = RuvC_P2
  SITE 93: note = RuvC_P3
  SITE 95: note = RuvC_P4
  SITE 98: note = RuvC_P5
  REGION 217..303: note = Tnp_domain
  SITE 225: note = Tnp_P1
  SITE 255: note = Tnp_P2
  SITE 263: note = Tnp_P3
  SITE 264: note = Tnp_P4
  SITE 276: note = Tnp_P5
MPPATVQTISVVGIDIGKNSFHIVGLDDRGAIVLRQKWSRGQVEARFANLPPCLIGMEACVGAHHLSRKLKALGHEARLMPAKYVRPYSKGQKNDFRDAEAIAEAVQRPTMKFVATKTAEQLDLQALHRVRERLVHQRTGIINQIRAFLLERGIAVRQGLRFLRAELPRILAAPSDVLSPRMVRLIEGLGADWRRLDERIDEVSSEIEALAKQDAGCERLMSVPGIGPIISSAVVAAIGTGEAFSKGRDFAAWLGLVPKQISTGDRTILGKISKRGNRYLRTLFVQAAWVVLVKIKSTRWGTHALRDWIEGAKKRLHHNVLAVALANKLARIAWSVLARGRSFETSKLQTA

SEQ ID NO: 16618 - protein, 387 aa, unidentified
  source 1..387: note = protein_7096a0e
  REGION 12..164: note = RuvC_domain
  SITE 15: note = RuvC_P1
  SITE 61: note = RuvC_P2
  SITE 101: note = RuvC_P3
  SITE 103: note = RuvC_P4
  SITE 106: note = RuvC_P5
  REGION 266..351: note = Tnp_domain
  SITE 274: note = Tnp_P1
  SITE 303: note = Tnp_P2
  SITE 311: note = Tnp_P3
  SITE 312: note = Tnp_P4
  SITE 324: note = Tnp_P5
MIEEARAYDAVLGLDVGKRSHWACLASRDGEVLMSGPVWNSEADLDGLFSQVGADVLVVVDQVRNIGALAISRARAAGLPVAYLPGLAAHGASKLFAGDAKTDERDATVIAKTALGIPDALLPVPRDDERLEAARSLAAQRNHMVTCSTRDKNRLRSILLESCPAFESLADLADPHWIAMMERLGGPWGILDAGKASLGAVTRGADRKKIDSAWDAASNSTRPSDLRVNAENPQVMMLARRIREASEEADRLDAAIAELLAGDGTYGCLMTVPGIGPRTASELVISIRIEDFPDHDHLASYCGVAPRNRQSGTSISSVCAFRQGNKRLKNLLIFSCNSLVRSDNRFGEYYRRCCDRGMCHGEALKAVARKRLKVIYAIMRDRVPYSA

SEQ ID NO: 16619 - protein, 343 aa, unidentified
  source 1..343: note = protein_93f7b98
  REGION 7..149: note = RuvC_domain
  SITE 10: note = RuvC_P1
  SITE 53: note = RuvC_P2
  SITE 88: note = RuvC_P3
  SITE 90: note = RuvC_P4
  SITE 93: note = RuvC_P5
  REGION 212..301: note = Tnp_domain
  SITE 220: note = Tnp_P1
  SITE 250: note = Tnp_P2
  SITE 258: note = Tnp_P3
  SITE 259: note = Tnp_P4
  SITE 271: note = Tnp_P5
MQTITTIGLDIAKSVFQVHGVDAGGQVVIRRQLKRRHVLALFEKLPPCLVGIEACASSHHWSRELQTLGHTVRLMPPAYVRPYVKRQKNDAADAEAICEAVTRANMRFVPTKTPEQQSCLMLHRTRHLFIRQQTAVINSIRAHLAEFGIIAPVGRKGVTELLHVVADPNDKRVPEVARACLTALGAQLLSLKEQILEFDRLIMAWHRSNQTSKRLHYIPGVGPMLATALVASVVDPRTFRSGRNFSAWIGLVPKQHSSGGKDRLGSISKQGDRYLRSLFVAGALAVIRYAKIHGTGHRPWLTTLLARRPTKVAAIALANKIARMAWAMMAKGERYKQPVALAA

SEQ ID NO: 16620 - protein, 323 aa, unidentified
  source 1..323: note = protein_f204321
  REGION 9..157: note = RuvC_domain
  SITE 12: note = RuvC_P1
  SITE 58: note = RuvC_P2
  SITE 98: note = RuvC_P3
  SITE 100: note = RuvC_P4
  SITE 103: note = RuvC_P5
  REGION 197..283: note = Tnp_domain
  SITE 205: note = Tnp_P1
  SITE 235: note = Tnp_P2
  SITE 243: note = Tnp_P3
  SITE 244: note = Tnp_P4
  SITE 256: note = Tnp_P5
MVNLEKKVVGIDVSSKFLTISFKNAQNQEIVMNIGNLKKDILSCLKKLDQKDYKIVVEATGSYSSKILYYAYSKGFDVYQVNPLTIKKYAEVRNLISKTDDEDAKLIRDFGEKMEICPFEPKKENLEFLEQELNLLQDLEQEKARFSLKLKSLRQKARLNKEVVKHYETLINNLQKEIEKLLKRLPKLEDEELQENKTLLKSINGIGEKTSLLLLVATNHFKSFEHSKSVSKYFGVAPRMYHSGNKKITIGKCRTTKEYIRSVLFICSWSAVKCNPQCKALYERILEKGKCKKLALIAVCNKLLRQAFGIIKSKNKYQLDFAK

SEQ ID NO: 16621 - protein, 341 aa, unidentified
  source 1..341: note = protein_4e979a5
  REGION 8..165: note = RuvC_domain
  SITE 11: note = RuvC_P1
  SITE 64: note = RuvC_P2
  SITE 102: note = RuvC_P3
  SITE 104: note = RuvC_P4
  SITE 107: note = RuvC_P5
  REGION 205..292: note = Tnp_domain
  SITE 213: note = Tnp_P1
  SITE 243: note = Tnp_P2
  SITE 251: note = Tnp_P3
  SITE 252: note = Tnp_P4
  SITE 265: note = Tnp_P5
MKKNVFFIGLDTSKDDFAASIYQSPGQAVITKEAIPNNPKGFTQFISWLKEQQITKSNSRICMEATGVYSQAIAYYLLLHGFPVSIEPPLKVKRAFDPVGHKTDSIDSKQIAEYAYRFQDELTAWQPKEELLEKIRQLLSVREQFTKQKTALKNAMHAYSLQRVQVELIRKAHLETLAQIEKQIARIDKELSKLIKQDPLISQRASYLDSIPGCGMLLAAHLLVLTDNFTRIQKAKRLASFIGIVPYQHKSGTSVAKRAKIRHFGPGPIRKLLRLAAQSVATHDATFRRYYLRKLAQGKAKSLVLNNIANKLLKVACSIIRDNTRYIKDHQSIHPMYVKSA

SEQ ID NO: 16622 - protein, 400 aa, unidentified
  source 1..400: note = protein_399cde1
  REGION 5..163: note = RuvC_domain
  SITE 8: note = RuvC_P1
  SITE 62: note = RuvC_P2
  SITE 102: note = RuvC_P3
  SITE 104: note = RuvC_P4
  SITE 107: note = RuvC_P5
  REGION 273..362: note = Tnp_domain
  SITE 281: note = Tnp_P1
  SITE 311: note = Tnp_P2
  SITE 319: note = Tnp_P3
  SITE 320: note = Tnp_P4
  SITE 333: note = Tnp_P5
MNSVVGLDVAKGESQVQAFLDQSEPYGKSFSIKHTREELDRFIGFLKEIEEVTAKMPMIILESTGHYHTPVIQYLEEQGVLYILLNPIISYQAKKSSLRKVKTDAIDAYQLCVLYYKEDFEPHKIRGIQLLDLRNLSRQQEIVTNMYVEAKLQFHTILDQVFPEYRKVFGDLYSKVSLLMLKEYPTSEAVLTVGESKLAESVMEFCPSRSGQWAWEKAKKIMDSASRNPFGTSVYQSHLINLRMYIELLFHYQGHLSDLEDRIVALANEMEEYKMIQSIPGIGEKIAATIISEIGEIDRFNHPKKLVAFAGVDPSVHSSGKFTATINRITKRGSSRLRHSLYLAVLCGIRSSRNKKLKAFYDKKKSEGKPAKVAIVACINKLLHWIYALLKRKEMFLDLA

SEQ ID NO: 16623 - protein, 412 aa, unidentified
  source 1..412: note = protein_687facf
  REGION 10..158: note = RuvC_domain
  SITE 13: note = RuvC_P1
  SITE 64: note = RuvC_P2
  SITE 98: note = RuvC_P3
  SITE 100: note = RuvC_P4
  SITE 103: note = RuvC_P5
  REGION 252..340: note = Tnp_domain
  SITE 260: note = Tnp_P1
  SITE 291: note = Tnp_P2
  SITE 299: note = Tnp_P3
  SITE 300: note = Tnp_P4
  SITE 311: note = Tnp_P5
MLKIVYPICCGMDVHKSFVVACIATTNDHGVTTYKSKRFSTFTNDLRRCAAWLAENHCRDVCMESTGKYWIPIYNILEASCTIVLAHPKYVKAIRGKKTDKKDAKWIADIFKHDLVSGSFIPPADIRQLRDLVRYHWKLTNYTTGEKNRAQNCLTVSNIKLDDVFSDVFGKAASAITTQLLESNEPFDVTPYLTKGIKAPVEKIQAAVDGEMCAEQAEKLRIIRTHMDTLELCKLNLHSLILTIAEKYLPQLNIVTTAPGIQAFSAIGIISEIGVDMSVFPSSKHLCSWAGLTPQNNESAGKKKTTRISRAGAYIKPLLVQCALCAIRAKQFPEVRRRYLALKKRRGHKKAIIAIARMLLTAVYNMLKKNEPYNPELYCKDDRPPAHREVSVEEAVYILQRQGYLVTAPSSP

SEQ ID NO: 16624 - protein, 311 aa, unidentified
  source 1..311: note = protein_c21b10d
  REGION 6..154: note = RuvC_domain
  SITE 9: note = RuvC_P1
  SITE 53: note = RuvC_P2
  SITE 92: note = RuvC_P3
  SITE 94: note = RuvC_P4
  SITE 97: note = RuvC_P5
  REGION 188..272: note = Tnp_domain
  SITE 196: note = Tnp_P1
  SITE 225: note = Tnp_P2
  SITE 233: note = Tnp_P3
  SITE 234: note = Tnp_P4
  SITE 245: note = Tnp_P5
MTEHNIGVDISKSYLDVFRLENDKAQRFDNSAAGFRALTKWLGEAPVARIVFEPTGPYHKAFEGAFGKTFPLVKVNPLQARRFAQAHGTRAKTDAVDAQMLARMGAAFDLEPQAPCSKETLVLKDLHVARAVLIKDRTRLRNRAQTQDIALLKRQTKARLAQVDRQIAELDAEIAALIEAHEATARNRDILCSMPGIGAVTAAAMLTLLPEIGRLHRKQVASLTGLAPITRQSGQWQGKSFIGGGRKPLRDALYMPALVAMRFNPDLKVKYEGLRAAGKPAKVAIVAIMRKLIETANALVKADRTWTPKNA

SEQ ID NO: 16625 - protein, 299 aa, unidentified
  source 1..299: note = protein_4eeee3d
  REGION 9..157: note = RuvC_domain
  SITE 12: note = RuvC_P1
  SITE 56: note = RuvC_P2
  SITE 96: note = RuvC_P3
  SITE 98: note = RuvC_P4
  SITE 101: note = RuvC_P5
  REGION 195..279: note = Tnp_domain
  SITE 203: note = Tnp_P1
  SITE 232: note = Tnp_P2
  SITE 240: note = Tnp_P3
  SITE 241: note = Tnp_P4
  SITE 252: note = Tnp_P5
MSLPNPLCVGIDVSKTTLDIAATRAFAQFTTNNDADGFDAIIAELRKHSVALILMEATGGLEAAVACSLQADGFEAAVVNPRQARDFARAMGHLAKTDRIDARVLAQMAEVIHRHPERERFIRALPDAERQVLAAMVVRHRQLIAMLVAERNRLHPAHPQSRKSINIIIQALENELARIDEDMNRHIQSHFKELTERLSSIKGVGTITAAALLAEVPELGRLSRREISALIGVAPVNRDSGTMRGRRTIFGGRAGPRTVLYMATLVAIRFNPVIKAFYMRLLTPEKPKKWRWLPVCVSC

SEQ ID NO: 16626 - protein, 345 aa, unidentified
  source 1..345: note = protein_246b3fc
  REGION 6..147: note = RuvC_domain
  SITE 9: note = RuvC_P1
  SITE 53: note = RuvC_P2
  SITE 86: note = RuvC_P3
  SITE 88: note = RuvC_P4
  SITE 91: note = RuvC_P5
  REGION 210..301: note = Tnp_domain
  SITE 218: note = Tnp_P1
  SITE 250: note = Tnp_P2
  SITE 258: note = Tnp_P3
  SITE 259: note = Tnp_P4
  SITE 272: note = Tnp_P5
MMKTIAGVDLAKKVVQVCVYANKKVHSNTEMTPNEFTCWLANSESATVIFEACGTSNYWKQLAVSLGHDARLISPKLVASVRQNQKTDKNDALAIIQASLLPDVAFISGKTMDQQQLQSVMRLRELSVRQKTAAKNQLTALLTEFNIKVSHKHGGLRGSIESTLEDAENGLSSEFLMALSVAWEQYLSLVNAVDTYDTCLEKSLQSQSDCKKLLKIEGVGMLNAVSLYIALGCADIGTFTKGKDAAACIGLTPIQHSTGGKVKLGSIGRRVKNNILRSQLITGAMAVVSHLANRPARTKKELWLKALIERRGKKCAAVALANKNVRTAFAILTQGTEYKAEPIVA

SEQ ID NO: 16627 - protein, 397 aa, unidentified
  source 1..397: note = protein_316608f
  REGION 4..160: note = RuvC_domain
  SITE 7: note = RuvC_P1
  SITE 57: note = RuvC_P2
  SITE 97: note = RuvC_P3
  SITE 99: note = RuvC_P4
  SITE 102: note = RuvC_P5
  REGION 274..361: note = Tnp_domain
  SITE 282: note = Tnp_P1
  SITE 312: note = Tnp_P2
  SITE 320: note = Tnp_P3
  SITE 321: note = Tnp_P4
  SITE 334: note = Tnp_P5
MIAVGIDVSKSKSTVAIVRPDGTILLKPHEFAHTISDLSQLSNLIRSYHEDAKIALESTSHYHYPIVKALLNENFSVFVINPFLIKKFMDNNIRKGKTDKKDAVRIAYFALEKSYQLKPYSPADQKYDDLKFLSRQYNQCVSMKVKARVQTANLLDEIMPGIQNIIPISSKYLENTLFYDFIEKYQNYEKIIHMGEKRFINSYIAFAQKHRCRSSHKKALAIYEAASNSITTRSHDISTSLALSQCLLLLKQASSSADLLLRQMQSVAYTLPEYNIVRSMHGVGDRLAPLLIAEIGDVRRFTSAKALNAYAGNDAPPYQSGQFEGTNRHISKRGSAYLRKACYQVMHSLKVHKPENDAVYQFILKKESEGKHKAVAKMAGVNKFLHIYYARVMEMYR

SEQ ID NO: 16628 - protein, 391 aa, unidentified
  source 1..391: note = protein_dbcf746
  REGION 4..163: note = RuvC_domain
  SITE 7: note = RuvC_P1
  SITE 60: note = RuvC_P2
  SITE 101: note = RuvC_P3
  SITE 103: note = RuvC_P4
  SITE 106: note = RuvC_P5
  REGION 266..353: note = Tnp_domain
  SITE 274: note = Tnp_P1
  SITE 304: note = Tnp_P2
  SITE 312: note = Tnp_P3
  SITE 313: note = Tnp_P4
  SITE 326: note = Tnp_P5
MICVGIDIAKDKHDCFILSSESEVLADVFTIPNNAEGFDALLQTIRRCTRPADKIKVGLEATGHYSYNILGFLLDCSLPTYVINPLHTNLYRKSMTLRKTKTDRVDARTIATMLMSDVNLKSYTDASYHNEELKSLTRYRFDKARERAKLKCSVSRLVYILFPALEKLVPTLHMTSVCALLSNFPGAKQIASVHLTRLTNLLHEASKGRYGRDKAIEIRNASRNSIGSTMPAKSLELKHTIRLIGELDVEIDEIENEINSIIDEAHSPITTIPGIGNCMGAMILAEVGDFSNFASPDKILAYAGLSPSTYQSGQLSNCYSHMEKRGSRYLRYAIFNATKYVYHWDPSFVAYLAKKRAEGKHYNVAISHAAKKLVRLIYAMEKTRQPYRPAA

SEQ ID NO: 16629 - protein, 292 aa, unidentified
  source 1..292: note = protein_0c6a5a2
  REGION 4..155: note = RuvC_domain
  SITE 7: note = RuvC_P1
  SITE 60: note = RuvC_P2
  SITE 100: note = RuvC_P3
  SITE 102: note = RuvC_P4
  SITE 105: note = RuvC_P5
  REGION 200..289: note = Tnp_domain
  SITE 208: note = Tnp_P1
  SITE 237: note = Tnp_P2
  SITE 245: note = Tnp_P3
  SITE 246: note = Tnp_P4
  SITE 256: note = Tnp_P5
MFYLGIDVAKAKLDCCLLLDEASDKHKTKVVKNTPSGIIDLLAWVAKQNVSPEALHIVMEATGVYHEQAAMALADAGVMVSIINPAQIKDFGRGLAVRTKTDGVDSVVLARYGALLKPKAWVPPPQEARVLQALLVRREAIAQDLQRERNRQEKAHATDTPALIHKSLEESIGFLVKQLAQLQKDIDAHIDQHSNLQKDRALLQSIPVIGPQVGSNILSVIHNHDFGSAEQLAAYLGLVPVERQSGSSVQRLLARGKSKMSSLGAAMRKLVYLCFGVLKTQQPYQHDYLKNV

SEQ ID NO: 16630 - protein, 323 aa, unidentified
  source 1..323: note = protein_e613b30
  REGION 9..154: note = RuvC_domain
  SITE 12: note = RuvC_P1
  SITE 57: note = RuvC_P2
  SITE 97: note = RuvC_P3
  SITE 99: note = RuvC_P4
  SITE 102: note = RuvC_P5
  REGION 195..279: note = Tnp_domain
  SITE 203: note = Tnp_P1
  SITE 232: note = Tnp_P2
  SITE 240: note = Tnp_P3
  SITE 241: note = Tnp_P4
  SITE 252: note = Tnp_P5
MVRSYQNFIGIDIGKFKNVVAVHKQKNAVEFDNNTSGWQQLCQKFSDILPNSLVTLENTGKYELGLSHFLIDKNITVHRANTRKVKSFILSHGTLAKSDKSDARALAQYGFERHRTLSLFVPTSEKQSTLVALCQRRDDITQMRTQEKCRLEAPENDHIRESCQKTIEFFNSQIDELNNTIQRIIDESHELQEHQKILKTVPGIGKKLSQDFLCLIPELGYLNRREVASLAGVAPHPRESGKAVGYRRIIGGRSNVRKKLFTAAMSTARSKSVLGAFYSKLVESGKKKMVAITALMRKIIVIANARLKEAINLHTLTTVAEIG

SEQ ID NO: 16631 - protein, 342 aa, unidentified
  source 1..342: note = protein_42f5e7e
  REGION 6..152: note = RuvC_domain
  SITE 9: note = RuvC_P1
  SITE 53: note = RuvC_P2
  SITE 91: note = RuvC_P3
  SITE 93: note = RuvC_P4
  SITE 96: note = RuvC_P5
  REGION 212..299: note = Tnp_domain
  SITE 220: note = Tnp_P1
  SITE 250: note = Tnp_P2
  SITE 258: note = Tnp_P3
  SITE 259: note = Tnp_P4
  SITE 271: note = Tnp_P5
MTLATLGIDLAKNVFAVHGVDKAGKAVLIKPRVMRDQLAALIAQLPPCLIGMEACSGAHHWARMFQQHGHTVKLMASKLVAPYRMSGKRGKNDAADAAAICEAVTRPNMRFVPLKDEHQQAALCLHRTRQGFIEERTATYNRVRGLLSEFGIVLPQSPGKLRSNIAVRMDDALPGWANRCIRDLLEHINRLEERLGEYDRAIGELARQDERSRRLMELRGIGPTTASALLATLGAALDFRNGRQVAAWLGLTPSQYSSGGKARLGGITKAGDAYVRTLLVSGARAVMANLRDKQDRLSRWIRSLVERRGYWRAAVAIAAKNARMAWAVLKYGDAFQLEPVEA

SEQ ID NO: 16632 - protein, 275 aa, unidentified
  source 1..275: note = protein_0174494
  REGION 1..81: note = RuvC_domain
  SITE 19: note = RuvC_P3
  SITE 21: note = RuvC_P4
  SITE 24: note = RuvC_P5
  REGION 185..248: note = Tnp_domain
  SITE 192: note = Tnp_P1
  SITE 222: note = Tnp_P2
  SITE 230: note = Tnp_P3
  SITE 231: note = Tnp_P4
MNPLHTNLYRKSLSLRKTKTDRVDARTIATMLLSDVDLKSYTDTAYHNEELKSLTRYRFDKVRERAKLKQSVSRLVTILFPELEKLVPSLHIASVYSLLSEYPGAKQVSEVHLTKLTNLLTTASKGRYGKDKAIQIRDAAKTSIGSVMPAKSLELKHTIKLIKELTSEIDEIEDSIQQIMDELHPPILSIPGVGIQSAAMILAEIGDFSNFESPDKILAYAGCSPSTYQSGKLTKLLRSYGKAWFTLFAICPLQRNQVRLSLESCLCQIPCQKTC

SEQ ID NO: 16633 - protein, 289 aa, unidentified
  source 1..289: note = protein_0a61720
  REGION 2..94: note = RuvC_domain
  SITE 33: note = RuvC_P3
  SITE 35: note = RuvC_P4
  SITE 38: note = RuvC_P5
  REGION 157..242: note = Tnp_domain
  SITE 165: note = Tnp_P1
  SITE 195: note = Tnp_P2
  SITE 203: note = Tnp_P3
  SITE 204: note = Tnp_P4
  SITE 216: note = Tnp_P5
MHWNHWGRIFQELGHRVALIPAQHVKPFVGRQKNDANDARAICEAFSRPDIHFVPVKSVEQQDLKAIRSVRKRLVENRTALANQIRGLAAEYGVVFPLSIKSLRSHLPLAIEDAENQLSHVMRSLLQTLYCNFINISDEIDEVTQSITRLSQQHPRYEAVKNIPGFGPILTAAIISEVGSGKQFQNGRQFSAWCGLVPKQNSSGGKSSLGALSKSGNRDLRTLLIHGARAVVRCRTNSMDPMGVWLRSLIARRGKAKAIVALANKLGRVVWRVLSTDCEYDINRAFKPL

SEQ ID NO: 16634 - protein, 349 aa, unidentified
  source 1..349: note = protein_03fcd23
  REGION 12..152: note = RuvC_domain
  SITE 15: note = RuvC_P1
  SITE 58: note = RuvC_P2
  SITE 93: note = RuvC_P3
  SITE 95: note = RuvC_P4
  SITE 98: note = RuvC_P5
  REGION 217..304: note = Tnp_domain
  SITE 225: note = Tnp_P1
  SITE 255: note = Tnp_P2
  SITE 263: note = Tnp_P3
  SITE 264: note = Tnp_P4
  SITE 276: note = Tnp_P5
MRTKPLSEAHAYGIDIGKRVFHVVAVDRDGAVIQRAKFGRETLHLFFDMAPKALIGMEACPGSQWLARKLIEMGHDARIIPARFVKPYVKSNKSDTIDAAAIAEAVTRPTMRFVQVRTPEQVDLQALHRIRDRLVAQRTGLMNQARAFCIEYGLVMRVGAGGFHADIRQHLANPENGLTQNMRALLNDLLDDLVYIESRVKTLSARIEAIANEDETIRRLLTIPGIGALGATALVAAAGDGRQFRKARDMAAWLGLVPAEHSTGGKQTLLGISKRGNGYVRRLIIHGARSCFLHLNRESHALGRWLNALEARTHRNKAVVALANKLTRIVWAILTKPGTVYMRSKGAAA

SEQ ID NO: 16635 - protein, 325 aa, unidentified
  source 1..325: note = protein_1d8df51
  REGION 19..191: note = RuvC_domain
  SITE 22: note = RuvC_P1
  SITE 66: note = RuvC_P2
  SITE 106: note = RuvC_P3
  SITE 108: note = RuvC_P4
  SITE 111: note = RuvC_P5
  REGION 202..286: note = Tnp_domain
  SITE 210: note = Tnp_P1
  SITE 239: note = Tnp_P2
  SITE 247: note = Tnp_P3
  SITE 248: note = Tnp_P4
  SITE 259: note = Tnp_P5
MIAIASRAKPEMRDTPITIGIDVSKDHLDAALHPGSATRRFDNDAAGHTALRRWIGKRAVARIVFEATGIYHRALERRLTQAGLPVCKVNPRQARRFAEATGTLAKTDRVDALMLARFGVALEPAIRQAPSEKQAELAELVAAREGLSRDRTRTLNRKAATENGLLLRQTRHRLRQIEAQIAAIDKAVAALIDAEPVMAHRRDILLSIPGVGATTAHALLANMPELGSMEEGQAGALAGLAPITRQSGTWQGKSVIRGGRAQLRRALYMPALVAIRHNPDLKRQYDALVARGKPAMLAITAVMRKLIVLANALLRQDRSWAPKIA

SEQ ID NO: 16636 - protein, 342 aa, unidentified
  source 1..342: note = protein_a59c541
  REGION 6..148: note = RuvC_domain
  SITE 9: note = RuvC_P1
  SITE 52: note = RuvC_P2
  SITE 87: note = RuvC_P3
  SITE 89: note = RuvC_P4
  SITE 92: note = RuvC_P5
  REGION 211..297: note = Tnp_domain
  SITE 219: note = Tnp_P1
  SITE 249: note = Tnp_P2
  SITE 257: note = Tnp_P3
  SITE 258: note = Tnp_P4
  SITE 270: note = Tnp_P5
MQISTIGLDIAKNVFQVHGIDANETVVVRKRLRRSQVLAFFKALPPCLIGMEACATAHYWARELTKLGHRVRLMPAKDVKAYVKRNKNDAADAEAICEAVRRPTMRFVQVKSAEQQGQLMQHRTRDLLMRQRTQSINALRAHLAELGIVAAQGDKGVKELLSIVADEKDARLPIDARASVIVLAAQLQAVQTLIGSIEKRIKTQHRSNEASKRLETIPGIGVIGASAIAATVADPTVFRSGRNFAAWIGLVPRQDSTGGKQKLGPISKQGDRYLRRILVVGAHSVLRRAKQNPEKYFWLTQLLARRPFKVVAVALANKMARMAWALLAHGGTYRAPVLAAAA

SEQ ID NO: 16637 - protein, 318 aa, unidentified
  source 1..318: note = protein_126a6e0
  REGION 5..150: note = RuvC_domain
  SITE 8: note = RuvC_P1
  SITE 55: note = RuvC_P2
  SITE 95: note = RuvC_P3
  SITE 97: note = RuvC_P4
  SITE 100: note = RuvC_P5
  REGION 190..276: note = Tnp_domain
  SITE 198: note = Tnp_P1
  SITE 228: note = Tnp_P2
  SITE 236: note = Tnp_P3
  SITE 237: note = Tnp_P4
  SITE 249: note = Tnp_P5
MATFVGVDVASKKFDVAVLDKENKIKNKVFTNSLQEFNDFFDWLNTYGTVHVCMEATGAYSTPLATFLFESSIAVSVENPARIHAFAQTELTRNKTDKSDARMIARYCRLYQPPLWQPEPLHIRQLLALVNRLDALKEMLRMEQNRMLVANEIIMSSLQKNTESLLSQIHEIQQNIKEHINANKELKKSKALLTSIPGVGDILSCTFLAYVGDISKFSNNKKLVAWVGLNPMQQESGLWKGHSKISKRGNIELRKALYMPAVAALTHNPILIALKNRLAGRGKAGKSIVCAGMKKLLQLMYGVLKSGEYFNAKIQLVK

SEQ ID NO: 16638 - protein, 392 aa, unidentified
  source 1..392: note = protein_e5df65e
  REGION 5..163: note = RuvC_domain
  SITE 8: note = RuvC_P1
  SITE 62: note = RuvC_P2
  SITE 102: note = RuvC_P3
  SITE 104: note = RuvC_P4
  SITE 107: note = RuvC_P5
  REGION 267..356: note = Tnp_domain
  SITE 275: note = Tnp_P1
  SITE 305: note = Tnp_P2
  SITE 313: note = Tnp_P3
  SITE 314: note = Tnp_P4
  SITE 327: note = Tnp_P5
MEPVVGLDVSKGTSMIQAFLKRNEAYGKSESIRHTELGFRRLGEVLIELRERTGEEPVVILEATGHYHRVVVAYLTTSGIKHIIVNPLLSKRAKSAQLRKVKTDAADAWHLAEMYYRGDVHPHRSWNENYTELQHVTRQHEFVTSLYVQAKLNMRALLDQVFPSYEEVFYDLYSVTALKALQACLSGQTQELDELIRQVAGKSHSESWIGTKTERLGKILQVWSREKKSAAQIQMLSSMVSLLLTMREQLQTIEEQMDRLAELLPEVELIKSIPGIGDKLAAAIVSEIGDASQFGDAKQLVAFAGLDPGVYSSGQFTASSNRITKRGSKRLRRALYMAAQCGLRRGTNPRLKAYYDKKRLEGKPYKVTVIACANKLLHHIYAILNKSQPYHA

SEQ ID NO: 16639 - protein, 396 aa, unidentified
  source 1..396: note = protein_3d8d715
  REGION 4..161: note = RuvC_domain
  SITE 7: note = RuvC_P1
  SITE 58: note = RuvC_P2
  SITE 98: note = RuvC_P3
  SITE 100: note = RuvC_P4
  SITE 103: note = RuvC_P5
  REGION 273..359: note = Tnp_domain
  SITE 280: note = Tnp_P1
  SITE 310: note = Tnp_P2
  SITE 318: note = Tnp_P3
  SITE 319: note = Tnp_P4
  SITE 332: note = Tnp_P5
MYAVGIDISKGKSTISIITLNGEVIEEPFEITHDQEGFNILLSKIKNYRKDEIKFVMEATGHYHLPLLNSLIENDYFVCVENALVIKKYCDIDLRKVKNDKKDSLKLALYCCEKWFKLKQYKIKDDLRQQLQFLSRRYVEYIKIQTDLKIQLTNLIDQTLPGIKEIVDSENRYQLLLDIYEKYSHPTLIIEKNKIDFINDIDLMAKKYGHRVGRIIGENLYIKAPTIKTSCPHNDSLQLSINSCILLLKSTLKVTNDIITKMDELASQLEEFKVVSNMKGVGLKTRSRLIAEIGDVRKYKNANALIASCGIDTPPYQSGTFNATNRHITKRGNKYLRKVGYEIVKSIKTNKPQIDNAVYLFIIKKENEGKPKKVAKIAGLNKFLRIYYARVMELYK

SEQ ID NO: 16640 - protein, 288 aa, unidentified
  source 1..288: note = protein_cb6909e
  REGION 29..171: note = RuvC_domain
  SITE 32: note = RuvC_P1
  SITE 75: note = RuvC_P2
  SITE 110: note = RuvC_P3
  SITE 112: note = RuvC_P4
  SITE 115: note = RuvC_P5
  REGION 231..276: note = Tnp_domain
  SITE 239: note = Tnp_P1
  SITE 269: note = Tnp_P2
MRWSPPPCVRYAGWVFYFRGNQHENVTLIGIDLGKHSFHVHCQDEMGNALLRKKFTRTRLMEFLASCQSATVVMEACAGAHFMARRIADLGHEAKLISPQFVRPFVKSNKNDFVDAEAICEAASRPSMRFVSPRTEDQQAMSALHRVRDSLIRQRVKTTNQMHAFLLEFGISMPRGIAVIRRLAAVLEENDFLAYLVRVLNRLHSQYIYLCGEIDEIDMELKTHLAENETAQRLLTIPGVGPLTASLLAARLGDGKNYASSRDFAASTGLVPRQYRWKNDTDGHQQAR

SEQ ID NO: 16641 - protein, 339 aa, unidentified
  source 1..339: note = protein_6c3c9eb
  REGION 6..147: note = RuvC_domain
  SITE 9: note = RuvC_P1
  SITE 52: note = RuvC_P2
  SITE 87: note = RuvC_P3
  SITE 89: note = RuvC_P4
  SITE 92: note = RuvC_P5
  REGION 210..297: note = Tnp_domain
  SITE 218: note = Tnp_P1
  SITE 248: note = Tnp_P2
  SITE 256: note = Tnp_P3
  SITE 257: note = Tnp_P4
  SITE 269: note = Tnp_P5
MNPTPVGIDIAKSVFQVHYVDEETGEIVNRPIKRQKFLEHFANRSLCLIGIEACGGAHHWARELAKMGHQVKLMPAKYVKAFNIRNKNDAADARAIWLAVQQPGKPVAVKTEMQQAMLALHRMRQQLVKFRTMQINSLRGLLTEYGEVMSKGRAALDGAIPNVLARISERLPAMLVDTMREQWNGLTKLDEQIAAIERRMREWVKHDPAVKAISEIPGVGLLTATAAVATMGDAKVFRSGREFAAWAGLVPRQSGSGGKVNLHGISKRGDTYLRTLLIHGARAVLSHAKDAGTWIEEMRRRRPANVVIVALANKMARMIWAVLAHDRPYQRDYVSRKPA

SEQ ID NO: 16642 - protein, 345 aa, unidentified
  source 1..345: note = protein_3a59ba2
  REGION 7..147: note = RuvC_domain
  SITE 10: note = RuvC_P1
  SITE 53: note = RuvC_P2
  SITE 88: note = RuvC_P3
  SITE 90: note = RuvC_P4
  SITE 93: note = RuvC_P5
  REGION 210..296: note = Tnp_domain
  SITE 218: note = Tnp_P1
  SITE 248: note = Tnp_P2
  SITE 256: note = Tnp_P3
  SITE 257: note = Tnp_P4
  SITE 269: note = Tnp_P5
MNQITRIGVDTSKSVFQLHGVDERDQPVLLKKLRRQQVLNFFGRLAPTKIGIEACGASHHWARSLRELGHEVVLLPPQYVKPYVMRGKNDAADAEAICEAMSRPKMRFVAIKSVEQQAAQMLLGVRDGLLRRRTQVSNQIRGYAAEFGLTAARGLARIEALLAEVADDASLPGLAQEMFIMLSGQYRHVNAQIQEIESKLKALHLSDEQSRRLAEIPTIGLITATALSAKVADPKAFRSGRDFAAWLGLTPKNHSTAGKVRLGGITRAGDEMLRCLLVSGATAVIRQAKLGKGYISAWLAALLQRSPPKLAAVALANKMARIAWKLMVSGERYNPLKATTVAVSA

SEQ ID NO: 16643 - protein, 388 aa, unidentified
  source 1..388: note = protein_07ab388
  REGION 4..160: note = RuvC_domain
  SITE 7: note = RuvC_P1
  SITE 58: note = RuvC_P2
  SITE 99: note = RuvC_P3
  SITE 101: note = RuvC_P4
  SITE 104: note = RuvC_P5
  REGION 264..348: note = Tnp_domain
  SITE 270: note = Tnp_P1
  SITE 300: note = Tnp_P2
  SITE 308: note = Tnp_P3
  SITE 309: note = Tnp_P4
  SITE 321: note = Tnp_P5
MYLVGIDIAKYNHQCFIATTHGEVINEFSFDNNSDGFKLLLKHLSALDQSLEIKIGLEATGHYGNTLKQLLSANGYTFIEFNPYLAKQFFKSTTIRKTKTDKVDARLLSSMLASVDYKTLHTKYYHTNELKSLTRTRNSLIETRSNSLVQITNALDIVFPEFKAHFSNRLGLTALYILKKYKTPEKISKLTKNQFQTISNKFMGKFTYPKFLKLKDLAKNTIGIKSNSITTVMIIHIDLFHSINTNIEILENEIKKIMSLTNCKMITIPGISLMSAATILGEVNDFNNFSNPAKLIAFSGFDIAIYQSGESLSYGKLVKRGSSLLRKTIWNLVLGSIRLIPEITEYYHKKRAEGKHRNVIFSAISRKLLRIIYHLETNNVSYDKNKIR

SEQ ID NO: 16644 - protein, 341 aa, unidentified
  source 1..341: note = protein_7c3c288
  REGION 6..148: note = RuvC_domain
  SITE 9: note = RuvC_P1
  SITE 52: note = RuvC_P2
  SITE 87: note = RuvC_P3
  SITE 89: note = RuvC_P4
  SITE 92: note = RuvC_P5
  REGION 211..296: note = Tnp_domain
  SITE 219: note = Tnp_P1
  SITE 249: note = Tnp_P2
  SITE 257: note = Tnp_P3
  SITE 258: note = Tnp_P4
  SITE 270: note = Tnp_P5
MNIKRIGIDLAKQVFQLHGVDQNEKAVLKKQLPRKKMLAYFQSLPPCLIGMEACGSSHYWARELQKIGHTVKLMAPQFVKPYVKGNKNDTNDAEAICEAVSRPNMRFVTIKTVAQQDVQSVHRIRSELVKQRTAKGNQIRGLLAEYGVVINKRIDVLRKALPSIFEDTENGLSADLRTLLEELRQDLIALDERVLVVTEKINVLAKADEDAQRLLKIPGIGPMTATAIISAIGNGKQFKCGRDLAAWLGLTPKQHSSGGKERLLGISKRGDAYLRTLLIHGARAVLRVSETKNDSLNCWLQKLCSRRNKNIAAVALANKNARIIWAILTKKTDYKMDGVAA

SEQ ID NO: 16645 - protein, 341 aa, unidentified
  source 1..341: note = protein_46df353
  REGION 6..146: note = RuvC_domain
  SITE 9: note = RuvC_P1
  SITE 52: note = RuvC_P2
  SITE 87: note = RuvC_P3
  SITE 89: note = RuvC_P4
  SITE 92: note = RuvC_P5
  REGION 211..302: note = Tnp_domain
  SITE 219: note = Tnp_P1
  SITE 249: note = Tnp_P2
  SITE 257: note = Tnp_P3
  SITE 258: note = Tnp_P4
  SITE 270: note = Tnp_P5
MDIDILGIDLAKRVFQLHGADRRGRLLHSSKVMRTELLSIVRKLSPHVIAMEACSSAHHWGRCFQEMGIEVRLISPQYVSPFVKTNKNDANDAAAIVEAASRPTMRFVPVKSVEQQDMRAVHRVRELLVHQRTALINQVRGLLGERGVIIAQTPAAFKRALPEILAKCEGEMTRTCQAILTELLEQMRVLEEQIARTNKLIAAFMKSSALCQKIAAIDGVGPITATAMVAAVGEAKEFKNGRHLSAWLGLVPRQYSSGGKSRLQGISKRGDTYLRTLLIHGARTVLRYAIGKADSRSRWLQELIARRGHNRAAVALANKNARVIQALLSNSDNYRPPIVAC

SEQ ID NO: 16646 - protein, 392 aa, unidentified
  source 1..392: note = protein_edfd375
  REGION 4..164: note = RuvC_domain
  SITE 7: note = RuvC_P1
  SITE 61: note = RuvC_P2
  SITE 102: note = RuvC_P3
  SITE 104: note = RuvC_P4
  SITE 107: note = RuvC_P5
  REGION 267..354: note = Tnp_domain
  SITE 275: note = Tnp_P1
  SITE 305: note = Tnp_P2
  SITE 313: note = Tnp_P3
  SITE 314: note = Tnp_P4
  SITE 327: note = Tnp_P5
MIFVGIDVAKDKHDCFIISSEGEVLADVFTITNSKEGFEHLLQTIHTCTGIGGSKIKVGLEATGHYSYNILGFLLDNGLPTYVINPLHTNLYRKSQTLRKTKTDRVDARTIASMLMSDVSLKPYTNIAYHNSELKSLTRYRFDKVKERATLKSSVARLVNILFPELEKLLPTLHTASSYALLSELPSAKHIAEVHLTHLTNLLYTASKGRYNKDKAIQIRETARNSIGTYMPAKALELKHTIKLIKEFDNEIAEIESVIQSIMDKINSPITTIPGISLRMGAMIIAEIGDFNNFDSPDKILAFAGLSPSTYQSGQLNNCYAHMEKRGSRYLRYALFNATKFVCNWCPLFADYLAKKRSEGKHYNVAISHAAKKLVRLIFALQKSGQPYIAKS

SEQ ID NO: 16647 - protein, 427 aa, unidentified
  source 1..427: note = protein_9695167
  REGION 11..174: note = RuvC_domain
  SITE 14: note = RuvC_P1
  SITE 68: note = RuvC_P2
  SITE 114: note = RuvC_P3
  SITE 116: note = RuvC_P4
  SITE 119: note = RuvC_P5
  REGION 293..380: note = Tnp_domain
  SITE 301: note = Tnp_P1
  SITE 331: note = Tnp_P2
  SITE 339: note = Tnp_P3
  SITE 340: note = Tnp_P4
  SITE 353: note = Tnp_P5
MNNALTTTLFIGIDVSSRTNYVFALDFFGKKLLSFQVKNNLPGSEQMVSKICSCLKENNLTHLTVAMESTSFYSWHLANTLSSHEALVWFKPKVYCLNPRVIAAYKKSFVDMDKTDPKDAFVIADFARVGKITTSPWSGAEYIALQRLTRCRLHIIENISREKSYILSNIFLKFSELAVLDKNETPFSNIFGATSEAVLTDYMSAEDIANTSIENLITFLIDKSKNRFSNPEATAEILQRAARDSYRLDKALYDPLNATIAASLNCIKALEKEVKSLDKAIEKAVKGFGNHQYQCLMSIPGIGPVFAAGIIAELGDITKFSNQACVAKYAGLTWRKKQSGNFTADNTFLTKTGNKYLRYYLLEASASVIRHIDEYSAYYQKKSDEALVHKHKRALALTSRKLVRLIFALLRNNQLYTSNEVVEKATI

SEQ ID NO: 16648 - protein, 400 aa, unidentified
  source 1..400: note = protein_7bcd781
  REGION 4..160: note = RuvC_domain
  SITE 7: note = RuvC_P1
  SITE 57: note = RuvC_P2
  SITE 97: note = RuvC_P3
  SITE 99: note = RuvC_P4
  SITE 102: note = RuvC_P5
  REGION 276..363: note = Tnp_domain
  SITE 283: note = Tnp_P1
  SITE 313: note = Tnp_P2
  SITE 321: note = Tnp_P3
  SITE 322: note = Tnp_P4
  SITE 335: note = Tnp_P5
MNAVGIDVSKGKSMVAIMRPFGEVVATPFEIKHTEIELKKMVCILEKLPGETRIVMEHTGIYWQPIAKALHDAGLWVSVVNALLIHKYGNNSIRKGKTDKLDAVKIANYCLDHWLDLDRFTLIDPIRQELKTCHRQYDQYIKLKVNLKNNLITLLDGTFPGLNTLFKSAPRDVDGHEKWIDFAIKFWHRECVCGCTEKSFTNQYRKWCTKAGYRFNEAKAASIYAHAAAQVNTLPMSDAIKRLVILAASQLNTIIETLSVIQNEMLTLASKLPEFPVVMKMFGVGPVLGPQLIAEIGDVRRFHHKQSLVAFAGVDAPPCQSGTFESKNRHISKRGSPRLRKTLFQIMSTIIQHAPADNPVFQFLDRKRQEGKHYYVYMTAAANKFLRIYYGTVRAYLEDT

SEQ ID NO: 16649 - protein, 390 aa, unidentified
  source 1..390: note = protein_c65a911
  REGION 4..163: note = RuvC_domain
  SITE 7: note = RuvC_P1
  SITE 60: note = RuvC_P2
  SITE 101: note = RuvC_P3
  SITE 103: note = RuvC_P4
  SITE 106: note = RuvC_P5
  REGION 266..351: note = Tnp_domain
  SITE 274: note = Tnp_P1
  SITE 304: note = Tnp_P2
  SITE 312: note = Tnp_P3
  SITE 313: note = Tnp_P4
  SITE 326: note = Tnp_P5
MIYVGIDVAKDKHDCCILDDEGRKVYPVFTISNDKVGFDELFSRIEKVTSDKTEIKVGLEATGHYSNNLLASLVDKGFPTVVINPLHTNLYRKGLSLRKTKTDKVDASSIAMMLMADRTLKPYSETSYHNEELKSLTRYRFDKVHERSKLKASLARLVNILFPELEKLVPSLHLNSVYVLLEELPGATYIASCHLTHLKKLLEDSSKGRYGRDKAIEIRNAAIDSIGAPMAAKSMELVHTIYLIRILSEEIEEIEESIKSIMDELHSPIMTIPGISYRMGAMILAEVGDFKRFDNADKILAYAGLSPSTYQSGQLDSSYSHMEKRGSRYLRYALFNATKFVCKWDESFGIYLGRKISEGKHYNVAVSHATKKLIRTIYRMELTGAGYSPR

SEQ ID NO: 16650 - protein, 314 aa, unidentified
  source 1..314: note = protein_e553c78
  REGION 1..86: note = RuvC_domain
  SITE 24: note = RuvC_P3
  SITE 26: note = RuvC_P4
  SITE 29: note = RuvC_P5
  REGION 189..274: note = Tnp_domain
  SITE 197: note = Tnp_P1
  SITE 227: note = Tnp_P2
  SITE 235: note = Tnp_P3
  SITE 236: note = Tnp_P4
  SITE 249: note = Tnp_P5
MPTYIINPLHTNLYRKSLSLRKTKTDKVDARTIASMIMSDVNLKSYTNTSYHNEELKSLTRYRFDKVKERAKLKSSISRLVCILFPELEKLVPTLHMASVYALLSEFPSANAIASSHLTRLTNLLSENSHGRYGKDTANLIRNAARNSIGSHMPAKSLELKHTIKLIKELTTEINEIETEIKSIMDKIDSPILTIPGIGYNTGAMIIAEIGDFNRFDSADKILAYAGMSPSTYQSGQLENCHSHMEKRGSRYLRYALYNATKYVCYWDESFGVYLGKKRSEGKHYNVALSHATKKLVRLIFAMEKSKQPYQPTV

SEQ ID NO: 16651 - protein, 403 aa, unidentified
  source 1..403: note = protein_1c59a2d
  REGION 6..162: note = RuvC_domain
  SITE 9: note = RuvC_P1
  SITE 59: note = RuvC_P2
  SITE 99: note = RuvC_P3
  SITE 101: note = RuvC_P4
  SITE 104: note = RuvC_P5
  REGION 276..363: note = Tnp_domain
  SITE 284: note = Tnp_P1
  SITE 314: note = Tnp_P2
  SITE 322: note = Tnp_P3
  SITE 323: note = Tnp_P4
  SITE 336: note = Tnp_P5
MNMNAVGIDISKGKSMIAIIRPYGEIVSLPFEIRHTSNEISSLINQIKSIEGESRIVMEHTGRYYEPLARELSQTNLFVSAVNPKLIKDFGDNSLRKVKSDKADAIKIARYALDNWNDLKQYNLMDEIRNQLKTMNRQFGFYMKHKTAMKNNFIGILDQTYPGVNTYFNSPARDDGSQKWVDFATAYWHVDCVRKLSLHAFTDHYQKWCKRNKYNFSKLKAEEIYGAAKELVPVLPKNDLTKLIVKQSVDQLNITSKTVEALRTLMNETASKLPEYSIVMEMKGIGPSLGPQLIAEIGDVTRFTHKGAITAFAGVDPGVNQSGTYEQKSVRTSKRGSSTLRKTLFQVMDTLIKTKPQDDAVYQFLDKKRAQGKPYYVYMTAGANKFLRIYYGRVKEYLTVLPQ

SEQ ID NO: 16652 - protein, 392 aa, unidentified
  source 1..392: note = protein_2ec50b3
  REGION 4..161: note = RuvC_domain
  SITE 7: note = RuvC_P1
  SITE 60: note = RuvC_P2
  SITE 100: note = RuvC_P3
  SITE 102: note = RuvC_P4
  SITE 105: note = RuvC_P5
  REGION 266..354: note = Tnp_domain
  SITE 274: note = Tnp_P1
  SITE 304: note = Tnp_P2
  SITE 312: note = Tnp_P3
  SITE 313: note = Tnp_P4
  SITE 327: note = Tnp_P5
MYYIGIDIAKNKHEVSIIDASGKLLSESISFSNTIKGFEKLIKYLSSYNVYSDNCIVGMEATGHYWLSIYSYLVECEFNTFVINPIQSEAFRKMYIRKTKTDSKDSFVIAQVMRFGEFSSSPLSDERLFELKNLTRYRFSLVDESSDWKRKLIALLDQVFPEYNKLFSDIFGVTSKNLLSKYPLPEDMLSISTETLAELLSKCSNGRFGFAKAEEIQNSALNTFGVKFAKRSFSFQIKQIIDQISFLEEQLKFLEKEIEYLLNDINPIITTITGIGSVLGASIIAEIGDISRFEKASQLVAYAGLDVSVKQSGEFNAINSAKLSKRGSPYLRRAIWLASTVAAFKDPALSVYYTNLRNRGKAHGTAMGAVARKLTNIIFAVLRDNKPYIPNI

SEQ ID NO: 16653 - protein, 345 aa, unidentified
  source 1..345: note = protein_f060b17
  REGION 6..150: note = RuvC_domain
  SITE 9: note = RuvC_P1
  SITE 54: note = RuvC_P2
  SITE 89: note = RuvC_P3
  SITE 91: note = RuvC_P4
  SITE 94: note = RuvC_P5
  REGION 213..300: note = Tnp_domain
  SITE 221: note = Tnp_P1
  SITE 251: note = Tnp_P2
  SITE 259: note = Tnp_P3
  SITE 260: note = Tnp_P4
  SITE 272: note = Tnp_P5
MNIIRVGVDIAKSVFHVHGVDRHGKTQWQGKYSRQKWLDALSRKVPAGAEIGMEACASSHHWARELQKRGYHVRLIAAQFVKPYVKSNKNDRVDAEAICEAMSRPNMRFVAPKTVAQQDIQAAHRIREELVGQRTAKANQIRGLVGEYGIVAPVGIQQLRRALPGWLEDAENGLTDNFRALLNGLAEDLRYLDDRITALDDRITESVKQDPIAKRLMTLRGVGPLTASALAGALGDGKAFRKGRDFAASLGLTPRQHSTGGRDRLLGISKRGDSYLRKLLVHGARAVLRHVDGKDDGLSHWLKGLAARKHVNVATVALANKTARIAWALVHNEEAYDEELAAADA

SEQ ID NO: 16654 - protein, 347 aa, unidentified
  source 1..347: note = protein_a891a16
  REGION 7..147: note = RuvC_domain
  SITE 10: note = RuvC_P1
  SITE 53: note = RuvC_P2
  SITE 88: note = RuvC_P3
  SITE 90: note = RuvC_P4
  SITE 93: note = RuvC_P5
  REGION 210..296: note = Tnp_domain
  SITE 218: note = Tnp_P1
  SITE 248: note = Tnp_P2
  SITE 256: note = Tnp_P3
  SITE 257: note = Tnp_P4
  SITE 269: note = Tnp_P5
MNQIIRIGMDTSKHIFQLHGVDAAEQPVLRRRLRRKEMVAFFSKLPPTVIGMEACGASHYWARELGQFGHTVKLIAPQHVKPYIKRNKNDGRDAEGLCEAMSRPTMQFVAVKTEEQQAALMLAGMRERLVARRTQLSNAIRGYAAEFGLTVAKGLDKIEPLLADIAADEALPGLARELFAMHGREYAHLQAELKKIEARLMAWHRANADSRRLAQIPGIGPIGATALVMKAPDPRLFPSGRHFAAWIGLTPKDHSTAGKTRLGTITRAGDEMLRSVLVAGATAVIQQARQGRGHASPWLLALLARKSSPKLAAIALANKIARIAWKLLVTGESYHAGGKPIASAHAA

SEQ ID NO: 16655 - protein, 315 aa, unidentified
  source 1..315: note = protein_a569133
  REGION 9..158: note = RuvC_domain
  SITE 12: note = RuvC_P1
  SITE 63: note = RuvC_P2
  SITE 97: note = RuvC_P3
  SITE 99: note = RuvC_P4
  SITE 102: note = RuvC_P5
  REGION 253..314: note = Tnp_domain
  SITE 261: note = Tnp_P1
  SITE 292: note = Tnp_P2
  SITE 300: note = Tnp_P3
  SITE 301: note = Tnp_P4
MEAMIERCAGLDVHQETVVACVLFGPLDKKPKPSIETFSTTTTGLLALSDWLATLQVSDVVMESTGVYWKPIWNILEGSFHLVLANARHVKNVPGRKTDVKDAEWLAKLLRCGLIESNFVPPEDIRDLRDLTRYRKKLIHHRTSEQNRIHKILQDANIKLTSVLSDIFGVSGRRILEAILNGEKIETDGLRKMVDWRTKASITDIASAINGRIRRHHRDMLRYHWEHMSYLEKAIEELEKQIDQLLSPYRKEVELLDGIPGVNKAAAATFIAEMGVDMSVFKSAKHLASWAGVSPGNYESAGKKKRVKPHKVTKL

SEQ ID NO: 16656 - protein, 341 aa, unidentified
  source 1..341: note = protein_314dbba
  REGION 7..149: note = RuvC_domain
  SITE 10: note = RuvC_P1
  SITE 53: note = RuvC_P2
  SITE 88: note = RuvC_P3
  SITE 90: note = RuvC_P4
  SITE 93: note = RuvC_P5
  REGION 209..295: note = Tnp_domain
  SITE 217: note = Tnp_P1
  SITE 247: note = Tnp_P2
  SITE 255: note = Tnp_P3
  SITE 256: note = Tnp_P4
  SITE 268: note = Tnp_P5
MSESALIGIDLGKHSFHLHGQDKLGREVFRKKLSRQQMMTLFGNLPACTVVMEACAGAHFVARQLMAMGHEAKLISPQFVHPFVKGNKNDFVDAEAICEAASRPSMRFVTPKTEAQQTLSVLHRLRESLVRDRTKTANQMHGFLLEFGISLPKGLAIMKRLASILAEHELPVRLTVLLQRLHEHFCYLDEQIKALDKELASQLADDDLGSRLLSLPCVGPITASLLAVEMGDGQQYKCSRDFAASVGLVPRQYSTGGRANLLGISKRGDKHLRQLLVQCARVYMQRLEHQKGALADWVRSLLGRRHSNVVACALANKLARIAWALAAHHTQYEAGPDALNA

SEQ ID NO: 16657 - protein, 343 aa, unidentified
  source 1..343: note = protein_61d8ff2
  REGION 6..149: note = RuvC_domain
  SITE 9: note = RuvC_P1
  SITE 54: note = RuvC_P2
  SITE 89: note = RuvC_P3
  SITE 91: note = RuvC_P4
  SITE 94: note = RuvC_P5
  REGION 213..300: note = Tnp_domain
  SITE 221: note = Tnp_P1
  SITE 251: note = Tnp_P2
  SITE 259: note = Tnp_P3
  SITE 260: note = Tnp_P4
  SITE 272: note = Tnp_P5
MKLMRIGVDLAKNVFQIHGVDCHDQPIWRQRLPRDRWLQTVLEKIEPGCEIGMESCGGAHHWARQLQACGFRVKLIAPQFVKPYVKSNKNDANDAEAICEAMSRPSMRFVAIKTVEQQDIQATHRIRAGLIEQRTAKANQIRGLVAEYGLIAPKELLMLRRAIPCWLEDPDNGLTVRFRRLLDGLWGDLRGLDERVNELDSEITAIATSEPAALRLQQLRGVGPMIATALVVALGDPRQFANGRQFAASLGLTPRQHSSGGKDRLLGISKRGDAYLRTLIVHGARSALRTAKPKDDRLSQWVVRLAERSHPNVAAVALANKTARMAWAMLRHDSDYQPDRAAT

SEQ ID NO: 16658 - protein, 367 aa, unidentified
  source 1..367: note = protein_8956365
  REGION 22..165: note = RuvC_domain
  SITE 25: note = RuvC_P1
  SITE 70: note = RuvC_P2
  SITE 105: note = RuvC_P3
  SITE 107: note = RuvC_P4
  SITE 110: note = RuvC_P5
  REGION 229..323: note = Tnp_domain
  SITE 237: note = Tnp_P1
  SITE 267: note = Tnp_P2
  SITE 275: note = Tnp_P3
  SITE 276: note = Tnp_P4
  SITE 288: note = Tnp_P5
MKKHTTKSNSLSSADVSACSTVAVDLAKNVFQIAGEDALGQVIYEKRIKSREAFVAFLQKLPAGVTVLMETGPGAQAWARLLQAQGNQARILPAQHVAKHRSGAKNDRNDVLAILRSGRDVNIAPVPVKSTAQLAMQALHRARQGYVRRRTAMGNQIRGLLLEQGIAMAQGAVTLSRNVPRILEDAIQPLPDMLRELIDEMLGEWSHLGERIDVLTGRLEAAAREDETAKRLMTVRGIGPIIATALLAKQTEPERFANARMFAAYFGTVPEQHSSGQKIRLGGICRRGDGYIRSLSIQGAHAVLRQVKPDSEHPDDRRLRRWLSQHGQKGAAVRLANRNLRIVWVLLQNDQTYRRQPAGCQEATMNH

SEQ ID NO: 16659 - protein, 389 aa, unidentified
  source 1..389: note = protein_3e2e7b9
  REGION 4..160: note = RuvC_domain
  SITE 7: note = RuvC_P1
  SITE 59: note = RuvC_P2
  SITE 99: note = RuvC_P3
  SITE 101: note = RuvC_P4
  SITE 104: note = RuvC_P5
  REGION 263..350: note = Tnp_domain
  SITE 271: note = Tnp_P1
  SITE 301: note = Tnp_P2
  SITE 309: note = Tnp_P3
  SITE 310: note = Tnp_P4
  SITE 323: note = Tnp_P5
MLLLGVDIAKLNHVASLIDSDSGELIFSNFKFQNNMSGFFSLYEKIITSSIKEIIIGLESTGHYGENFINFFFQKGFKIAVINPLQTSHLRKANIRDTKNDHLDSVTIAKAFLFDNHKYVSQKNISNFALKKLTRFRKNLVKQRTRTKIQLVSLLDVIFPELQYIFKSGIHTKTIYSLLKKYPSTEKIAALREKSLFSILSKTSRGHYDMENALLLKSHAKSSVGVKDTSISIHIPQLIQLIEMLDKQIKSIEEEIKYSLDNEAPILTIPGISDVAAATIVGEINDIDNFDSPSKLLAYAGLDPKVRQSGNFNASSCRMSKKGSPYLRYALIFTAWNLVRNSKRFKNYYLSKRAQGKSHYNALGHVAHKLVRTVYTLLKKNISYQELII

SEQ ID NO: 16660 - protein, 328 aa, unidentified
  source 1..328: note = protein_6b0dfd3
  REGION 6..150: note = RuvC_domain
  SITE 9: note = RuvC_P1
  SITE 57: note = RuvC_P2
  SITE 95: note = RuvC_P3
  SITE 97: note = RuvC_P4
  SITE 100: note = RuvC_P5
  REGION 200..287: note = Tnp_domain
  SITE 208: note = Tnp_P1
  SITE 238: note = Tnp_P2
  SITE 246: note = Tnp_P3
  SITE 247: note = Tnp_P4
  SITE 260: note = Tnp_P5
MKNIFIGIDISSETLDLCTKKDGQVAYSTIGNTIKDCNKFFKKLLVHHGHKIYVAMENTGRYNYNLYEALEGFSFLVYVINPIHIKKSLGLVRGKNDRIDAERITLFIEKNHMDIPQWEPSTESIKQLKVLQAERKYRVKIKSGLLRQRADYKLINVNGIDKELLKLNESLIRNVDAQISKIEAKIQFIIGNDEQLREQANRIRTIPGVGKVLAWMMLSRTEGFTKIDNPRKMACFAGVVPFDHQSGTSLRYRPRVSVFADKELKKVLHLAAMSAIRLENDLRVYYLRKIEEGKNKMSILNAIRNKIIHRIFALIKNQTFYKNRLVVS

SEQ ID NO: 16661 - protein, 339 aa, unidentified
  source 1..339: note = protein_89fe079
  REGION 6..152: note = RuvC_domain
  SITE 9: note = RuvC_P1
  SITE 53: note = RuvC_P2
  SITE 91: note = RuvC_P3
  SITE 93: note = RuvC_P4
  SITE 96: note = RuvC_P5
  REGION 211..299: note = Tnp_domain
  SITE 219: note = Tnp_P1
  SITE 249: note = Tnp_P2
  SITE 257: note = Tnp_P3
  SITE 258: note = Tnp_P4
  SITE 270: note = Tnp_P5
MAILYVGIDLAKNVFAIHGVDEHGKAVLVRPSVQRARLHQLVAALPPCTIGMEACSGAHHWARLFAQHGHTVRLMAPKFVAPYRMSGKRGKNDAADAQAICEAVQRPNMRFVPVKSQDEQARLCIHRVRQGFVEQRTATINRLRGLLSEFGIVLAQKAATVRREAAAHLEDLPGWANIAVGDCLSEVHRLDERLAEYERHVSRMAGEDARSARLMLLQGVGCTTASALVSTVGDARDFKNGRQLAAWLGLVPGQYSSGGKTRLGGITKAGDGYLRTLLVLGAKSVLAAARNKQDWLSRWAMALEVRRGYWKAVIAIAAKNARMAWAVLAKGEDFRLIEA

SEQ ID NO: 16662 - protein, 353 aa, unidentified
  source 1..353: note = protein_af1bb3c
  REGION 12..160: note = RuvC_domain
  SITE 15: note = RuvC_P1
  SITE 64: note = RuvC_P2
  SITE 100: note = RuvC_P3
  SITE 102: note = RuvC_P4
  SITE 105: note = RuvC_P5
  REGION 228..314: note = Tnp_domain
  SITE 236: note = Tnp_P1
  SITE 267: note = Tnp_P2
  SITE 275: note = Tnp_P3
  SITE 276: note = Tnp_P4
  SITE 287: note = Tnp_P5
MNNSRNKAEVILGVDTHLDTHVGVLLNAQGHLLGCLMVTTNISGYERLVTWANSFGCLKRAGVEGTGTYGAGLACVLRKHGVEVFEVNRPDRSKRRLQGKSDPTDAENAARSVLSGSATAIAKTQSGAAEMMRVVSVARRSAVKAKTQAMNQLRALLVSAPQNVRERLWKSKPADCAKGCARVRSLGSTEFLHTLTTTLCLLAKRWLLLADEVEKLDAMLDALTHQHARRLREQFGVGPQTAAVLLSTAGDNPERLRNEASLAALCGVNPLPASSGKTVRHRLNRGGNSAANNALWTITMVRMRGDPQTQSYVARRSAQGLSSKEIQRCLKRYIVRELYPLLLADLADSARAC

SEQ ID NO: 16663 - protein, 392 aa, unidentified
  source 1..392: note = protein_34eb91d
  REGION 4..162: note = RuvC_domain
  SITE 7: note = RuvC_P1
  SITE 60: note = RuvC_P2
  SITE 101: note = RuvC_P3
  SITE 103: note = RuvC_P4
  SITE 106: note = RuvC_P5
  REGION 267..354: note = Tnp_domain
  SITE 275: note = Tnp_P1
  SITE 305: note = Tnp_P2
  SITE 313: note = Tnp_P3
  SITE 314: note = Tnp_P4
  SITE 327: note = Tnp_P5
MIYAGVDIAKADHVVGAVGETGDEVAKPMPFKNSKEGFERCVAWLEGVAETQDDVVVGMEATGHYWQACFSYLTSCGYRVAVINPMQVKAVRRLKSLSKVKNDRIDSVVIAETLRIGNFDETALATDELQSLKTLTRYRQSLKEQIAAVKTHVVCLMDTYFPEYDGIFSNMFGKASLAVLAKCPLPADIARVRESTLEKIVTEASHGRSGARQAAKIKERAKASIGFTLGSEAASFEIRSYISQIGFLLARIAEADGRIAVLLEAIEPLILTVPGISTTTGAQIVAEIGDVSRFKNAAAIVSYAGINSSVNQSGKFELEGGSITKHGSPYLRRALYLAAQGAYRLDPGLRAFYDKKRSEGKCHRVAVMAVARKLCHIIYAILRDQAPFESRG

SEQ ID NO: 16664 - protein, 400 aa, unidentified
  source 1..400: note = protein_0d5340c
  REGION 10..164: note = RuvC_domain
  SITE 13: note = RuvC_P1
  SITE 62: note = RuvC_P2
  SITE 102: note = RuvC_P3
  SITE 104: note = RuvC_P4
  SITE 107: note = RuvC_P5
  REGION 270..356: note = Tnp_domain
  SITE 278: note = Tnp_P1
  SITE 308: note = Tnp_P2
  SITE 316: note = Tnp_P3
  SITE 317: note = Tnp_P4
  SITE 329: note = Tnp_P5
MSERRAQVWAGIDVGKVHHWAAVVDETGATLWSKKIENDESAILTALGEILELADEVQWAVDISGTSSALMLALLEAHGQQAVYVPGRTVNRMSGAYRGEAKTDARDAYVIAETARHRRDFAAIDVPAQLAADLALLTARRSDLAADRVRMINRLRDVLTGVFPALERAFDYSAHKGALVLLTGYQTPAAIRRRGRARLTAWLTNRSVRSADTVAAAALDAAQAQHTALPGEDVAAQIVADLAAQILALDDRLRRIDKQIRETFRCHPQAEIIESLPGMGPILGAEFVVAAGDLTAYADAGHLASAAGLVPVPRDSGRRTGNLHRPKRYSRRLRRVFYMSAQTSIIREGPNRDFYLKKRGEGCKHVQAVIALARRRASVLWALLRDDREFTSAPPAAKAA

SEQ ID NO: 16665 - protein, 338 aa, unidentified
  source 1..338: note = protein_b2c7315
  REGION 7..149: note = RuvC_domain
  SITE 10: note = RuvC_P1
  SITE 53: note = RuvC_P2
  SITE 88: note = RuvC_P3
  SITE 90: note = RuvC_P4
  SITE 93: note = RuvC_P5
  REGION 211..296: note = Tnp_domain
  SITE 219: note = Tnp_P1
  SITE 249: note = Tnp_P2
  SITE 257: note = Tnp_P3
  SITE 258: note = Tnp_P4
  SITE 270: note = Tnp_P5
MSNTHIIGIDLAKNIFHLVGHDLSGHETFRKKLTRQKTLQLLSVHEPVIVAMEACGGCHWFARKCQEYGHQVKLLPSQYVKPYVKTNKNDFIDADAIAEAALRPKMRFVSPKSEQAQLGIVVRRVRSGYIKERTACMNRIGSILLEFGVSFPRGHHHMKNLFQWLANRKESIPPLLILELRQQLDYYNLLNQWIKQQEDKLLELNKNNELNGLLQSIPGIGPMTAACCLSVVGSPSDFSNGRNFAAWIGLVPYQYTTGGKPKLLGISKRGNKELRELFIHAARSVLWRDSSAERYFGSWLIDLKQRKPFNVAVVALANKLARIAWSVMTTRKPFEVRT

SEQ ID NO: 16666 - protein, 422 aa, unidentified
  source 1..422: note = protein_00bee42
  REGION 26..183: note = RuvC_domain
  SITE 29: note = RuvC_P1
  SITE 80: note = RuvC_P2
  SITE 120: note = RuvC_P3
  SITE 122: note = RuvC_P4
  SITE 125: note = RuvC_P5
  REGION 294..383: note = Tnp_domain
  SITE 302: note = Tnp_P1
  SITE 332: note = Tnp_P2
  SITE 340: note = Tnp_P3
  SITE 341: note = Tnp_P4
  SITE 354: note = Tnp_P5
MRICRGVGTNHNLKNRKEEKKMKYGVGIDISKGKSTVAILSIEGEVIEEPFEINHDIEGLNLLEEKIKDIPKEDLKIVMEETGTYHLPVLGYLLDKGYFVSAENALKIKKYLDRGLRKAKTDKKDSLKIAEYACDNWYKLKKVRENDKIYNNLRFLSRQYLGYIAVQTKQKINFSNLCDLLFPGYYQLLDENNFVLGLKIFKKYHHPEIVINKKQPQFVNEIDKLAKKLGHKGAGITLANKIYLLAQKTISPCPNNEYAQLSAISCADALILTIKTTTTIISEMDKLARELPEYDVISEIPGCGKKLISRVIAEIGDVRRFKNAGSIIAYAGIDAPPYQSGQFESKNRHISKRGNKYLRKTGYEVMKCIKSSCKSDNELKSYIIKKENEGKLRKVAKIAGLNKFLRMYYGIVKKKYKELEIW

SEQ ID NO: 16667 - protein, 392 aa, unidentified
  source 1..392: note = protein_e312e1d
  REGION 5..164: note = RuvC_domain
  SITE 8: note = RuvC_P1
  SITE 61: note = RuvC_P2
  SITE 102: note = RuvC_P3
  SITE 104: note = RuvC_P4
  SITE 107: note = RuvC_P5
  REGION 267..354: note = Tnp_domain
  SITE 275: note = Tnp_P1
  SITE 305: note = Tnp_P2
  SITE 313: note = Tnp_P3
  SITE 314: note = Tnp_P4
  SITE 327: note = Tnp_P5
MVVSVGIDVSKDKHDCFILSSEGEVLVDVFTIPNTMDGFNCLLQRIQDCTTPQGKMKVGLEATGHYSYNLLGFLLDNGLATYVLNPLRTNLYRKSLSLRKTKTDRVDARTIASMLLSDAGLKPYTDTAYHNEELKSLTRYRFDKVKERAKLKSSVSRLVCILFPEMEKLVSTLHTASVYTLLEEFPGAKQVARAHLTRLKSLLETASKGRYKRDMALEIREAARNSIGSRMPAKSLELQHTIRLIRELDTEIVEIEEQIQSLMDELASPITTIPGMGFRMAAMILAEVGDFTRFDSPDKLLAYAGMSPSTYQSGQLKNCYPHMEKRGSRYLRYALYNATKYVCRWDPTFAAYLAKKRAEGKHYNVALSHAAKKLVRLIFAMEKSRRPYCLAT

SEQ ID NO: 16668 - protein, 391 aa, unidentified
  source 1..391: note = protein_80b17d6
  REGION 4..163: note = RuvC_domain
  SITE 7: note = RuvC_P1
  SITE 60: note = RuvC_P2
  SITE 101: note = RuvC_P3
  SITE 103: note = RuvC_P4
  SITE 106: note = RuvC_P5
  REGION 266..353: note = Tnp_domain
  SITE 274: note = Tnp_P1
  SITE 304: note = Tnp_P2
  SITE 312: note = Tnp_P3
  SITE 313: note = Tnp_P4
  SITE 326: note = Tnp_P5
MISVGIDVAKDKHDCFIISSEGEVLADVFTIPNSVDGFHRLLETIQSCSSPQDKIKVGLEATGHYSYNLLGFLLDNGLATYVLNPLHTNLYRKSLSLRKTKTDRVDARTIAAMLLSDVGLKPYTDTAYHNEELKSLTRYRFDKVKQRGQLKQSIARLVCILFPELEKLVPTLHLASVYALLEEFPGAKQVANAHLTRLKTLLQDASKGRYGRDMALEIRGAARDSIGSVMPAKSLELRHTIHLIHELDGEINEIESEIQTIMEEMHSPVTTIPGIGTRMGAMILAEAGDLSRFDSPDKLLAYAGLSPSTYQSGQLKNCYAHMEKRGSRYLRYAIFNATKYVCHWDPTFAAYLAKKRAEGKHYNVAISHAAKKLVRLIYALEKSREPYRSAA

SEQ ID NO: 16669 - protein, 263 aa, unidentified
  source 1..263: note = protein_33b55c3
  REGION 8..149: note = RuvC_domain
  SITE 11: note = RuvC_P1
  SITE 54: note = RuvC_P2
  SITE 89: note = RuvC_P3
  SITE 91: note = RuvC_P4
  SITE 94: note = RuvC_P5
  REGION 213..263: note = Tnp_domain
  SITE 221: note = Tnp_P1
  SITE 251: note = Tnp_P2
  SITE 259: note = Tnp_P3
  SITE 260: note = Tnp_P4
MSDYSYFGGIDLAKNHFSIHVVNSQGKVILHKSVTRSKLLPTLANMPPMRIGLEACGGAHYWARTLNGLGHDARIMAVKYVVPHRTKGKNDLNDAIAICQAVQHSSTRFVPVKSPEQQAILSVHRMREHWVRERTALMNRIRALLSEFGLIIPVGRSSLMKQVPLMLEDAENELPHIARTVIADAYHHLEALNQRIADTEQVFDAFAKVSDNVQRIMKVRGIGPQTATAILASIGNGTQFDKSRDFSAWLGLVPKQFSTGGKP

SEQ ID NO: 16670 - protein, 338 aa, unidentified
  source 1..338: note = protein_c1769f6
  REGION 6..147: note = RuvC_domain
  SITE 9: note = RuvC_P1
  SITE 52: note = RuvC_P2
  SITE 87: note = RuvC_P3
  SITE 89: note = RuvC_P4
  SITE 92: note = RuvC_P5
  REGION 209..295: note = Tnp_domain
  SITE 217: note = Tnp_P1
  SITE 246: note = Tnp_P2
  SITE 254: note = Tnp_P3
  SITE 255: note = Tnp_P4
  SITE 267: note = Tnp_P5
MEFKRISIDTSKHVFTIHGVDDQERPVLRRDLRRAQVEPFFAKLAPTEVALEACAGSHHWGRLLRGMGHRVRLIPPQYVKPFVKRSKNDRNDAEAISEAASRPTMRTVSVKSAEEQAATIIVKHRELMVNQRTQAINALRGHAAEFGIIAAQGCGNVTALLEVLSSEDSIPVVAKAMFEQMGQHVSDLDTKIGALEKQLLEQHKANAVSKLLAAIPGVGPITAITVALTVNPASFETGRHFAAWIGLTPREHSTGGKHRLGRISKAGSERLRQLLVVGAMAVIRYAKPGSKSASAWLLQLLERRPRKVAAVALANKMARIIWAMMARGEAYRCQPVAA

SEQ ID NO: 16671 - protein, 399 aa, unidentified
  source 1..399: note = protein_3ce0556
  REGION 7..163: note = RuvC_domain
  SITE 10: note = RuvC_P1
  SITE 61: note = RuvC_P2
  SITE 101: note = RuvC_P3
  SITE 103: note = RuvC_P4
  SITE 106: note = RuvC_P5
  REGION 269..356: note = Tnp_domain
  SITE 277: note = Tnp_P1
  SITE 308: note = Tnp_P2
  SITE 316: note = Tnp_P3
  SITE 317: note = Tnp_P4
  SITE 329: note = Tnp_P5
MQQQLWAGIDAGKAARHCVVIDTDGKRLLSRRIANDEPALLELINAVIGLTSDAEVTWAIDLNHGGAALLIALLLSREQRLLYIPGRTVHWAAGTYRGDAKTDAKDAAVIADQARMRRDLQPLRVGDEAAVELRILISRHTDLGCDRTRAINRLRAQLLDYFPALERAFDLAHNKAALILLTGFQTPDQLRKIGASRLETWLRNRKTRNSARVAATALEAARSQHVTIAGQQLGAAMVARMAQEVIQLDIEITEIEAMIEQRFRRHRHAETILSMPGFGVLLGAEFIAATGGDMTAFDSANRLAGVAGLAPVPRDSGKVSGNLKRPRRYDRRLLRACYLAAQIAAINDTASRTYYQRKRSEGKTHTQAVIALARRRINVLWAMLRTSTPYQPIPRAAAA

SEQ ID NO: 16672 - protein, 346 aa, unidentified
  source 1..346: note = protein_44d02c3
  REGION 10..164: note = RuvC_domain
  SITE 13: note = RuvC_P1
  SITE 69: note = RuvC_P2
  SITE 109: note = RuvC_P3
  SITE 111: note = RuvC_P4
  SITE 114: note = RuvC_P5
  REGION 210..297: note = Tnp_domain
  SITE 218: note = Tnp_P1
  SITE 248: note = Tnp_P2
  SITE 256: note = Tnp_P3
  SITE 257: note = Tnp_P4
  SITE 270: note = Tnp_P5
MTKKVVKQVVGIDVAQKELVVTIGRKLDDFSIELFGYKVFKNSDSGILSLVEWVKKISDIGVTVRYVMEATGVYHQKFAYYLSENNYEVSIVLPNKISNYMRTLEMKTITDKSCSQAIAQFGLERNLDPWSKPNNVYKELQQLTRERDQIVQERSIVKNQIHAENSEAQPNLKSLDRMTSRIKFLNSQEKEIKDDIVVIIKENPDLQQIINRVTTIPGVGALTAVIVLAETNGFELIRNKSQLASYAGLDVKEKQSGTSVKGKPRISKKGNRNLRKSMHLPALTAVKWDENFRLRYARLISKQGIKMKALVAIQRKILELIYTLFKNETIYDKGYLEKNSVQTQMV

SEQ ID NO: 16673 - protein, 273 aa, unidentified
  source 1..273: note = protein_2f89c97
  REGION 2..77: note = RuvC_domain
  SITE 17: note = RuvC_P3
  SITE 19: note = RuvC_P4
  SITE 22: note = RuvC_P5
  REGION 141..226: note = Tnp_domain
  SITE 149: note = Tnp_P1
  SITE 179: note = Tnp_P2
  SITE 187: note = Tnp_P3
  SITE 188: note = Tnp_P4
  SITE 200: note = Tnp_P5
MKLIPAQFVKPFVKSNKNDFLDAEAIAEAVDRQNMRFVPIKTDDQLDLQAMHRVRDRLVARRTSVINQLRAFLPERGMVFAKTPFKLKQAMPEILENAEANLTPRMRNLVSMLWSEWKDLDQQIVAMNDEVEQIASSDPACQRLRQIPGIGPLVATAIVAAIGNGAAFHKGREFSSWLGLVPRQHSTGGKARLFGISKRGNCYLRKLLVHGARSAVLIVKRERSPFGPWLDALEQRAPVKVVITAAANKLARVAWAVLSSGEEYRPPTTAMAA

SEQ ID NO: 16674 - protein, 343 aa, unidentified
  source 1..343: note = protein_7975646
  REGION 7..149: note = RuvC_domain
  SITE 10: note = RuvC_P1
  SITE 53: note = RuvC_P2
  SITE 88: note = RuvC_P3
  SITE 90: note = RuvC_P4
  SITE 93: note = RuvC_P5
  REGION 212..296: note = Tnp_domain
  SITE 220: note = Tnp_P1
  SITE 250: note = Tnp_P2
  SITE 258: note = Tnp_P3
  SITE 259: note = Tnp_P4
  SITE 271: note = Tnp_P5
MEKIITVGLDLAKSIFQVHGVADNGQVLVRRTLRRSQVLPFFRGLPACLVGMEACASAHHWAREIAALGHSVRLMPPAYVKPYVKRNKTDAADAEAICEAITRPTMRFVPVKTAEQQAAGMVLRTREMLMRQRSQTANALRGHMAELGIIAGTGMTSIAKLLVLLRDEKDSRIPSAARFALIQFAEQIELLTTRIEKLDREILAAVRQDPHARRLMSIPGVGPLIAATVRTSVLDARAFAAARDFAAWTGLTPRAQSSGGKDRLGAISKRGNRQLRTLLIVGATSIIKLAKRGLKVPVWIRTMLQRRPVKVVSVALANKIARTIWALLVRGGIYQAPTAMLKS

SEQ ID NO: 16675 - protein, 342 aa, unidentified
  source 1..342: note = protein_808c730
  REGION 7..148: note = RuvC_domain
  SITE 10: note = RuvC_P1
  SITE 53: note = RuvC_P2
  SITE 88: note = RuvC_P3
  SITE 90: note = RuvC_P4
  SITE 93: note = RuvC_P5
  REGION 210..300: note = Tnp_domain
  SITE 218: note = Tnp_P1
  SITE 248: note = Tnp_P2
  SITE 256: note = Tnp_P3
  SITE 257: note = Tnp_P4
  SITE 269: note = Tnp_P5
MDQITRIGMDTSKQLFQLHGVNAAEEPVLRRKLRRSQMIAFFAALPPTVIGIEAGGAAHHWSRTLSALGHEVRIMAPQFVKPYVKRGKNDAADAEALCEAVSRPTMRFVPEKTAEQQAALMLVSLRDRLVRSRTQLTNAIRGHAAEFGLIAARGTDKIAPLLERIAGDSNLPALARSLFAQLGEEFAQLQERLKKVDVALMAWHRQSEVSRRLAEIPGVGPIGASMLALKTPDPRSFKSARHFAAWIGLTPKDHSTGGRTRLGGITRAGDEGLRSVLVVGATALIQHMRRGSRLWPWLQRLLASKPYKLVAVALANKIARIAWKLMTSGHGYEPAYVLRAAV

SEQ ID NO: 16676 - protein, 339 aa, unidentified
  source 1..339: note = protein_ac16591
  REGION 7..147: note = RuvC_domain
  SITE 10: note = RuvC_P1
  SITE 53: note = RuvC_P2
  SITE 88: note = RuvC_P3
  SITE 90: note = RuvC_P4
  SITE 93: note = RuvC_P5
  REGION 212..297: note = Tnp_domain
  SITE 220: note = Tnp_P1
  SITE 250: note = Tnp_P2
  SITE 258: note = Tnp_P3
  SITE 259: note = Tnp_P4
  SITE 271: note = Tnp_P5
MNLIKTLGIDLAKNSFSLVGMDKYGKVIFRKTLSRKKLLPFIAQLHPCLIAMEACSGAHYWAREFKSIGHQVAIIAAKFIEPFRKGGKNDNNDAEAICEAATRPNIWHVPVKTAEQQAIMTLHRVRQGLIKERTAMINQIRGLSAEFGITIPQGRYSLQDKIQSILEDADNKLPTFARQMINDLWQRIKQANEQILSYDRALAQQVREDTVAQRLMTIPGVGEQIATAMSANVPDPRLFRSSRQFCAWLGLVPRQYTTGGKIRLGRITKRGDKYMRMCLIHGARAVMANLGDKQDKVSCWIRELIERRGYLRAAVALAARNARLIWTLMIKQEDYKVVA

SEQ ID NO: 16677 - protein, 337 aa, unidentified
  source 1..337: note = protein_7834120
  REGION 14..164: note = RuvC_domain
  SITE 17: note = RuvC_P1
  SITE 65: note = RuvC_P2
  SITE 103: note = RuvC_P3
  SITE 105: note = RuvC_P4
  SITE 108: note = RuvC_P5
  REGION 208..295: note = Tnp_domain
  SITE 216: note = Tnp_P1
  SITE 246: note = Tnp_P2
  SITE 254: note = Tnp_P3
  SITE 255: note = Tnp_P4
  SITE 268: note = Tnp_P5
MEKIKEVKRFVESVGIDVSKLTLDVFLYNKKNHRQFSNTAKGFLEMQKWVKSEQHSLTDLIYCFEHTGWYCLLLSQYLHDHGMYYCCINPIEIKRSMGFKRGKTDKTDSYEIARFAWLRREELKASVPLPISLLELQRLMSVREQFVKQSTSLKNLEKGLLVTLEKITGDIGLKAVRQSIKQLEQQIQKIEKAMEELIASEPKMKSNYKLTKSVKGVGRILAIQMLLHTHNYTRFEEWRQFSAYCGLVPYPFQSGTSIHGRKRIHAISDIKMKSLLSMSAISAIQHDSELKIYYQKRVEEGKPKMVVLNIIRNKIVSRVFATVKRGTPYVEINKFAA

SEQ ID NO: 16678 - protein, 318 aa, unidentified
  source 1..318: note = protein_bb78397
  REGION 3..147: note = RuvC_domain
  SITE 6: note = RuvC_P1
  SITE 50: note = RuvC_P2
  SITE 90: note = RuvC_P3
  SITE 92: note = RuvC_P4
  SITE 95: note = RuvC_P5
  REGION 189..273: note = Tnp_domain
  SITE 197: note = Tnp_P1
  SITE 226: note = Tnp_P2
  SITE 234: note = Tnp_P3
  SITE 235: note = Tnp_P4
  SITE 246: note = Tnp_P5
MFVGIDVAKAELVVAVHPTNERWTVANDERGVRTLVERLRAVPPTLIVLEATGGYELLGVAALVAAGLPVVVANPRQVRDFARSTGQLAKTDRLDADILAAFADRVRPAVRPLPDAEAQELDALLTRRRQLLEMLGAERNRLGQIFGKGKRPVTKSLRAHIAYLERELKSTDHDLSDLVRATPAWREREDLLRSVPGVGPVLSRTLLADLPELGRLSRREIAKLVGVAPLSRDSGILRGRRFVQGGRASVRAVLYMGALVGIKRNVILHAFYHRLVTAGKPKKLALVACMRKLLTILNTIVRTGQPWCAGYSSILATA

SEQ ID NO: 16679 - protein, 343 aa, unidentified
  source 1..343: note = protein_a925934
  REGION 7..149: note = RuvC_domain
  SITE 10: note = RuvC_P1
  SITE 53: note = RuvC_P2
  SITE 88: note = RuvC_P3
  SITE 90: note = RuvC_P4
  SITE 93: note = RuvC_P5
  REGION 211..297: note = Tnp_domain
  SITE 219: note = Tnp_P1
  SITE 249: note = Tnp_P2
  SITE 257: note = Tnp_P3
  SITE 258: note = Tnp_P4
  SITE 270: note = Tnp_P5
MTKDTMIGVDLAKHVFQLHGASMNGDVKFRKKLSRPQFLRFMADHDPAVVVMETCGGANYWARELSRLGHVVKLIPTRYVKPFVERQKNDAADAEAIVIAAQRPEMRFVEPKSEDKQARAMVFRSRERLVHQRTELVNALRSYLYEFGYIFPQGIGHLKRVEAFLEDPNSGLPELVCGECHDLLHQISEMTARIDAKTRQIKVLGTETDTARRLQTMPGVGPIIALAVEAFAPDMASFRRGRDFAAWLGLVPRQHSSGGTERLGRVSKAGQADIRKLLIIGAMSRLNWLGRKSIGKESWLGRMLARKPKMLVAIALANKMARAIWAMVTNNEDYRDPAPTAAG

SEQ ID NO: 16680 - protein, 346 aa, unidentified
  source 1..346: note = protein_0affaab
  REGION 6..147: note = RuvC_domain
  SITE 9: note = RuvC_P1
  SITE 52: note = RuvC_P2
  SITE 87: note = RuvC_P3
  SITE 89: note = RuvC_P4
  SITE 92: note = RuvC_P5
  REGION 211..298: note = Tnp_domain
  SITE 219: note = Tnp_P1
  SITE 249: note = Tnp_P2
  SITE 257: note = Tnp_P3
  SITE 258: note = Tnp_P4
  SITE 270: note = Tnp_P5
MEIHTLGIDLGKTIFHLVGLNATGEAVVRKKFSRNQLLHFTANLRVRLIGMEACGGAHFLGRALREQGHDVRLMPAQYVKPYVKTNKNDYIDAEAIAEAVGRPTMRFVPIKSDEQLDMQSLHRVRERWVGRRTAVVNQIRGLLLERGITVRKGRRHAEAALPCILEEPDSNLSGSLRMLLAQLQCELRQLHSQIEQVDAAILKAAHEHEACQRLMAIPGIGPVIATAIVSAIGNGTDFKKGRGFAAWLGLVPGQFSTGGKQKLLSISRRGNCYLRSLLVHGARAVMQCRKKQSSGLSAWLGKLVSRVHCNVAVVALANKLARMAWALLAKGETYRPPLLAANPVTV

SEQ ID NO: 16681 - protein, 344 aa, unidentified
  source 1..344: note = protein_adb1dad
  REGION 6..162: note = RuvC_domain
  SITE 9: note = RuvC_P1
  SITE 63: note = RuvC_P2
  SITE 101: note = RuvC_P3
  SITE 103: note = RuvC_P4
  SITE 106: note = RuvC_P5
  REGION 208..295: note = Tnp_domain
  SITE 215: note = Tnp_P1
  SITE 246: note = Tnp_P2
  SITE 254: note = Tnp_P3
  SITE 255: note = Tnp_P4
  SITE 268: note = Tnp_P5
MKKVLIGIDFSKEKFDVAIIVKSTSMQAHAEFDNKVSGYRKMIKWIKSVVEEKTCSSWLFCGETTGGYSRMMSDWLYAQGYDVWIENALTIKRTFPLKRIKNDAVDAFMIAEYALRFEDKAQLYEPLSPALSGLRELFLYRHHLVRHRCSFQVRRIEKRFTQEKSPIKNTISQSARHIITEINKEIAKCDEKIKEYIESDDQLYSIFAIVTSMPGVGTINAVSLMVYTNNFTKFAYNPRKIACYYGIAPFGRDSGTSVHTDPQVGFIANKMLKSLLTQAALAAVRTCPQIAKYYQRLIERGKKPMVALNNVKNKMIAIITAMVRNGCMYQSDNICVATPSVNVK

SEQ ID NO: 16682 - protein, 345 aa, unidentified
  source 1..345: note = protein_3b80355
  REGION 11..153: note = RuvC_domain
  SITE 14: note = RuvC_P1
  SITE 57: note = RuvC_P2
  SITE 92: note = RuvC_P3
  SITE 94: note = RuvC_P4
  SITE 97: note = RuvC_P5
  REGION 216..301: note = Tnp_domain
  SITE 224: note = Tnp_P1
  SITE 254: note = Tnp_P2
  SITE 262: note = Tnp_P3
  SITE 263: note = Tnp_P4
  SITE 275: note = Tnp_P5
MKKQLQTVTVFGIDIGKNSFHVVGLDSTGQPVVRTKFRRDRLLQYFANARTATVGMESCPGSQWLARKLEAMGHTARIIPAQFVKPYVKSNKNDMVDAAAIAEAVTRPTMRFVQVRQPEQSARQALHRVRDRYMSQRTGLINQIRGFLLEFGIPIRQGAGVFRIDMPRVLGDEDNELPPSMRQLLADLWNDFKELEKRIEEITRQIQRSVQYSDTARRLMTVPGIGPLAASALEASAGNGHQFTNGRFFAAWLGLTPREYSTGGKTTLLSISKRGNSYLRRLLIHGARSCVQTCDRQRHPLGAWITRLEQRMHRNKVIVAVANKIARVAWKILIKPDEIYRWSEA

SEQ ID NO: 16683 - protein, 395 aa, unidentified
  source 1..395: note = protein_f2550c7
  REGION 5..162: note = RuvC_domain
  SITE 8: note = RuvC_P1
  SITE 59: note = RuvC_P2
  SITE 99: note = RuvC_P3
  SITE 101: note = RuvC_P4
  SITE 104: note = RuvC_P5
  REGION 272..359: note = Tnp_domain
  SITE 280: note = Tnp_P1
  SITE 310: note = Tnp_P2
  SITE 318: note = Tnp_P3
  SITE 319: note = Tnp_P4
  SITE 332: note = Tnp_P5
MKYGVGIDISKGKSTIAILSIEGEVIKEPFEFYHNQKDLDNLNLLLNNYSKEDLKIIMEETGTYHLPVLSYLIDKGYCVIAENAFRIMKYLDRGLRKAKTDKKDSLKLAEYACDNWYKLKMPIIEDKNYKDLRFLSRQYFAFNSIKIQQKVNFSNLTDMLFPGYYQLLDENNYILGLKVFQKYSIDIIKKKKLETFINEVDKIAQKIGHKRAGITFAKKVYELAKESIPSCPSSEYTQLIIDNCVVALIQSIETTKEIISKMQEIANKLPEYETVKSMPGAGPRLAPLLIAEIGDIRKFKDSSSLIAYAGIDAPPYQSGQFEATNRHISKRGNKYLRKTGYEVMKAIKSFYSTGNEFYDYMVKKESEGKKKKVAKIAALNKFLRQYYAKLIKVYN

SEQ ID NO: 16684 - protein, 331 aa, unidentified
  source 1..331: note = protein_6bb096f
  REGION 7..160: note = RuvC_domain
  SITE 10: note = RuvC_P1
  SITE 59: note = RuvC_P2
  SITE 97: note = RuvC_P3
  SITE 99: note = RuvC_P4
  SITE 102: note = RuvC_P5
  REGION 202..289: note = Tnp_domain
  SITE 210: note = Tnp_P1
  SITE 240: note = Tnp_P2
  SITE 248: note = Tnp_P3
  SITE 249: note = Tnp_P4
  SITE 262: note = Tnp_P5
MKIKDVIGIDASKLTLDCCLHKSGVQEVFDNTPEAIAHMADWSMKSSGLDKDGLLFVFEHTGLYTHQLARYLSEQGYCFHLVPGLEIKRSLGIARGKDDKADAKRIALYGYRLREEIKPYQMPKESLETLKRLMSMRRKLVAQRAGHIATLSEQKRVLDKELGPLLFQVQQEIIGVLDVQIAKIEKELDRIIEQDPELQDLYRLLMTIKGIGAVTARFLMVYTVGFTAFKTWRKFASYCGIAPFPNRSGTSIRGRTKISQLANKEGKTLLNLCAVSAIQCNPEMKAYYERRTAKGKNKMSTLNIIRNKLLARAFAVVVRGTPYVNTMGYIS

SEQ ID NO: 16685 - protein, 346 aa, unidentified
  source 1..346: note = protein_2db5655
  REGION 9..151: note = RuvC_domain
  SITE 12: note = RuvC_P1
  SITE 55: note = RuvC_P2
  SITE 90: note = RuvC_P3
  SITE 92: note = RuvC_P4
  SITE 95: note = RuvC_P5
  REGION 214..300: note = Tnp_domain
  SITE 222: note = Tnp_P1
  SITE 252: note = Tnp_P2
  SITE 260: note = Tnp_P3
  SITE 261: note = Tnp_P4
  SITE 273: note = Tnp_P5
MSSSNVHIYGIDLGKNWFHIVAMDRQGHILWRKKLNRSQLKTFVINTPPTIVAVEACPGSQYWGRLFNDAGFSVKIIPAQFVKPYLKSNKNDFNDAAAIAEAGSRGTMRCVPIKTHEQLALQATHRVRQRFIVERTATVNQMRALLLEFGITVPVGRKVFERNLPSILEDAENGLPDFIRALVFRLRERWQYLDVQIDEMSEQLQQASIASEKCQLISSIPGIGPIVATGLIAAVGSGTQFKRGRDMSAWLGLVPRQYSTGGKSNLGGISKRGNVYLRRQVIQGAKALKIHMKRDKSALGQWIAKLEATHHHHVVLIALANKIMRICWKVLTSGQEYQPYPASATK

SEQ ID NO: 16686 - protein, 387 aa, unidentified
  source 1..387: note = protein_9c43de5
  REGION 4..159: note = RuvC_domain
  SITE 7: note = RuvC_P1
  SITE 57: note = RuvC_P2
  SITE 98: note = RuvC_P3
  SITE 100: note = RuvC_P4
  SITE 103: note = RuvC_P5
  REGION 264..347: note = Tnp_domain
  SITE 269: note = Tnp_P1
  SITE 299: note = Tnp_P2
  SITE 307: note = Tnp_P3
  SITE 308: note = Tnp_P4
  SITE 320: note = Tnp_P5
MYFVGIDISKFKHDCAIIDELCDTVMPSWSFSNDREGFSHFKALLDSLEGEKKIGLESTGHYGQNLKQFLESNGFTFMEFNPLLVSRFVRSKSLRNTKTDSIDALSIAQYVMTVEYKPYPSSFYHLDKLKSLTRFRNSLVRQRSRQLVELTNVLDKLFPEFKPFFKDKFSVTALYILAHYQTPERIANMNARSYEALRKLSRGRFTLSNFTQLKALAKNTVGTQSDYLLDQMNILLELYSQLDSKVDELDAQIKECVRGIDPPCLSIPGVGELSAAMILSEFGDFSKFQNPSKMLAFAGLEPGYFQSGQSEYTGHMVKHGSSRLRYALMNCCLPLISNEPVFAAYYAKKRSEGKPHRVALTHVAKKLLRVIYTLQTKNIRYDPTMIH

SEQ ID NO: 16687 - protein, 391 aa, unidentified
  source 1..391: note = protein_a02ec3d
  REGION 4..163: note = RuvC_domain
  SITE 7: note = RuvC_P1
  SITE 60: note = RuvC_P2
  SITE 101: note = RuvC_P3
  SITE 103: note = RuvC_P4
  SITE 106: note = RuvC_P5
  REGION 266..353: note = Tnp_domain
  SITE 274: note = Tnp_P1
  SITE 304: note = Tnp_P2
  SITE 312: note = Tnp_P3
  SITE 313: note = Tnp_P4
  SITE 326: note = Tnp_P5
MVSIGIDVSKDKHDCFILSSEGEVLADAFTVPNNMEGFTTLLERIQDCTTPQDKIRVGLEATGHYSYNLLGFLLDNGLPTYVLNPLRTNLYRKSLSLRKTKTDRVDARTIATMLMSDVGLKPYTDTAYHNDELKSLTRYRFDKVKERAKLKSSVSRLVCILFPELEKLVPTLHMVSVYALLEEFPGAKQIAGAHLTRLKTLLHGASRGRYGRDMAVEIRDAARNSIGSRMPAKSLELRHTIHLIRELNTEIEEIEAEIQAIMDEIHSPITTIPGIGHRMGAMILAETGDFSRFESPDKLLAYAGLSPSTYQSGQLKNCYAHMEKRGSRYLRYAIFNATKYVCLWDPTFAAYLAKKRAEGKHYNVAISHAAKKLVRLIFALEKSGQPYCLAA

SEQ ID NO: 16688 - protein, 405 aa, unidentified
  source 1..405: note = protein_9d0fd01
  REGION 10..163: note = RuvC_domain
  SITE 13: note = RuvC_P1
  SITE 63: note = RuvC_P2
  SITE 103: note = RuvC_P3
  SITE 105: note = RuvC_P4
  SITE 108: note = RuvC_P5
  REGION 270..355: note = Tnp_domain
  SITE 277: note = Tnp_P1
  SITE 307: note = Tnp_P2
  SITE 315: note = Tnp_P3
  SITE 316: note = Tnp_P4
  SITE 328: note = Tnp_P5
MDCKAFSVFVGIDVSKDKFNVCAISTPNSIIFEHVFEMSKQGFSSFVDNLSSFSKNSIILAMESTGCYHLNLLSFLSLNNFSCVVFNPLTIKDSPSISLRKTKTDKIDARSIARTLFYLQQELPSSPFLNTEFRDVVRERESLISRISKIKNNIEKLLNLLFPELESFTNIYNDSILNLLSSFPSAKAIQNAPIDSLRAFFSKSVGRKPILSPESLKELANNSIAQYWPMKEKILIQNIKELRFLKELLKEYDEMLNQYCQYASFNVDIGLLTSIKGIGQNSAMHFLAEVGNVSRFSSYKKLIAYCELDPSIYQSGKRKTESHISKRGNAHLRRIVWLMSVSVVRHNEYFRDYFERKRAHGLPYKKAMIAVSHKLLRTMYAMLKKQEKFNVDYALSSSKLNLNFT

SEQ ID NO: 16689 - protein, 340 aa, unidentified
  source 1..340: note = protein_b82a131
  REGION 6..148: note = RuvC_domain
  SITE 9: note = RuvC_P1
  SITE 52: note = RuvC_P2
  SITE 87: note = RuvC_P3
  SITE 89: note = RuvC_P4
  SITE 92: note = RuvC_P5
  REGION 211..299: note = Tnp_domain
  SITE 219: note = Tnp_P1
  SITE 249: note = Tnp_P2
  SITE 257: note = Tnp_P3
  SITE 258: note = Tnp_P4
  SITE 270: note = Tnp_P5
MTITTLGIDIAKSVFQLHGVDQAGTVIIRKKLRRGAVLDTLRKLEPCLVGLEACATAHYWAREISALGHEVKLMPPAYVKPYVKRQKNDMADAEAICEAVTRPTMRFVPVKSADRQAVLVLHRTRDLLMRQRTMLLNAVRGHLAEFGIIAPQGPSKALELIAQLREGAHEDLPDVARTALLGIGVQLDALGTQIHDLERHLLAWHRQDEISRRLETIPGVGILTATALAASVPDPSVFRSGRQFAAFLGLTPRQNSSGGKDKLGRISKMGDGYLRRLLVTGATSVIRRADTNPSATGAWVRALLARKSKRLTTVAMANKTARIAWAVMARGEIYRAPIMA

SEQ ID NO: 16690 - protein, 405 aa, unidentified
  source 1..405: note = protein_f3be863
  REGION 4..161: note = RuvC_domain
  SITE 7: note = RuvC_P1
  SITE 60: note = RuvC_P2
  SITE 100: note = RuvC_P3
  SITE 102: note = RuvC_P4
  SITE 105: note = RuvC_P5
  REGION 266..353: note = Tnp_domain
  SITE 274: note = Tnp_P1
  SITE 304: note = Tnp_P2
  SITE 312: note = Tnp_P3
  SITE 313: note = Tnp_P4
  SITE 326: note = Tnp_P5
MYYCGIDIAKYKHEATVIDKTGKALLDSISFSNSAEGCKKLMALFERLSITKDALIIGMEATGHYWLSVYEYLLEGGFEVKVINPIQSEAFRKMYIRQTKNDSKDSFIIAQIMRFGQFSATNLSEQAIVAMRQLSRYRLALVDACGDCKRRTISLLDQVFPEYDSFFSDTFGVTSKEVLANYPTPEDMLSVSTAKLTYLLEKASHGRFGEEKAKQLKETAANSFGVSFAKDAFAFQIRQLIEQLEFLEHQIEELEEQIAVLLKQTGSYITTIPGIGDTLGAIILSEIGDIRRFSAPGKLVAFAGLDVRVTQSGEFMGTRQKISKRGSPYLRRAIWLAASRAAFCDPVLSEYYQGLRARGKHHLTAIGAVCRKLCNIIFAILSENRPYQTLPPNDKKLSASSFSPT

SEQ ID NO: 16691 - protein, 389 aa, unidentified
  source 1..389: note = protein_c402e22
  REGION 4..161: note = RuvC_domain
  SITE 7: note = RuvC_P1
  SITE 59: note = RuvC_P2
  SITE 100: note = RuvC_P3
  SITE 102: note = RuvC_P4
  SITE 105: note = RuvC_P5
  REGION 264..349: note = Tnp_domain
  SITE 271: note = Tnp_P1
  SITE 301: note = Tnp_P2
  SITE 309: note = Tnp_P3
  SITE 310: note = Tnp_P4
  SITE 322: note = Tnp_P5
MYYVGIDISKYKHDCFIITDAGCVVSNPFTIKNNHDGFEELLTVLHSLDSPEEIRIGFESTSHYALNLKLFLEKAHYSFMEFNPVLLAKFNKSQSLRRTKTDAIDCALIARWLMTVEYKPHPTGFYHTYSLKSLTRLRDSLVKQRSFYLVKITNVLDHTFPEFKPFFDNRLGATALYLLENYGTAEKISRMNAQSYDALRRISRGKFSMQKFLKLKELAKNTVGEDNSIFILQLNCLLALYRLCAKEADSLEQQIIFLIHEVNPKALTIPGIGALSAAVIYAEYGDFSKFNSAAQMLSFAGLEPGYYQSGISEYGGHMVKRGSSHLRYTLMNLCIPLIQYNMVFAEYYAKKRAEGKTHRVACSHLVKKLIRVIFTLEKNDIDFVPEKLR

SEQ ID NO: 16692 - protein, 345 aa, unidentified
  source 1..345: note = protein_8ec042b
  REGION 6..147: note = RuvC_domain
  SITE 9: note = RuvC_P1
  SITE 52: note = RuvC_P2
  SITE 87: note = RuvC_P3
  SITE 89: note = RuvC_P4
  SITE 92: note = RuvC_P5
  REGION 211..297: note = Tnp_domain
  SITE 219: note = Tnp_P1
  SITE 249: note = Tnp_P2
  SITE 257: note = Tnp_P3
  SITE 258: note = Tnp_P4
  SITE 270: note = Tnp_P5
MKITTVGIDLAKNVFQVHGIDERGKAVLGKQLRRAQAAVFFANLPPCVIGMEACASAHHWARTLLRFGHTVRLIAPQFVKPYVKTNKNDVADAEAICEAVGRPNMRFVPIKSIEQQAILSVHRVRQGFVKARTAQANQIRGLLGEFGLVIPQGIYNVAKRVPELLEDASNELPVPFRHLIDRLTEHLKELDRRVKEVEREIIAWHRDSELSRKLEKIPGIGPLAASALLASIADARSFDNGRQVSAWLGLVPRQSSSGGKPTLLGMSKRGDAYLRTLLIHGARSAILAAKNKVDNTQGWLTDLLKHRHPNIAAVALANKNVRTVWAILAHGREFKPDYVPTRMAA

SEQ ID NO: 16693 - protein, 339 aa, unidentified
  source 1..339: note = protein_52ec162
  REGION 6..148: note = RuvC_domain
  SITE 9: note = RuvC_P1
  SITE 52: note = RuvC_P2
  SITE 87: note = RuvC_P3
  SITE 89: note = RuvC_P4
  SITE 92: note = RuvC_P5
  REGION 211..301: note = Tnp_domain
  SITE 219: note = Tnp_P1
  SITE 249: note = Tnp_P2
  SITE 257: note = Tnp_P3
  SITE 258: note = Tnp_P4
  SITE 270: note = Tnp_P5
MKVSTLGIDLAKNVFQLHGVGCNGQTVLKKKLTRDKFLPFLMQLEPCLIGMEACASSHHFARVLRQYGHEVKLIPPQYVKPYVKTNKTDAADAEAICEAVARSNMRFVQIKTAEQQAILVLHTERNILIRERTACANSMRAILAEFGIIMPRTLSQLYKKIPEILEEYDNELSPFVRCSVARQLEHLQGVEDQITLIEQELSRWAKTQPACQRVMKVPGVGLMTATYLVASVVNGQQFHSVKQFAAWLGLVPREFSSGGKQRLGRISKRGDRYFRYLVVHGARAVAAVIVRHKDNMPWLYRLLNKKAYNVAVVAQANKTARILWSMLVHHTEYRTLSVV

SEQ ID NO: 16694 - protein, 309 aa, unidentified
  source 1..309: note = protein_c03dd05
  REGION 6..148: note = RuvC_domain
  SITE 9: note = RuvC_P1
  SITE 52: note = RuvC_P2
  SITE 87: note = RuvC_P3
  SITE 89: note = RuvC_P4
  SITE 92: note = RuvC_P5
  REGION 211..300: note = Tnp_domain
  SITE 219: note = Tnp_P1
  SITE 249: note = Tnp_P2
  SITE 257: note = Tnp_P3
  SITE 258: note = Tnp_P4
  SITE 270: note = Tnp_P5
MKVSTLGIDLAKNVFQLHGVGCNGQTVLKKKLTRDKFLPFLMQLEPCLIGMEACASSHHFARVLRQYGHEVKLIPPQYVKPYVKTNKTDAADAEAICEAVARPNMRFVQIKTAEQQAILVLHTERNILIRERTACANSMRAILAEFGIIMPRTLSQLYKKVPEILEEYDNELSPFVRCSVARQLEHLQGVEDQITLIEQELSSWAKTQPACQRVLKVPGVGLMTATYLVASVGNGQQFHSAKQFAAWLGLVPREFSSGGKQRLGRISKRGDRYFRYLLVHGARAVAAVIERHKDNMPWLYRLLSKRPIT

SEQ ID NO: 16695 - protein, 406 aa, unidentified
  source 1..406: note = protein_220ae29
  REGION 5..161: note = RuvC_domain
  SITE 8: note = RuvC_P1
  SITE 58: note = RuvC_P2
  SITE 98: note = RuvC_P3
  SITE 100: note = RuvC_P4
  SITE 103: note = RuvC_P5
  REGION 275..361: note = Tnp_domain
  SITE 283: note = Tnp_P1
  SITE 313: note = Tnp_P2
  SITE 321: note = Tnp_P3
  SITE 322: note = Tnp_P4
  SITE 335: note = Tnp_P5
MLNAVGIDVSKGRSTVAVLQPGGIVLHKPFDVYHNFKDLHDLVHYLASLEGETKVVMESTGRYHEPICNTLSEAGLFVCAVNPHLIKNFGNNTIRKVKTDPADAKKIARYTLDNWTSLHEYSAMDTTRAELKTLNSQFNFFMKQKTSAKTNLIALLDETYPGVNKLFDSPVRSDGSEKWVDYAYSFWHVNCVLDSGLKVFTERYQNFCKHHRYEYQPDKPGAIYEQAKSLVPAVPKDPIYKELIQDSIQQLNLMSQHVEQLRKRMNDLASTLPEYNTVLSMYGVGQSLGPQLIAEIGDISRFTHREALTAFAGVDPGKDDSGQVVHKSGHASKCGSARLRKTLFRIMKVMLQVGPRDDDPVSQFLFKKKAENKPYLVYMTAGANKFLRVYYGKVKECLRNQAKTEV

SEQ ID NO: 16696 - protein, 343 aa, unidentified
  source 1..343: note = protein_c282630
  REGION 6..149: note = RuvC_domain
  SITE 9: note = RuvC_P1
  SITE 54: note = RuvC_P2
  SITE 89: note = RuvC_P3
  SITE 91: note = RuvC_P4
  SITE 94: note = RuvC_P5
  REGION 213..298: note = Tnp_domain
  SITE 221: note = Tnp_P1
  SITE 251: note = Tnp_P2
  SITE 259: note = Tnp_P3
  SITE 260: note = Tnp_P4
  SITE 272: note = Tnp_P5
MNISRIGVDLAKNVFQVHGTDNQGHVTWKRKLSREKWIAAVCRTVPKGSEVGMEACAGAHHWARRLSEHGYQVKLIPPQFVIPYVKSNKNDANDAEAICEAMSRPNMRFVKVKTVEQQDIQAIHRVRSELMSQRTAKINQIRGLVAEYGLVAPKQAESLRKALPRWLEDAENGLTPRFRHLLHGLSQDLGYLYDRIARLDQEIKEIANGDPMAVRLQQLRGVGPLVATALIAAVGDGRQFAKGRQMAAAIGLTPRQFSSGGKDKLLGISKRGDAYLRTILIHGARAAVYKAKMRDDRLSTWVTDLAKRRHVNVAAVALANKTVRIAWAMMRNNVDYDPEYAVA

SEQ ID NO: 16697 - protein, 393 aa, unidentified
  source 1..393: note = protein_2d68738
  REGION 4..164: note = RuvC_domain
  SITE 7: note = RuvC_P1
  SITE 59: note = RuvC_P2
  SITE 99: note = RuvC_P3
  SITE 101: note = RuvC_P4
  SITE 104: note = RuvC_P5
  REGION 266..353: note = Tnp_domain
  SITE 274: note = Tnp_P1
  SITE 304: note = Tnp_P2
  SITE 312: note = Tnp_P3
  SITE 313: note = Tnp_P4
  SITE 326: note = Tnp_P5
MFLVGIDIGKLKHSFCLIEKETSEILVEPMFFNNNKDGFNVLLSSFKDLPQKDILIGMEDTGHYHLALLKFLLDKHYQVALINPVATDLIRKMQGGITKNDKLDTLTICDVLASNQRVKSYRITKVDRFDLYEQKQLTREHHNLKEELNQYSNRLQKCIDIVFPEFNGLFNSKYGVVYMNILKDFGSADVISHTDIRSLRKCFDIGRGKHISLTAEELKEAAKNSIGFPSTADVIQIKHLVAQIELINEQIAEIDKKIEEFSIQNNSPILTIPGISHFSGTSILAELGDIHNYSKPSQIIKYAGVAPLTYESSQFTAQHTAITKKGCKYLRKTLYQIITPVIQYNPVFKEFYQLKISQGKGHRCAQGHCVRKLLRVIYHLLNTNTQFDPALLR

SEQ ID NO: 16698 - protein, 327 aa, unidentified
  source 1..327: note = protein_b038735
  REGION 6..154: note = RuvC_domain
  SITE 9: note = RuvC_P1
  SITE 56: note = RuvC_P2
  SITE 94: note = RuvC_P3
  SITE 96: note = RuvC_P4
  SITE 99: note = RuvC_P5
  REGION 199..286: note = Tnp_domain
  SITE 207: note = Tnp_P1
  SITE 237: note = Tnp_P2
  SITE 245: note = Tnp_P3
  SITE 246: note = Tnp_P4
  SITE 259: note = Tnp_P5
MKNVYVGIDISKATLDFCVVEPKRISFHKIKNNVAAIGKLLKTIKEIDPQAYLCMENTGYYNFNLYEVLEKFSFRTYVIDPKHIKRSIGLVRGKNDKIDAKRIAIFIERNHQDFESWKPIGESVKAIKILLSQRRFKIKQRTGLKQQNSDLKSVTFSKTTDKLIRINEKSIKEINKHIVEIETLIKKEINADHQLRTEINRIKTIPGIGDITAWTIAVKTEGFKRLCDPRKLACFAGVVPFEQQSGTSLRTKPRVSKMADMTLKSVLQMAAMRAVRMQNDLRIYYLRKVEEGKNKMSVLNAVRNKLIHIAMALIKNQTNYKNRLQLS

SEQ ID NO: 16699 - protein, 328 aa, unidentified
  source 1..328: note = protein_554caaf
  REGION 5..159: note = RuvC_domain
  SITE 8: note = RuvC_P1
  SITE 62: note = RuvC_P2
  SITE 102: note = RuvC_P3
  SITE 104: note = RuvC_P4
  SITE 107: note = RuvC_P5
  REGION 204..289: note = Tnp_domain
  SITE 212: note = Tnp_P1
  SITE 241: note = Tnp_P2
  SITE 249: note = Tnp_P3
  SITE 250: note = Tnp_P4
  SITE 262: note = Tnp_P5
MMYFTGIDISKNKIDVCWLRDAHKGKKKSKVLKNNTDGHQALAKWLLDNIKAKPEQVIVTLEPTGVYHETLMYFLHDHGFKVYLVNSGYAKKYAQAINLTHKTDKSDAFMLANYGCAQQGHIEFWKPEPIEVRELNALLRRLDALEADYKRELNRLDSSEFGLSSERVVMSLKDMLQALETEIKKLTEDIDDHINRNPELKNNRKLLGSIPGIGSVLSRELTYLFASKTFKNAKEVGAYLGLIPKLNESGKLKGRTTLSKAGPSRIRAKLYMAAIVAGQFNHSIKAQKSRLLAKGKTKMQALGAAMRKLAQMCFGVIKNQTEYQPQVT

SEQ ID NO: 16700 - protein, 310 aa, unidentified
  source 1..310: note = protein_e65cd97
  REGION 4..164: note = RuvC_domain
  SITE 7: note = RuvC_P1
  SITE 62: note = RuvC_P2
  SITE 103: note = RuvC_P3
  SITE 105: note = RuvC_P4
  SITE 108: note = RuvC_P5
  REGION 267..310: note = Tnp_domain
  SITE 275: note = Tnp_P1
  SITE 305: note = Tnp_P2
MLFVGIDVAKSKHDCCIIDSDGVIITDSLRISNTKEGFDTLYTSIISALDSSDFSNVKIGLESPGHYSTNITNYLYSKGFSITVLNPLVTNAFRKAGTLRKTKTDKCDAKVIATMLFSDESKSYSPSSYQIQELKSLTRHRYRMIGYRSKLKLSVTRLIDIIFPELPDFVWSIHQASCYQLLLGLPSPEVISTCHLTHLINVLSKASRGKYGREKALQLRELAANSIGSSNRSLTFELQQTIRLIQAVQSEIDTLDKQIKLVVDELNTPLITIPGIGYTIAAIILAEIGDINNFSSPAKLLAFAGMEPST

SEQ ID NO: 16701 - protein, 392 aa, unidentified
  source 1..392: note = protein_019213e
  REGION 4..164: note = RuvC_domain
  SITE 7: note = RuvC_P1
  SITE 62: note = RuvC_P2
  SITE 103: note = RuvC_P3
  SITE 105: note = RuvC_P4
  SITE 108: note = RuvC_P5
  REGION 267..354: note = Tnp_domain
  SITE 275: note = Tnp_P1
  SITE 305: note = Tnp_P2
  SITE 313: note = Tnp_P3
  SITE 314: note = Tnp_P4
  SITE 327: note = Tnp_P5
MLFVGIDVAKSKHDCCIIDSDGVIITDSLRISNTKEGFDTLYTSIISALDSSDFSNVKIGLESTGHYSTNITNYLYSKGFSITVLNPLVTNAFRKAGTLRKTKTDKCDAKVIATMLFSDESKSYSPSSYQIQELKSLTRHRYRMIGYRSKLKLSVTRLIDIIFPELPDFVWSIHQASCYQLLLGLPSPEVISTCHLTHLINVLSKASRGKYGREKALQLRELAANSIGSSNRSLTFELQQTIRLIQAVQSEIDTLDKQIKLVVDELNTPLITIPGIGYTIAAIILAEIGDINNFSSPAKLLAFAGMEPSTYQSGKYNASKTPMVKRGSTYLRWAIMQAARLVSMRDSTFATYMAKKRSEGKHFNVAQSHVGKKLIRVIYSLLKNNTAFVPQM

SEQ ID NO: 16702 - protein, 342 aa, unidentified
  source 1..342: note = protein_95e8aa8
  REGION 6..152: note = RuvC_domain
  SITE 9: note = RuvC_P1
  SITE 53: note = RuvC_P2
  SITE 91: note = RuvC_P3
  SITE 93: note = RuvC_P4
  SITE 96: note = RuvC_P5
  REGION 211..298: note = Tnp_domain
  SITE 219: note = Tnp_P1
  SITE 249: note = Tnp_P2
  SITE 257: note = Tnp_P3
  SITE 258: note = Tnp_P4
  SITE 270: note = Tnp_P5
MTIVTVGIDLAKNVFAVHGVDAAGKPVLVRPSVARDKLLELIASLPPCLIGMEACSGAHHWAREFDKLGHTARLMAPKFVAPYRLSGKRGKNDAADAAAICEAVTRPQMRFVPLKSADQQGQLMVHRARQGFIEQRTATLNRIRGLLSELGIVLPLKAATVRRQALQHLEDLPGWANTVIGDLLSEVSHLDERIAQYDRHIALMARHSTQAQHLMQLAGIGETTATAIVSTVGNGHDFVCGRSFSAWLGLVPGQYSSGGKQRLGRITKAGDAYLRSLLVMGARVVLAAAMNSKAPKQDPLSRWARALAERRGYWRAVVAIAAKNARLCWAVLQRGDNFKIPA

SEQ ID NO: 16703 - protein, 323 aa, unidentified
  source 1..323: note = protein_0e3cef1
  REGION 5..156: note = RuvC_domain
  SITE 8: note = RuvC_P1
  SITE 52: note = RuvC_P2
  SITE 92: note = RuvC_P3
  SITE 94: note = RuvC_P4
  SITE 97: note = RuvC_P5
  REGION 195..284: note = Tnp_domain
  SITE 203: note = Tnp_P1
  SITE 235: note = Tnp_P2
  SITE 243: note = Tnp_P3
  SITE 244: note = Tnp_P4
  SITE 257: note = Tnp_P5
MKKFVGIDISKKTFDIYFEQEGNGSHVKLNQTAEDYKILLHLIDHDAICVMEATGNYHLKLADYLHQSGIKVVAENPLKIKRFSQMSLQRTKADKADAKLIHEYGRLILSSTGPHFWQPDVAEIGHLKQYDTVRHQLIKQRTALNNSEEALTALTNLNEEVTSVLQDMVPAIEKAIKQLDKGMLKLVKAHHAETFELVTSVPGVGAKTATMMICLTDGFKKFTPAHVKQFISYIGMSPRTFESGTSVKGRSHISKVGNSRLRSMLYMCSWTAKRSNQQCAALYERLHEKGKPEKVIKVAISHKLIRQIFGVIKTGIPFSNEFA

SEQ ID NO: 16704 - protein, 413 aa, unidentified
  source 1..413: note = protein_53def63
  REGION 12..164: note = RuvC_domain
  SITE 15: note = RuvC_P1
  SITE 61: note = RuvC_P2
  SITE 101: note = RuvC_P3
  SITE 103: note = RuvC_P4
  SITE 106: note = RuvC_P5
  REGION 269..353: note = Tnp_domain
  SITE 276: note = Tnp_P1
  SITE 305: note = Tnp_P2
  SITE 313: note = Tnp_P3
  SITE 314: note = Tnp_P4
  SITE 326: note = Tnp_P5
MVEASGAAVAYLGIDVGKLSHSACAIDAGGEVVFRADLENRPDDIDRLLERAGASALVVVDQRRNIGALVLARAFAHGNPCAYLPGYAEKQARGMFPGVAKTDAIDAEVIARTARGLPGALRPLAEKPEDTASLRILSSQREFAAAARTRAKNRLRATLLEADPALERAVDPSRPWQVALLAEFGSAAGCSAAGWSGFSAAAERAEAPADGARRLWESMAASARSGRRVPAGEDVAVRMLARDIAALDADVAELDGLIADALAGNELYECPLTVPGIGPKTVAALVTSVDISMFRGHDELASYCGVAPAGSRSGTSVRSTSPQRGGNKQLKNLLIFSCNSLVSTQNRFGRYYDEGDEAQQGAEGRGEKEAQGHLRRHAGRGPVLGLNGRATTRRAAGRTAPRCIMPKIRGKSG

SEQ ID NO: 16705 - protein, 382 aa, unidentified
  source 1..382: note = protein_1801629
  REGION 7..147: note = RuvC_domain
  SITE 10: note = RuvC_P1
  SITE 53: note = RuvC_P2
  SITE 88: note = RuvC_P3
  SITE 90: note = RuvC_P4
  SITE 93: note = RuvC_P5
  REGION 210..295: note = Tnp_domain
  SITE 218: note = Tnp_P1
  SITE 248: note = Tnp_P2
  SITE 256: note = Tnp_P3
  SITE 257: note = Tnp_P4
  SITE 269: note = Tnp_P5
MNKIIRIGIDTSKSVFVLHGVDAAEQPVLRRKLRRSQVLEFFGKLEPTKIGMEACGGAHYWARELQALGHEVVLLPPQYVKPYVKRNKNDAADAEAICEAMSRPTMRFVPVKTTEQQAALMLAGTRDGLIGRRTQLSNTIRGYAAEFGLTTAKGLDKIELLLAGIAASAELPTLAKELFAAYGREYAQLQRQIIKIEARLMAWHKDNELSRRLVEVPSIGPIGATLLVMKVTNPHAFRCGRDFSAWIGLTPKDHSTAGKTRLGVITRAGDEALRSVLVAGATAVIQQAQKGRGYAPPWLVELLKRKPRKLAAVALANKMARVAWKLMVSGERYNPARTAAQSAAREGRGAAPRGGSAPRPSLASRITPLGGGCHDRGVTSSA

SEQ ID NO: 16706 - protein, 273 aa, unidentified
  source 1..273: note = protein_3734a8a
  REGION 7..149: note = RuvC_domain
  SITE 10: note = RuvC_P1
  SITE 53: note = RuvC_P2
  SITE 88: note = RuvC_P3
  SITE 90: note = RuvC_P4
  SITE 93: note = RuvC_P5
  REGION 209..273: note = Tnp_domain
  SITE 217: note = Tnp_P1
  SITE 247: note = Tnp_P2
  SITE 255: note = Tnp_P3
  SITE 256: note = Tnp_P4
  SITE 268: note = Tnp_P5
MQNITLIGIDLGKYSFHIHCQDKSGKALLRKKFTRTKLMQFLATCPPSVVVMEACAGAHFMARRISDFGHETKLISPQFVRPFVKSNKNDFVDAEAICEAASRPSMRFVQPKTEVQQAMRALHRVRESLIRDKVKTTNQIHGFLLEFGISLPIGEAVIKRLSLILAEHGIPEYLSRLLMKLHSHYLYLVEQITTLESELNQSIKADDTAQRIMTIPGVGPITASLLSSQLGDGKQFSCSRDFAASTGLVPRQYSTSGKSTLLGISKRGDKNLR

SEQ ID NO: 16707 - protein, 353 aa, unidentified
  source 1..353: note = protein_c1fdb29
  REGION 7..149: note = RuvC_domain
  SITE 10: note = RuvC_P1
  SITE 53: note = RuvC_P2
  SITE 88: note = RuvC_P3
  SITE 90: note = RuvC_P4
  SITE 93: note = RuvC_P5
  REGION 212..296: note = Tnp_domain
  SITE 220: note = Tnp_P1
  SITE 250: note = Tnp_P2
  SITE 258: note = Tnp_P3
  SITE 259: note = Tnp_P4
  SITE 271: note = Tnp_P5
MEKITTIGLDLAKSVFQIHAITEGGHVAVRRALRRSQVLEFFRHIEPCLVGMEACGSAHYWANAIGEFGHTVRLMPPAYVKPYVKRNKTDAADAEAICEAVTRPTMRFVPVKTPDEQAAGMVLKTRELLVRQRSQTVNAMRAHMVELGIVAATGMTSIAKLVAILRDDRDGRLPNSARAALLEMADQIERLTERVEVLDSKIVAAVKADDATRRLTTIPGVGPIIAATVRAAVQDPAAFRTGRDLAAWIGITPRANSSGGKERLGKISKRGNKQLRTLLIVGATSILKQARRGSKLSGWVVSIMDDAPTRWQPWRWLTRWPARYGRFWSRAAHTKRQRWQRRRNRIPGVPASG

SEQ ID NO: 16708 - protein, 379 aa, unidentified
  source 1..379: note = protein_3c6eb7e
  REGION 1..145: note = RuvC_domain
  SITE 43: note = RuvC_P2
  SITE 84: note = RuvC_P3
  SITE 86: note = RuvC_P4
  SITE 89: note = RuvC_P5
  REGION 250..337: note = Tnp_domain
  SITE 258: note = Tnp_P1
  SITE 288: note = Tnp_P2
  SITE 296: note = Tnp_P3
  SITE 297: note = Tnp_P4
  SITE 310: note = Tnp_P5
MKKRKKIIFKAFSFSNTTNGGESLITKLNNFIRSVNDVEIGMEATGHYWLSIYSFLVEKGFVIHVVNPIQTDGWRKGIEIRKRKTDIIDSVLIADLIRYGDFLETSLADENTISLRNLSRFRNYLISSIGDLKRKTICVLDQVFPEYQSIFSDIFGQTSKEILLHFSSPSDFENISSEKLDKVLSEITMKKFATNKIKQLSRVAKNSFGISFCLDSFALQLKLLIEQINFIESQVKDIEKQINTLLDKINSPITTIPGIGNVTAATILGEIGDISRFSNPSKLVAYAGIDASVSQSGEYQSTNNKMSKRGSPYLRKALFSAALVTSNCDPVFKAFYQKKRSEGKHHLTAIGAVARKLCYTIHAILKNNCPYEVRLPNNE

SEQ ID NO: 16709 - protein, 387 aa, unidentified
  source 1..387: note = protein_5042629
  REGION 4..159: note = RuvC_domain
  SITE 7: note = RuvC_P1
  SITE 58: note = RuvC_P2
  SITE 98: note = RuvC_P3
  SITE 100: note = RuvC_P4
  SITE 103: note = RuvC_P5
  REGION 263..350: note = Tnp_domain
  SITE 271: note = Tnp_P1
  SITE 301: note = Tnp_P2
  SITE 309: note = Tnp_P3
  SITE 310: note = Tnp_P4
  SITE 323: note = Tnp_P5
MFYVGIDIAKLHHFASVLSSDGEVLSEPFEFSNDYDGFQKLLSALSSFEKDSLIIGLESTAHYGNNLVTYLFSLDFKVCVINPIQTATLRKNNIRKTKTDKVDAYLIAKELMLYPHRPVSEVDVQIMKLKQLCRFRHKLLKARTRAKIQLTSYVDQLFPELQYFFKSGIHSKGCYALLKEVAVPQDIASMHLTHLTNLLRKASHGHFQKDTAQKLRVLAQKSVGTGNKSISIQIAQSIEQIELYDRQNGEVLVQIESIMKDLDSVIMTIPGIGYLNGAMILGEIGEISRFSHPSKVLAFAGLDPSVHQSGNFKANHTRMSKRGSKLLRYALINAAHNVVRNNKTFKAYYDLKVAEGHSHYSALGHCAGKLVRIIYKMLSCNVSFNLE

SEQ ID NO: 16710 - protein, 399 aa, unidentified
  source 1..399: note = protein_eed87e9
  REGION 4..160: note = RuvC_domain
  SITE 7: note = RuvC_P1
  SITE 57: note = RuvC_P2
  SITE 97: note = RuvC_P3
  SITE 99: note = RuvC_P4
  SITE 102: note = RuvC_P5
  REGION 274..357: note = Tnp_domain
  SITE 282: note = Tnp_P1
  SITE 308: note = Tnp_P2
  SITE 316: note = Tnp_P3
  SITE 317: note = Tnp_P4
  SITE 330: note = Tnp_P5
MNAVGIDVSKGKSMVTILRPFGEIVSSPFEIKHTSSDIHSLIKLIHSIEGESRVVMEHTGRYYEALAHQLSAADLFVSAVNPKLVKDFNNDSLRKIKSDKADSVKIARYALDKWQSLEPYSITDELRAQLKVMNRQFHFYVKQKTAMKNNLIGLIDQTYPNANTYFNSPTRSDGSQKWVDFVSTYWHVDCIRKMSLNAFVEHYQNWCKRKKYAFNKSKAEEIYTKTKELVPVFPKNEITKHIIRQAIDQLNSTSVTVETIRTLMNETASKLPEYSIVMQFKGIGPQLMAEIGDVTRFTHKGALTAFAGVDPGVNESGSYAQKSVPTSKRGSSHLRKTLFQVMDVLIKTMPQDDPVYQFMDRKRTQGKPYYVYMTAGANKFLRIYYGRVKEYLSVLPDPS

SEQ ID NO: 16711 - protein, 387 aa, unidentified
  source 1..387: note = protein_6aa91b8
  REGION 5..161: note = RuvC_domain
  SITE 8: note = RuvC_P1
  SITE 59: note = RuvC_P2
  SITE 100: note = RuvC_P3
  SITE 102: note = RuvC_P4
  SITE 105: note = RuvC_P5
  REGION 262..347: note = Tnp_domain
  SITE 269: note = Tnp_P1
  SITE 299: note = Tnp_P2
  SITE 307: note = Tnp_P3
  SITE 308: note = Tnp_P4
  SITE 320: note = Tnp_P5
MIYYIGIDISKYKHDFCIISNTGEVIVENSSFENNKKGFQYFLDQLKPYNKSSIQIAFEATGHYSLNLELLLIDQDYSFMKMNPLVIHQFLKARSLRRTKTDKADSLTIANYLMSVPYKPNSHLLYNIYTLKSLCRSREQLIKERSKFQVLLTNELDKSFPELKIFFNNIISSTLLYILEKYKNTNHISLMKDYESLRKISHGKFSYAKFARLKQLAKDSIGHHDDNSDLLISTYVSTINHFDEKIDPIDKQISTIIKELNPKMLTIPGLGEISAATILSEYGDIKNFSSPNKMLAFAGLEPSIIQSGTLQNNGKMVKHGSGHLRYSIMNIAMSILRYSPTFYDYYLKKRSEGKCHRVALSHVCKKLIRVIYTLEKNNINFDPSLLK

SEQ ID NO: 16712 - protein, 315 aa, unidentified
  source 1..315: note = protein_6dc0ed2
  REGION 6..151: note = RuvC_domain
  SITE 9: note = RuvC_P1
  SITE 54: note = RuvC_P2
  SITE 94: note = RuvC_P3
  SITE 96: note = RuvC_P4
  SITE 99: note = RuvC_P5
  REGION 193..277: note = Tnp_domain
  SITE 201: note = Tnp_P1
  SITE 230: note = Tnp_P2
  SITE 238: note = Tnp_P3
  SITE 239: note = Tnp_P4
  SITE 250: note = Tnp_P5
MYHNFIGIDMSKNDFVVAIHGSKKTFKYLNNSKGFNDLLEKHPILKDNSLVVLETTGGYEKALLEYLLVEKIIVHRANTRVVKHFIRSTGQLAKSDNIDAIGLARYGYERHAHLDCYKPNENNLQKLVKYTLRKQDLKKQLAAEKNRIQAPDQECTKESHQRVIEFLEQEIAILDSLIDNLIKDCEYLTKARDLLVKEVAGLGKATAVSLLALMPELDNLNRKQIASLAGVAPYAYESGKKIGYRKTYGGRADLKPVLFMSAMTASRSNGKLGTFYNKLVESGKKKMVALIAVMRKIIVIANAKIRDLKRDLKIL

SEQ ID NO: 16713 - protein, 344 aa, unidentified
  source 1..344: note = protein_63a7a2f
  REGION 7..149: note = RuvC_domain
  SITE 10: note = RuvC_P1
  SITE 53: note = RuvC_P2
  SITE 88: note = RuvC_P3
  SITE 90: note = RuvC_P4
  SITE 93: note = RuvC_P5
  REGION 212..301: note = Tnp_domain
  SITE 220: note = Tnp_P1
  SITE 250: note = Tnp_P2
  SITE 258: note = Tnp_P3
  SITE 259: note = Tnp_P4
  SITE 271: note = Tnp_P5
MDKISTIGLDLAKHVFQAHGVDECGVVAVRKRLRRGEVMEFFGGLAPCVVGIEACGSAHYWAREIAALGHRVKLMPPAYVKPYVKRGKNDAADAEAICEAVMRPTMRFVPVKSAQQQASGMVYKVRELLVRQRTQTVNALRSHLAEMGIVAAQGGGKLVGLIAVVREAGDARLPEAARLALEDLAGQIEALDARLARLDDEIVAQVRASEAGRRLTGIPGVGPITAGALLAMVPDPAGFRSARHFATWLGLAPRQNSSGGKQRLGRISKQGNRYLRTLLILGAANVLRFMRKNMAISAWLAALRERRPFKVAAVALAHKMARIVWALMVKGGVYRATVPAAATS

SEQ ID NO: 16714 - protein, 275 aa, unidentified
  source 1..275: note = protein_71910ba
  REGION 4..150: note = RuvC_domain
  SITE 7: note = RuvC_P1
  SITE 52: note = RuvC_P2
  SITE 92: note = RuvC_P3
  SITE 94: note = RuvC_P4
  SITE 97: note = RuvC_P5
  REGION 191..275: note = Tnp_domain
  SITE 199: note = Tnp_P1
  SITE 229: note = Tnp_P2
  SITE 237: note = Tnp_P3
  SITE 238: note = Tnp_P4
  SITE 251: note = Tnp_P5
MVYIGIDISKSSFVAAYPSVNGYRTQTYPNTVAGARKFIATLSVAEHHCVMEATGNYGFLLLYLLHQSGIAVSLVNPKQIKHFSRMIMAVTKTDKKDACMIAMYGEKMNPPIYKMPSQAILLLKQKRTVIRQLRKQLVASKNLRESLVVLPYRDKACLRALDKTIDFLTKQIEQLEAELAEIASSEFDKQLKALTSIKGIGITLATALILTTGGFTYFDNAKQLSRFIGICPTYQQSGTSVNIKGHINRNGDEHLRSLLYVASWTALRYKNAISD

SEQ ID NO: 16715 - protein, 345 aa, unidentified
  source 1..345: note = protein_c792bb5
  REGION 7..148: note = RuvC_domain
  SITE 53: note = RuvC_P2
  SITE 88: note = RuvC_P3
  SITE 90: note = RuvC_P4
  SITE 93: note = RuvC_P5
  REGION 210..295: note = Tnp_domain
  SITE 218: note = Tnp_P1
  SITE 247: note = Tnp_P2
  SITE 255: note = Tnp_P3
  SITE 256: note = Tnp_P4
  SITE 268: note = Tnp_P5
MTEYKRIAIDTSKAVFTLHGVDQADRPTLRTDLRRAQLLPFLRKLPATEIVLEACGGSHHWARELTALGHRVRLIPPQYVKPFVKRAKNDRNDAAAICEAGGRPGMHFVPVKSAEQQAQGMVLKVRETLVAQRTALVNALRGHAAEYGVIAGKGLSNIALLLEVVAAAPAIPAAAGAMMALLGAEIDRLDARLRELETTLAATHKANPVSRRLATIPGVGPITALSLAIEIDAAAFESGRHLAAWIGLTPREHSTGGKQRMGGISRAGNERLRALFVLGATSVIKVAERPGNKLATDWLLKLLRRKPRKVAAVALANKMARTAWALMTSGETYRREPAATGAGAA

SEQ ID NO: 16716 - protein, 395 aa, unidentified
  source 1..395: note = protein_81d6dea
  REGION 5..156: note = RuvC_domain
  SITE 8: note = RuvC_P1
  SITE 57: note = RuvC_P2
  SITE 96: note = RuvC_P3
  SITE 98: note = RuvC_P4
  SITE 101: note = RuvC_P5
  REGION 266..351: note = Tnp_domain
  SITE 274: note = Tnp_P1
  SITE 304: note = Tnp_P2
  SITE 312: note = Tnp_P3
  SITE 313: note = Tnp_P4
  SITE 325: note = Tnp_P5
MKHILSFDIAKGKSVYCFIDELRNTIIDATLIEHNKNEFDNLFKLVKNYPNLIVIMESTSVYHLPVENYFRSKGIDTIVINPKLVKQFKDTLNKSKTDKLDCFKIARCYLGTIDNFYYKNDEYFIYNPLARQYWSLIEGQTRLKNRYKQLIEIVFPEFSLIFNNLYDDLALNFIHDFPHPVLFANRRIDYLMNYLKEKNATTQAFRFKNKVLKMKELASNSLCFVSFDSLQVQNLVQIIEMIQYHKSEINKIKNQLINEMKYKKLFKIINSIPGFGEFYTALFLAEVGDITRFDNKYQFISFIGIDSVTSQSGISAYHGPISKTGCKFGRTILFNVVTTLIQISAHSDKTNPIYLFFRKKQSEGKRHYKCIIACETKLCKTIYKLCSSDCLYKNK

SEQ ID NO: 16717 - protein, 321 aa, unidentified
  source 1..321: note = protein_20e81b5
  REGION 8..147: note = RuvC_domain
  SITE 11: note = RuvC_P1
  SITE 52: note = RuvC_P2
  SITE 92: note = RuvC_P3
  SITE 94: note = RuvC_P4
  SITE 97: note = RuvC_P5
  REGION 191..277: note = Tnp_domain
  SITE 199: note = Tnp_P1
  SITE 229: note = Tnp_P2
  SITE 237: note = Tnp_P3
  SITE 238: note = Tnp_P4
  SITE 251: note = Tnp_P5
MDKDRKIYGIDISKSVFDVYSESGGHIQFSNIVKGFRLFVKSLPRTALVVMEATGYYHYRLAQFLDKEGVYVSVVNPLSIKRFIQMKLAKVKTDKSDAKAICAYGKQNEVPLYNALTSVHAECLQLFRLLDSYQKKRTATKNKIHGEKALGVPSAVVYQSLQRDLNHLNKEMAVLEARLLELVKEDQQHQLTLLQSIPGIGMKTALFLIVVTDGFKKFETASQLCSYVGITPTIRVSGSSVRGRSRISKVGNKKLRNLLFLAAFSACKYNKACKMLFDRLVAKGKSKKLALIAVANKLLKQAFAVAKSGLPYDENFVSKLN

SEQ ID NO: 16718 - protein, 323 aa, unidentified
  source 1..323: note = protein_dc1a206
  REGION 8..149: note = RuvC_domain
  SITE 11: note = RuvC_P1
  SITE 52: note = RuvC_P2
  SITE 92: note = RuvC_P3
  SITE 94: note = RuvC_P4
  SITE 97: note = RuvC_P5
  REGION 191..280: note = Tnp_domain
  SITE 199: note = Tnp_P1
  SITE 229: note = Tnp_P2
  SITE 237: note = Tnp_P3
  SITE 238: note = Tnp_P4
  SITE 253: note = Tnp_P5
MNKDKKIYGVDISKAVFDVYCESTGHHQFNNDEKGFKSFLKHLPQGVLVVMEATGYYHYRLAQFLFKSNILVSVVNPLSVKRFIQMKLAKVKTDKSDAKAISEYGQMNEVPLYTALTDIQSECLQLFRLLDSYLKHRTATKNKLKGEEVLGVPSKFVYRSLKRNLKHLNKEVDVLESRLLELVKQDQQHQLTLLKSIPGMGVKTALFLIVVTDGFKKFETASQLCSYVGITPTIRESGSSVRGRSRISKVGVGNKKLRNLLFLCAFSACKHNKGCRELYERIVNKGKSKKLALIAVSNKLLKQAFAIAKSGLPYDENFVSKLA

SEQ ID NO: 16719 - protein, 338 aa, unidentified
  source 1..338: note = protein_5e2bcd2
  REGION 6..148: note = RuvC_domain
  SITE 9: note = RuvC_P1
  SITE 52: note = RuvC_P2
  SITE 87: note = RuvC_P3
  SITE 89: note = RuvC_P4
  SITE 92: note = RuvC_P5
  REGION 211..299: note = Tnp_domain
  SITE 219: note = Tnp_P1
  SITE 249: note = Tnp_P2
  SITE 257: note = Tnp_P3
  SITE 258: note = Tnp_P4
  SITE 270: note = Tnp_P5
MNITRIGIDLAKSVFQIHGVDRAGKVVAKKQLRRNQMLTYFSKLSPTLIGMEACGSAHYWARELGKMGHDVRLMSPQFVKPYVKSGKNDANDAEAICEAVSRPNMRFVQIKSVEQQVMQAEHRIRARLIKARTALGNEIRGLLGEFGIALPVSLANLRRAIPELLEDAENGLLMDFRRLLKLLGDELRELDDNIKHYDARIAQNAKEDERIKRLLAVEGIGPVVASALVSAVGNGKQFSKGRDMAAWLGLTPNQHSSGGKNRLGHISKRGDKYVRMMLIHGARAALKAAENKTDGRSRWVTGLAKRRNKNIATVALANKNARIAWSILSREETYRVAD

SEQ ID NO: 16720 - protein, 340 aa, unidentified
  source 1..340: note = protein_03a0d69
  REGION 6..146: note = RuvC_domain
  SITE 9: note = RuvC_P1
  SITE 52: note = RuvC_P2
  SITE 87: note = RuvC_P3
  SITE 89: note = RuvC_P4
  SITE 92: note = RuvC_P5
  REGION 211..298: note = Tnp_domain
  SITE 219: note = Tnp_P1
  SITE 249: note = Tnp_P2
  SITE 257: note = Tnp_P3
  SITE 258: note = Tnp_P4
  SITE 270: note = Tnp_P5
MNIVYLGIDLAKNVFQLCGLNQAGKPVYSKRTGRKGLLQTVANIPACLIGVEASTGAFYWQREFERLRHKVKVISPQYVKPFVCGQKNDGNDAQAIAVALMQPTMQFVPPKILEQQDIQALHRARQRIVNHRTATVCQIRGLLLDRGITIGAAVSRVRRAVPLILEDAENGLSARMRRTIAELYDLFNDPGRRINFFDKEIDAVFRQSEACQRIAKVKGIGPKTATAVVAAIGKGTEFKNDRHFAAWLGLVPRQHSSGDRQVLMNMTKKGDRHLRTLFIHGTRAVVRVATNNNDGCLHQWVNQLKERCGFNKTAVAVANKNARIIWSMLRNEIEYQSIGS

SEQ ID NO: 16721 - protein, 345 aa, unidentified
  source 1..345: note = protein_2978ca7
  REGION 6..147: note = RuvC_domain
  SITE 9: note = RuvC_P1
  SITE 51: note = RuvC_P2
  SITE 86: note = RuvC_P3
  SITE 88: note = RuvC_P4
  SITE 91: note = RuvC_P5
  REGION 210..299: note = Tnp_domain
  SITE 218: note = Tnp_P1
  SITE 250: note = Tnp_P2
  SITE 258: note = Tnp_P3
  SITE 259: note = Tnp_P4
  SITE 272: note = Tnp_P5
MNNTIVGVDLAKDVIQVCVYANKKVESNTEMARHEFHEWLLNTSNTTLVFEACGTSNYWKQRAVQAGHVAHLISAELVSTIRQNQKTDKNDALAIVQASLLPDISFIKGKTIEQQQLQSILRLRELAVRQKTASGNQLKALLLEFSIRVSSRNGGLGGVIESVLEDAQNELSMPFRAALNAGWQHHLELIRSIATYDRCLEELVEQHEDCKRLLKLEGVGVINAVNLYVALGCSDLGSFLKGKDASACIGLTPIQHSSGGKIKHGSIGRYVKNSLLRSQLITGAMAAVAQVCKRTAVTQKDLWIQQLVARRGKKVAAVALANKTVRTAFAMLTEGTEYKAELIAA

SEQ ID NO: 16722 - protein, 388 aa, unidentified
  source 1..388: note = protein_d422812
  REGION 6..162: note = RuvC_domain
  SITE 9: note = RuvC_P1
  SITE 60: note = RuvC_P2
  SITE 101: note = RuvC_P3
  SITE 103: note = RuvC_P4
  SITE 106: note = RuvC_P5
  REGION 262..348: note = Tnp_domain
  SITE 270: note = Tnp_P1
  SITE 300: note = Tnp_P2
  SITE 308: note = Tnp_P3
  SITE 309: note = Tnp_P4
  SITE 321: note = Tnp_P5
MMIYYIGIDISKYKHDFCIISNTGEVIVENLFFENNKKGFQELLEKLKPYNKSDVHIAFEATGHYSKNLELFLIDQGYSFMKMNPLVIHQFLKARSLRRTKTDKADSLAIANYLMSVPYKPNSDLLYNIFTLKSLCRAREQLIKERSKYQVLLTNQLDLTFPELKQLLNNRISATLLFILEKYTNTNHISLMRDYDSIKNISRGKFSYAKFAKLKELAKNSIGHHDENNDLLISTYVSIIKTLNDKIDPIEKQISTIIKELNPRMLTIPGLGEISAATILAEYGDINNFSSPNKMLAFAGLEPSIIQSGTIENNGKMVKHGSGHLRYSIMNAAMIILRYSPTFYDYYLKKRSEGKCHRVALSHVCKKLLRVIYTLEKNNIDFDSSLLK

SEQ ID NO: 16723 - protein, 394 aa, unidentified
  source 1..394: note = protein_6c6e031
  REGION 4..164: note = RuvC_domain
  SITE 7: note = RuvC_P1
  SITE 59: note = RuvC_P2
  SITE 99: note = RuvC_P3
  SITE 101: note = RuvC_P4
  SITE 104: note = RuvC_P5
  REGION 268..354: note = Tnp_domain
  SITE 275: note = Tnp_P1
  SITE 305: note = Tnp_P2
  SITE 313: note = Tnp_P3
  SITE 314: note = Tnp_P4
  SITE 327: note = Tnp_P5
MIIVGIDIGKNSHYFCVLNRGTGEVLVDATSFKNNQNGFDSLIKALEPYDKASVLIGMEDTGHYHFALLRYLLSKGFAVALINPVATDMTRKMQGGISKNDKLDTLTICDVLSSNAHKKSYRILKISKFDYYEQRQLTRHHHNLKEEINVYTNRLQKCIDLVFPEFNSLFKSKYGTVYMNILKTFGSADRIAHADIRSIRKCFEIEGRGKRISLTAEQLKEAAKESVGFASLAEEIQIRHLISQIELMNAQLDEIDKKIEEFSVKTNSPIISIPGISHFSGTSILSELGDIFNYSKPSQIIKVAGVAPYEYESSQYRAEHTAITKKGSKYLRKTLYQIIVPVIQHNEVFKQYYQLKRSQGKSHRCAQGHCIRKLLRVIYHLLTMNQQFDPSLLR

SEQ ID NO: 16724 - protein, 346 aa, unidentified
  source 1..346: note = protein_a3cd16d
  REGION 14..164: note = RuvC_domain
  SITE 17: note = RuvC_P1
  SITE 69: note = RuvC_P2
  SITE 107: note = RuvC_P3
  SITE 109: note = RuvC_P4
  SITE 112: note = RuvC_P5
  REGION 212..301: note = Tnp_domain
  SITE 220: note = Tnp_P1
  SITE 250: note = Tnp_P2
  SITE 258: note = Tnp_P3
  SITE 259: note = Tnp_P4
  SITE 272: note = Tnp_P5
MSEKNAKILKKTVIGIDISKKSLDWCVIDGKEVVDYHKTTNEMDAIVKKMAEILSNGDRDIMDVLVCAEYTGRYIYPLVLACYKCGVDLWLESGYNIKCEARKERGKDDRTDARRIAEYGRKNQDDARIYHLPAKSIATLRDLISERALYCSQRAAHKGQLRDERQYMDPKAYTARAIRQLSLVKELDRLVEEVDKNMAEIIASDPELQRQKELLLTIPGVGIICATALIAVTAGFSLFDNGRELCCFAGLAPFAYTSGTSIRSAKRVSGRADHELKALLHMCALVAATRRKTGHFAEYYKRKIAEGKNKMSVLNAVRAKLMLTAFAVVRNNRPYEENFKNNFVKS

SEQ ID NO: 16725 - protein, 361 aa, unidentified
  source 1..361: note = protein_debbe4b
  REGION 15..163: note = RuvC_domain
  SITE 18: note = RuvC_P1
  SITE 67: note = RuvC_P2
  SITE 103: note = RuvC_P3
  SITE 105: note = RuvC_P4
  SITE 108: note = RuvC_P5
  REGION 235..319: note = Tnp_domain
  SITE 241: note = Tnp_P1
  SITE 272: note = Tnp_P2
  SITE 280: note = Tnp_P3
  SITE 281: note = Tnp_P4
  SITE 292: note = Tnp_P5
MKEEQATVGRRSIVGGVDTHKDLHFAAVVDEHDRLLGSECFPTTRHGYKQMLLWMRSFGELVRVGVECTGSYGAGLLRYLQQAHVTVLEVTVPDKSDRRKRGKDDTLDACNAAHAAFAGVRTVTPKTRDGMIESLRVLKVCRKTAISARRVALQLIHSTIISAPDELRESLRAMTRMQLIRTLAAWRPDLSDYRNLTSACRIALKSLGRRYLELHDEIADLDVMIATLVDELAPDLVSRNSIGYESASQLLLTAGDNSDRLQSEASFAALCGVNPVPASSGKVTRHRLNRGGDRAANSALHIIAIGRLRTDARTKAYIAKRVSEGHSKLEAIRCLKRYIAREVYYVIQQRNRQITQTQITP

SEQ ID NO: 16726 - protein, 342 aa, unidentified
  source 1..342: note = protein_f14a408
  REGION 6..149: note = RuvC_domain
  SITE 9: note = RuvC_P1
  SITE 52: note = RuvC_P2
  SITE 88: note = RuvC_P3
  SITE 90: note = RuvC_P4
  SITE 93: note = RuvC_P5
  REGION 211..296: note = Tnp_domain
  SITE 219: note = Tnp_P1
  SITE 249: note = Tnp_P2
  SITE 257: note = Tnp_P3
  SITE 258: note = Tnp_P4
  SITE 270: note = Tnp_P5
MIANTIGLDLAKHNFHVHAVDADGLVIKTAALRRSEMIKFFKSARPCLVGMEACATAHYWARELMMLGHEVRLIPPSYVKPFVRRGAKNDAADAAAICEAVRRPDMRFVPVKSEANQSFLMLHRARGLLVRQRTMTVCAIRAHLAEFGIIFGQGRQRIETIMPMIEEVAASLLEHARYALTSLIGSVGELNKQIDGIETKLAEIGRSDPVSNLLSSIPGVGPITSTAIAATIPDARMFRSGREFAAWLGLTPRQNSSGGTTRLGGITKQGDAYLRHLLVIGARNIVRYPKARAKVGGPWIDALLQRRRPMIVAVAVANKLARVIWAMMTSGEMFREARVKAA

SEQ ID NO: 16727 - protein, 409 aa, unidentified
  source 1..409: note = protein_753e7df
  REGION 4..163: note = RuvC_domain
  SITE 7: note = RuvC_P1
  SITE 60: note = RuvC_P2
  SITE 100: note = RuvC_P3
  SITE 102: note = RuvC_P4
  SITE 105: note = RuvC_P5
  REGION 273..359: note = Tnp_domain
  SITE 281: note = Tnp_P1
  SITE 312: note = Tnp_P2
  SITE 320: note = Tnp_P3
  SITE 321: note = Tnp_P4
MLFIGDDWAEAHHDIEIQDETGRRLVRRRLPEGVAGIAELHVLIADHLGDADEPSVVVVGIETDRGPWVGALVAAGYQVYAINPLSAARYRERHVTSRAKSDAGDAKVLADLVRTDRDNHRPIAGDSELAEAVKVLARTHQNLIWSRQRQANLLRSTLREFYPAALAVFSGELASRDALAVLEIAPTPARGRGLSTARIVSALRRAGRQRNLDKRAGEIRDALRSEQLQAAPLVADAYGHTVTALVAVLATLAAQIEQVESELGSCFDQHPDAKILLSQPGLGPVLAARVLAEFGDDPTRYADAKARKNYAGTAPITRASGTRRVVLARVATNKRLRDALYLQAFTALNTSPGARAYYDAHRARGATHHQALRTLANRLVGILHGCLRHHTPYDEATAWPSHSEQKIAA

SEQ ID NO: 16728 - protein, 391 aa, unidentified
  source 1..391: note = protein_1388813
  REGION 4..163: note = RuvC_domain
  SITE 7: note = RuvC_P1
  SITE 60: note = RuvC_P2
  SITE 101: note = RuvC_P3
  SITE 103: note = RuvC_P4
  SITE 106: note = RuvC_P5
  REGION 266..353: note = Tnp_domain
  SITE 274: note = Tnp_P1
  SITE 304: note = Tnp_P2
  SITE 312: note = Tnp_P3
  SITE 313: note = Tnp_P4
  SITE 326: note = Tnp_P5
MIYIGIDVAKDKHDCFITNSEGEALFNSFTIPNSADGFNDLYQKISSLTNDFSNVKVGLEATGHYNYNLLGFLIDKGLPTFVINPLHTNLFRKSLSLRQTKTDKVDAHTIALMMMSGVNLQSYSDTSYHNEELKSLTRYRFDKVKERAKLKTSVSRLVNILFPELEKLVPTLHMVSVYSLLAELPSSSQIASCHLTHLTKLLGTASKGRYGKEKAMEIRTAARQSIGSNMPAKSLELKHTIKLIQELSSEIDEIESSIKSIMDAIHSPILSIPGINYRMGSMIIAEIGDFNRFSSPDKILAYAGLSPSTYQSGQLDSSYSHMEKRGSRYLRYALFNATKFVCMWDNTFAAYLAKKRSEGKHYNVAISHAAKKLVRVIYQMEKTGQPYKRAA

SEQ ID NO: 16729 - protein, 404 aa, unidentified
  source 1..404: note = protein_8e2f5a6
  REGION 4..160: note = RuvC_domain
  SITE 7: note = RuvC_P1
  SITE 57: note = RuvC_P2
  SITE 97: note = RuvC_P3
  SITE 99: note = RuvC_P4
  SITE 102: note = RuvC_P5
  REGION 275..361: note = Tnp_domain
  SITE 282: note = Tnp_P1
  SITE 312: note = Tnp_P2
  SITE 320: note = Tnp_P3
  SITE 321: note = Tnp_P4
  SITE 334: note = Tnp_P5
MNAVGIDVSKGKSTVTIRKPGGKVVLAPRDYKHNRSAINALINEIKSLEGETKVCMECTGRYYEPMATWLSNAGIFVSTVNPMLIKDFSDDSLRTPKTDKADSQKIARYTLDRWDKLKQYGLMDETRNQLKTMNRQFDYYMEQKTSMKNNLISLLDQTFPGANDLFTSPPRADGSQKWVDFVYTYWHVDCVAGKSLDAFTDHYRNWCSRKDYGFSAKRAREIYEISKDLIAVLPKNETTKLIIHNAVDQVNSISKTVETLRSKLYDTAATLPEFPIVMAMDGIGPTLGPQLMAEIGDVTRFKHRGALTAFAGVDPGSNQSGQYAQKSVRTSKKGSPHLRKTLFQVMDGLIKRSPADNDVYLFMAKKRAEGKPYYVYMTAGANKFLRIYYGRVNEYLNSLNQETQ

SEQ ID NO: 16730 - protein, 413 aa, unidentified
  source 1..413: note = protein_93e637a
  REGION 5..167: note = RuvC_domain
  SITE 8: note = RuvC_P1
  SITE 64: note = RuvC_P2
  SITE 104: note = RuvC_P3
  SITE 106: note = RuvC_P4
  SITE 109: note = RuvC_P5
  REGION 275..361: note = Tnp_domain
  SITE 283: note = Tnp_P1
  SITE 314: note = Tnp_P2
  SITE 322: note = Tnp_P3
  SITE 323: note = Tnp_P4
MRLFVGDDWAEAHHDVELMDVTGRRLAKARLPEGVAGIARLHAMIGEQLGENADEEDAGQVAVGIETDRGPWVQALIAAGYAVYGINPLQASRYRERHGVSGAKSDAADAHVLADMVRTDSHQLRPVAGDTAQAAAVKVVTRTHKTLIWERTRCTQRLRHALRDYFPAALEAFEDLDAADTLELLARAPDPASAARLTTAQVSAALKRARRRHVAEKAGEIQAVLRAAHLGQPAIVTAAYAASARALVAVLVTLNEQVKALQGQVEAYFGQHPDAEIILSQPGLGPILGARVLAESGDDPARYASAKARKNYAGTSPITRASGKKRAVQARYVHNDRLIDALMTQAFAALQASPGARAYYDRQRARGSEHNAALRQLANRLVGIQHGCLKTRTLYDETTAWPQHATTTEKTAA

SEQ ID NO: 16731 - protein, 338 aa, unidentified
  source 1..338: note = protein_fe9415d
  REGION 2..144: note = RuvC_domain
  SITE 5: note = RuvC_P1
  SITE 48: note = RuvC_P2
  SITE 83: note = RuvC_P3
  SITE 85: note = RuvC_P4
  SITE 88: note = RuvC_P5
  REGION 206..290: note = Tnp_domain
  SITE 214: note = Tnp_P1
  SITE 244: note = Tnp_P2
  SITE 252: note = Tnp_P3
  SITE 253: note = Tnp_P4
  SITE 265: note = Tnp_P5
MIGVDLAKNVIQVHAARMTGEVEYRKQLSREKFRRFMAEQPPAVVVMEACGSANYWARELGRVGHAVKLIAPHYVRPFVKRQKNDAADAEAIVIAAQRPEMRFVAAKSEQQQGRAILFRTRTRLVHQRTELINMLRAFLYEFGHTVPQGIQQCQRIEAIIDEANSDLPEIVRSECREILDQLAGMTERIKRSDERIRALAAQTDTSRRLQTMPGIGPMTALAVEAFAPPMESFRSGRDFAAWLGLVPRQHSSGGKARNGRISKAGQADIRRLLIIGAMSRLNWMGRKAIPPGSWLANLSARKPRMLVAIALANKMARAIWAMLTRHENFRDPMAATVA

SEQ ID NO: 16732 - protein, 339 aa, unidentified
  source 1..339: note = protein_70e8a99
  REGION 6..147: note = RuvC_domain
  SITE 9: note = RuvC_P1
  SITE 52: note = RuvC_P2
  SITE 87: note = RuvC_P3
  SITE 89: note = RuvC_P4
  SITE 92: note = RuvC_P5
  REGION 210..297: note = Tnp_domain
  SITE 218: note = Tnp_P1
  SITE 248: note = Tnp_P2
  SITE 256: note = Tnp_P3
  SITE 257: note = Tnp_P4
  SITE 269: note = Tnp_P5
MKYTPVGVDIAKHLIQVHFIDENTGEVVDKQLRGRDFLEYFSNREPCLIGMEACGGSQHWARELTKLGHKVRLLQARFVKAFVMGNKNDVMDARAIWMAVQQPGKEIAVKTEEQQSVLVLHRTRMQLVKFRTAQINALHGTLLEFGETIHKGRAAMEREFPEALERMKERLPPYLITVLENQYKRLNELDSLIEDIEKQLASVAKQNETCKRLLDIPGVGPLIATAAVATMGEASAFKSGREFAAYVGLVPKQTGSGGKIRLLGISKRGDTYLRTLFIHGARAAALLTKEPGPWITELKKRRPASVAIVAMANKLARTVWAIAAHDRKYVRNHVSIRPY

SEQ ID NO: 16733 - protein, 320 aa, unidentified
  source 1..320: note = protein_bbc6921
  REGION 14..161: note = RuvC_domain
  SITE 17: note = RuvC_P1
  SITE 61: note = RuvC_P2
  SITE 101: note = RuvC_P3
  SITE 103: note = RuvC_P4
  SITE 106: note = RuvC_P5
  REGION 197..281: note = Tnp_domain
  SITE 205: note = Tnp_P1
  SITE 234: note = Tnp_P2
  SITE 242: note = Tnp_P3
  SITE 243: note = Tnp_P4
  SITE 254: note = Tnp_P5
MTSRGTEKMTETTIGIDISKDTLDAHRLSDGSSHQFTNDSNGHKSLIAWIGKDVVVRVVFEPTGPYHRAFERALARGGLPMVKVNPRQARRFAEATGKLAKTDRLDAILLARMGALLQLETRPAPDETIAELRQFHLAREALVKDRTAAKNRAKSLTITLLRRQNAERLKHIERQIAAIDAELEGRIQADAELSRRLEILISIPGIGRLTAINLLIEMPELGVLEPGQAASLAGLAPIARQSGRWTGHAFIRGGRAGVRQALYMPALVAMRFNPDLKAKYEQFIAAGKPAKVAITAIMRRIIVLANALLRAGRPWMPKTA

SEQ ID NO: 16734 - protein, 411 aa, unidentified
  source 1..411: note = protein_594f45c
  REGION 4..170: note = RuvC_domain
  SITE 7: note = RuvC_P1
  SITE 67: note = RuvC_P2
  SITE 107: note = RuvC_P3
  SITE 109: note = RuvC_P4
  SITE 112: note = RuvC_P5
  REGION 278..364: note = Tnp_domain
  SITE 286: note = Tnp_P1
  SITE 317: note = Tnp_P2
  SITE 325: note = Tnp_P3
  SITE 326: note = Tnp_P4
MIWIGDDWAEGHHDVELVDECGSRLARARLPEGLDGITRLHALIAEHTPDCGAELDPAQASGQVGIGIETDRGMWVQALLAASYRVYAINPMSVARYRERHSTSGAKSDQGDAHVLAEMARLDHAHHRQVAGDSPLAESVKLLARAHQSLVWDRTRQVLRLRSTLREFFPAALQAFDDLAASDALELLDRAPDPDQAARLARLTIVAVLRRAGRRDLEGKATRIQQILKAEQLRQPRPVQVAYAAIVSSQVQLINSLNIEISELGQVMADHFGRHRDAERYLSLPGLGPVLGARILGEFGDDPHRYTDAKARRNYAGTSPITRASGRRRVVLARYARNRRLADAVHQWAFCAMRGSPGARAYYQALRERGAGHQAALRQLSNRLVGILHGCLKTKTFYDEATAWAHLQPTT

SEQ ID NO: 16735 - protein, 390 aa, unidentified
  source 1..390: note = protein_e6e7f79
  REGION 4..160: note = RuvC_domain
  SITE 7: note = RuvC_P1
  SITE 59: note = RuvC_P2
  SITE 99: note = RuvC_P3
  SITE 101: note = RuvC_P4
  SITE 104: note = RuvC_P5
  REGION 265..352: note = Tnp_domain
  SITE 273: note = Tnp_P1
  SITE 303: note = Tnp_P2
  SITE 311: note = Tnp_P3
  SITE 312: note = Tnp_P4
  SITE 325: note = Tnp_P5
MIIVGIDIAKRNHEATVIDESGKTLGRLSFANSNSGAEKLLSFIEQNNSDNDMVVFGMEATGHYWLSLYSFLIERDFTVYVINPIQSDGLRNLYIRKSKNDLKDSFIIAEIIRFGRFTDTQLADENTLALKQLCRYRSYLVDQVAELKLKSIAILDQIFPEYEKLFSDIFGTSSKSLLLEYTTPEELLTISTEHLAQFLAKCSRGRFNLEKAQQIQDAAKNTFGIKIACEAFSFQLKQIIEQIQFLENHIKELENQIDVYFKPLDSHLTSIPGIGVVLAATIESEIGDINRFSSPEKLVAFAGLDPTVKQSGEFNGTRNRMSKRGSPYLRRAIWQAAICSLQYNPVLKEFYDKKRLEGKAHGTAVGAVARKLTYVIFAIMRDKTDYVAMD

SEQ ID NO: 16736 - protein, 330 aa, unidentified
  source 1..330: note = protein_89d6732
  REGION 8..154: note = RuvC_domain
  SITE 11: note = RuvC_P1
  SITE 59: note = RuvC_P2
  SITE 97: note = RuvC_P3
  SITE 99: note = RuvC_P4
  SITE 102: note = RuvC_P5
  REGION 202..289: note = Tnp_domain
  SITE 210: note = Tnp_P1
  SITE 240: note = Tnp_P2
  SITE 248: note = Tnp_P3
  SITE 249: note = Tnp_P4
  SITE 262: note = Tnp_P5
MRKWAFILGIDVSKKTLDVYCKERKKHICIENGAEGFRILQKWCREHEIDLSQSIIALEYTGGYEYRLLQFCEAKKIRFVRFPGLAVKRSMGITRGKNDKVDAQRIAQYTDEKQQSIEPSKPLNKKILELRALLKFRKHLVVERAGYEARVKERKYMYPELKNDCIIRECNRKIKAGKEAEARVERTIAMLIESDENMQLNYELVTSIKGIGPINAWMTIAYTENFSAFPNARSYAVYAGVVPFDYSSGTSINGRKRVSSLANKALKAELGQAAKSAMTWDLEIKEYTERKLLTKKWPVVVNNVKFKLILRIFAVVKRGEKYVDNYRKTA

SEQ ID NO: 16737 - protein, 411 aa, unidentified
  source 1..411: note = protein_a12d997
  REGION 5..163: note = RuvC_domain
  SITE 8: note = RuvC_P1
  SITE 62: note = RuvC_P2
  SITE 102: note = RuvC_P3
  SITE 104: note = RuvC_P4
  SITE 107: note = RuvC_P5
  REGION 273..373: note = Tnp_domain
  SITE 281: note = Tnp_P1
  SITE 311: note = Tnp_P2
  SITE 319: note = Tnp_P3
  SITE 320: note = Tnp_P4
  SITE 333: note = Tnp_P5
MNPVVGLDVSKGESQVQAFLDKVKPYRKSFKVSHTVEGLDSLVAFLEDVKRESGKKPSVILEATGHYQTPVVHYLEERGYLLIIINPLISYKARGSSLRKVKTDAIDAYLLCELFYKEELEPYKKRGVQLLNLRNLTRQHENITGVIIQTKLQFQAVLEQVFPEYNGVFGDLYSVVSLLTLSEFPSSEDILKASEKAITDKIFELCKSRSIKWANEKAIQLKAAAARNPFEKTVYQSHILSLGMYINILLQYKEHLSKLETEIDALAKEIEEYTIIKSIPGIGEKIAATIISEVGEIDRFNNPKKLVAFAGVDPSVFESGKFTATKNRITKRGSSRLRHALYMAVRCAIRDCRKKKTTDEIIPRNKKMREFYDKKREEGKPFKVAIIACVNKLLHWIYALLKNKTTFQDIV

SEQ ID NO: 16738 - protein, 325 aa, unidentified
  source 1..325: note = protein_e0d72ce
  REGION 6..157: note = RuvC_domain
  SITE 9: note = RuvC_P1
  SITE 55: note = RuvC_P2
  SITE 93: note = RuvC_P3
  SITE 95: note = RuvC_P4
  SITE 98: note = RuvC_P5
  REGION 198..284: note = Tnp_domain
  SITE 205: note = Tnp_P1
  SITE 235: note = Tnp_P2
  SITE 243: note = Tnp_P3
  SITE 244: note = Tnp_P4
  SITE 257: note = Tnp_P5
MEKVFIGIDISKLTLDVFVNSCSKTQHYQIKNCSKAIKKFFKSFSNDANTVVGMENTGRYNFELYEVLSSMNIPVFVINPLHLKKSIGLLRGKNDKLDSQRICAFLEKNYMDLQPWIPKSLDIQKINLLNTERRHRVKIRAGLLRQMKDLSFLKNHTDKEIIKLNKQLILLLDKQIKTIEKKIVEIIESNTELKDQYIRIQTVPGVGRVLATMLIVKTNGFTEIQSARKMACYSGVVPFDHRSGSSIYYKPRISTMADKELKKILHLAALSSIRLKNDLALYFQRKVLEGKNKMSVLNAIRNKIIHRVYALIKNNSVYENNLQMS

SEQ ID NO: 16739 - protein, 340 aa, unidentified
  source 1..340: note = protein_a0860ec
  REGION 28..170: note = RuvC_domain
  SITE 31: note = RuvC_P1
  SITE 75: note = RuvC_P2
  SITE 115: note = RuvC_P3
  SITE 117: note = RuvC_P4
  SITE 120: note = RuvC_P5
  REGION 210..294: note = Tnp_domain
  SITE 218: note = Tnp_P1
  SITE 247: note = Tnp_P2
  SITE 255: note = Tnp_P3
  SITE 256: note = Tnp_P4
  SITE 267: note = Tnp_P5
MSEIRGMNSTLLDKIVKSKKMENMNQWVGIDVSKATLDVYIRPMGKAFQLANTEVEISHLVEQLKSYDLNLIVLEATGGLETELVIQLQAALLPVALINPRQGRDFAKATGRFAKTDAIDAQILAHFGEAMKPQVLAIESEGARQLSELISRRRQLVEMQTAEKNRRTRARGKALADIEAHIDYLAQRLKQLNQEIEELAQNNQQWIDKVNLLKTTPGIGQVISTTIVSDLPELGKLTAKQISRLVAVAPINHDSGQHKGKRMINGGRAHVRATLYMGAVVAIRHNPVIKAFYERLVERGKSKKLALTACVHKMLVILNAMLRDHLPWRICDNFQPIVNA

SEQ ID NO: 16740 - protein, 345 aa, unidentified
  source 1..345: note = protein_391ac67
  REGION 7..149: note = RuvC_domain
  SITE 10: note = RuvC_P1
  SITE 53: note = RuvC_P2
  SITE 88: note = RuvC_P3
  SITE 90: note = RuvC_P4
  SITE 93: note = RuvC_P5
  REGION 212..302: note = Tnp_domain
  SITE 220: note = Tnp_P1
  SITE 250: note = Tnp_P2
  SITE 258: note = Tnp_P3
  SITE 259: note = Tnp_P4
  SITE 272: note = Tnp_P5
MEQCNVIAIDLAKDIFQVCIMTTNGKIIFNKAMNRAKLKEWLAKKKLALVAMESCGGAHYWARFALSLGHKVMVIPPKQVKPFRTGQKTDANDAVAIAVASRAANIKPARILSIEQQGLQSIEKMRSLIDKQKLQLSNQVRGLLLEFGIVINKSIKSFKERIPEILEDAENDLSFPMRKVLLQMWELYSRLENDFDVINNELIQLTAQDSDCQKLMKLEGVGPITAVRLKIQLGNGEHFHSGRQVAACIGLTPKQHSSGGKVKLGSVGKGSYDKPLRSCIFLGARAVVSKLKNRPAKTEKERWLKALIERRGVNCASMALANKTARTAYALLKNNTDYKPVLIAA

SEQ ID NO: 16741 - protein, 330 aa, unidentified
  source 1..330: note = protein_795ab3d
  REGION 5..155: note = RuvC_domain
  SITE 8: note = RuvC_P1
  SITE 55: note = RuvC_P2
  SITE 95: note = RuvC_P3
  SITE 97: note = RuvC_P4
  SITE 100: note = RuvC_P5
  REGION 196..283: note = Tnp_domain
  SITE 204: note = Tnp_P1
  SITE 234: note = Tnp_P2
  SITE 242: note = Tnp_P3
  SITE 243: note = Tnp_P4
  SITE 256: note = Tnp_P5
MSGFVGIDVAAKTVDLVVRDDDKTSKSEQFSQTPDGHAAVVRKLQKLAPELIVMEATGIYYLDLAVALAKANLPVAVINPKSFHHFAALKLNGNKTDAVDAALLAEFAQCMRPRLWTLPQDELLGLRDIGRQLNRLTGSRTQAKNRLHALMSKGMTLPMLIEDEQEGIEQLERRIKRLTQAALTLIVSNEILAAHFDRLTAAKGIGETSAIAILAELCVLPSTMKAPQVSRYAGLDVRKTESGSSVNKPGRLSKAGNAYLRAALYMPAMSAVRHDVRARAFYEALTGRGKKKIQAQCAVMRKYLVGIWACMQTQTTFDSSLLFSEKHLNH

SEQ ID NO: 16742 - protein, 311 aa, unidentified
  source 1..311: note = protein_0b8a2b4
  REGION 7..149: note = RuvC_domain
  SITE 10: note = RuvC_P1
  SITE 53: note = RuvC_P2
  SITE 88: note = RuvC_P3
  SITE 90: note = RuvC_P4
  SITE 93: note = RuvC_P5
  REGION 217..304: note = Tnp_domain
  SITE 225: note = Tnp_P1
  SITE 256: note = Tnp_P2
  SITE 264: note = Tnp_P3
  SITE 265: note = Tnp_P4
  SITE 277: note = Tnp_P5
MTQITTIGLNLAKNVFQVHGVDADGQVLLRKPLRRSQMLTFFKTLSPCLIGIEACATAHYWAQTLQSLGHDVRLISPAYVKPYVKRQKNDAADAAAICEAVSRPTMRFAPVKSVEQQSTLMLHSARELLITQRTALINAIRAHFSELGIVVAEGARNVRSLLALLQHREEKMNSSAQVPEIAATALQPLAEMLIETDRQIAKLDRAIVEMHRDSETRNRLATIPGIGVLTATYITASLAAFAKQFSCGREFAAYLGLVPRQYSSGGKPRLGRISKMVNRHLRKLLVVGATAALYSIRKGTSQSALALWARQ

SEQ ID NO: 16743 - protein, 402 aa, unidentified
  source 1..402: note = protein_9f886d5
  REGION 15..171: note = RuvC_domain
  SITE 18: note = RuvC_P1
  SITE 68: note = RuvC_P2
  SITE 108: note = RuvC_P3
  SITE 110: note = RuvC_P4
  SITE 113: note = RuvC_P5
  REGION 285..372: note = Tnp_domain
  SITE 293: note = Tnp_P1
  SITE 323: note = Tnp_P2
  SITE 331: note = Tnp_P3
  SITE 332: note = Tnp_P4
  SITE 345: note = Tnp_P5
MLIHLKGVSIMMNAVGIDVSKNKSTVTIRRPGDEVVLPPCDVRHTRSSIDALINEIKSLEGETKVCMECTGRYYEPMATWLTDAGLFVSTVNPVLIKDFGDDSLRAPKTDKADSKKIARYTLDRWTKLKQYDLMDETRNQLKTMNRQFGFYMDQKTSMKNNLIALLDQTFPGANDFFDSPVRPDGSQKWVDFVYTYWHVDCVTGRTLDAFTEHYHKWCSRKGYNFSAAKAKTIYDVSKDLIAVFPKDDVTKIIIHQAVDLLNAASKTVETLRARMDETASTLPEYPVVMDMNGVGPTLGPQLMAEIGDVMRFEKRGSLTAFAGVDPGKNESGQYVQKSVHTSKKGSPHLRKTLFQIMDGLIQRSPVGEPYYVYMTAGANKFLRIYYGRVKEYLKSLEANESE

SEQ ID NO: 16744 - protein, 344 aa, unidentified
  source 1..344: note = protein_50816a5
  REGION 7..149: note = RuvC_domain
  SITE 10: note = RuvC_P1
  SITE 53: note = RuvC_P2
  SITE 88: note = RuvC_P3
  SITE 90: note = RuvC_P4
  SITE 93: note = RuvC_P5
  REGION 212..299: note = Tnp_domain
  SITE 220: note = Tnp_P1
  SITE 249: note = Tnp_P2
  SITE 257: note = Tnp_P3
  SITE 258: note = Tnp_P4
  SITE 270: note = Tnp_P5
MIYSSVIAIDLAKHVFQVCKASHDGTVIYNRTCSRQKLKELLVKEKPALVAMESCGGTHYWARFARDQGHKVKAIAARAVKPFRQGQKTDANDAIAISVAARQPHIHSSRLLSVAEQCQQSIVRARDLLINQKVKTSNHIRALMLELGIAVTKGDKTLQKTIPEILEDGENDLTIGFRTTLNIMYQHFLMLLDEIETVSKQLNNEVAQDEVCQRLKSLEGVGPICAIQLKIALAPEHFSKGREAAACIGLTPVQHSSGGKQKLGAISKRSTHNTLRSALFQGALAVVVNIEKKEARTHKDIWLKALVARRGKKVAAIALANKTVRTAFAMIKHNQEYQPQLLVA

SEQ ID NO: 16745 - protein, 344 aa, unidentified
  source 1..344: note = protein_ae860ee
  REGION 9..159: note = RuvC_domain
  SITE 12: note = RuvC_P1
  SITE 64: note = RuvC_P2
  SITE 99: note = RuvC_P3
  SITE 101: note = RuvC_P4
  SITE 104: note = RuvC_P5
  REGION 256..344: note = Tnp_domain
  SITE 264: note = Tnp_P1
  SITE 295: note = Tnp_P2
  SITE 303: note = Tnp_P3
  SITE 304: note = Tnp_P4
  SITE 315: note = Tnp_P5
MKVVFPTCCGVDVHKTFLVATIITTPADSLQPNYQKKRFSTFNSDLNRCADWLLEHNCLDVCMESTGKYWVPVFNILEKRGIRVVIANPKWVKAVKGNKDDTKDSKWIGDLFRIGLVKSSFIPDLNIRILREFTRYRYKLVSMKSSEKNRFQNAFTVCNVALDSVVSDMFGKSATAITDYLTSDESFDAEHCVSLLQRSLKKKAEQVLESIEGFSIADEQKARIKIIREHHDFIEEMIATVDTRVNEMVAKYEGNINLLCTIPGIDRRSAITIISEIGTDMGQFGSSKRLCCWAGLTPGNNESAGKKKSVRISRAGVYLKPALVQVAHAAVKDNDHPYYKLKYE

SEQ ID NO: 16746 - protein, 342 aa, unidentified
  source 1..342: note = protein_46c6593
  REGION 8..162: note = RuvC_domain
  SITE 11: note = RuvC_P1
  SITE 67: note = RuvC_P2
  SITE 107: note = RuvC_P3
  SITE 109: note = RuvC_P4
  SITE 112: note = RuvC_P5
  REGION 208..295: note = Tnp_domain
  SITE 216: note = Tnp_P1
  SITE 246: note = Tnp_P2
  SITE 254: note = Tnp_P3
  SITE 255: note = Tnp_P4
  SITE 268: note = Tnp_P5
MKELKQVVGIDVAQKELVVTIGRLLEDLSVDLFSYKVFKNNDKGFLSLVEWVAKLVENPKEVHYVMEATGVYHQKIAYFLDTNQLKVSIVLPNKISNYFRTLEVKTITDKTCSQVIARFGLERKLDLWKRPKTVYKKLQQLTRERDQIVAERVIVKNQLHAEKIEAEPNLMTLKRISERMKLLNKQENEIKNDISQILKNNAELKKETDRMMTIPGIGELTAVIILAETNGFELIRNKKQLTSYAGLDVKEKQSGTSIKGKPKISKKGNRSIRKAMHFPSLVAVKWDENFKELYARLVSKHGIKMKALVSIQRKLLEMSYVLYKNQTIYDKEYKNSVQTQMA

SEQ ID NO: 16747 - protein, 346 aa, unidentified
  source 1..346: note = protein_e805e40
  REGION 7..147: note = RuvC_domain
  SITE 10: note = RuvC_P1
  SITE 53: note = RuvC_P2
  SITE 88: note = RuvC_P3
  SITE 90: note = RuvC_P4
  SITE 93: note = RuvC_P5
  REGION 210..296: note = Tnp_domain
  SITE 218: note = Tnp_P1
  SITE 248: note = Tnp_P2
  SITE 256: note = Tnp_P3
  SITE 257: note = Tnp_P4
  SITE 269: note = Tnp_P5
MNEIIRIGMDTSKHFFQLHGVGADERVVLRKKLRRSQMLAFFAGLPPTAIGIEACGASHHLARTLSGLGHTVKLLAPQHVKPYVSRNKNDGRDAEGLCEAMSRPRMEFVPVKTAEQQAGLMLLGVRQQLIARRTQLSNAIRGYAAEFGLIAPCGLHKIEPLLARIAQDETVPELARELFAAQGQDYARLQDELTTIEAKLLAWHRADTASRRLAQIPGVGPVGASALVLKTPAPQAFRSGRDFAAWLGLTPKDHSTGGKLRLGRITRAGDEMLRSVLISGAMAVIQQARHGRGRASVWLVALLARKPIKLAAVALANKIARIAWKMMITQQTYDGARMPSASPRAD

SEQ ID NO: 16748 - protein, 390 aa, unidentified
  source 1..390: note = protein_3517d15
  REGION 4..164: note = RuvC_domain
  SITE 7: note = RuvC_P1
  SITE 60: note = RuvC_P2
  SITE 101: note = RuvC_P3
  SITE 103: note = RuvC_P4
  SITE 106: note = RuvC_P5
  REGION 263..352: note = Tnp_domain
  SITE 270: note = Tnp_P1
  SITE 300: note = Tnp_P2
  SITE 308: note = Tnp_P3
  SITE 309: note = Tnp_P4
  SITE 322: note = Tnp_P5
MIYVGIDAASKKHDFTIMNQEGNIVVQPTTIKNDSEGFKKLHTEISSHTELAHEVCIGIEETGIYAKNLVSFLHASGFIVFNLNPLLTSFNQKAVSLRMSKTDKIDALAICRYIRQNHSILNPYTPTVYRFSELKSLSRLRYEKLKVLSKSKMELTRLLMIIFPEFIEHYDQHAKWATVLFTKYPLPAQIARMHTDTLVNIMRIKGDRIKAAEHIKLIAKQTIGAVSLTGQILLSSTLDDIKHFKSQLDVIDNAIAEIMGNFDFIKSIPGVGNTVGAMILGEIGNINRFKSSSSLLAYAGLDPSVYESGEFKSKNSRISKRGSKYLRTAIFTATRVACVGKGKDNKFRHKYLKKRLENKHHYSAVCAVSKNMINTIFKMLQTGEYFSYSH

SEQ ID NO: 16749 - protein, 269 aa, unidentified
  source 1..269: note = protein_f0a3f7e
  REGION 7..149: note = RuvC_domain
  SITE 10: note = RuvC_P1
  SITE 53: note = RuvC_P2
  SITE 88: note = RuvC_P3
  SITE 90: note = RuvC_P4
  SITE 93: note = RuvC_P5
  REGION 209..269: note = Tnp_domain
  SITE 217: note = Tnp_P1
  SITE 247: note = Tnp_P2
  SITE 255: note = Tnp_P3
  SITE 256: note = Tnp_P4
  SITE 268: note = Tnp_P5
MENVALIGIDLGKHSFHIHCQDRFGKVLLRKKFNRTKLIEFLATFPACTIVMEACAGAHHMARRLAELGHESKLISPQFVRPFVKSNKNDFIDAEAICEAACRPSMRFVTPKTESQQMLGALHRVRESFVRDRVKASNQIHGFLLEFGISLPIGHAAIKRLPSVIAEHELPARLIAVLERLHAHFKYLEQQIAEIDKELASQIDEDDLGHRLMTIPGVGPITASLLATELGDGKHYRCSRDFAASVGLVPRQYSTGGRANLKGISKRGD

SEQ ID NO: 16750 - protein, 346 aa, unidentified
  source 1..346: note = protein_7377086
  REGION 12..153: note = RuvC_domain
  SITE 15: note = RuvC_P1
  SITE 58: note = RuvC_P2
  SITE 93: note = RuvC_P3
  SITE 95: note = RuvC_P4
  SITE 98: note = RuvC_P5
  REGION 214..298: note = Tnp_domain
  SITE 221: note = Tnp_P1
  SITE 251: note = Tnp_P2
  SITE 259: note = Tnp_P3
  SITE 260: note = Tnp_P4
  SITE 272: note = Tnp_P5
MRTKPVPETAAFGIDIGKTVFHVVALDASGATIQRAKFSRDTLMAFFEAAPKVLISMEACPGSQWLARRLVAMGHDARIIPARFVKPYVKSNKTDTVDAAAIAEAVTRSTMRFVEVRTPEQVDLQALHRIRHRLVGHRTALMNQARALCLEYGLAMRVGAGGFHADIRRHLANAGNDLTPAMRALLDDLAYTEGRIKAVNAKVDAYAREHEAVCRLVAIPGIEPLGATAIIAAAGDDRRFRKARDLAAWLGLVPAEHSTGGKQTPLGISKRGNRYVRRLIIHGARSCFLHRNRASHALGGWLSALEARTHRNKAVVALANKLTRIVWAIPTRPGTVYLQSSGAAAR

SEQ ID NO: 16751 - protein, 266 aa, unidentified
  source 1..266: note = protein_f83759a
  REGION 1..99: note = RuvC_domain
  SITE 2: note = RuvC_P2
  SITE 42: note = RuvC_P3
  SITE 44: note = RuvC_P4
  SITE 47: note = RuvC_P5
  REGION 138..222: note = Tnp_domain
  SITE 146: note = Tnp_P1
  SITE 175: note = Tnp_P2
  SITE 183: note = Tnp_P3
  SITE 184: note = Tnp_P4
  SITE 196: note = Tnp_P5
MEATGGYQELLARLAHERGFVVYVLNPTHVHHYAISLGNRGKTDRLDAEVIAQYIAQRHTKLHPYEPISPELQQVRALQALRTTVVRVSTSLRLLAQRHGCASVHQKKALAGLSSWAEQLERELIAKIKAQSEWAKIYGLLTGICGIGPINGVALTALFTRVHFTSSDAVVAFCGLDPRPKESGRKVGRRRLSKQGDKAARSLLYNAASSAVRTPHFKDYYAALRARGLASTAALVVIARKLLRIAYGVWRTGRAFDPDRLNLKTA

SEQ ID NO: 16752 - protein, 325 aa, unidentified
  source 1..325: note = protein_eb58022
  REGION 5..163: note = RuvC_domain
  SITE 8: note = RuvC_P1
  SITE 62: note = RuvC_P2
  SITE 102: note = RuvC_P3
  SITE 104: note = RuvC_P4
  SITE 107: note = RuvC_P5
  REGION 273..325: note = Tnp_domain
  SITE 281: note = Tnp_P1
  SITE 311: note = Tnp_P2
  SITE 319: note = Tnp_P3
  SITE 320: note = Tnp_P4
MNPVVSLDVAKGESQVQAFLDKKKPYQGSFKVTHTIEGLETLFQFLRELENKTGIKPPIVLESTGHYHTPVVQYFEERGYLLIVVNPLISYRAKSSSLRKVKTDIIDARHLCELYYKEDLEPYKKRGIQLLNLRNLSRQHENITGIYVQTKLQFQAVLDQVFPEYRGVFGDLYSVVSLLTLLEFPTSEDILAVGEETVANRINELCPSRSKKWANTQAEKLTAASARNPFQRTLYQSHILSLEMYIKMLIEYQKHLSKFEDEINALAKEIEEYKIIQSIPGIGEKIAATIISEIGEIDRFNHPKKLVAFAGIDPSIFESGKFKAQ

SEQ ID NO: 16753 - protein, 344 aa, unidentified
  source 1..344: note = protein_0e8ea0b
  REGION 6..149: note = RuvC_domain
  SITE 9: note = RuvC_P1
  SITE 54: note = RuvC_P2
  SITE 89: note = RuvC_P3
  SITE 91: note = RuvC_P4
  SITE 94: note = RuvC_P5
  REGION 212..299: note = Tnp_domain
  SITE 220: note = Tnp_P1
  SITE 250: note = Tnp_P2
  SITE 258: note = Tnp_P3
  SITE 259: note = Tnp_P4
  SITE 271: note = Tnp_P5
MEISRVGVDLAKRVFQLHGLDRKGKTVWKRQLSRDKWIKVLSETVKPGAEIGIEACSGAHHWARLLGDKGYLVKIIPPQFVKPFVKSNKNDANDAQAICEAMIRPNMYPVKVKTVEQQDIQAIHRVREEIKSHRIAKANQIRGLVAEYGLVAPQKLPSLRCAIPIWLEDATNGLTSCFRQLLQGLWEDLLALDKRMKALDKQISQLASEPEAKRLQQLDGIGPLIATAILATVGDAKQYRKGRDMAAAIGLTPRQHSSGGKDKMLGISKRGDSYLRYLLIHGARSVVVRAKGKDDRLSRWINSLMVRRNINVVTVAVANKLARMAWVMLSKEVDYDPGYCSMKS

SEQ ID NO: 16754 - protein, 340 aa, unidentified
  source 1..340: note = protein_800041b
  REGION 6..148: note = RuvC_domain
  SITE 9: note = RuvC_P1
  SITE 52: note = RuvC_P2
  SITE 87: note = RuvC_P3
  SITE 89: note = RuvC_P4
  SITE 92: note = RuvC_P5
  REGION 211..299: note = Tnp_domain
  SITE 219: note = Tnp_P1
  SITE 249: note = Tnp_P2
  SITE 257: note = Tnp_P3
  SITE 258: note = Tnp_P4
  SITE 270: note = Tnp_P5
MKLTAVGVDVAKRVFQLHWVEAETGEIISKQIKRAAFLEHFVNRAPCQIGMEACGGAQHWARRLIEMGHQVRLMPGKTVKAFVSGNKNDVADARAIWTAVQQSSVKSVAVKSEAQQAVLALHRMRQQLIKFRTMQSNGLRGLLTEYGEVMAVGRAALNKAMTDVLARLSERLPAALVHTLREQWGRLGDLDEQIAEIERRLSAWMKEDRSCRKLAEIPGVGLLTATAAVATMGDAKAFKSGREFAVWLGLVPGQVGTGGKVRLLGISKRGDTYLRTLLIHGARAVLTHAKEPGPWVQQISKRRPPNVVTVALANKMARTIWALLAHDRSYERSYVSVKPA

SEQ ID NO: 16755 - protein, 347 aa, unidentified
  source 1..347: note = protein_923a98b
  REGION 6..147: note = RuvC_domain
  SITE 9: note = RuvC_P1
  SITE 52: note = RuvC_P2
  SITE 87: note = RuvC_P3
  SITE 89: note = RuvC_P4
  SITE 92: note = RuvC_P5
  REGION 214..297: note = Tnp_domain
  SITE 222: note = Tnp_P1
  SITE 252: note = Tnp_P2
  SITE 260: note = Tnp_P3
  SITE 261: note = Tnp_P4
  SITE 273: note = Tnp_P5
MAITVLGIDLGKNSCSVAGFDETGRVVLRRRLTRDGVVRLGAKLPACTMAMEACCGAHHLGHVLREQGHEVRLMSPEYVQPYVKAQKNDERDAEAIAEAATRPTMRFVELKSEAQLDAQILHRARTRLVGQRTALINQLRAVLLERGIVVAKGRQQLERFLTEMLDPAIEPPSTLSPRTRLLIEDMRLEWGELDRRIAALTTEFVARAREDQAARRLVSIPGFGALNATALVAAIGTGETFRSGRDLAAWLGLVPRQATTGGKPRLLGITKRGNTYLRTLLIHGARAALPSLSAGQTLIGEWLRGLVGRAHKNKVVVALAGKLARIAWAVLRSGEGYAARVSQPVAA

SEQ ID NO: 16756 - protein, 311 aa, unidentified
  source 1..311: note = protein_bb76162
  REGION 5..152: note = RuvC_domain
  SITE 8: note = RuvC_P1
  SITE 52: note = RuvC_P2
  SITE 92: note = RuvC_P3
  SITE 94: note = RuvC_P4
  SITE 97: note = RuvC_P5
  REGION 186..270: note = Tnp_domain
  SITE 194: note = Tnp_P1
  SITE 223: note = Tnp_P2
  SITE 231: note = Tnp_P3
  SITE 232: note = Tnp_P4
  SITE 243: note = Tnp_P5
MTCWVGIDVAKDSLAVWLRPQGKNFSVSNDEQGHQQLLALFAEEKPERIVLEATGGYECGVMFSLSRAGHRVSRLNPTRVRAFATAMGKLAKTDPIDAAVLAHLAQTLEEAPSTVPSPERERLRELVQRREQLVSQRDDERRRLHQARDSFVRQCLEGAIKALKETIRGYDKEIAKAMNVVDAEQAQQLCQVKGVGPVTAAGLLAYLPELGQLNRRQIAALVGLAPYNSDSGQKSGQRRIRGGRGMIRRILYMTTLSIIRYQEDFARRYQGLRENGRCAKVALVACMRVLIVRLNAMVRDGTCWRTGTVQQ

SEQ ID NO: 16757 - protein, 390 aa, unidentified
  source 1..390: note = protein_691b19e
  REGION 4..163: note = RuvC_domain
  SITE 7: note = RuvC_P1
  SITE 60: note = RuvC_P2
  SITE 101: note = RuvC_P3
  SITE 103: note = RuvC_P4
  SITE 106: note = RuvC_P5
  REGION 266..352: note = Tnp_domain
  SITE 274: note = Tnp_P1
  SITE 304: note = Tnp_P2
  SITE 312: note = Tnp_P3
  SITE 313: note = Tnp_P4
  SITE 326: note = Tnp_P5
MIYVGIDVAKDKHDCCILDNEGRSIFPIFTISNDKAGFDELFSKIRSVTRFRKKTKVGLEATGHYSSNLLATLVDKGFPTYLINPLHTNLFRKGQSLRKTKTDKVDASSIAMMLLTDKSLKPYSDTSYHNEELKSLTRYRFDKVHERAKLKTSLSRLVTILFPELEKLVPTLHIASVYALLEEFPGAAFIASSHLTRLKNVLYTASKGRYHRDKAIEIRNAAINSIGTPMNAKSLELRHTIQLIRMLDQEIDEIEASIKKIMDESNSPIMTIPGISYRMGAMIIAEIGDFSRFDNADKILAYAGLSPSTYQSGQVESSHSRMEKRGSRYLRYALFNAARFVCKWDETFGSYLGKKISEGKHYNVAVSHAAKKLVRTIYRMEMTQETYSPK

SEQ ID NO: 16758 - protein, 391 aa, unidentified
  source 1..391: note = protein_8b7371d
  REGION 6..163: note = RuvC_domain
  SITE 9: note = RuvC_P1
  SITE 61: note = RuvC_P2
  SITE 102: note = RuvC_P3
  SITE 104: note = RuvC_P4
  SITE 107: note = RuvC_P5
  REGION 267..351: note = Tnp_domain
  SITE 273: note = Tnp_P1
  SITE 303: note = Tnp_P2
  SITE 311: note = Tnp_P3
  SITE 312: note = Tnp_P4
  SITE 324: note = Tnp_P5
MSLYFVGIDISKYKHDCCIISATDQKVISKFSIKNDKVGFEELITTFNSLSSPEDIRIGFESTAHYALNLELFLENAHHSFMEVNPVLIKEYKKSTTLRRTKTDSVDCESIARWLMTVEYKPHSKGFYHAYSLKSLTRLRDRLIRQRSFYLVKITNVLDHTFPEFKPFFNERLSKTALYLLENYGSAEKMARMNSVSYEKLRSISRGKFSPQQFIALKELAANTVGVNNSIFDVELNSLLTLYKTLVTEINTLEKEINLLIEEVHPHYLSVPGIGSISAAIIYSEYGDISNFDNPGQMLAFAGIEPGINESGTESHGGRMVKRGSSQLRYALINCCLPLIRFDMTFATYYAKKRAEGKPHRVAITHVAKKLIRVIYALERQNTDFCVQKLR

SEQ ID NO: 16759 - protein, 323 aa, unidentified
  source 1..323: note = protein_dddc85d
  REGION 8..150: note = RuvC_domain
  SITE 11: note = RuvC_P1
  SITE 52: note = RuvC_P2
  SITE 92: note = RuvC_P3
  SITE 94: note = RuvC_P4
  SITE 97: note = RuvC_P5
  REGION 191..278: note = Tnp_domain
  SITE 199: note = Tnp_P1
  SITE 229: note = Tnp_P2
  SITE 237: note = Tnp_P3
  SITE 238: note = Tnp_P4
  SITE 251: note = Tnp_P5
MNKDIKYFGIDISYLVFDVTDSDGNYYQFKNKVSGFKAFRKLLNSESHCVMEATGYYHYQLAYYLFEEGLNVSVENPLSVKRFIQMRLSKVKTDKSDSKLICSYAEQVELKLWKGSSKEVQECLQITRTLSVYTKQRTMIKNKLHGESVLGEPSKAIVRSLKRSLKHLDKEMSSLEELLLVLVKEAHKDLFTRIKTIPGIGKKTSIMLIVLTGGFERFSSAAELCSYAGLTPVIRQSGSSIKGRPRISKMGNQKLRNLLFMCSFTACKYNKACRDIYERLVAKGKSKKLALIAVCNKLLKQAFAIAKSGLIFDKEYKSTLVKN

SEQ ID NO: 16760 - protein, 392 aa, unidentified
  source 1..392: note = protein_f501a13
  REGION 4..164: note = RuvC_domain
  SITE 7: note = RuvC_P1
  SITE 61: note = RuvC_P2
  SITE 102: note = RuvC_P3
  SITE 104: note = RuvC_P4
  SITE 107: note = RuvC_P5
  REGION 267..354: note = Tnp_domain
  SITE 275: note = Tnp_P1
  SITE 305: note = Tnp_P2
  SITE 313: note = Tnp_P3
  SITE 314: note = Tnp_P4
  SITE 327: note = Tnp_P5
MICVGIDVAKDKHDCLIMSSEGEVLADVFTVSNSKEGFEHLLQTINTCTGIGNSKIKVGLEATGHYSYNLLGFLLDNGLTTFVINPLHTNLYRKSQSLRKTKTDRVDARTIASILMSDMSLKPYTNIAYHNSELKSLTRYRFDKVKERAALKSSVARLVNILFPELEKLLPTLHTASSYALLSELPSAKHIAEVHLTHLTNLLYVASKGRYSKDKAIQIREAARNSIGTYMPAKALELKHTVKLIKEFNNEIAEIESEIQSIMDKIDSPITTIPGISLRMGAMIIAEVGDFNNFDSPDKILAFAGLSPSTYQSGQLNNCYAHMEKRGSRYLRYALFNATKLVCYWNPLFADYLAKKRSEGKHYNVAVSHAAKKLVRLIFALQKSGQPYMANS

SEQ ID NO: 16761 - protein, 392 aa, unidentified
  source 1..392: note = protein_7a0f34f
  REGION 5..164: note = RuvC_domain
  SITE 8: note = RuvC_P1
  SITE 61: note = RuvC_P2
  SITE 102: note = RuvC_P3
  SITE 104: note = RuvC_P4
  SITE 107: note = RuvC_P5
  REGION 267..354: note = Tnp_domain
  SITE 275: note = Tnp_P1
  SITE 305: note = Tnp_P2
  SITE 313: note = Tnp_P3
  SITE 314: note = Tnp_P4
  SITE 327: note = Tnp_P5
MIVSVGIDVAKDKHDCFIQNSEGEVLADVFTIPNNMEGFNTLLHKIQTCTTLQDKIKVGLEATGHYSYNILGFLLDNGLATYVLNPLRTNLYRKSLSLRKTKTDRVDARTIAAMLLSDVGLKPYTDTAYHNEELKSLTRYRFDKVKERAKLKTSVSRLVCILFPELEKLVTTLHTASVYTLLEEFPGAKQIAAAHLTRLKSLLENASKGRYKRDMAIAVRDAARNSIGSRMPAKSLELQHTIRLIRELDSEIHEIETEIEAMMDDIQSPITTIPGIGCRMGAMILAEAGDLSRFDSPDKLLAYAGMSPSTYQSGQLKNCYPHMEKRGSRYLRYALYNATKYVCLWDPTFTAYLAKKRAEGKHYNVAISHAAKKLVRLIFAIEKSRQPYRSAT

SEQ ID NO: 16762 - protein, 356 aa, unidentified
  source 1..356: note = protein_c7b0f9f
  REGION 6..147: note = RuvC_domain
  SITE 9: note = RuvC_P1
  SITE 52: note = RuvC_P2
  SITE 87: note = RuvC_P3
  SITE 89: note = RuvC_P4
  SITE 92: note = RuvC_P5
  REGION 208..293: note = Tnp_domain
  SITE 216: note = Tnp_P1
  SITE 245: note = Tnp_P2
  SITE 253: note = Tnp_P3
  SITE 254: note = Tnp_P4
  SITE 266: note = Tnp_P5
MEFKCIAVDTSKSVFTLHGVDEHGRPILRRDLSRARFETFLAKISPTEVVLEACGSSHHWGRVAQASGHTARLIPPQYVKPFVQRGKNNRNDAEAIGEAASRPTMRFVPVRSATAQAEAMDLTARDLLVRQRTQLVHAVRGHAAEFGVIAAKGIAQVEPLLRKIAETDMPQAAKETLAQLGRVITQLDAQLAEVDQRLTAQHKANPVSQRLAAVPGVGPVTALTVAMKVDASQFESARHFAAWLGLTPREHSTGSRQCLGGISRAGNERLRQLLVVGAMAVIRHAKPGSKTASPWLLTLLERRPRKVAAVALANKMARILWAELAKVPTDRLRSVGMPAEGMMANGTAYRRTPQAA

SEQ ID NO: 16763 - protein, 262 aa, unidentified
  source 1..262: note = protein_a6c7f8b
  REGION 1..91: note = RuvC_domain
  SITE 29: note = RuvC_P3
  SITE 31: note = RuvC_P4
  SITE 34: note = RuvC_P5
  REGION 134..220: note = Tnp_domain
  SITE 142: note = Tnp_P1
  SITE 172: note = Tnp_P2
  SITE 180: note = Tnp_P3
  SITE 181: note = Tnp_P4
  SITE 193: note = Tnp_P5
MMFLDEQNFPFTVVSGLEIKRSMGIRRGKSDKTDSKLIAEYVYEKREKIKLFEMPSATLRALKKLASYRERLVQERAGFKTRIKEFKEVFPDTEFVFYTESHKKIIECLDKEIQGIDNEIRKLIKKEEKLHRQYKLIQTIKGIGPQTAIIMIVLTKGFSSFENWRKFASFSGTAPYPNESGLYKGKTKTSNLANKQIKSLLTLCAESAIQHNPEMRLYYQRKVEEGKNKMSVLNTIRNKLIARVFAVAKRNTPYVETFGFAS

SEQ ID NO: 16764 - protein, 334 aa, unidentified
  source 1..334: note = protein_ffbfc2c
  REGION 7..149: note = RuvC_domain
  SITE 10: note = RuvC_P1
  SITE 53: note = RuvC_P2
  SITE 88: note = RuvC_P3
  SITE 90: note = RuvC_P4
  SITE 93: note = RuvC_P5
  REGION 208..296: note = Tnp_domain
  SITE 216: note = Tnp_P1
  SITE 246: note = Tnp_P2
  SITE 254: note = Tnp_P3
  SITE 255: note = Tnp_P4
  SITE 267: note = Tnp_P5
MEQITTVGIDLAKNVFSLHGVDAAGKTVLRRTVRRDRLVEVVAALSPCLIGMEACSGAHEWGRRFQQQGHTVKLMAPKFVAPYRKSDKNDGNDAEAVCEAVGRPSMRFVPVKSAEQQALLTMHRVRQGFVVERTALINRLRGLLAEFGVVLPLRSVTVRRQAADAAEVLPELARRAIADLLEQLHLLDGRIDAYDTEIEAQARLSEPARRLMKIRGIGPTTALAIVATVGNAREFKNGRQFAAWIGLVPGQYSTGGKARLGHISKRGDAYLRNLLVQGARSVLQTAAAHPDRLSRWALELQERRGYYRTLVAIANKNARIAWALLAKNEQLHKN

SEQ ID NO: 16765 - protein, 386 aa, unidentified
  source 1..386: note = protein_59014ff
  REGION 58..183: note = RuvC_domain
  SITE 79: note = RuvC_P2
  SITE 117: note = RuvC_P3
  SITE 119: note = RuvC_P4
  SITE 122: note = RuvC_P5
  REGION 255..339: note = Tnp_domain
  SITE 262: note = Tnp_P1
  SITE 291: note = Tnp_P2
  SITE 299: note = Tnp_P3
  SITE 300: note = Tnp_P4
  SITE 312: note = Tnp_P5
MERNDLSRSLVAFDQNSTLVAVVELSLKSWLVAGLVPGLTRQPLKKQGADAAVLLGLLYRWRDEAAKAGGVIKRIVVAFEAGRDGFWLARWLRARGIEAYVIHPSSIPVSREHRRAKTDRLDTGLLLRAVLGWLRGEPKHCSMVAIPTLEEEDAKRPSREHESLVGERTRLVNRMKATLMRLGIRGFNVKRRKAADGLAELRTPEGVALPPNTLAELRHDMARLRVIGEQLKEIERTRLERLRKAPREGTHPMMLMLAKVKSIGIETADMLVHEVLSRGLRDQRAVARYGGITGAPDESGSKRREKGLAKAGNARVRRGMLQLAWRWVMFQKQSVLAQWFRERTENAGGRHIRKTMIVALARKLLIALWRYVTTGEVPAGAILRAA

SEQ ID NO: 16766 - protein, 387 aa, unidentified
  source 1..387: note = protein_d451c4c
  REGION 5..159: note = RuvC_domain
  SITE 8: note = RuvC_P1
  SITE 58: note = RuvC_P2
  SITE 98: note = RuvC_P3
  SITE 100: note = RuvC_P4
  SITE 103: note = RuvC_P5
  REGION 263..350: note = Tnp_domain
  SITE 271: note = Tnp_P1
  SITE 301: note = Tnp_P2
  SITE 309: note = Tnp_P3
  SITE 310: note = Tnp_P4
  SITE 323: note = Tnp_P5
MTVYVGVDIAKELHYAAIMDDDGVVSNPFSFENNDKGFQSLLSHLAPFKKESVLVGYESTAHYQENLAYFLKQEGYRTAELNPLQTSALRKANIRNTKTDSVDAKLICLALAQHNVTANERDASCMDDLYSLCRMRMDLVTKRSQCKIQLVAIMDRIFPELAKFFKGNLHINTAYRLIERYPLPSQIKKTRIDVLTSLFRKASKGHYRRDNAAALKKLAAVSVGIPSDVFAFQAQQLVHQIEFYSDQIAAVDQKIDSDPIVTSSLLMTIPGISSYACACILSVIKNINDFDEPCKILAYAGLDPVIRQSGKFNARSTRMSKRGNSLLRYSLVWTAGNVVLNNATFAAYYAKKTSEGKSHYQALGHCAKKLVNSIFHILKYNEAFNLA

SEQ ID NO: 16767 - protein, 320 aa, unidentified
  source 1..320: note = protein_d7c3bf5
  REGION 10..158: note = RuvC_domain
  SITE 13: note = RuvC_P1
  SITE 57: note = RuvC_P2
  SITE 97: note = RuvC_P3
  SITE 99: note = RuvC_P4
  SITE 102: note = RuvC_P5
  REGION 193..278: note = Tnp_domain
  SITE 201: note = Tnp_P1
  SITE 230: note = Tnp_P2
  SITE 238: note = Tnp_P3
  SITE 239: note = Tnp_P4
  SITE 250: note = Tnp_P5
MMAQNDRVVVGIDVAKNKMDACIRATSQRRTFESSAQGRRQLISWLRKHKATTAVMEASGGYERDWAKVLREAGLEVRIVDPKRVRSFARSAGRLAKNDAIDAEMIAWFAETFGEAPAQAYDADREQLLYIVNARQALVDVQTELQNRNEHSLPDVVQKVQARLLKRIALELAKLEAAIAAMISATAHFAELAEIIESVPGLGKGTSAGLIAAMPELGQVSNKVAAALLGVAPYDDDSGKRRGERQIKGGRRKVRNLFYMACLGAATLHNPVLKAFYRRLIAKGKEKKVALVACMRKLIVILNIMIGRGEKWDASRYPVG

SEQ ID NO: 16768 - protein, 302 aa, unidentified
  source 1..302: note = protein_c1a5483
  REGION 6..147: note = RuvC_domain
  SITE 9: note = RuvC_P1
  SITE 52: note = RuvC_P2
  SITE 87: note = RuvC_P3
  SITE 89: note = RuvC_P4
  SITE 92: note = RuvC_P5
  REGION 211..273: note = Tnp_domain
  SITE 219: note = Tnp_P1
  SITE 249: note = Tnp_P2
  SITE 257: note = Tnp_P3
  SITE 258: note = Tnp_P4
MSILILGIDLGKNSCSIVGVDAQGAVVVRRSMRRKTLIEYVATLPACVVAMEACCGAHHLGRLFAAKGHEVRLMSPEYVRPYVKAQKNDDRDAEGIAEAASRPTMRFVELKSQAQLDIQTLHRMRSRLVAERTGLINQLRAILSERGTDFPAGRRKLEQGVDGLLADGDDTLSARIVELITQLRAEWSELDTKIEALNAEFVEMARTDAAMRRLTTIPGVGVLNATALVAAVGDGSSFGKARDLGAWLGLVPRQHTTGASLGCLESRSAATLTCVRFSSTVREPPYPRYPKATRHWAAGSKR

SEQ ID NO: 16769 - protein, 345 aa, unidentified
  source 1..345: note = protein_19bf819
  REGION 6..147: note = RuvC_domain
  SITE 9: note = RuvC_P1
  SITE 51: note = RuvC_P2
  SITE 86: note = RuvC_P3
  SITE 88: note = RuvC_P4
  SITE 91: note = RuvC_P5
  REGION 210..302: note = Tnp_domain
  SITE 218: note = Tnp_P1
  SITE 250: note = Tnp_P2
  SITE 258: note = Tnp_P3
  SITE 259: note = Tnp_P4
  SITE 271: note = Tnp_P5
MNKTIVGVDLAKKVIQVCIYTNRKVHSNTEMTPKAFTCWLVNSRPATIVFEACGTSNYWKQLASSHGHDARLISSRLVAVVRQNQKTDKNDALAIVQASLLPDVNFIQGKTAEQQQLQSIVRLRELSIRQKTASKNQLIALLSELNIQVSNRNGGLRATIDETLEDPDNGFSPSFRQAISTAWDQYLSLVEAIDIYDNCLEESLNYHPECKKLLKIEGIGILDAVNLYIALGCADIGAFSKGKAAAACIGLTPIQHSSGGRAKIGSIGRGFKNTLFRSQLITGAMSIVSKVANRPPKTKKEEWLKNLIERRGKKCAAVALANKNVRTAFAILTQGTEYKAEPLVS

SEQ ID NO: 16770 - protein, 372 aa, unidentified
  source 1..372: note = protein_1daf255
  REGION 2..124: note = RuvC_domain
  SITE 23: note = RuvC_P2
  SITE 63: note = RuvC_P3
  SITE 65: note = RuvC_P4
  SITE 68: note = RuvC_P5
  REGION 234..334: note = Tnp_domain
  SITE 242: note = Tnp_P1
  SITE 272: note = Tnp_P2
  SITE 280: note = Tnp_P3
  SITE 281: note = Tnp_P4
  SITE 294: note = Tnp_P5
MQLLQFFQNIEEITNTKPVIILESTGHYHSPVIQFLDNSNYIYIVLNPLISYRAKSTSLRKVKTDAIDAFHLCELYYKEELEPYKKRGVQLLNLRNLTRQHDQLTGISTQSKLHFQAILDQVFPEYRGVFGDLYSNVSLLTLLEFPSSEAVLRAGEDQLAKRIASLCTSRSKQWASERAKLLITAAEKNPFQVNLYRSLIISLEMHIKMVLQYKEHLSNLKAEIDVLVKEVEEYTIIQSIPGIGEKIAATIISEIGEINRFDNPKKLVAFTGVDPSVFESGKFTATRNRITKRGSSRLRHALFMAVRCAIRDTRKSKTTDEIIPRNKRMRQYYDKKREEGKPFRVTVIACVNKLLHWIYALLKSKSTFQDLA

SEQ ID NO: 16771 - protein, 346 aa, unidentified
  source 1..346: note = protein_28240e1
  REGION 6..147: note = RuvC_domain
  SITE 9: note = RuvC_P1
  SITE 52: note = RuvC_P2
  SITE 87: note = RuvC_P3
  SITE 89: note = RuvC_P4
  SITE 92: note = RuvC_P5
  REGION 211..295: note = Tnp_domain
  SITE 219: note = Tnp_P1
  SITE 249: note = Tnp_P2
  SITE 257: note = Tnp_P3
  SITE 258: note = Tnp_P4
  SITE 270: note = Tnp_P5
MEIDKVGIDLGKSVFHLACLSASGETVMRKKFSRLQLLRFTANLRVRVIGMEACGGAHFLGRALREQGHDVRLMPAQYVKPFVKTNKNDYIDAEAIAEAVDRPRMRYVPIKSEDQLDMQSLHRVRERWVKSRTALTNQIRGLLLERGITIRKGRRYAQAALPSLLEDAETNLSAALRLLLAQLMSELQRLENQITDVDATIARRASEHEACQRLMAIPGVGPVTSTAIVSAIGNGVEFRKARSFSAWLGLVPGEYSTGGKQKLLGISKRGNGYLRKLLVHGARAILRCREKQSPGLSSWLGQLLARAHPNVVTIALANKMARMAWVLLTRGESYRPPVLEQQIKVV

SEQ ID NO: 16772 - protein, 342 aa, unidentified
  source 1..342: note = protein_12473d9
  REGION 7..149: note = RuvC_domain
  SITE 10: note = RuvC_P1
  SITE 53: note = RuvC_P2
  SITE 88: note = RuvC_P3
  SITE 90: note = RuvC_P4
  SITE 93: note = RuvC_P5
  REGION 212..296: note = Tnp_domain
  SITE 219: note = Tnp_P1
  SITE 249: note = Tnp_P2
  SITE 257: note = Tnp_P3
  SITE 258: note = Tnp_P4
  SITE 270: note = Tnp_P5
MGEVTIIGIDLAKNVFQVHGAAADGSVVFRKKLTRPQFARFMAEQPPCLVVMEACASAHHWAREMSRHGHKVRLIAPHYVKPFIKRQKNDAADAEAIVEAALRPTMRFVEPKTQEQQARAVAFRTREQLVKQRTEAVNALRSHLYEFGHVAPVGIGYVPRLEQVIADPDADIPDLAREICRMLLDQINQLTDRIDALKARIAALSNEAEMPRQLQTMPGVGPITALAVETFAPPMEQFRRGRDFAAWLGLVPRQHSTGGKQKLGKTSKMGQRDIRRLLVIGATAVIRWASRRGAPKGSWLARMLERKPVPVVAVALANKMARGIWAMLTRGESYRGPVLIGA

SEQ ID NO: 16773 - protein, 345 aa, unidentified
  source 1..345: note = protein_9653539
  REGION 7..149: note = RuvC_domain
  SITE 10: note = RuvC_P1
  SITE 53: note = RuvC_P2
  SITE 88: note = RuvC_P3
  SITE 90: note = RuvC_P4
  SITE 93: note = RuvC_P5
  REGION 210..295: note = Tnp_domain
  SITE 218: note = Tnp_P1
  SITE 248: note = Tnp_P2
  SITE 256: note = Tnp_P3
  SITE 257: note = Tnp_P4
  SITE 269: note = Tnp_P5
MGDIIRIGLDTSKHFFQVHGVDADEHVVVCRKLNRRQMEGFFAKLGPVEVGLEACGSSHHWGRWLESLGHTVRMMPAQLVKPYVKRNKNDAADAAGLCEAMSRPTMRFVPVKTKAQQADLMLMTHRERLITERTRLSNTIRSHATEFGHCVARGLAHLEGLLATLQADTDLPEMAATLFERMSRDYHRLCQEIAELEAELVVWHKHNECSRRLERIPGVGPVCSALLVMKVTDVAAFKSGRDFAAWLGLTPKDHSTGGKLRLGGITRAGDEILRCKLVAGATAVIQHTRRRGKGSAWLINLLKRKPPKLAAVALANKTARIAWKLMKTGETYTDKPAQSQTLCAA

SEQ ID NO: 16774 - protein, 351 aa, unidentified
  source 1..351: note = protein_e92a11e
  REGION 6..146: note = RuvC_domain
  SITE 9: note = RuvC_P1
  SITE 52: note = RuvC_P2
  SITE 87: note = RuvC_P3
  SITE 89: note = RuvC_P4
  SITE 92: note = RuvC_P5
  REGION 211..296: note = Tnp_domain
  SITE 219: note = Tnp_P1
  SITE 249: note = Tnp_P2
  SITE 257: note = Tnp_P3
  SITE 258: note = Tnp_P4
  SITE 270: note = Tnp_P5
MNLHSIGIDLGKTVFHLVGLNAAGEVVVRKKFSRIQLLRFTVNVQVGLIGMEACPGSHFLGKALREQGHEVRLMPAQYVKPFVKTNKNDFIDAEAIAEAVSRPTMRFVPIKTDEQLDMQSLHRVRERWIMRRTAVVNQIRGLLLERGVTVRTGRCHLNEALPRILEDASIDLSGALRFLLLELKRELEQLASHIEQAETLIQRAAQQSEACQRLDAIPGIGPLTATALIAAIGNGGAFRKGREFAAWVGLVPREHSTGGKQKLFGISKRGNCYLRKLFVQGARAVLQFRDKQCSGLRHWLAELSSRHHYNVVGVALANKLARIAWAVLARGEAYRPPVLADAATGLQMAPG

SEQ ID NO: 16775 - protein, 321 aa, unidentified
  source 1..321: note = protein_7ea8d9c
  REGION 8..148: note = RuvC_domain
  SITE 11: note = RuvC_P1
  SITE 52: note = RuvC_P2
  SITE 92: note = RuvC_P3
  SITE 94: note = RuvC_P4
  SITE 97: note = RuvC_P5
  REGION 191..278: note = Tnp_domain
  SITE 199: note = Tnp_P1
  SITE 229: note = Tnp_P2
  SITE 237: note = Tnp_P3
  SITE 238: note = Tnp_P4
  SITE 251: note = Tnp_P5
MNKITNYFGIDISKDVFDVVDSCDVHYQFTNCQKGFDDFLDILDESSHCVMESTAFYHVQLANALVQSGIKVSVENPLAVKRYIQMHLSRIKTDKSDAKMICQYAQQADLRLWEERTKDQVGCLQLMSLINQYTKQIVMTKTKLEGEAALGNPVKLVVRSLEKNLRRLKKEVDFLELELLRIVKREHQDLLTRIESIVGIGRKTAVTLIVLTEGFEKFESAKQLCSYAGLTPIIRQSGSSLHVKARISKMGNRRLRSMLFLCSFSAKKHNKACIALFNRMVAKGKPRKVALIAVCNKLLKQAFAIAKSGVPYDREYRSVLH

SEQ ID NO: 16776 - protein, 341 aa, unidentified
  source 1..341: note = protein_cc240c6
  REGION 6..147: note = RuvC_domain
  SITE 9: note = RuvC_P1
  SITE 52: note = RuvC_P2
  SITE 87: note = RuvC_P3
  SITE 89: note = RuvC_P4
  SITE 92: note = RuvC_P5
  REGION 211..296: note = Tnp_domain
  SITE 219: note = Tnp_P1
  SITE 249: note = Tnp_P2
  SITE 257: note = Tnp_P3
  SITE 258: note = Tnp_P4
  SITE 270: note = Tnp_P5
MKITTIGIDLAKNVLQVHGVDERGKVLLKKQLKRDQMIPFFANLSPCLIGMEACSSAHFWANKLQELGHTVKLMAPQFVKPYVKTNKNDAADAEAICEAVTRPTMRFVPIKSSEQLAVLALHRARQGFVKARTAQANQIRGLLAEHGLIIPLGIVHIGKRVPEFLEDSENGLPETFRELLMRLHEHLKALDKQVHELEEAIVRWHQDSAVSQKLAQLPGIGPITASALVASIGDAKNFKNGRQLAAWLGLVPRQHSSGGKQTLLGISKRGDSYLRTLLIHGARAMLLAAERKESFAGSWLAGVMGQRNRNVATVAQASKARIVWALLAHDRQYDAKYGVAA

SEQ ID NO: 16777 - protein, 407 aa, unidentified
  source 1..407: note = protein_068972b
  REGION 4..163: note = RuvC_domain
  SITE 7: note = RuvC_P1
  SITE 60: note = RuvC_P2
  SITE 100: note = RuvC_P3
  SITE 102: note = RuvC_P4
  SITE 105: note = RuvC_P5
  REGION 273..359: note = Tnp_domain
  SITE 281: note = Tnp_P1
  SITE 312: note = Tnp_P2
  SITE 320: note = Tnp_P3
  SITE 321: note = Tnp_P4
MLFVGVDWAEAHHDVCVVDIEGRVLGRRRISDSLAGVSELHALVAESSGDVEDVPDVIVGIEKDRGLLVTALVAADYQVFAINPMAAAHYRDRHHVSGAKSDPGDAKMLADLVRTDRHNHRRVAGDSSSVEAVKVLARVHQNTIWNRQRQVNALRSALKDYYPGALAAFGTDLADRDAVSVLLVAPTPTLGRALSRAKVISALRRGGRQRNLEKRADAIRSALGEEQLAQPAVLENAYGATTRAALALLTQFNATILELEKALAEHFEQHPSAKIIRSLPGMGTVLGARVLGEFGDDPNRYADAKSRRNYAGTSPVTRASGKSKVVLARRHRNKRLADALDQWAFCSLNFSPGARAYYDQLRAREKTHRKAVRQLANRWVGILHVCVERGCLYDETIAWTKREDIAA

SEQ ID NO: 16778 - protein, 402 aa, unidentified
  source 1..402: note = protein_44df944
  REGION 8..164: note = RuvC_domain
  SITE 11: note = RuvC_P1
  SITE 60: note = RuvC_P2
  SITE 101: note = RuvC_P3
  SITE 103: note = RuvC_P4
  SITE 106: note = RuvC_P5
  REGION 270..356: note = Tnp_domain
  SITE 278: note = Tnp_P1
  SITE 308: note = Tnp_P2
  SITE 316: note = Tnp_P3
  SITE 317: note = Tnp_P4
  SITE 329: note = Tnp_P5
MTTGQLWAGVDVGREHHWVCVVNAAGTVVLSRKLVNDEQAIRELIAEVDGLGPQVSWTVDLTMTYATLLLTVLADVGKSVRYLAGRAVWQASTVYRGGEAKTDAKDARVIADQSRMRGEDLPVLHPDDDLVTELRMLTAHRADLVADRTRTINRLRQQLIAVCPALERVAELSSDRGWAVLLSRYQRPKAIRQSGISRLTKVLADAGVRNASTIAAAAVSAAKAQTVKLPGEDVAATLVAELAQGVIALDDRIKTTDADIEGRFRRHPLAEVITSMPGIGFRLGAEFLAAVGDPALIGSADQLAAWAGLAPVPRDSGTRTGNLRTPKRYNRRLRRVMYMSALTSIRCDANSRAYYQRKRDQGKRPIPATICLARRRTNVLYALIRDNRTWQPDSPPSTTTAA

SEQ ID NO: 16779 - protein, 317 aa, unidentified
  source 1..317: note = protein_f5498d8
  REGION 9..150: note = RuvC_domain
  SITE 12: note = RuvC_P1
  SITE 56: note = RuvC_P2
  SITE 96: note = RuvC_P3
  SITE 98: note = RuvC_P4
  SITE 101: note = RuvC_P5
  REGION 191..276: note = Tnp_domain
  SITE 199: note = Tnp_P1
  SITE 228: note = Tnp_P2
  SITE 236: note = Tnp_P3
  SITE 237: note = Tnp_P4
  SITE 248: note = Tnp_P5
MTKTSTETAGIDTAKDKLDIAVHGQARQWQVANTVAGWRQLAADFARVGVAKVGIEATGGYERGVVAHLRTAGLVVLVLQPIQVKAFARQHLRRAKNDTLDAMLIAACTVTLDPPEVAPDPRFNALADDLTFIEQIEEDIARFKTRREHIDDPRRRRLVDNDIVRLKARRTAELARLAARLRKHPDLARRLDLVLSVPGIGERTALAIIVRMPELGQVSREQAAALAGLAPFDDDSGKRRGERHIAGGRSRLRRSLFAAALPASFRWNKALCELYGRLKARGKAHNSALIACARKLLIYANTIVQRGTPWVEKQPAV

SEQ ID NO: 16780 - protein, 347 aa, unidentified
  source 1..347: note = protein_4388714
  REGION 4..157: note = RuvC_domain
  SITE 7: note = RuvC_P1
  SITE 55: note = RuvC_P2
  SITE 96: note = RuvC_P3
  SITE 98: note = RuvC_P4
  SITE 101: note = RuvC_P5
  REGION 219..304: note = Tnp_domain
  SITE 227: note = Tnp_P1
  SITE 257: note = Tnp_P2
  SITE 265: note = Tnp_P3
  SITE 266: note = Tnp_P4
  SITE 277: note = Tnp_P5
MVTIGIDPHKASHTAVALDPNGEMLGELGVVADASMLRRLRKWASSWPQRVWAIEGAAGLGRLLAHQLVAAGERVVDVPSALAARARVLASGHGRKSDGIDARSVAVVAQHRGDLLAVAADDHTAVLRLLSDRRDELTGERRRTINRLHRVLRDMHPGGAPRQLSADRAARLLTSIRPASAVDLERKAIARQLIADVRRIDRALLENRRRCEQAIAASGSTLTEIFGISDVLAAKILGHTGDITRFASADHYASYTGTAPVEASSGEQTRHRLSRAGNRSLNHALHMAARVQTMHPGPGRTYYQRKRAEHKTSTEALRSLKRQLAKIVYRQLRHDHLGRPFIDSGLT

SEQ ID NO: 16781 - protein, 314 aa, unidentified
  source 1..314: note = protein_2f22274
  REGION 10..152: note = RuvC_domain
  SITE 13: note = RuvC_P1
  SITE 55: note = RuvC_P2
  SITE 95: note = RuvC_P3
  SITE 97: note = RuvC_P4
  SITE 100: note = RuvC_P5
  REGION 190..274: note = Tnp_domain
  SITE 198: note = Tnp_P1
  SITE 227: note = Tnp_P2
  SITE 235: note = Tnp_P3
  SITE 236: note = Tnp_P4
  SITE 248: note = Tnp_P5
MAMPASRPEIGIDVAKDNLVIHLQGLNQTLTIDNTPQAIRQWLATLPKGCDIAIEATSTYHMDVTERAHTKGHRVYVVDGYRLSNYRKGVGGRAKTDLADAQLLARYLHNEKDELRQWSPPPKAYRLLQSLLRRRAALVKARTALCQSLSGEPALKAPLHALITEMDRIDSLIQKRLKNAVKEAGLQDQVQRCEAINGIGEITAIALVMAFLRGDFKNSDAFVAFLGLDVRVRDSGKLTGKRKLTKQGDTEVRRLLHCAAMSASRHPVWRAFYQRYRDRGLKTTQALVILARKMARTAFALMKQQQAYCPAKLF

SEQ ID NO: 16782 - protein, 338 aa, unidentified
  source 1..338: note = protein_1372b12
  REGION 7..149: note = RuvC_domain
  SITE 10: note = RuvC_P1
  SITE 53: note = RuvC_P2
  SITE 88: note = RuvC_P3
  SITE 90: note = RuvC_P4
  SITE 93: note = RuvC_P5
  REGION 211..296: note = Tnp_domain
  SITE 219: note = Tnp_P1
  SITE 249: note = Tnp_P2
  SITE 257: note = Tnp_P3
  SITE 258: note = Tnp_P4
  SITE 270: note = Tnp_P5
MSLIKVLGIDLGKSTFHLVGHDHSGREQLRRKFNRKQLLQFLVKHEPVTIAMESCGGSHWLARKLVSFGHQVKLIPPQYVKPYVKTNKNDFIDADAIAEAATRPSMRFVSIKTEEAQVIAVIQRIRASYIKERTACMSRIGAILLEFGMSFPRGHSQMKQLFQWLAEHKASISPMLMLELVEHHEYYTHLNTLIQKQDKKLTELVSKDERAQLLKTIPGVGDLTASRCLSDISNAQDFKNGRHMASWLGLVPHQHSTGGKSTLLGISKRGNKSLRTLFIHGARALMSRPELASKCFGEWLVNLRARKPYNVAVVALANKLARISWSVMVTKQPFKITV

SEQ ID NO: 16783 - protein, 394 aa, unidentified
  source 1..394: note = protein_5e7a6c6
  REGION 11..164: note = RuvC_domain
  SITE 14: note = RuvC_P1
  SITE 62: note = RuvC_P2
  SITE 103: note = RuvC_P3
  SITE 105: note = RuvC_P4
  SITE 108: note = RuvC_P5
  REGION 226..311: note = Tnp_domain
  SITE 234: note = Tnp_P1
  SITE 264: note = Tnp_P2
  SITE 272: note = Tnp_P3
  SITE 273: note = Tnp_P4
  SITE 284: note = Tnp_P5
MSTSVPARVVIGMDPHKRSATIEVMTADEAVLGGGRFATDSEGYAQMLRYAGQWPDRVWAVEGCAGIGKHIAVRLLADGEQVVDVPPKLSARTRVFSTGQGRKTDETDAHSVAVVGTRMSGLRPVVNDEQLAVLRLLVDRRRSLGEEHTRKVSQLHQLLLELIPGGAKRDLSAAQAKALLAGVRPRDIAGKTRRRVAAELIADLEKIYARKKAANKELTELVTETGTTLLDLHGIGPTGAARLLVEVGDITRFPNKAHFASWNGTAPIDASSGDNVRHRLSRRGNRQINRVLHTMARVQLRNPTPGREYYDRKKADGKAPMEAMRCVKRRLSDIVFQTMLNDAVAARPRTGPGGQRGNVSESSATGSHPRTSSSDKSLPGPVTANPRTPIPAAS

SEQ ID NO: 16784 - protein, 387 aa, unidentified
  source 1..387: note = protein_d89d225
  REGION 4..159: note = RuvC_domain
  SITE 7: note = RuvC_P1
  SITE 57: note = RuvC_P2
  SITE 98: note = RuvC_P3
  SITE 100: note = RuvC_P4
  SITE 103: note = RuvC_P5
  REGION 262..347: note = Tnp_domain
  SITE 269: note = Tnp_P1
  SITE 299: note = Tnp_P2
  SITE 307: note = Tnp_P3
  SITE 308: note = Tnp_P4
  SITE 320: note = Tnp_P5
MYFIGIDISKFKHDCSVIDDFGEIVTPSWSFTNDSEGFAQLKILLDSLDAETRIGLESTGHYGMNLKLYLESNNFSFMEFNPLLINRFVKSKSLRKTKNDSIDCMMIARYLMTVEYKPYPPLLYHIEKLKSLTRFRDSLIRLRSRQLVELTNILDKVFPEFKPFFGGKFSVTALYILSNYSSPEKIANMNSKSYEALRKLSRGRFSTVDFAKLKQLAKNTVGNTEDYLLQEMQIVLELYSQLDSKVDETEVSIKECVSDMNPPILSVPGIGIESAAVILAEFGDFSKFKNASQMLSFAGLEPGYFQSGTSETTGKMVKHGSSYLRYTLMNCAQTVVNYEPTFAMFYAKKRAEGKPHRVALSHVVKKLLRVIYTLQTKNTAYDADFVR

SEQ ID NO: 16785 - protein, 328 aa, unidentified
  source 1..328: note = protein_0e033c8
  REGION 6..160: note = RuvC_domain
  SITE 9: note = RuvC_P1
  SITE 62: note = RuvC_P2
  SITE 102: note = RuvC_P3
  SITE 104: note = RuvC_P4
  SITE 107: note = RuvC_P5
  REGION 202..288: note = Tnp_domain
  SITE 210: note = Tnp_P1
  SITE 239: note = Tnp_P2
  SITE 247: note = Tnp_P3
  SITE 248: note = Tnp_P4
  SITE 261: note = Tnp_P5
MPMYQLGIDVSKNTLDLCLLREGIKGRIKTRKLKNTADAAKVVTEWLKKQSCELGEVHIIMEATGVYHEPLAYGLHFAGARISLANPHRTREFARGMNILTKNDKVDAWMLACYGSLKEPEAWTPPPESVRYLRALLRRRDALVADSTREKNRLEKSVFTDSPDAVRASIEHMLQELNNEIEHLDVLIQEHIEPHPELNQDFRLLTSIKSVGYLLGLNMLAILKSHSFESAEQAAAFLGVVPVERRSGTSVKGKPKLSKIGPPEIRTKLYLAALCGLRFNPVMKQMYTKLCQRGKSKMCAIGALMRKLVHWCYGVLKTQLPFDAEYNQ

SEQ ID NO: 16786 - protein, 308 aa, unidentified
  source 1..308: note = protein_5f59367
  REGION 6..146: note = RuvC_domain
  SITE 51: note = RuvC_P2
  SITE 91: note = RuvC_P3
  SITE 93: note = RuvC_P4
  SITE 96: note = RuvC_P5
  REGION 187..271: note = Tnp_domain
  SITE 195: note = Tnp_P1
  SITE 224: note = Tnp_P2
  SITE 232: note = Tnp_P3
  SITE 233: note = Tnp_P4
  SITE 244: note = Tnp_P5
MPQPVVGCDLSRGFIDLCRLPSAKVERIANTPEAISAFLDTLDRDVLVVFEATSGCDGDLIAALAKRSHPFSRVKPRQAREFARATGVLAKTDRVDARVLAQMGSSLSLPTTVPLSRARAELSDFLRRRRQLVDMRKAEKLHRHSAGQDEIATAIDAMIELLARQIGDLDRRIADLIHADQTLAEQARLLAAVPGIGPTVLATLLGELPELGTLCRRRIASLAGLAPHARESGTWRGARRIWGGRRKVREVLYIAALSASRRVPVLVALKDRLRLKGKPPKTILIAVARQLLVILNAMLRSKTPIALA

SEQ ID NO: 16787 - protein, 285 aa, unidentified
  source 1..285: note = protein_d569451
  REGION 1..114: note = RuvC_domain
  SITE 16: note = RuvC_P2
  SITE 56: note = RuvC_P3
  SITE 58: note = RuvC_P4
  SITE 61: note = RuvC_P5
  REGION 156..239: note = Tnp_domain
  SITE 163: note = Tnp_P1
  SITE 192: note = Tnp_P2
  SITE 200: note = Tnp_P3
  SITE 201: note = Tnp_P4
  SITE 212: note = Tnp_P5
MSRRRRRDGAELIVLEATGGDELSCVAALAAVSVPIVVVNPRQVRDFAKATGQLAKTDRIDADILALFADRVRPEVRALPDAEAQELEALLARRRQLLEMLQAERNRLWQVFGRGKAPVKKSLKAHIAFLERELRMADSDLGDQVRQSPAWRERDDLRRSVPGVGPVLSLTLLANLPELGRLSRRAIAKLVGVAPLSRDSGTLRGRRFVQGGRASVRGVQYMGALVATKRNVVIRAFYTRLLAAGKPKKLALVACMRKLLTILNTMIRTGQRWCAEHADRTLIQA

SEQ ID NO: 16788 - protein, 398 aa, unidentified
  source 1..398: note = protein_f3dd686
  REGION 4..163: note = RuvC_domain
  SITE 7: note = RuvC_P1
  SITE 61: note = RuvC_P2
  SITE 102: note = RuvC_P3
  SITE 104: note = RuvC_P4
  SITE 107: note = RuvC_P5
  REGION 269..356: note = Tnp_domain
  SITE 277: note = Tnp_P1
  SITE 307: note = Tnp_P2
  SITE 315: note = Tnp_P3
  SITE 316: note = Tnp_P4
  SITE 329: note = Tnp_P5
MLYVGIDVAKSKHDISVIDSTGRIFVKHLQITNNREGFTKLQSTLTNLQKTTGEEVQVALEDTGHYCFNLLRFLRMNGYPTFSYNPLLIKEFAKHHSLRKTKTDKKDAMTIARKLREDIDKQLFEAKTDMIELKYATRNASKIKENCTKQKINYTRLLDILFPELATFLGSPTAKHDSFIYAVLKEFPSPKKLANAHLRKLTNLLSRHSRGRFGKEQAIALKELASESIGSESSALEFELLQTIDTIEYFTSQRKLADKEVAKIIEEIDSPILSIPGIGITLGSIILAEIRDIDNFKSPNQLLAYAGCEPSVSTSGTNQVETGHMVKRGSSQLRWALHEAARLMSIWSPSMRLYLDKKRSEGKHYNVAISHVVKKLVRIIFQLLKNNKSYDEDKMVVN

SEQ ID NO: 16789 - protein, 348 aa, unidentified
  source 1..348: note = protein_e263b10
  REGION 9..151: note = RuvC_domain
  SITE 12: note = RuvC_P1
  SITE 55: note = RuvC_P2
  SITE 90: note = RuvC_P3
  SITE 92: note = RuvC_P4
  SITE 95: note = RuvC_P5
  REGION 214..300: note = Tnp_domain
  SITE 222: note = Tnp_P1
  SITE 252: note = Tnp_P2
  SITE 260: note = Tnp_P3
  SITE 261: note = Tnp_P4
  SITE 273: note = Tnp_P5
MNATTKAVVGVDTAKSVFQLYSVDMETGEVISKQLKRGQFLLWFSNRAPCLVGMEACGGSQHWARQLQALGHEVKLMGGKMVKAFVSGNKNDAADARAIWLAAQQAGVKEVAVKTEAQQAVLAMHRMRQQLVKMRTAQRNELRGLLAEYGEVFGLGRAAFSVGMKGALARLAERLPAVLIDTLREQCNELVRLDERIGAIEARLQVWFREDRAAQAIAAIPGVGLLMATAAVATMGQPNAFRSGREFAAWIGLVPAQTGTGGKVKLLGISKRGDTYLRTLLIHGARAVQHHTQAPTRWLQDIGQRRPPNVVTVALANKIARTIWAVLAHRHAYDRDHVSQRPQAAMPT

SEQ ID NO: 16790 - protein, 316 aa, unidentified
  source 1..316: note = protein_e8e3af6
  REGION 10..178: note = RuvC_domain
  SITE 13: note = RuvC_P1
  SITE 55: note = RuvC_P2
  SITE 95: note = RuvC_P3
  SITE 97: note = RuvC_P4
  SITE 100: note = RuvC_P5
  REGION 190..274: note = Tnp_domain
  SITE 198: note = Tnp_P1
  SITE 227: note = Tnp_P2
  SITE 235: note = Tnp_P3
  SITE 236: note = Tnp_P4
  SITE 248: note = Tnp_P5
MAMQVEATLIGADVAKVELVIRTSDSANLLKLPNERKAIDAYLKSLHGPVCLVVEATNIFHVTLVERAHALGHTVYVIDGLRLKRYRESIGVRAKTDANDAALLLRYLRHEREELRAWSPPPQGYTAIQKLLRRRAVLVQARTQLRQSLQGLSELQSSMHALLKKMTALVHLINKRLRNHLLRCGWMTDARRCQGIEGVGPITGAALTLIFHRGAFTSADAFIAFIGMDVRVCESGQYSGRRRLTKKGDSEVRRLLYMAAMTASRSATWKPFYERALARGLSRIQALVALGRKLARIAFALMSNQSDYQPRQPAMA

SEQ ID NO: 16791 - protein, 361 aa, unidentified
  source 1..361: note = protein_e2e383c
  REGION 18..165: note = RuvC_domain
  SITE 21: note = RuvC_P1
  SITE 67: note = RuvC_P2
  SITE 105: note = RuvC_P3
  SITE 107: note = RuvC_P4
  SITE 110: note = RuvC_P5
  REGION 236..322: note = Tnp_domain
  SITE 244: note = Tnp_P1
  SITE 274: note = Tnp_P2
  SITE 282: note = Tnp_P3
  SITE 283: note = Tnp_P4
  SITE 295: note = Tnp_P5
MKCVQSNKLDFSGQNIYVGIDVHLRSWSVAILSDHSVLKRFSQNPEPEALHKYLVSNYPGANYFSVYEAGFCGFWIHERLTDLGITNIVVNPSDVPTMSKEKLRKTDAVDCNKLARELRSGSLVGIYVPGVETLELRSLIRMRNLIVKDSTRAKNRIKSLLRFHGVDIPEEFTRCSIGCWSKRFLSWLQALELSTEYGKKTLGLHLEQFIRLRMMLLQETRAIREISRKAPFEKPIRLLTSVPGIGVTTAATLMVELDDIARFKNSDRLASFIGLIPMCHSNGESNGTGDITVRRHFMLRCLLVEAAWIAIRKDPAMTLAYTEYRKRMSPQKSIIKIARRLVNRIYYVLKHEKEYVPCVVQ

SEQ ID NO: 16792 - protein, 336 aa, unidentified
  source 1..336: note = protein_c8f97cd
  REGION 6..148: note = RuvC_domain
  SITE 9: note = RuvC_P1
  SITE 52: note = RuvC_P2
  SITE 87: note = RuvC_P3
  SITE 89: note = RuvC_P4
  SITE 92: note = RuvC_P5
  REGION 209..295: note = Tnp_domain
  SITE 217: note = Tnp_P1
  SITE 247: note = Tnp_P2
  SITE 255: note = Tnp_P3
  SITE 256: note = Tnp_P4
  SITE 268: note = Tnp_P5
MTIIRVGLDTSKHVFQIHGVDENEKPVLQRQLRRSEVEKFFAKLPPTRIGIEACGASHHWARLLRGLGHTVMLMPPQYIKPYVKRGKNDKIDAEAICEAMSRPTMRFVPVKSAEQQAALTMLGVRDVLVKQRTMLINAIRGHAAEFGVTVAKGPKQVSELLQRLANDEGVPTLAREMVSMLASQLDGLDIKLKAIEARLMAWHRQDQTSQCLATIPGIGPIAGVSFALKVADPRAFRSGRHFASWIGITPRENSTAGRQKLGRISRAGDEDLRRLLVIGATAVIRAAKPGRTSPWLLALLARKSKKLAAVALANKMARIIRAMMVSGETYRRPAQA

SEQ ID NO: 16793 - protein, 398 aa, unidentified
  source 1..398: note = protein_e2b4eab
  REGION 10..164: note = RuvC_domain
  SITE 13: note = RuvC_P1
  SITE 61: note = RuvC_P2
  SITE 101: note = RuvC_P3
  SITE 103: note = RuvC_P4
  SITE 106: note = RuvC_P5
  REGION 271..356: note = Tnp_domain
  SITE 279: note = Tnp_P1
  SITE 309: note = Tnp_P2
  SITE 317: note = Tnp_P3
  SITE 318: note = Tnp_P4
  SITE 330: note = Tnp_P5
MSDLGYAIFCGLDVGKGTHHAVALDPDGKRLHDGALPQDEQRLRQLFTGLQVHGDVLVVVDQPATIGALPIAVARDVGCQVAYLPGLAMRRIADLHPGSAKTDARDAYVIAEAARTMPRTLRQVDPGEEVLAELGVLIGFDDDQAAEATRLSNRIRGLLTQIHPAAERVLGPRVSTTVVLELLSRFGGPAGLRAAGKRRLITVARKAAPRAGEQLVTDLLAALDEQTVVVPGSAAAEKVLPRLAESLAQVLTQRRQIAEEVEGILDAHPLAKVLTSMPGVGVRTAARILLEVGDGSAFPTSGHLAAYAGLAPVTRRSGSSIRGEHPPQGGNKQLKRALFLSAFAALADPTSRAYYDRKRAAGKRHNAALICLARRRVDVLFAMLREGTLYETRSARPA

SEQ ID NO: 16794 - protein, 338 aa, unidentified
  source 1..338: note = protein_47227ce
  REGION 7..149: note = RuvC_domain
  SITE 10: note = RuvC_P1
  SITE 53: note = RuvC_P2
  SITE 88: note = RuvC_P3
  SITE 90: note = RuvC_P4
  SITE 93: note = RuvC_P5
  REGION 212..298: note = Tnp_domain
  SITE 220: note = Tnp_P1
  SITE 250: note = Tnp_P2
  SITE 258: note = Tnp_P3
  SITE 259: note = Tnp_P4
  SITE 271: note = Tnp_P5
MNNINVVGIDLAKSIFQVCCADNKGKIILNRSLRRAQILKFFSNLKPVLVGMESCSSSHYWARELTKLGHEVKLMPPQYVKPYVKTNKNDAADAEAICEEVTRPNMRFVSVKSPEQQALLLIHREREGVIRDRTSLINRIRASMQEFGISVPAGRYQLAKWFRTDFADAELRMPSLLFDHIRSMEVRLRELEEYIKRLDTLIDTTSKDSYLCKSLIEIPGVGRLTASAIVASVGDAKSFKSGRQFSAWLGLVPKQHSSGGKNTLMGISKRGDTYMRRMLIHGAIAVIRHIKPGKPFYEWVNELLSRMHKNKVVVALANKLARISWAILVHDRAFASNN

SEQ ID NO: 16795 - protein, 327 aa, unidentified
  source 1..327: note = protein_70527cc
  REGION 4..156: note = RuvC_domain
  SITE 7: note = RuvC_P1
  SITE 61: note = RuvC_P2
  SITE 101: note = RuvC_P3
  SITE 103: note = RuvC_P4
  SITE 106: note = RuvC_P5
  REGION 200..286: note = Tnp_domain
  SITE 208: note = Tnp_P1
  SITE 237: note = Tnp_P2
  SITE 245: note = Tnp_P3
  SITE 246: note = Tnp_P4
  SITE 259: note = Tnp_P5
MAHIGIDVSKRKLDCMWVRDLETAKVKPKVFTNDPARYPDLLHWLERNTGEPADALHVYLEATGIYHEPLAYWLHEHGVQVYVLNPAQVRYHAQGMGVRNKTDRKDSMMLARYGIERAPAPWQPEPPEVRELKRRLNRLEALERDIRREENRREKAQFNGDALAQESISNVLGALHEEHRRLQRQIDDHFDANAHLKQDRALLESIPGVGRVLSASMTATLRSRAFRTARQAAAFHGLVPVHRESGSSVHAQPRLSKAGSARFRQTLYMAAVVATRRNPDVRHQYQRLLNRGKAKMAAIGAAMRKLLHIAFGVLKSQTPYQPLHQSA

SEQ ID NO: 16796 - protein, 327 aa, unidentified
  source 1..327: note = protein_8aad39f
  REGION 4..160: note = RuvC_domain
  SITE 7: note = RuvC_P1
  SITE 59: note = RuvC_P2
  SITE 99: note = RuvC_P3
  SITE 101: note = RuvC_P4
  SITE 104: note = RuvC_P5
  REGION 199..285: note = Tnp_domain
  SITE 207: note = Tnp_P1
  SITE 236: note = Tnp_P2
  SITE 244: note = Tnp_P3
  SITE 245: note = Tnp_P4
  SITE 258: note = Tnp_P5
MKYLGIDVSKAKLDCTLLDPVTDKRKAKVVSNDSAGLDALSVWLAKQGIALGEVHGVMEATGVYHEQAALGLTDAGMRVSVVNPAQIRDFAKGLAVRTKTDGTDSVALARYGALTQPAPWVAPPLEIRELKALIARLEALEADARRELNRREKALVARAPALVQESLANHLASLNREIARLKQAIDDHINRHPGLRADRERLLSIPAVGDKTANRMLAVLHSRKFTRAEQVAAFLGLVPVEHQSGSSIQKRPRLAKNGDAKTRAVLYMAAIVATQHNPHVRALYTRLCAKGKAKMAALGAAMRKLVHLCFGVLKQQTTYQSNWAGSC

SEQ ID NO: 16797 - protein, 254 aa, unidentified
  source 1..254: note = protein_d416370
  REGION 6..127: note = RuvC_domain
  SITE 9: note = RuvC_P1
  SITE 52: note = RuvC_P2
  SITE 87: note = RuvC_P3
  SITE 89: note = RuvC_P4
  SITE 92: note = RuvC_P5
  REGION 121..209: note = Tnp_domain
  SITE 129: note = Tnp_P1
  SITE 160: note = Tnp_P2
  SITE 168: note = Tnp_P3
  SITE 169: note = Tnp_P4
  SITE 181: note = Tnp_P5
MNITTFGLDIAKNVMQVHWVDEQTGEVGRRALKRAQLAPFFARQPQCRIVLEACGSGHYWGRTLSALGHEVRLIHARHVRPFVRGNKNDAADAQAIWSAAQQPDMRWVPLKSEQQQAVLSLHRVRQIPGVGLLGATVLAAVLGEDAQGYRNAREFAACLGLVPCHRGTGGKVAIGHLSKRGDPYLRTLLMHGARAVIFHAKTKSAWLQQLPARRPLNVVVAALANKMARTAWALVAHGREYQAGGFAKASSPNT

SEQ ID NO: 16798 - protein, 399 aa, unidentified
  source 1..399: note = protein_dfb80e7
  REGION 12..166: note = RuvC_domain
  SITE 15: note = RuvC_P1
  SITE 63: note = RuvC_P2
  SITE 103: note = RuvC_P3
  SITE 105: note = RuvC_P4
  SITE 108: note = RuvC_P5
  REGION 273..357: note = Tnp_domain
  SITE 281: note = Tnp_P1
  SITE 310: note = Tnp_P2
  SITE 318: note = Tnp_P3
  SITE 319: note = Tnp_P4
  SITE 331: note = Tnp_P5
MIRNHDDVEVFIGLDVGKGEHHAVALDRSGKRLLDRALPNDETRIREILAELEHHGRILVVVDQPATIGALPVAVAQAAGTLVGYLPGLAMRRIADLHPGEAKTDARDAFIIADAARTMPHTLRSVQLADEQIAELTMLCGFDDDLAKQATATSNRIRGLLTQIHPALERVLGPRLEHPAVLDLLRTWPTPAALRHAGRRRIGNRLTKLAPRMGERLADDIIEALAQQNVTVIGTNAATIVLPELTGMLARIHDGRATVYAQVEALVEAHPLHQVLMSLPAVGIRTAARILTEVAGKDFPTAGHLASYAGLTPVTWRSGSSIRADRASRKGNKVLKRTLYLSAFAALKDPLSCAYYDRKRAEGKHHNQALIALARRRCDTLYAMLRDGTLYQAKSPKAA

SEQ ID NO: 16799 - protein, 342 aa, unidentified
  source 1..342: note = protein_cbc360e
  REGION 7..148: note = RuvC_domain
  SITE 10: note = RuvC_P1
  SITE 53: note = RuvC_P2
  SITE 88: note = RuvC_P3
  SITE 90: note = RuvC_P4
  SITE 93: note = RuvC_P5
  REGION 211..296: note = Tnp_domain
  SITE 219: note = Tnp_P1
  SITE 249: note = Tnp_P2
  SITE 257: note = Tnp_P3
  SITE 258: note = Tnp_P4
  SITE 270: note = Tnp_P5
MNEVSIIGLDLAKNVFQAHGAGADGSAIFRRKLSRVQLLKFLTQQPSCVVAMEACASAHHWGRVIGDLGHEVRLIPPAYVKPFVKRQKNDMADAEAIAEAVSRPTMRFVAVKSEEQQGAAMVYRTRDLLVRQRTQTINALRAHLAEQGIVAPTGPAHVGRLAAVIDSDDGALPAAVRDLARLLLDQIAGLSEKVADLDAELRRRASVDDTARRLATIPGVGPITAAAITTFAPPMETFSKGRDFAAWVGLTPRQHSSGGKERLGRTSKMGQRDIRRLLIIGAVAVVRWAARKGAPEGSWLARMLERKPKMLVAVALANRMARTAWALMRKGEDYRDPAMVTA

SEQ ID NO: 16800 - protein, 399 aa, unidentified
  source 1..399: note = protein_8c364f4
  REGION 6..159: note = RuvC_domain
  SITE 9: note = RuvC_P1
  SITE 57: note = RuvC_P2
  SITE 98: note = RuvC_P3
  SITE 100: note = RuvC_P4
  SITE 103: note = RuvC_P5
  REGION 221..306: note = Tnp_domain
  SITE 229: note = Tnp_P1
  SITE 259: note = Tnp_P2
  SITE 267: note = Tnp_P3
  SITE 268: note = Tnp_P4
  SITE 279: note = Tnp_P5
MEHVIIGVDPHKLSATIEVVDDHEQRLGSGRFPTDQAGYAAMRTYAKAWPQRVWAVEGANGAGRPLAQRLLEAGEQVLDVPAKLAARVRLFDTGHNRKTDARDAHSIAIVAVRTQGLRVLKVDGELESLRMLTDRREALTRRRVQTVNRLQALLAELLPGQAKRDITTGQAKTMLARVRPRDIAGKTRRRIAAEELSELVAVDAKIKKATAELETMVLARGSHLMDLRGVGPVVAARVLADVGDVARFPDRNRFASWTGTAPLDASSGEQNRHRLSRAGNRRVNHMIHIVAVTQLRHDCQGRAYYRRKRAEGKKPLEAMRCLKRRISDVIYRQLLADAQAMAGTGPGGHCGATQESSAADLHPHIDTSDQPLPGPAKPTLRPMPRPRKTNHPKSLTRTG

SEQ ID NO: 16801 - protein, 312 aa, unidentified
  source 1..312: note = protein_e60a315
  REGION 6..150: note = RuvC_domain
  SITE 9: note = RuvC_P1
  SITE 53: note = RuvC_P2
  SITE 93: note = RuvC_P3
  SITE 95: note = RuvC_P4
  SITE 98: note = RuvC_P5
  REGION 189..273: note = Tnp_domain
  SITE 197: note = Tnp_P1
  SITE 226: note = Tnp_P2
  SITE 234: note = Tnp_P3
  SITE 235: note = Tnp_P4
  SITE 246: note = Tnp_P5
MIKLTIGVDVSKDTLDVHLHPAGDHRQFSNDPRGFRSIVRWIAARPVARLVFEATGPYHRAFERAMGEAGLPLCKVNPRQAKRFGEALGQLAKTDRMDAGMLARFGALLEPDVRPAPSKIISDLKDLHVARTALIKDRTAAKNREKNLTSPLLRRQIRQRLSSIESHLKEVETAIRVLIDRDESLRRKIAILVSIPGIAERSASALLIDMPELGTLAAQEAAALSGTAPLTRQSGKWAGKAFVSGGRVNVRKALYMPALVAARFNPDLKEKYICLTSRGKPPKVALTAVMRKLIILANALIRDDRDWSPERA

SEQ ID NO: 16802 - protein, 387 aa, unidentified
  source 1..387: note = protein_1e8664c
  REGION 4..159: note = RuvC_domain
  SITE 7: note = RuvC_P1
  SITE 58: note = RuvC_P2
  SITE 98: note = RuvC_P3
  SITE 100: note = RuvC_P4
  SITE 103: note = RuvC_P5
  REGION 263..350: note = Tnp_domain
  SITE 271: note = Tnp_P1
  SITE 301: note = Tnp_P2
  SITE 309: note = Tnp_P3
  SITE 310: note = Tnp_P4
  SITE 323: note = Tnp_P5
MNYVGIDIAKQTHYASIMNSEGEILVAPFPFSNDHAGFQKLLKHLSAFSHEDVLIGMESTAHYAENLTSFLFTRGFNICIINPIQTSSLRKSNIRKTKTDSVDTYLIIKALFLNHYRLFTERDYDSLQLKNLCRFRQKLMKARTKVKIQLVTYVDLLFPELQYFFKSGIHGKACYELLKIQPNPDRIAKMHLTRLTNLLSKSSKGHFKQSHAVQLKELASHSVGIKNNTLSLQILQSIQQIEMYNKQLAEVEASIHEIMDKMDSVIKTIPGIGYLNGAMIIGEIGDISRFEKPCQLLAYAGLDPSVYQSGNFNAARTRMSKRGSKLLRYALINAAWQTTLVNKTFKDYYNLKVSQGRRHYNALGHVAHKLVRVIHKMMTDNVEFNLV

SEQ ID NO: 16803 - protein, 325 aa, unidentified
  source 1..325: note = protein_a6ce69d
  REGION 1..88: note = RuvC_domain
  SITE 25: note = RuvC_P3
  SITE 27: note = RuvC_P4
  SITE 30: note = RuvC_P5
  REGION 196..280: note = Tnp_domain
  SITE 203: note = Tnp_P1
  SITE 232: note = Tnp_P2
  SITE 240: note = Tnp_P3
  SITE 241: note = Tnp_P4
  SITE 253: note = Tnp_P5
MGIAVAYLAGLTMRRVADLHPGQVKTDARDAYIIADTARTIPHTLRGITIADEHIAELSMLCGFDDDLTAQLTGVRNRLRGLLTQIHPALERVVGPRLAHPAVVDMLSRYPTPAALHEAGRSRVRTRLKKLAPRMAARLADEIFAALAEQTTIVAGTNTAGHIISRLAAQLAQLTEQRADIEAEILTVVDAHPRTCVLTSMPGIGVRTAARILTEVVGKNFKSVAHLASYAGIAPVTRRSGTSIRGEAPSRRGKTTLKRALFLSAFASIKADPFSRAYYDRKRAEGKRHNQAIIALARRRTDVLYAMLRDGTLYEPRPTQQAPAA

SEQ ID NO: 16804 - protein, 344 aa, unidentified
  source 1..344: note = protein_d461da6
  REGION 5..152: note = RuvC_domain
  SITE 8: note = RuvC_P1
  SITE 55: note = RuvC_P2
  SITE 92: note = RuvC_P3
  SITE 94: note = RuvC_P4
  SITE 97: note = RuvC_P5
  REGION 212..299: note = Tnp_domain
  SITE 220: note = Tnp_P1
  SITE 250: note = Tnp_P2
  SITE 258: note = Tnp_P3
  SITE 259: note = Tnp_P4
  SITE 271: note = Tnp_P5
MQYYAGLDVSVKETSVCIVDKAGKVVGEVKVATQPAAILAALTQDALAVERIGLEAGPLSQWLYRALAEAGLPVICVETRHMKAALSAQINKSDRNDARGIAQMMRVGLYRPVHVKTLASQKQRMLLTSRRLLQCKALDIENDLRGTLRNFGLKLGMVGAVKLEDRVRELLADHADLAVIVEPLLIARRVLREQLGVLHRQLLEIVRHDEVCRRLMTTPGVGPVVALTFRATVDVPTRFTHSKAVGAAFGLTPRRQQSGEIDRMGRISKCGDGLMRETLFEAALVLMTHSRKWSWLKAWGMKIARHRGMKRAIVAVARRLAVIMHRMWVDGSEFRWSGKEAAAA

SEQ ID NO: 16805 - protein, 345 aa, unidentified
  source 1..345: note = protein_300f6c1
  REGION 6..147: note = RuvC_domain
  SITE 9: note = RuvC_P1
  SITE 52: note = RuvC_P2
  SITE 87: note = RuvC_P3
  SITE 89: note = RuvC_P4
  SITE 92: note = RuvC_P5
  REGION 211..298: note = Tnp_domain
  SITE 219: note = Tnp_P1
  SITE 249: note = Tnp_P2
  SITE 257: note = Tnp_P3
  SITE 258: note = Tnp_P4
  SITE 270: note = Tnp_P5
MELHTIGIDLGKTVFHLVGLNLRGEVAVRKKFSRVQLLHFTANLKVDLIGMEACGGAHFLGRALRDQGHEVRLMPAQYVKPYVKTNKSDYIDAEAIAEAVARPTMRFVPIKTDDQLDLQSLHRVRERWVMRRTAVVNQIRGLLLERGITLRKGRSHVGRALPGILEDADSTLSGALRVLLAQLKLELEQLTLRIEEADAAIGKTAQENDACRRLVAIPGIGPVTATALIAAIGNGAAFHKGREFAAWMGLVPREHSTGGKQKLLGISKRGNSYLRRLFVQGARAVMRFQAKQSSGLSAWLARLTARTHHNIVTVALANKLARMAWAVLAKGEPYRPPVVASAVAA

SEQ ID NO: 16806 - protein, 341 aa, unidentified
  source 1..341: note = protein_e5ba69b
  REGION 6..148: note = RuvC_domain
  SITE 9: note = RuvC_P1
  SITE 52: note = RuvC_P2
  SITE 87: note = RuvC_P3
  SITE 89: note = RuvC_P4
  SITE 92: note = RuvC_P5
  REGION 231..295: note = Tnp_domain
  SITE 247: note = Tnp_P2
  SITE 255: note = Tnp_P3
  SITE 256: note = Tnp_P4
  SITE 268: note = Tnp_P5
MQVITIGLDIAKNVFQVHGVDNAGNAVLRRKVRRDQLIPLLRDMQPCLIGMEACATAHHWARELIALGHVVKLMPPAYVKAYVKRNKNDAADAEAICEAVTRPTMRFVAVKSADAQSILMLHRARHLLVRQRTAQISAMRAHLAEYGVVAPKGRAHVRGLIEARQGRWAAPRDGATGSYPPRPNDRRAWRTNPEDRDRASGVVSHEPGLPAAFNYSRNRLHHGDRPRCHRRRGKVFRSGRQFAAWLGLVPKQHSSGGKDRMGGISKMGDRYLRHLLVVGATAVIRYTRRKATTVSTWANQLLERKPARLVTVAVANKVARIAWAVMAREENYRATPSMARG

SEQ ID NO: 16807 - protein, 342 aa, unidentified
  source 1..342: note = protein_88afb05
  REGION 7..149: note = RuvC_domain
  SITE 10: note = RuvC_P1
  SITE 53: note = RuvC_P2
  SITE 88: note = RuvC_P3
  SITE 90: note = RuvC_P4
  SITE 93: note = RuvC_P5
  REGION 211..295: note = Tnp_domain
  SITE 219: note = Tnp_P1
  SITE 249: note = Tnp_P2
  SITE 257: note = Tnp_P3
  SITE 258: note = Tnp_P4
  SITE 270: note = Tnp_P5
MEEVSIIGLDLAKNVFQAHGALMDGSTAFRKKISRAKMLSFFDSIPRCVVAMEACASSHHWARQIGALGHEVRLIAPIYVKPFVKRNKNDAADAEAIAEAAGRPTMRFVAVKSAEKQASGMAFKTRDLLVRQRTQTINALRGHMAEYGVVAPNGPVHIERLAEALQDSGSGLPAPVVVLSQMLLAHIAALSEQIGLLDQELRQRARHDQTAKRLMTIPGVGVICAVAMEALAPPLESFAKGRDFAAWLGLTPRQNSSGGKTRLGGTSKMGQRDLRRLLVSGAMTVVRWASRKGAPEGSWLGRMLKKKPRLVVAVALANRTARIAWALMTKGGVYQAPDAARA

SEQ ID NO: 16808 - protein, 320 aa, unidentified
  source 1..320: note = protein_d709292
  REGION 10..157: note = RuvC_domain
  SITE 13: note = RuvC_P1
  SITE 55: note = RuvC_P2
  SITE 95: note = RuvC_P3
  SITE 97: note = RuvC_P4
  SITE 100: note = RuvC_P5
  REGION 190..275: note = Tnp_domain
  SITE 198: note = Tnp_P1
  SITE 227: note = Tnp_P2
  SITE 235: note = Tnp_P3
  SITE 236: note = Tnp_P4
  SITE 248: note = Tnp_P5
MAKPITPVMVGVDVSKAELVIARSDSKDLKRIANTAQAIGGWLKTLAGRTKIALEATGTYHRTLATLAHQAGVELYLLDGYRLNRYRDGVGSRAKTDPADARLILRYLSKELSDLKPWVPPHDAFYRIQSLLRRRASLVHTRIALTQSLDDMPDLKSASKRLSNNIKDIERLIERRLKEAMAEVGWQSDAQRCKAIEGIGDLTSVALANTFHRGEFKNSDAFVAYLGMDVRVRDSGKQVGRRKLTKKGDPELRRLLYNAAMSARRTKAWSGLYETYLSQGLKTTQALVKLGRKLARIAFALMKNQSMYRPKMPVKCCAAP

SEQ ID NO: 16809 - protein, 343 aa, unidentified
  source 1..343: note = protein_5952163
  REGION 6..146: note = RuvC_domain
  SITE 9: note = RuvC_P1
  SITE 52: note = RuvC_P2
  SITE 87: note = RuvC_P3
  SITE 89: note = RuvC_P4
  SITE 92: note = RuvC_P5
  REGION 211..296: note = Tnp_domain
  SITE 219: note = Tnp_P1
  SITE 249: note = Tnp_P2
  SITE 257: note = Tnp_P3
  SITE 258: note = Tnp_P4
  SITE 270: note = Tnp_P5
MKIQTLGIDLGKTVFHLVGLDSTGKVVIRKRCSRKQLLAFTANLQVQLIGMESCSGSHFLGRALREQGHEVRLMPAQYVKPYVQTNKSDYLDAEAIAEAVQRPRMRFVPIKSEEQLDLQALHRVRERWVMRRTAVVNQIRSLLLERGLTLPKGRRYVEEALPRILEDAELPLSGLFRLLLAQLKLELEQLTARIEQLDVVILQRAKEDEGCQRLTAIPGVGPVTATALIAAIGNGAAFRKGRHLAAWIGMVPRECSTGGKQKLLGISKRGNTYLRRLFVQGARSVLQQRHRQAPGLSSWLAQLLARKHQNVVIVALANKLVRMAWAVLYKSERYRAPALALST

SEQ ID NO: 16810 - protein, 339 aa, unidentified
  source 1..339: note = protein_d20e53f
  REGION 2..155: note = RuvC_domain
  SITE 5: note = RuvC_P1
  SITE 53: note = RuvC_P2
  SITE 94: note = RuvC_P3
  SITE 96: note = RuvC_P4
  SITE 99: note = RuvC_P5
  REGION 218..303: note = Tnp_domain
  SITE 226: note = Tnp_P1
  SITE 256: note = Tnp_P2
  SITE 264: note = Tnp_P3
  SITE 265: note = Tnp_P4
  SITE 276: note = Tnp_P5
MIGIDPHKASHTAVAIDGNEHVLDEIRVRSSTTQADQLRCWADSFENRTWAVESAQGLGYLLAQQLIAAGEVVLDVPAVRASRIRTLSSGRSQKNDPNDARSVAIAALRADDLARVRADDHARILRLLAKRHRDLGRAKNQSCGRLHALLLEMIPGGAGFRMSSITRANTLLGTFEPTDAMGCQRLEIACELAVEIARFDEQLKTSKRRIRPAVAASNTSLTSIRGLGPITAAIIIGHTGNIDRFPTRARFASHNATAPIEASSGSRVRHRLDPRGNRQLNWAIQVVAISQLRHDSAGREFYDRKVAEGKSSKEAIRALKRRLSDVIYRHLVNDARQLR

SEQ ID NO: 16811 - protein, 341 aa, unidentified
  source 1..341: note = protein_c483ebe
  REGION 6..146: note = RuvC_domain
  SITE 9: note = RuvC_P1
  SITE 52: note = RuvC_P2
  SITE 87: note = RuvC_P3
  SITE 89: note = RuvC_P4
  SITE 92: note = RuvC_P5
  REGION 211..300: note = Tnp_domain
  SITE 219: note = Tnp_P1
  SITE 249: note = Tnp_P2
  SITE 257: note = Tnp_P3
  SITE 258: note = Tnp_P4
  SITE 270: note = Tnp_P5
MQIEILGIDLAKRVFQLHGADRQGRTVYTAKVMRAAFLETVRELHARIIAMEACGSAHHWARCFRAMGMEVRLISPQYVTPFVKTNKNDRNDAQAIVEAASRPTMTFVPVKSLEQQDIQAVHRVRELLVQQRTALINQARGLLAERGVSMAQSREAFKREVPKIVGACEGEVTSVCQAMMLEISQQIHALEERIKRAETWLRSFMKQSALCKKIAAIDGVGTITATAMVASVGEAKEFKNGRHLSAWLGLVPRQHSSGGKSQLRGISKRGDKYLRTLLIHGARSVLRYAVGKTDAQSRWLQDLIARRGYNRAAVALANKNARVIQALLSSDTPYRPTAAAH

SEQ ID NO: 16812 - protein, 342 aa, unidentified
  source 1..342: note = protein_1a983b3
  REGION 7..149: note = RuvC_domain
  SITE 10: note = RuvC_P1
  SITE 53: note = RuvC_P2
  SITE 88: note = RuvC_P3
  SITE 90: note = RuvC_P4
  SITE 93: note = RuvC_P5
  REGION 211..295: note = Tnp_domain
  SITE 219: note = Tnp_P1
  SITE 249: note = Tnp_P2
  SITE 257: note = Tnp_P3
  SITE 258: note = Tnp_P4
  SITE 270: note = Tnp_P5
MENVSIIGLDLAKNVFQAHGARADGSTVFRKKISRAKLLSFFASVPVCVVAMEACASAHYWARQIGALGHQVRLIAPIYVKPFVKRNKNDAADAEAIAEAACRPTMRFVAVKSVEKQASGMAFKTRDLLVRQRTQTINALRGHMAEYGVVAPQGPVHVERLAEALRDPRGGLPAPVISLCQLLLANIAALAEQIGLLDQELRERARRDQTAKRLMTIPGVGVICAVAMEALAPPLEGFAKGRDFAAWLGLTPRQNSSGGKTRLGGTSKMGQRDLRRLLVSGAMTVVRWASRKGAPEGSWLGRMLKKKPRLVVAVALANRTARIAWALMTKGGVYQAPDAVRA

SEQ ID NO: 16813 - protein, 346 aa, unidentified
  source 1..346: note = protein_0024046
  REGION 6..148: note = RuvC_domain
  SITE 9: note = RuvC_P1
  SITE 52: note = RuvC_P2
  SITE 87: note = RuvC_P3
  SITE 89: note = RuvC_P4
  SITE 92: note = RuvC_P5
  REGION 211..296: note = Tnp_domain
  SITE 219: note = Tnp_P1
  SITE 249: note = Tnp_P2
  SITE 257: note = Tnp_P3
  SITE 258: note = Tnp_P4
  SITE 270: note = Tnp_P5
MKITTIGIDLAKNVFQLHGVDERGKVAVRKPLKRKEMSSYFANLEPCLIGMEACGSAHHWARKLEGFGHTVKLMAPQFVKPYVKTNKNDMADAEAICEAVGRPNMRFVAMKNVEQQAILSVHRARQGFVKARTAQGNQIRGLLSEFGIVIPQGIGSVMKQVPEILEDGENGLPGTMRHLIARLADNLKEMDRQAKELEAQIQLWHRENAASRKLAEIPGLGPITASAIVATVGDAREFKNGRQLAAWLGLVPRQNSSGGKQNLLGISKRGDTYLRTLMIHGARSVVRVAEKKAEPGSWMKNLMGRRNKNVAAVALANKNARIVWALLAHDRMFRPDYTSAAVVAAM

SEQ ID NO: 16814 - protein, 322 aa, unidentified
  source 1..322: note = protein_43a92b6
  REGION 9..160: note = RuvC_domain
  SITE 12: note = RuvC_P1
  SITE 56: note = RuvC_P2
  SITE 96: note = RuvC_P3
  SITE 98: note = RuvC_P4
  SITE 101: note = RuvC_P5
  REGION 195..279: note = Tnp_domain
  SITE 203: note = Tnp_P1
  SITE 232: note = Tnp_P2
  SITE 240: note = Tnp_P3
  SITE 241: note = Tnp_P4
  SITE 252: note = Tnp_P5
MSLPNPLCVGIDVSKATLDIAASTDITQFTVSNDSDGFDAIIAELREHSVALILMEATGGLEAAVACQLQAEGFDVAVINPRQARDFARAMGHLAKTDRIDARVLAQMAEVINRHPDRVRFIRSLPDVERQVLAAMVVRRRQLIAMLVAERNRLHPVHPQSRKSINIIIKALEDELARIDEEMNSHIRNHFKEQAARLSSIKGVGAMTVASLLAKVPELGSLSRRAISALVGVAPVNRDSGSMRGRRTIFGGRSGVRAALYMAALVATRFNPVIKAFYMRLLAAGKTKKVALVACMRKLLTILNAMIRKNEEWNESYHYVAP

SEQ ID NO: 16815 - protein, 404 aa, unidentified
  source 1..404: note = protein_3b9cf59
  REGION 4..160: note = RuvC_domain
  SITE 7: note = RuvC_P1
  SITE 57: note = RuvC_P2
  SITE 97: note = RuvC_P3
  SITE 99: note = RuvC_P4
  SITE 102: note = RuvC_P5
  REGION 275..362: note = Tnp_domain
  SITE 283: note = Tnp_P1
  SITE 313: note = Tnp_P2
  SITE 321: note = Tnp_P3
  SITE 322: note = Tnp_P4
  SITE 335: note = Tnp_P5
MNAVGIDVSKGKSTVAVLRPFGEVVASPFDVAHTGSELKSLADFVKNLCGETKVVMEATGNYYEPIARYLHEQNIFVSVVNPVLISDFGGNTLRRPKTDKKDSLKIASYALSYWVDLKEYVPQEDLRKSLKMLNRQYQQASKLKTMMNNNLISLLDLTFPGINKKFTSPSRESDGHEKWVDFVLAFPHCDMISKLTVKAFSKKYRKWCTGNSYHFTEASCEKIYEFSKECISSVSSAESTVFAVIQAARMLNSAIENCHAIRLEMNRVAAQLPEYDTVMSMYGVGKAMGPQLIAEIGDPRRFHSRKAITAYFGYDSENNDSGQKVSKSNSMTKKGAGALRRTLFIIMQIMLKTKPVDNPVYDFLIKKQSEGKHYYSYMNAAANKFLRIYYAKVKEILTAAEAST

SEQ ID NO: 16816 - protein, 406 aa, unidentified
  source 1..406: note = protein_0f27e0d
  REGION 15..169: note = RuvC_domain
  SITE 18: note = RuvC_P1
  SITE 66: note = RuvC_P2
  SITE 106: note = RuvC_P3
  SITE 108: note = RuvC_P4
  SITE 111: note = RuvC_P5
  REGION 276..360: note = Tnp_domain
  SITE 284: note = Tnp_P1
  SITE 313: note = Tnp_P2
  SITE 321: note = Tnp_P3
  SITE 322: note = Tnp_P4
  SITE 334: note = Tnp_P5
MVTLNNNPPEIEVFIGLDVGKGEHHAVALDPGGKHLLDRALPNDEGKLRALLAELGNPTRILLVVDQPATIGALPVAVAQAAGTHVAYLPGLAMRRIADLHPGEAKTDARDARIIANAARTMPHALRSIQIADEQVAELAMLCGFDEDLAGQITQFTNRIRGLLTQIHPALERVLGPRLDHPAILDALEHYASPAGFRAAGEKRIANRLIKRAPRKGRVWAAEIIAALDAQTVTVTGTNAATLVLPKLDAQLTAFRDQRDEVAAEVERLVEIHPLSPVLTSMPGVGVRTAARLLTEVTTKHFPTAGHLASYAGLAPVTRRSGSSIRGEHPSRRGNKILKRTMFLSAFAALRDPVSRGYYDRKIAQGKRHNQALIALARRRSDVLFAMLRDGTIYQAPAWSDQALTA

SEQ ID NO: 16817 - protein, 313 aa, unidentified
  source 1..313: note = protein_03dede4
  REGION 9..150: note = RuvC_domain
  SITE 12: note = RuvC_P1
  SITE 56: note = RuvC_P2
  SITE 94: note = RuvC_P3
  SITE 96: note = RuvC_P4
  SITE 99: note = RuvC_P5
  REGION 190..274: note = Tnp_domain
  SITE 198: note = Tnp_P1
  SITE 227: note = Tnp_P2
  SITE 235: note = Tnp_P3
  SITE 236: note = Tnp_P4
  SITE 247: note = Tnp_P5
MSNLLPQTIGIDISKATLDCHVHPAGIERQFANTTKGHKALIAWAGQWEVERIAYEATGTYHRAVEVALGHLPCVKLNPERARRFAQATGTLAKTDRIDARLLARMAATLQPPVRPARSPQQNQLAELVNARDGLVRDRTALKNREKNLNVTLLKRQCSQRLEQIARHIEALDAEIARLIAADEKLARRHDILTSIAGLGTLTANQIIATMPELGSLDNKQAASLAGLAPVARQSGQWKGKSFIRGGRANVRQALYMPALVAARFNPDLKAKYQQLIAAGKPAKIAITALMRKLIVTANALLRADRIWLQSPA

SEQ ID NO: 16818 - protein, 271 aa, unidentified
  source 1..271: note = protein_2d6f62f
  REGION 1..88: note = RuvC_domain
  SITE 28: note = RuvC_P3
  SITE 30: note = RuvC_P4
  SITE 33: note = RuvC_P5
  REGION 152..211: note = Tnp_domain
  SITE 160: note = Tnp_P1
  SITE 190: note = Tnp_P2
  SITE 198: note = Tnp_P3
  SITE 199: note = Tnp_P4
MGAALREQGHQARLIPAQFVKPYRKSNKNDFLDAEAIAEAVTKENMRFVAIKTQDQLDLQAIHRVRDRLVQRRTALINEIRGFLLERGISFAADPIHLRKNLPGVMEDAEQNLSPRLRWLLERMWQESKQMEIDIKAITDEIERISNEDALCRRLRQIPGFGPLVSTATVAAIGNGAAFHRGRDFAAWVGVVPRQYSTGQAKAVRHEQAWQCLSASHADPRSSCGTVSHQVRHWRVRAVGAPASAACSTQQGRRGHRQQVGPHRLGGVVQR

SEQ ID NO: 16819 - protein, 342 aa, unidentified
  source 1..342: note = protein_3f644ed
  REGION 13..165: note = RuvC_domain
  SITE 16: note = RuvC_P1
  SITE 65: note = RuvC_P2
  SITE 106: note = RuvC_P3
  SITE 108: note = RuvC_P4
  SITE 111: note = RuvC_P5
  REGION 208..294: note = Tnp_domain
  SITE 215: note = Tnp_P1
  SITE 245: note = Tnp_P2
  SITE 253: note = Tnp_P3
  SITE 254: note = Tnp_P4
  SITE 267: note = Tnp_P5
MPHRPQGDVEVFAGLDVSAREISVARLRSKEGTLTLASFANTASGHKALLAYLQQGTEDVRVCLEASGNYSLDLALALHAHRHVEVSLVNPRRARRFAESLGERSKTDPVDARVLCEYAARMPWVVWRPPSARGLRLRAITRAIESLGVMHTQEKNREHALKASLALPSLVIREMRRHQRYLENRMEQLRREARRLIAKDRELDRRFRLMVTVPGIAETSALQILGELAVLADSLDARQWVAFSGLDPSQFTSGTSVQKHPRISRGGSRHLRRALYMPALVALRREPHLRTFYQRLVNRGKARLQALVAVMRKLLHALYAMFRSNQTYDGAKLCSAELASCA

SEQ ID NO: 16820 - protein, 339 aa, unidentified
  source 1..339: note = protein_94cfd65
  REGION 6..147: note = RuvC_domain
  SITE 9: note = RuvC_P1
  SITE 52: note = RuvC_P2
  SITE 87: note = RuvC_P3
  SITE 89: note = RuvC_P4
  SITE 92: note = RuvC_P5
  REGION 211..295: note = Tnp_domain
  SITE 219: note = Tnp_P1
  SITE 249: note = Tnp_P2
  SITE 257: note = Tnp_P3
  SITE 258: note = Tnp_P4
  SITE 270: note = Tnp_P5
MQIHSVGIDLGKTTFHLVALGASGKVLVKKKFTQRQLLTYTANMQTSLIGLEACSGAHFLGRALRKQGHDVRLIAAQFVKPFVKSNKNDFVDAEAIAEAVERKNMRFVPIKTDDQLDLQAIHRVRDRLVSRRTAVINQLRAFLLERGMVFAQKPAKLKAAMADILENAEADLTPLMRNLIDTLWGEWKTVEQQIEELNDELERISASDAGCTRIRKIPGIGPVVATAIVAAIGNGAAFRKGRDFAAWLGIVPRQYSTGGKAKLFGISKRGNVYLRKILIHGARAAVLRIKRDRAPIGTWLDALDARAPKNVVVVAMANKLARIAWAVLSSGNEYRPVAA

SEQ ID NO: 16821 - protein, 408 aa, unidentified
  source 1..408: note = protein_05ed742
  REGION 6..162: note = RuvC_domain
  SITE 9: note = RuvC_P1
  SITE 99: note = RuvC_P3
  SITE 101: note = RuvC_P4
  SITE 104: note = RuvC_P5
  REGION 269..356: note = Tnp_domain
  SITE 277: note = Tnp_P1
  SITE 309: note = Tnp_P2
  SITE 317: note = Tnp_P3
  SITE 318: note = Tnp_P4
  SITE 329: note = Tnp_P5
MQRYYLGVDWADKSHQLYAADESGKKIKELEVQQTAEGLAEFGRWLDERRSAGTELWAAIEKPQGRIVDFLLDHGVVVYPVNPKALDRARDRFRMSQSKSDGFDAYVLAEFLRTDHTHLRALEPDSAQGQELKMLTRDHQRLLRQKTRLLNQMTITLKEYYPRALEVFDDLETQIARDFLHAYPTPQGLSRMTRPQWKRFAKGEHHLSEARWQELWEKINKPQITIPDHVVRAKAKLLLALVAQLEVGVKAVHDYSQEVERFFAALPAAKIARTLPGAKSGTTMPTLWAELGDAKNRWNSFRHLQAEAGTVPVTKASGKSRMVQFRFACKKRLRTAMYWFAFNSLMRCEWANKYYRDQRAKGHSKHQALRALGAKWLKIIFVMWRDHKPYDENYHLANIARHAMRQAA

SEQ ID NO: 16822 - protein, 357 aa, unidentified
  source 1..357: note = protein_96542ea
  REGION 36..186: note = RuvC_domain
  SITE 39: note = RuvC_P1
  SITE 88: note = RuvC_P2
  SITE 128: note = RuvC_P3
  SITE 130: note = RuvC_P4
  SITE 133: note = RuvC_P5
  REGION 225..311: note = Tnp_domain
  SITE 233: note = Tnp_P1
  SITE 262: note = Tnp_P2
  SITE 270: note = Tnp_P3
  SITE 271: note = Tnp_P4
  SITE 284: note = Tnp_P5
MLRPRKVSLNHQSVRRQKAAGPEAVEQGKGNEMHILGIDIAKGTFDTALTQDNQAYAQASFSNDSQGFKRVVKWLATHQVEALHVCLEATGRYGDALADYLHTQGHQVSLVNPAQIHAYGRSKLRRNKNDRLDAQLIADFCFTQQPLAWKPPLRIERESQELSRHIATLKEDRQRKRNQLAAGLTSPPLRRSIQKTLDFLNQEIELLEKELHELLSQDPDKAQQIELLCSIPGIGRLTACRFLAEVDVTRFRQASHLAAYAGLVPTEHTSGASVRKKPRLSKVGNRHLRTLFFMPALSAHRFNPIIADLHARLTERGKPKMAVVGAVMRKLLHLAYSVLKTRKPFDPQHLHSIPVGG

SEQ ID NO: 16823 - protein, 342 aa, unidentified
  source 1..342: note = protein_7331a7b
  REGION 13..165: note = RuvC_domain
  SITE 16: note = RuvC_P1
  SITE 65: note = RuvC_P2
  SITE 106: note = RuvC_P3
  SITE 108: note = RuvC_P4
  SITE 111: note = RuvC_P5
  REGION 208..294: note = Tnp_domain
  SITE 215: note = Tnp_P1
  SITE 245: note = Tnp_P2
  SITE 253: note = Tnp_P3
  SITE 254: note = Tnp_P4
  SITE 267: note = Tnp_P5
MTDRPDEHVDVFAGLDVSARAISVARLRSKDGTLTVASFANNASGHKALLAYLLQGTEQVRVCLEASGNYSLDLALALHAHRHVEVSLVNPRRARRFAESLGERSKTDPVDARVLCEYAARMPWVVWRPPSTRGLRLRAITRAIESLGVMHTQEKNREHALQASQALPSLVIREMRHHQRYLENRMEQLRREARRLIAKDPELDRRFRLMVTVPGVAETSALQILGELVGLPDSLDARQWVAFSGLDPSQFTSGTSVERRPRISRGGSRHLRRALYMPALVALRHEPHLRTFYRRLVDRGKARLQAVVAVMRKLLHALFAMFRSNQTYDGAKLCSAELVSCV

SEQ ID NO: 16824 - protein, 342 aa, unidentified
  source 1..342: note = protein_badeba4
  REGION 7..149: note = RuvC_domain
  SITE 10: note = RuvC_P1
  SITE 53: note = RuvC_P2
  SITE 88: note = RuvC_P3
  SITE 90: note = RuvC_P4
  SITE 93: note = RuvC_P5
  REGION 212..295: note = Tnp_domain
  SITE 219: note = Tnp_P1
  SITE 249: note = Tnp_P2
  SITE 257: note = Tnp_P3
  SITE 258: note = Tnp_P4
  SITE 270: note = Tnp_P5
MCEVSIIGIDLAKRSFQLHGAGVDGSAAFRRKVSREKLLQFLERQPTCLVAMEACATSHLWGREIAKLGHEVKLIPPIYVKPFVKRQKNDTADAEAIAEAASRKNMRFVAVKAEEQQAQSMVFRTRDLLVRQRTQMINALRGHLAEYGVIAPQGAAHVRRLAQEIENPTSCLPDLVRKLGRMYLKQITEYDTRIKGLEQHIRKLAKADEDVCRLMTIPGIGPICAMAIRAFAPPMETFKNGRDFAAWTGLVPRQKSTGGKQILGKTSKMGQRDIRRLLIIGAMAVVCWASRRGAPEGSWLARMMARKPRMLVATALANRMARAVWAMTIKNEDYRNPAVAAA

SEQ ID NO: 16825 - protein, 344 aa, unidentified
  source 1..344: note = protein_6c5abd2
  REGION 6..150: note = RuvC_domain
  SITE 9: note = RuvC_P1
  SITE 54: note = RuvC_P2
  SITE 89: note = RuvC_P3
  SITE 91: note = RuvC_P4
  SITE 94: note = RuvC_P5
  REGION 213..300: note = Tnp_domain
  SITE 221: note = Tnp_P1
  SITE 251: note = Tnp_P2
  SITE 259: note = Tnp_P3
  SITE 260: note = Tnp_P4
  SITE 272: note = Tnp_P5
MNISRVGVDIAKSVFHVHGVDRHEKPQWRGKYSRAKWLEAVCRRVPQGATIGMEACAAAHYWARELQARGYQVKLIAAQFVKPYVKTNKNDRADAEAICEALGRPTMRFVAVKTVDQQDSQATHRIREELISQRTAKANQIRGLVGEYGFTAPTGIQQLRRALPLWLEDATNGLSDRFRCLLADLADDLRYLDERVAQLTSAIETHANTDPVAKRLMSLRGIGPITASALSGVLGDGAIYKRGRDFAASLGLTPRQHSTGGRERLLGISKRGNSYLRKLLVHGARAVLRFAVRQEDGLSQWIKHLAVRKHRNVAIVALANKTARMAWAVTRYEVPYNPELAAAA

SEQ ID NO: 16826 - protein, 390 aa, unidentified
  source 1..390: note = protein_46018df
  REGION 4..161: note = RuvC_domain
  SITE 7: note = RuvC_P1
  SITE 60: note = RuvC_P2
  SITE 101: note = RuvC_P3
  SITE 103: note = RuvC_P4
  SITE 106: note = RuvC_P5
  REGION 266..352: note = Tnp_domain
  SITE 273: note = Tnp_P1
  SITE 303: note = Tnp_P2
  SITE 311: note = Tnp_P3
  SITE 312: note = Tnp_P4
  SITE 325: note = Tnp_P5
MIYVGIDVAKDKHVCFITNSDREILFQSFPISNNKEGFETLFHRIESVAEDLNKVKVGLEATGHYSYNLLGFLLDKGLTTYVTNPLHTNLYRKSLSLRKTKTDKVDSRTIATMMMSDMDLKSYSDTFYHNEELKSLTRYRFDKVKAKLKSSVSRLVNILFPELEKLVPTLHLASVYTLLSEFPGASLIAATHLTRLSNLLSESSKGHYGRDSATLLREAAKNSIGSVMPAKSMERKHTIKLIQELTSQIDEIETAIKQIMDEEIKSPILTIPGISYQMEAMIIAEIGDFSRFDSPDKILAYAGMSPSTYQSGQLDNGYSHMEKRGSRYLRYALYNATKYVCHWDKSFGSYLEKKRLESKHYNVALSHAAKKLVRLIFALEKSGQAYISAV

SEQ ID NO: 16827 - protein, 342 aa, unidentified
  source 1..342: note = protein_5eaf248
  REGION 6..146: note = RuvC_domain
  SITE 9: note = RuvC_P1
  SITE 52: note = RuvC_P2
  SITE 87: note = RuvC_P3
  SITE 89: note = RuvC_P4
  SITE 92: note = RuvC_P5
  REGION 211..294: note = Tnp_domain
  SITE 219: note = Tnp_P1
  SITE 249: note = Tnp_P2
  SITE 257: note = Tnp_P3
  SITE 258: note = Tnp_P4
  SITE 270: note = Tnp_P5
MTIVMIGVDLGKNSCSIAALDERGAVVLRRRMRPTSIVEFAAKYAPCTVAMEACCGAHYLGRQLIARGLTVKLMPPEYVRPYVKAQKNDDRDAEGIAEAATRPTMRFVELKSQEQLDIQSLHRVRSRLVGSRTTLINQMRALLLERGVTIAQGRRKFERAVDAMLADEAALTPGRLRDLLLDMRAEWTALDSRIGALDEEFVQLARTDEVARRLTSIPGVGALNATALVAAVGRAEAFDQARDLGAWLGLVPRQHTTGGKPRLLGISKRGNTYLRTLLIHGARAALPTLAKADTTLGAWLRGLQARCHPNTVVVALANKLARIAWVLMRRDTMFATQRVAIA

SEQ ID NO: 16828 - protein, 373 aa, unidentified
  source 1..373: note = protein_2f7e062
  REGION 5..164: note = RuvC_domain
  SITE 8: note = RuvC_P1
  SITE 61: note = RuvC_P2
  SITE 102: note = RuvC_P3
  SITE 104: note = RuvC_P4
  SITE 107: note = RuvC_P5
  REGION 267..309: note = Tnp_domain
  SITE 275: note = Tnp_P1
MVVSVGIDVSKDKHDCFIVSSDGEVLADVFTISNTLDGFHGLLQRIQECSAPRTKLRVGLEATGHYSYNLLGFLLDNGLATYVLNPLRTNLYRKSLSLRKTKTDRVDARTIASMLLSDAGLKPYTDTAYHNEELKSLTRYRFDKVKERAKLKSSIARLVCILFPELEKLVPSLHIASVYALLEEFPGAKQVAAAHLARLKALLETASNGHYKRDMALEIRDTAKNSIGSQMPAKSLELQHTIRLIRELNREIDEIEEQIQSIMDELHSPITTIPGLGFRMAAMILAEVGDFTRFDSRTSCWLMPGCPPPLTNPDSSKIATRTWKSVAPDTYATHFTTQPSMSATGTRLLLIISPRSGRRENTTILPSLTLPKS

SEQ ID NO: 16829 - protein, 487 aa, unidentified
  source 1..487: note = protein_d1d99c4
  REGION 7..175: note = RuvC_domain
  SITE 10: note = RuvC_P1
  SITE 64: note = RuvC_P2
  SITE 113: note = RuvC_P3
  SITE 115: note = RuvC_P4
  SITE 118: note = RuvC_P5
  REGION 279..365: note = Tnp_domain
  SITE 287: note = Tnp_P1
  SITE 317: note = Tnp_P2
  SITE 325: note = Tnp_P3
  SITE 326: note = Tnp_P4
  SITE 338: note = Tnp_P5
MENNAYLGIDVAKGSADFLLIDARKEILEEGFVLDDCTQGRKVLTQLIDGWFEGGVTHLYCGVESTGGYENNWFTLLCSLAAIYQKKGKTLRVTRVNPRPVKACGEAAMLRTQTDQTSALAIASYMIGFPEKIRYSPHAGQSEDPLWLAARGQAGLIRMLLKQKTQLSSQLEKLLYTRLGETMIYCRNGIPGWLLRLISRYPSREHLRRAGVGKVAKIKGISLDKAQSLLGRLHGDQPTTPAIACHTIKATARQILHLQTQIDAQQDFLINQFSDHPDVKLLESITGIGSASAVRLLVEIEDISRFDSCKAFCAYFGVHPTWKESGDGHWKTGMSKKGRAQVRGILYMSSLSALRWDSDMKGLYHRFRKENRMNHYQAMGVVMHKLLRIVYGVLKNQTPYDRQVDRKNRRQSKENQQAYQKKAAQNKTTQKTTRQRYSKRADSTEYAPISRRAYKKRKQEVSQSSLVEEYAGSPPANNPNGIPKENI

SEQ ID NO: 16830 - protein, 343 aa, unidentified
  source 1..343: note = protein_4827478
  REGION 7..148: note = RuvC_domain
  SITE 10: note = RuvC_P1
  SITE 53: note = RuvC_P2
  SITE 88: note = RuvC_P3
  SITE 90: note = RuvC_P4
  SITE 93: note = RuvC_P5
  REGION 211..295: note = Tnp_domain
  SITE 219: note = Tnp_P1
  SITE 249: note = Tnp_P2
  SITE 257: note = Tnp_P3
  SITE 258: note = Tnp_P4
  SITE 270: note = Tnp_P5
MNEIKVLGIDLGKDVCSVVGLDEAGNVLLRRRMRRDSVVKLAAGMPACVMAMEACCGAHHLGRQLREQGHDVRLMSPEYVRPYVKAQKNDDRDAEAIAEAATRPTMRFVDLKSDEQLDMQSLHRARDRLVGERTTLINQLRAILLERGIMIAKGRRKLELRLEQLLAGEMAIGRRIRVLIEDMRAEWRALDARIVSFDAEFATLARTDASMKLLSTIPGIGPLNATAFVASVGKAETFGRGRDLAAWLRLVPRQMTTGGKPKLLGISKRGNGYLRRMLIHGARAALASLAKGKTLLGEWLRGLLSRTHMNTAVVALAAKMARIIWAVLRSGRPFQMAALPSVE

SEQ ID NO: 16831 - protein, 313 aa, unidentified
  source 1..313: note = protein_b85c35a
  REGION 8..152: note = RuvC_domain
  SITE 11: note = RuvC_P1
  SITE 55: note = RuvC_P2
  SITE 95: note = RuvC_P3
  SITE 97: note = RuvC_P4
  SITE 100: note = RuvC_P5
  REGION 193..278: note = Tnp_domain
  SITE 201: note = Tnp_P1
  SITE 230: note = Tnp_P2
  SITE 238: note = Tnp_P3
  SITE 239: note = Tnp_P4
  SITE 250: note = Tnp_P5
MIQELTVVGIDISKARFDVCTYPTGKHWSTGSSSEQITALIKRIQALGPVVVEMEASGGYERKLADSLHKAGLKVYILPPSRVRNFATAMGQLAKTDKIDAAMIARYLATAGDRLVAYGGPDPARDRLGALLAHRRRLVAEKSGLMSQLDTIEEPLVRDMLEARLRIIAQDIAIMDKAMHALLKATPSLRKRHERMCQVTGVGPVLASALLADLPELGTVSSKVIAALLGVAPHARQSGNSNRKGKCSGGRKHLRDIAYMAALSAIKIRDPVLGTFYQRLRSKGKTFKIAIVATIRKLITILNAIAKTDPAFT

SEQ ID NO: 16832 - protein, 337 aa, unidentified
  source 1..337: note = protein_60a1e20
  REGION 4..155: note = RuvC_domain
  SITE 7: note = RuvC_P1
  SITE 60: note = RuvC_P2
  SITE 100: note = RuvC_P3
  SITE 102: note = RuvC_P4
  SITE 105: note = RuvC_P5
  REGION 200..286: note = Tnp_domain
  SITE 208: note = Tnp_P1
  SITE 237: note = Tnp_P2
  SITE 245: note = Tnp_P3
  SITE 246: note = Tnp_P4
  SITE 259: note = Tnp_P5
MYQLGIDVSKATLDICLLLDGVRGRIKTKKLKNDYRAVHVILAWLQQQNCKPEDVHTIMEATGVYHELLATGLHLAGVTVSLANPHRSREFARGMDILIKTDKVDAWMLACYGALKEPEPWSPPPEEIRYLSSLLKRRDLLVADAVREKNRLEKYRSTNTPEILIQSAEKMLLRLNEEIAVLESLLKEHIDSNASLKEDLALLTSIKSVGQQLALNMLVIMRSHEFDSAEQAAAFLGVVPVEKRSGTSVRGRTKMSKIGPPKMRAKLYLSALCGLRFNPLMKSIYERLCLSGKPKMVAVGALMRKLIHWCFGVLRTRHPFDINYQRVDAQSACKAAF

SEQ ID NO: 16833 - protein, 342 aa, unidentified
  source 1..342: note = protein_b76f333
  REGION 6..147: note = RuvC_domain
  SITE 9: note = RuvC_P1
  SITE 52: note = RuvC_P2
  SITE 87: note = RuvC_P3
  SITE 89: note = RuvC_P4
  SITE 92: note = RuvC_P5
  REGION 211..297: note = Tnp_domain
  SITE 219: note = Tnp_P1
  SITE 249: note = Tnp_P2
  SITE 257: note = Tnp_P3
  SITE 258: note = Tnp_P4
  SITE 270: note = Tnp_P5
MQITTIGLDIAKNVFQVHGIDAKEKVVARKQLRRSQVITFFKALPPCLIGMEACATAHYWARELTKLGHEVRLMPAKDVKAYVKRNKNDAADAEAICEAVRRPTMRFVRIKSAEQQGQLMQHRTRDVLIRQRTQIINALRAHLAELGVVAAQGNAGVNELRAIVTDEQDTRLPIDARASVIVLAAQLEALESVIGAIEKRIKMQHRSSEASQRVEAIPGIGVIGATAIVATVADPTIFRSGRDFAAWIGLVPRQDSTGGKQKLGPISKQGDRYLRRILVVGAIAVLRRAQENPGKYPWLTQLLARRPFKVVAVALANKMARMAWALLAHGGTYRAPELAETA

SEQ ID NO: 16834 - protein, 351 aa, unidentified
  source 1..351: note = protein_f82faaa
  REGION 13..155: note = RuvC_domain
  SITE 16: note = RuvC_P1
  SITE 59: note = RuvC_P2
  SITE 94: note = RuvC_P3
  SITE 96: note = RuvC_P4
  SITE 99: note = RuvC_P5
  REGION 218..302: note = Tnp_domain
  SITE 226: note = Tnp_P1
  SITE 256: note = Tnp_P2
  SITE 264: note = Tnp_P3
  SITE 265: note = Tnp_P4
  SITE 277: note = Tnp_P5
MTQQTTAETIATIGIDLGKNTFHLIGMDARGKIVLRRKIARGQLQSCLANVPVCLIGLEACTGAHHVGRQLAALGHDVRLLPAQYVKPFLKGHKNDYRDAEAIAEAAQRPTMRPVPLKSAEQLDLQALHRVRSRRIGQRTAVINQIRGFLLECGIAVRQGPAGLREALPTLLAHRTDVLSPRMIHLIEELAEDWRQLDERIAVLTRDIAALAGQDAGCRRLMGIPGVGVITASAMVAAVGTGAAFTKGRDFAAWLGLVPKQISTGDRTILGGLSKRGNRYLRTLFVSGAQTLLRDPGRWQNHGFGRWVMTALARLPRNVLAAALANKLARMAWSVLFRGCGYEAEFTTRAA

SEQ ID NO: 16835 - protein, 391 aa, unidentified
  source 1..391: note = protein_5a4e2ec
  REGION 9..162: note = RuvC_domain
  SITE 12: note = RuvC_P1
  SITE 60: note = RuvC_P2
  SITE 101: note = RuvC_P3
  SITE 103: note = RuvC_P4
  SITE 106: note = RuvC_P5
  REGION 224..309: note = Tnp_domain
  SITE 232: note = Tnp_P1
  SITE 262: note = Tnp_P2
  SITE 270: note = Tnp_P3
  SITE 271: note = Tnp_P4
  SITE 282: note = Tnp_P5
MNETPRVVIGMDPHKRSVTIEVMTSDESIVSKGRFGTDRAGHDAMLRQVKAWPDRVWAIEGCQGIGRHVANRLLADGEKVVDVPPKLSARARVFATGQGRKTDATDAHSVALVGTRMSGLRPVVNDEQLAVLRILVDRRRSLGDEHTRKMSQVHHLLLELIPGGAKKDLSAAQAKALLATVRPRDIAGKTRRRVAAELIADLERIYLRKKAANKELTELVATTGTSLLGLEGIGPSGAARLLVEVGDITRFPDSNHFGSWTGTAPIDASSGENVRHRLSRGGNRQINRVLHIMAVVQLRHATEGRAYYDRTKARGKTSNESMRLLKRRLSDIVYRTMVNDAARHMATGPGGQRGNVSDSSAAGSQPQHQLFGQATPGPASQHSKPALPKVS

SEQ ID NO: 16836 - protein, 343 aa, unidentified
  source 1..343: note = protein_da70a9a
  REGION 5..158: note = RuvC_domain
  SITE 8: note = RuvC_P1
  SITE 56: note = RuvC_P2
  SITE 97: note = RuvC_P3
  SITE 99: note = RuvC_P4
  SITE 102: note = RuvC_P5
  REGION 220..306: note = Tnp_domain
  SITE 228: note = Tnp_P1
  SITE 258: note = Tnp_P2
  SITE 266: note = Tnp_P3
  SITE 267: note = Tnp_P4
  SITE 278: note = Tnp_P5
MQVIIGVDPHKATHTAVALSDGEDELARKKVRATRVQVPQLLGWAEPFPTRRWAIEGADGLGFLLAQQLVAAGEHVVNVPATLAARTRLLGTGRSNKNDPNDALSVAVTALRTRGLRRVEAVGHSEVLRLLAKRNTDLGDQRCRLVSRLHALLVELAPGGIAKEINASDVDAFLAQITPATPVEQLRYDLAGELLDDIRRLDTQLKASHKRVRVAVQASATTVTDLFGVGPIIAAMLIGYSGDIGRFANRDHYAAYNGTAPVEFSSGGRIVHRLSQRGNRKLNHAIHMAAICQLRQPHCEGRAYFERRVADGKTNKEAIRSLKRHISNAVYRQLATDARRATR

SEQ ID NO: 16837 - protein, 341 aa, unidentified
  source 1..341: note = protein_bbb5a35
  REGION 7..149: note = RuvC_domain
  SITE 10: note = RuvC_P1
  SITE 53: note = RuvC_P2
  SITE 88: note = RuvC_P3
  SITE 90: note = RuvC_P4
  SITE 93: note = RuvC_P5
  REGION 209..296: note = Tnp_domain
  SITE 217: note = Tnp_P1
  SITE 247: note = Tnp_P2
  SITE 255: note = Tnp_P3
  SITE 256: note = Tnp_P4
  SITE 268: note = Tnp_P5
MNQAARVGIDLGKHSFHLHGQDSSGREVFRRKLTRLQMMRFLGNLPSCTVVMEACAGAHYTARAIRALGHEAKLISPHFVRPFVKSNKNDFVDAEAICEAASRPSMRFVAPKTEAQQTLSVLHRMRESLIRNRTSTINQMHGFLLEFGISLPKGPAVMKRLSDVLAEHNLPPQLTALLHGLHDHFVYLDGRIRDLDRELERQLAEDDLGSRLLSIPGIGPVTASLLSGEMGDGRQYSCSREFAASLGLVPRQYSTGGRANLLGISKRGDKNLRRLLVQCARSYMLHLDRQRGALAEWVRSLQLRRHSNVVACALASKLARIAWALATKHTRFDAGPDTLPA

SEQ ID NO: 16838 - protein, 345 aa, unidentified
  source 1..345: note = protein_c4a7cdd
  REGION 7..149: note = RuvC_domain
  SITE 10: note = RuvC_P1
  SITE 53: note = RuvC_P2
  SITE 88: note = RuvC_P3
  SITE 90: note = RuvC_P4
  SITE 93: note = RuvC_P5
  REGION 212..301: note = Tnp_domain
  SITE 220: note = Tnp_P1
  SITE 250: note = Tnp_P2
  SITE 258: note = Tnp_P3
  SITE 259: note = Tnp_P4
  SITE 272: note = Tnp_P5
MSYRNILAIDLAKEVFQVCKTDHNGKVIYNKAVSRRKLQEILRKEKASLAAMESCATSHYWCRYAMECGHAVKPMHARTVKAFLTKQKTDKNDALAISIAALQPHVPSTRILNTEEQALQSVDRMRELAVSQRRSCSNQIRSLLSEFGITIAKGIAHLKAKLPDILEDAENGLPGMFRQSIAMAFEMLKTHIEYIADLDKKLEAEVKNNETCQKLMMLEGVGPLSAIGLTIRLGQPAIFKNGRAASASIGLTPKQHSSGGKEVIGHIAKYSADKRLRSTLYQGALAVIARVDKREARTQKEVWLKGIIQRRGKKVAAIALANKNVRTTYALIKNNTNYKATAIAA

SEQ ID NO: 16839 - protein, 408 aa, unidentified
  source 1..408: note = protein_7acd84e
  REGION 6..162: note = RuvC_domain
  SITE 9: note = RuvC_P1
  SITE 59: note = RuvC_P2
  SITE 99: note = RuvC_P3
  SITE 101: note = RuvC_P4
  SITE 104: note = RuvC_P5
  REGION 273..356: note = Tnp_domain
  SITE 309: note = Tnp_P2
  SITE 317: note = Tnp_P3
  SITE 318: note = Tnp_P4
MERYYLGVDWADEFHQVWVSDPEGKKVSEKKVEQSVGGLTEFGRFLDESRSKGVELWAAIEKPQGRIVDFLLDHGVVVYAVNPKALDRARDRFRMSQSKSDSFDAYVLAEFVRTDHGHLRALKPNSDSAQELKLLTRDQQRLVRQKTRLLNQLTTTLKEYYSRPLEMFSDLESNLALDFLKQYPTPQALSRLTRRQWNRFSKREHSLGEQRSKELWDKLQQPQLEVPEHVVRAKARLLEVLVAQLITLRDAVESYNERVRSFFASMPAAELVRLLAGAKTGTIVATLWAELGDAKDRWQSFRHLQAEAGVVPVTQASGKSRVVKFRFCCNKILRHAAYWLAFVSLNRSEWANHYDRDQRAKGHSHHRSLRALAAKWLKIIFVMWRDHKPYDENYHLANITRQKMRQAA

SEQ ID NO: 16840 - protein, 411 aa, unidentified
  source 1..411: note = protein_cc6f2d1
  REGION 5..164: note = RuvC_domain
  SITE 8: note = RuvC_P1
  SITE 61: note = RuvC_P2
  SITE 101: note = RuvC_P3
  SITE 103: note = RuvC_P4
  SITE 106: note = RuvC_P5
  REGION 272..358: note = Tnp_domain
  SITE 280: note = Tnp_P1
  SITE 311: note = Tnp_P2
  SITE 319: note = Tnp_P3
  SITE 320: note = Tnp_P4
MRLFVGDDWAEDHHDVELMDQAGRVLAKRRLPEGVAGMAGLHELIGQQLGDDADDAEVLIGIETDHGPWVAALAAAGYTVFAVNPLQASRYRERHGVSGAKSDSTDAHMLTDMVRTDSHQLRAVAGDSADAEGIKVLARTHKTLIWERTRQVQRLRHQLREYFPAALEAFEDLDAGDTLELLGKAPDPARAARLTRAQISAALKRARRRNIPDKATAIMAALRGPQLGQPPVITAAYAVTARSLIAVITVLNEQVKALQGQVEENFGQHPDAEIYRSQPGMGAILGARVLAEFGDDPHRYADGKARRNYAATSPITRASGKKKVVAARLIHNDRLVDALNAQAFASLKASPGARALYDDLRARGIEHNDALRRLANRLVGILHGCLKTRTLYNEATAWSHRANLPQSSVAA

SEQ ID NO: 16841 - protein, 267 aa, unidentified
  source 1..267: note = protein_da44df9
  REGION 2..74: note = RuvC_domain
  SITE 14: note = RuvC_P3
  SITE 16: note = RuvC_P4
  SITE 19: note = RuvC_P5
  REGION 137..230: note = Tnp_domain
  SITE 145: note = Tnp_P1
  SITE 175: note = Tnp_P2
  SITE 183: note = Tnp_P3
  SITE 184: note = Tnp_P4
  SITE 197: note = Tnp_P5
MPPAYVKPYVPRNKNDARDAHGCCEAVSRPDMRFVPIKSVEQQWARALHRTRDLLVRQRTQLANAMRGLLYEMGQTSAKGAAGIETLLRRVEAADEAIPAALLICLVPLAGQWRALDGEIGKLDKQILAQVRQQRAALRLTTIPSVGPIIAHATVAAIGDGRQFASARDFAAWLGLTRKTHDTGGKHRPTGHISRAGDKDLRRLLILGASSWLRQVRAKPDRGSPWIRGLLARRPVKVAVVAQAAKTARIIWAMLQSGQQYRAPAVA

SEQ ID NO: 16842 - protein, 404 aa, unidentified
  source 1..404: note = protein_bf5383c
  REGION 11..166: note = RuvC_domain
  SITE 14: note = RuvC_P1
  SITE 62: note = RuvC_P2
  SITE 102: note = RuvC_P3
  SITE 104: note = RuvC_P4
  SITE 107: note = RuvC_P5
  REGION 273..358: note = Tnp_domain
  SITE 281: note = Tnp_P1
  SITE 311: note = Tnp_P2
  SITE 319: note = Tnp_P3
  SITE 320: note = Tnp_P4
  SITE 332: note = Tnp_P5
MSTPDEVNVWIGLDVGKEDHFADVLDDEGVSLFARSIANDEADLVALLEQAARHGTPALVIDQPGSIAQLAIAVAAQQQVPVAYVPGLVMRRAADLYPGEAKTDRRDAFVIADTARTRRRSVHWLDAGNDEMLDQLRVLNGFDVDLAADLTRLTNRLRDSLVAISPALELAIGSRLHQAGVRDLLAKFPTPTALRAAGRTRIATAVKKRSPRVATKVADAVTAALDAQTVTMPAETAVGRVVAELAVELDRLHGRRDALAAEIEEVFLAHPFGQVLVTLPGIGPRTGARILAEIGDGTRFANGSKLASYAGLAPVTRQSGTSIRGESQSRRGNHRLKNAMFLAAFASLRSPDSKAFYDRKRGEGKKHNAAIICLARRRCDVILAMLRNLEPYRATTQDDTPIAA

SEQ ID NO: 16843 - protein, 338 aa, unidentified
  source 1..338: note = protein_9eeb9ec
  REGION 6..148: note = RuvC_domain
  SITE 9: note = RuvC_P1
  SITE 52: note = RuvC_P2
  SITE 87: note = RuvC_P3
  SITE 89: note = RuvC_P4
  SITE 92: note = RuvC_P5
  REGION 211..297: note = Tnp_domain
  SITE 219: note = Tnp_P1
  SITE 249: note = Tnp_P2
  SITE 257: note = Tnp_P3
  SITE 258: note = Tnp_P4
  SITE 270: note = Tnp_P5
MKITTIGLDIAKSLFHSYEINHTGRLLKKKQLKRKQLLTYFAKLQPSIVVMEACGGANYWARELIKHGHQVKLIAPQYVKPFVKGNKNDYNDAQGIAEASQRSSMRFVPIKSVEQQDLQNFHRQRERIKKERTALVNQIRGLLAEYGVVVNKGVTAVRKGLPFIIEDAENGLTVLSRELFNELLDELCTMDVLIKNCDKKINITNKSNDVCVRLGGVLGIGAITSSALYAAAGDGKDFVNGRHFSAWIGLVPRQYSTGGKPTLLGISKRGNSYLRTLLIHGARAVLRHSEKKNDRFSLWAQALLKRRGQNKACVAVANKLARMAWVIMAKGETYRPVI

SEQ ID NO: 16844 - protein, 400 aa, unidentified
  source 1..400: note = protein_249b225
  REGION 4..160: note = RuvC_domain
  SITE 7: note = RuvC_P1
  SITE 57: note = RuvC_P2
  SITE 97: note = RuvC_P3
  SITE 99: note = RuvC_P4
  SITE 102: note = RuvC_P5
  REGION 274..361: note = Tnp_domain
  SITE 282: note = Tnp_P1
  SITE 312: note = Tnp_P2
  SITE 320: note = Tnp_P3
  SITE 321: note = Tnp_P4
  SITE 334: note = Tnp_P5
MNAVGIDVSKGKSMISVMRPLGEIVANPFEIFHTPSELDNLANYLKSLDGETKIVMEYTGKYHQPISQFLIEQGFFVSIIHAKLIHDFGNNSIRKVKTDKADAIKIANYGLANWQVLSPQSREDEIRTLLKGYNRQYNQYSKTKVALKNNLNAILDQTFMHCNSLFSSPRKPDGHEKWLDFTNRFWHCECVTKYSLNAFIKIYNSWCRKNNYYQSSKKATEIYELAQSCLPTLPYNKFTKELVQLAIRQVNELAFTLAFLQKEMNLLASTLPEYSIVLNMGGVGETLGPQLMAEIGDIQRFAKKQSLVAFSGVDAPPHQSGKFEAKSRRISKRGSGNLRKTLFQVMICLLQNSLHEDPVYQFLDRKRQEGKHYYVYMVAGCNKFLRIYYARVKEYLLSKE

SEQ ID NO: 16845 - protein, 250 aa, unidentified
  source 1..250: note = protein_a0e7f8f
  REGION 5..152: note = RuvC_domain
  SITE 8: note = RuvC_P1
  SITE 55: note = RuvC_P2
  SITE 92: note = RuvC_P3
  SITE 94: note = RuvC_P4
  SITE 97: note = RuvC_P5
  REGION 212..246: note = Tnp_domain
  SITE 220: note = Tnp_P1
MKYYAGLDVSVKETSMCIVDQTGKICREVKVTSHPDDLIVVLKDPAWNMERIGLEAGPLSQWLFEGLARAGLPVICIETRHTKAFLKAQPNKSDRNDARGIAQMMRVHLYRAVHVKTLTSQKRRALLTARKLLQDKAIAIENDLRGLLRNFGLKVGVVGSAKFEARIRELVEGTLDLVEIVEPLLDARRKLREHFATLHRKLLMIARDDEVCRLLMTIPGVGPVVAVAYAATIDIPQRSKTPRQWDRSWD

SEQ ID NO: 16846 - protein, 360 aa, unidentified
  source 1..360: note = protein_e03d94f
  REGION 28..175: note = RuvC_domain
  SITE 31: note = RuvC_P1
  SITE 79: note = RuvC_P2
  SITE 120: note = RuvC_P3
  SITE 122: note = RuvC_P4
  SITE 125: note = RuvC_P5
  REGION 221..308: note = Tnp_domain
  SITE 229: note = Tnp_P1
  SITE 259: note = Tnp_P2
  SITE 267: note = Tnp_P3
  SITE 268: note = Tnp_P4
  SITE 281: note = Tnp_P5
MSKQIVSIVRPVLCEEELTVPRQASVFCGIDVSADTLSVAVLTSNQAIEQREFLNTGSEHKALIAWLGKKKALVRVSMEATGIYSMDLALALDAADGIELAVLNPKRAHDFAKSMMRRSKSDRADAAVLAEFSLRMKFMAWQRPGLSALTVRSVTRQIEAFGLEHTRGLNRLHAAQGSLGTPRCVVEDLKRVLVALERRIVTQRRTARKLIDSDEQTREQFRLLLGMPGIGEISALQILGELVLLAPDLTARQWVARSGLDPVHEDSGSSVHKPAHISRAGSRHLRRALFMPALAAVRCDPHLKAFYESLLARHKSKLQALIAVARKLLHAIYGVFKSGQPYKGKLLFPNIRLEVESIAG

SEQ ID NO: 16847 - protein, 347 aa, unidentified
  source 1..347: note = protein_488345f
  REGION 1..118: note = RuvC_domain
  SITE 16: note = RuvC_P2
  SITE 57: note = RuvC_P3
  SITE 59: note = RuvC_P4
  SITE 62: note = RuvC_P5
  REGION 180..265: note = Tnp_domain
  SITE 188: note = Tnp_P1
  SITE 218: note = Tnp_P2
  SITE 226: note = Tnp_P3
  SITE 227: note = Tnp_P4
  SITE 238: note = Tnp_P5
MLTAAQRFGDRFWAIEGCNGVGRHLAHRLVHDGETVIDVPAKLSAQVRVFATGNGRKTDPVDAHSVALAALRSPNLRRVQVDSALVALGMLADRRDELGRARTDTVNRLHRLLLELVPGGAKKFLSAMQARKLVATVKPQDPAGKVRRRLTVELIEELERIDRRIKAADKELRELVVQHGSTVMELNGIGPAGAARLLADVGDIHRFRDRGRFASWNGTAPLDASSGEQKRHRLSRAGNRRINRVLHTMATVQLRNPSAGRTYYDGRKAAGKTSMEAMRALKRRLSNVVYARMIADQRNRETASPGGQTGAATDSSATGATPKPVLRTSHNPDLPSTSLTPDLPSAP

SEQ ID NO: 16848 - protein, 390 aa, unidentified
  source 1..390: note = protein_312ca9a
  REGION 4..163: note = RuvC_domain
  SITE 7: note = RuvC_P1
  SITE 60: note = RuvC_P2
  SITE 101: note = RuvC_P3
  SITE 103: note = RuvC_P4
  SITE 106: note = RuvC_P5
  REGION 266..352: note = Tnp_domain
  SITE 274: note = Tnp_P1
  SITE 304: note = Tnp_P2
  SITE 312: note = Tnp_P3
  SITE 313: note = Tnp_P4
  SITE 326: note = Tnp_P5
MIYVGIDVAKDKHDCCILDDEGRKMDPNFTITNDKVGFDELFSRIEEVTTDKAEIKVGLEATGHYSNNLLAALVDKGFPTVVINPLHTNLYRKGLSLRKTKTDKVDAFTIAMMLMTDRTLKSYSDTSYHNEELKSLTRYRFDKVHERSKLKTSLSRLVNILFPELEKLVPSLHMNSVYTLLEELPGATYVANCHLTHLKKILEDASKGHYSRDKAIEIRNAAIDSIGAPMAAKSMELVHTIRLIRLLSDEIEEIEESIKSIIDKLDSPIMTIPGISYRMGAMILAEIGDFNRFDNADKILAYAGLSPSTYQSGQLDSSYSHMEKRGSKYLRYALFNATKFVCKWDESFGIYLERKISEGKHYNVAVSHATKKLLRTIYRMELTGEVYSPR

SEQ ID NO: 16849 - protein, 344 aa, unidentified
  source 1..344: note = protein_60d6ac1
  REGION 1..107: note = RuvC_domain
  SITE 4: note = RuvC_P2
  SITE 44: note = RuvC_P3
  SITE 46: note = RuvC_P4
  SITE 49: note = RuvC_P5
  REGION 215..301: note = Tnp_domain
  SITE 223: note = Tnp_P1
  SITE 253: note = Tnp_P2
  SITE 261: note = Tnp_P3
  SITE 262: note = Tnp_P4
  SITE 274: note = Tnp_P5
MVVDQPNTIGALPIAVARDAGCLVGYLPGLAMRKAADLYPGRSKTDRKDAFIIADTARTMPHTLRAVDRDDEVLSALKMLSGFDDDIAKDCTRTINRLRSVLTQIYPSLERALPGSVITRPLVLDMLIHYGGPTKLKKAGYHRALAWMSKRATKDPTTLVDAIFEGLKAQTVTVPGTAAAEIVIPQLATNIKALLEQRKTIAEQVEELLQDFPLSEVLMSMPGVGIKTAANILLAVGDCSDFRSAGHLAAYAGIAPVTRRSGTSIRGEFPARAGNKRLKNALFYSAFASIRFHEPSKTYYERKRAEGKRHNAAVMCLARRRCNVIYAMLTRAEFFREIPARVAA

SEQ ID NO: 16850 - protein, 342 aa, unidentified
  source 1..342: note = protein_9458dd0
  REGION 7..148: note = RuvC_domain
  SITE 10: note = RuvC_P1
  SITE 53: note = RuvC_P2
  SITE 88: note = RuvC_P3
  SITE 90: note = RuvC_P4
  SITE 93: note = RuvC_P5
  REGION 211..297: note = Tnp_domain
  SITE 219: note = Tnp_P1
  SITE 249: note = Tnp_P2
  SITE 257: note = Tnp_P3
  SITE 258: note = Tnp_P4
  SITE 270: note = Tnp_P5
MKEVSIIGLDLSKRSFQAHGALADGSVAFRKKLTREKVLGFLAEQPRCIVAMEACGSAHHWGRAIRDAGHEVRLIPPAYVKPFVKRQKNDAADAEAIAEAASRPTMRFVAVKTEEQQARAMLFRTRDLLVRQRTQLINALRGQLSEHGVVAPQGPANVAILAQAIDDMTPSLPLLVVELARVYLDQIDGLSEKVAGLEKAIACEAKRGAMTRRLQTMPGVGPITAMAIETFAPPMEVFRRGRDFAAWLGLVPVQHSTGGKQVLGKTSKMGQRDIRRLLITGAMVIVRWACRKGAQEGTWLHRMLGRKPRMLVAIALANKMARSIWAMLTKGEDYRGPVAATL

SEQ ID NO: 16851 - protein, 395 aa, unidentified
  source 1..395: note = protein_a75e90f
  REGION 4..161: note = RuvC_domain
  SITE 7: note = RuvC_P1
  SITE 60: note = RuvC_P2
  SITE 100: note = RuvC_P3
  SITE 102: note = RuvC_P4
  SITE 105: note = RuvC_P5
  REGION 266..353: note = Tnp_domain
  SITE 274: note = Tnp_P1
  SITE 304: note = Tnp_P2
  SITE 312: note = Tnp_P3
  SITE 313: note = Tnp_P4
  SITE 326: note = Tnp_P5
MFIVGIDIAKRSHEAIIIAEDGQVVRKAFSFRNNCTGYNLLLEQVRKLTLVKSQIVFAMESTAHYWLALYARLLKDGYAVMVLNPIQSHSLRELYIRKAKTDARDSLIIADLVRFGRCKASNVPQDKILALRELCRSRAYLVDMAADLKRKLIALLDRIFPEYESLFDSVFSKASIAVLCKYSTPQKVKNANLRKLTDLLMESSNGHFGEWKAHQLKEAACSSFGIDDSGGVYSTLLGMFLEQILSLTAQADSLEKQISVFFQEFNNPLTSIPGVGTVLAATILSEIGDITRFSSADKLLAYAGLDPSVKQSGEFKSNQNRMSKRGSPYLRRAIWLASTVAVHRDPMFQTYYEKKISEGLHYMNVIGHVSRKMTAVIFAVLRDGQPYQPILQSAG

SEQ ID NO: 16852 - protein, 354 aa, unidentified
  source 1..354: note = protein_064629c
  REGION 8..161: note = RuvC_domain
  SITE 11: note = RuvC_P1
  SITE 67: note = RuvC_P2
  SITE 107: note = RuvC_P3
  SITE 109: note = RuvC_P4
  SITE 112: note = RuvC_P5
  REGION 208..295: note = Tnp_domain
  SITE 216: note = Tnp_P1
  SITE 246: note = Tnp_P2
  SITE 254: note = Tnp_P3
  SITE 255: note = Tnp_P4
  SITE 268: note = Tnp_P5
MAITKQSVGIDISQATFTVCLCQRSEDGKLTFSKILTFGNDSKGFNQLLRWAKGVIASGPELVFLMEATGVYYENLAHHLHKIKKAVHVVLPNTSKHYFSSLNVKTKTDAVDARVLSQFGVERTHKLWNPPPAALLQLRNLTRYYVQLQEQKTALGNIKQSKDASHEVQSFILKSNKKLIAEIDKEIAKTLKEIKRLVETDNSLKEKIRKLSTIKGVGLITIATILAETMGFEQFKSAKQLVSYAGYDVVQRESGTSIKGKTRISKKGNRYIRNALYFPAMVACRFNPTLKEIYTRINQQKPSKMIGQVAIQRKLLILIYTLWKNNTEFIEAYKESSPNPKAETTLDSSIVELL

SEQ ID NO: 16853 - protein, 345 aa, unidentified
  source 1..345: note = protein_7b593b1
  REGION 9..163: note = RuvC_domain
  SITE 12: note = RuvC_P1
  SITE 68: note = RuvC_P2
  SITE 108: note = RuvC_P3
  SITE 110: note = RuvC_P4
  SITE 113: note = RuvC_P5
  REGION 209..296: note = Tnp_domain
  SITE 217: note = Tnp_P1
  SITE 247: note = Tnp_P2
  SITE 255: note = Tnp_P3
  SITE 256: note = Tnp_P4
  SITE 269: note = Tnp_P5
MKKVVKQVAGIDVAQKELVITLGRMFDDFTIELFSYKVFKNNDSGIKLLVDWVNKLTDHDVPVRYVMEATGVYHQKFAYYLVDNGYEISIVLPNKISNYIRTLELKTVTDKSCSQAISQFGLERKLDKWAKPKSIYKELQQLTRERDQIVQERSMIKNQLHAENVEAIPNQRSLERMQSRIVFLNSQEKEIKQDIAALIKMNPDIKSTIERIKSIPGVGELTAVIVLAETNGFELIRSKSQLSSYAGLDVKEKQSGTSVKGKPRISKKGNRNLRKAVHLPALTAVKWDDNFRNIYARLVSKHGIKMKALVAIQRKILELIYILFKNESVYDKEYITKNSVQTQVV

SEQ ID NO: 16854 - protein, 341 aa, unidentified
  source 1..341: note = protein_b199272
  REGION 6..158: note = RuvC_domain
  SITE 9: note = RuvC_P1
  SITE 67: note = RuvC_P2
  SITE 105: note = RuvC_P3
  SITE 107: note = RuvC_P4
  SITE 110: note = RuvC_P5
  REGION 211..296: note = Tnp_domain
  SITE 218: note = Tnp_P1
  SITE 248: note = Tnp_P2
  SITE 256: note = Tnp_P3
  SITE 257: note = Tnp_P4
  SITE 269: note = Tnp_P5
MQKFTIGADISKDKINFAVRYCNEFILEMEVENNSKPLTKFIKEILAISKKYANENFHPSLIEFVMEHTGIYNTLLIACLAEHHIVTYVVPGLEIKNSLGINRGKNDRIDARRIAEYGVRFSDKLKPYSLPDKSLEKLKMLNTKRAQLVKIMSQLIESDEDTKKFLGEESYRNMRFYINPVIKELSASIKMIEEEMLSIIKIDEQLFENYQFAVSVPGVGKVIAIAFICATNNFTKFETAKALGSYCGVVPFGRESGKYRGKEMVSPIANKKLKTLLHLGARATISGNNQFTKYYQRKIMDDKKNKMLALNNLANKIVKTLFACVKNKEMYKPDYVHTLAA

SEQ ID NO: 16855 - protein, 345 aa, unidentified
  source 1..345: note = protein_ce1b039
  REGION 6..148: note = RuvC_domain
  SITE 9: note = RuvC_P1
  SITE 52: note = RuvC_P2
  SITE 87: note = RuvC_P3
  SITE 89: note = RuvC_P4
  SITE 92: note = RuvC_P5
  REGION 211..295: note = Tnp_domain
  SITE 219: note = Tnp_P1
  SITE 249: note = Tnp_P2
  SITE 257: note = Tnp_P3
  SITE 258: note = Tnp_P4
  SITE 270: note = Tnp_P5
MQITTIGLDLAKNVFQVHGVDAEGNVLIRRKLRRAQVREFFAGLAPCLIGMEACGTAHFWARELIAMGHQAKIMPPSYVKAYVRRGKNDAADAAAICEAVMRPHMRFVPVKTEEQQAALMLHKARELLVRQQTMLINAMRGHMAELGMIAPQGSAKIKDLIAVIQDDEDQSIPALARTALQPLVHQMETLDKQIEALDREIKAWHKTNETSRRLATIPGIGVITASAIAATVPDPSFFKSGREFAAWLGLTPRQNSSGGKDRLGRISKKGNTYIRRLLVTGATSMLRYARAKTAPGADWVNGLLQRRPARLVTVAMANKTARIAWAVMKKEENFRVPVPPVTEAA

SEQ ID NO: 16856 - protein, 324 aa, unidentified
  source 1..324: note = protein_27189ad
  REGION 7..148: note = RuvC_domain
  SITE 10: note = RuvC_P1
  SITE 53: note = RuvC_P2
  SITE 88: note = RuvC_P3
  SITE 90: note = RuvC_P4
  SITE 93: note = RuvC_P5
  REGION 209..263: note = Tnp_domain
  SITE 217: note = Tnp_P1
  SITE 247: note = Tnp_P2
  SITE 255: note = Tnp_P3
  SITE 256: note = Tnp_P4
MDYATLVGIDLGKQTFHVHGQDSKGKAVFRKKFGRRQLIEFLATCHSCTVVMEACAGSHFMARKLSSLGHEVKLISPQFVRPFVKSNKNDFIDAEAICEAASRPAMRFGTPKTESQQTLSVLHRVRESMVQDRTRTINQMHGFLLEFGVSLPAGKTGVPRLPEILDFHPLPPRLVAILKRLHEHFKYLQHQIGEIDRELALQLADDDAGQRLMGIPGVGPITASVLASEIGDGTQFKCGRDLQLRLALCPDSTVSAENPTFSELVAVAIATSEAFLCSAPGHTCAFLIDEPGPSRNGPARWPAGVIRTSWRARWPISWPESHGR

SEQ ID NO: 16857 - protein, 329 aa, unidentified
  source 1..329: note = protein_30c3db3
  REGION 14..158: note = RuvC_domain
  SITE 17: note = RuvC_P1
  SITE 63: note = RuvC_P2
  SITE 103: note = RuvC_P3
  SITE 105: note = RuvC_P4
  SITE 108: note = RuvC_P5
  REGION 204..288: note = Tnp_domain
  SITE 212: note = Tnp_P1
  SITE 241: note = Tnp_P2
  SITE 249: note = Tnp_P3
  SITE 250: note = Tnp_P4
  SITE 261: note = Tnp_P5
MSESPPSSLSPYWIGVDVCKDHLDAHVRPANLRRRFDNSADGIVELLAWVKAQGSGLQRIVFESTGPYQKAAVGALLAEELPAVVVNARQVRDFAKGHGKLAKTDAIDAAILAHFAQDVATVVRPLESAEIAEFRQFYDRRSQLVRMLAVEKNHRHAAEAGFVTSPRVLRNIDKSIAFLEKQIAELEKRMDAIVESSETFRAKNEILRSIVGIGPQVSRTLLVHLPELGQRTRQGIAALVGLAPYPDDSGPNRHARHIRGGRGKVRLGLYQAAIAAIRHNPSMKAFYVKLKAHGKASKVAIVAVARKILVLANALIRTMTPYRHPANSV

SEQ ID NO: 16858 - protein, 358 aa, unidentified
  source 1..358: note = protein_d0367fd
  REGION 12..165: note = RuvC_domain
  SITE 15: note = RuvC_P1
  SITE 67: note = RuvC_P2
  SITE 103: note = RuvC_P3
  SITE 105: note = RuvC_P4
  SITE 108: note = RuvC_P5
  REGION 232..317: note = Tnp_domain
  SITE 240: note = Tnp_P1
  SITE 270: note = Tnp_P2
  SITE 278: note = Tnp_P3
  SITE 279: note = Tnp_P4
  SITE 290: note = Tnp_P5
MSIVAHLYSFFIGVDTHARNHVYTIITNTGILVETRSFPTSRAGIKRAMAWAGRRTDGDLDSLWVVEGAASYGAVLTGHIAAAGYSVVEAGRMDAKARFGVGKSDELDSRRIAASVLPLDVDQLRWPRQGAGVRQALRVLLAARDAMTTERTRAINALTALVRTVDLGLDARQSLTDAQVVEIAKWRTRNEDVDVFTARAEATRLAKRALALDDDLQDNHDRLTELVEASPAAVLLAEPGVGPFSAAVCFTAWSHPGRVRDEAAFAALAGVNPIPASSGNTQRHRLNRGGDRQLNRALHTVITNRMIHDERTKNYVARHCGEGPTKKSKREIKRKLKWYLARRVFKILNGLETIPTPA

SEQ ID NO: 16859 - protein, 334 aa, unidentified
  source 1..334: note = protein_990e44e
  REGION 7..149: note = RuvC_domain
  SITE 10: note = RuvC_P1
  SITE 53: note = RuvC_P2
  SITE 88: note = RuvC_P3
  SITE 90: note = RuvC_P4
  SITE 93: note = RuvC_P5
  REGION 208..295: note = Tnp_domain
  SITE 216: note = Tnp_P1
  SITE 246: note = Tnp_P2
  SITE 254: note = Tnp_P3
  SITE 255: note = Tnp_P4
  SITE 267: note = Tnp_P5
MEKVTTLGIDLAKSVFSLHGVDGAGRVVLRRTVRRDQLLGAVAALPPCLIGMEACSGAHEWGRRFQEFGHTVRLMAPKFVAPYRKSGKNDGNDAEAICEAVTRPNMRFVPVKSLEQQALLAMHRVRQGFVVERTAIINRLRGLLCEFGVVLPLRSVTVRRQAAAAAENLPELARRAIGDLLEQLRSLDERIGGYDREIEAQAKLCEPAQRLMKIRGIGPTTALAIVATVGNAREFKNGRQFAAWIGLTPSQYSTGGKPRLGHISKRGDAYLRNLLVQGARSVLNSAGRHPDRMSRWVLDLQPRRGYYRTLVAIANKNARIAWALLAKGESMRSA

SEQ ID NO: 16860 - protein, 338 aa, unidentified
  source 1..338: note = protein_80c21fa
  REGION 6..148: note = RuvC_domain
  SITE 9: note = RuvC_P1
  SITE 52: note = RuvC_P2
  SITE 87: note = RuvC_P3
  SITE 89: note = RuvC_P4
  SITE 92: note = RuvC_P5
  REGION 211..298: note = Tnp_domain
  SITE 219: note = Tnp_P1
  SITE 249: note = Tnp_P2
  SITE 257: note = Tnp_P3
  SITE 258: note = Tnp_P4
  SITE 270: note = Tnp_P5
MKITTIGLDIAKTEFHLFAVNREGRLVKKKQLKRKALLAHITKFEPCLIVMEACGGANYWAREFIALGHEVKLIAPQYVKPFVKGNKNDYNDAQAIAEAAQRPSMRFVPIKSIEQQDVQNFHRQRERIKKERKALVSQIRGLLAEYGVVINLGVAAVRRDLPLILENADNGLTALSRELFAELFEELQSVEERFKQCERRIKTLNKENEICRRLDEVLGIGPIIASATYAAAGDGKEFVNGRHYSAWLGLVPGQHSSGGKPTLLGISKRGNAYLRTLYIHGARSVLRHSANKTDRFSRWAQALLARRGHNKACVAVANKLARIAWVIMAKGETYRPAV

SEQ ID NO: 16861 - protein, 392 aa, unidentified
  source 1..392: note = protein_3e5caee
  REGION 5..163: note = RuvC_domain
  SITE 8: note = RuvC_P1
  SITE 62: note = RuvC_P2
  SITE 102: note = RuvC_P3
  SITE 104: note = RuvC_P4
  SITE 107: note = RuvC_P5
  REGION 267..356: note = Tnp_domain
  SITE 275: note = Tnp_P1
  SITE 305: note = Tnp_P2
  SITE 313: note = Tnp_P3
  SITE 314: note = Tnp_P4
  SITE 327: note = Tnp_P5
MQPVVGIDVAKGCSVIQAFKKRNEPYGKMETLQHGEEGFERLGEVLSILKETSGVEPVVVFEATGHYHRGLAGYLKRSGWIHYIINPLQAKRSKGTQLRKVKTDAADAWHLAEMYYRGDVKAHREWEESYSELQHLTRQHEFVTAMYVQAKLNSRALLEQVFPDFIGVFCNLYATTSLKVLQRCLENNTENVEGLIQECVGRSHSKRWIAEKTERLRELMGGWNRQSRSRSQTVALASMVVLLLEFDNQLSHLEKQMEALAMELPEVGLVKSIPGIGGKLDAAIVAELWNASQFQDAKQLVAYAGLDPGIYSSGKFTSTSSRITKRGSKRLRRALYLAVQCGIRKAANRRLKEYYDKKRKEGKPYKVVVIACANKLLHHVYAILKKGEPYTH

SEQ ID NO: 16862 - protein, 343 aa, unidentified
  source 1..343: note = protein_2f5879b
  REGION 6..147: note = RuvC_domain
  SITE 9: note = RuvC_P1
  SITE 52: note = RuvC_P2
  SITE 87: note = RuvC_P3
  SITE 89: note = RuvC_P4
  SITE 92: note = RuvC_P5
  REGION 211..295: note = Tnp_domain
  SITE 219: note = Tnp_P1
  SITE 249: note = Tnp_P2
  SITE 257: note = Tnp_P3
  SITE 258: note = Tnp_P4
  SITE 270: note = Tnp_P5
MNIASVGIDLGKTTFHLVALDGHGKVVSKKKFSRKQLLVYTANLQPALVGIEACSGAHFIGAALRRQGHDVRLIPAQFVKPFVKSNKNDFIDAEAIAEAVTRENMRFVPIKTDDQLDLQALHRVRDRLVHRRTAVINQIRGLLLERGITFAKGPAKLRNQIPALLEDADQNLTPRLRNLLGRVWQEWKQLQSDIEGVSQEIEVISSEDAACQRLRQIPGVGPLVATATVAAIGNGAAFHKGREFAAWLGLVPRQHSTGGKARLFGISKRGNIYLRRMFIHGARAVLLRVKYDTGGLGRWVHQLEARAPRNVVTVAIANKLARIAWAVLAKGEDYRAAAAVGAA

SEQ ID NO: 16863 - protein, 419 aa, unidentified
  source 1..419: note = protein_0cc0850
  REGION 11..159: note = RuvC_domain
  SITE 14: note = RuvC_P1
  SITE 65: note = RuvC_P2
  SITE 99: note = RuvC_P3
  SITE 101: note = RuvC_P4
  SITE 104: note = RuvC_P5
  REGION 254..344: note = Tnp_domain
  SITE 262: note = Tnp_P1
  SITE 295: note = Tnp_P2
  SITE 303: note = Tnp_P3
  SITE 304: note = Tnp_P4
  SITE 315: note = Tnp_P5
MAFKIFRKNCCGLDVHKTWIHACIGITDTNGRTEYKQARFSSFTKGLQKLADWLAKYDCNDVCMESTGKFWIPVFNILEKTCWVTLAYPKYTKPQKGNKTDHKDAKWICDLYMCDMVNPSFIPPPDIRQLRDLMRYRSKLTNIMTSEKNRALNCLTVSNLKLDDVFSDVFGKSSRSVIRYILEHPGETFQVAPFIDRRCKHPVEEIQAVIDGTISHQQAVKLRECLQHLDELEVHKTNVEKEILCLVRQYPYQLELLQTVPGFSGNIMTAIALISEIGADMSVFPSAKHLVSWAGCCPRNDQSSKKVKSTRISRAGVYLKPLLVQVANAVVKSDKYPECKERYRRIKARRGHKKAIIAVCRMLLTAIWNILSKLEPYSAAGYLEDKLTEHSVVISKAQRLELLRKRGYIFKDEVDPAPA

SEQ ID NO: 16864 - protein, 359 aa, unidentified
  source 1..359: note = protein_e1a47f7
  REGION 7..153: note = RuvC_domain
  SITE 10: note = RuvC_P1
  SITE 55: note = RuvC_P2
  SITE 93: note = RuvC_P3
  SITE 95: note = RuvC_P4
  SITE 98: note = RuvC_P5
  REGION 217..303: note = Tnp_domain
  SITE 225: note = Tnp_P1
  SITE 255: note = Tnp_P2
  SITE 263: note = Tnp_P3
  SITE 264: note = Tnp_P4
  SITE 276: note = Tnp_P5
MLNVTRVGVDLAKNLIQVCALDASGKVLANKSLPRDKFLAWCTEQLPPECLVAMEACSGSHHWARELNKRGFTAKIISASLVEPYRMEGKGGKNDANDAFAVSEAAARPKMRFIPVKSRQQQGLLCVHRIREGFKEERTGIINRIRGLIAEFGLVVSKSPEKLRESLQDLLEDAENGLDWLARLAVQELSTHWEAIDQKIDWCDRRINAHIAEDTQAKAAMQLMGVGPITASAVVTTVVDFKQFKNGAQFGAWLGLTPRQNSSGGKTKLGKITKRGDTYLRTLLIQGAKSAVMSAHKREDPISKWLFELKEKAGWQKAAVAMANKNARILWAVMTKGTAFDPRHVSLKPTGEISPAMAM

SEQ ID NO: 16865 - protein, 331 aa, unidentified
  source 1..331: note = protein_76d005e
  REGION 2..141: note = RuvC_domain
  SITE 43: note = RuvC_P2
  SITE 81: note = RuvC_P3
  SITE 83: note = RuvC_P4
  SITE 86: note = RuvC_P5
  REGION 201..287: note = Tnp_domain
  SITE 209: note = Tnp_P1
  SITE 239: note = Tnp_P2
  SITE 247: note = Tnp_P3
  SITE 248: note = Tnp_P4
  SITE 260: note = Tnp_P5
MKETAVSIRRDGKRIWRGKCASDPKLIAELIRKRAPAVRRMVFETGPLSVWFYHALCAEGVPAICIDARHAKAALDMAPNKTDANDADGLAHLAEVGFFREVRVKGFDSMLTRTLVAARTRLVRITIELSNQIRGVMKTFGLVVPAGKGSMFERNVRGLLVDHEQLAAIILPLLDAWRSVRIRAADLGRQLIRDARESQACCLLMSIPGVGAITATSFVTAVEEPDNFRKSRNVGAWIGLTTRRYQSGEVDYDGHISRRGDNHLRGLLYEAASVILARSKKESALRTWGLRLRERLGFKRAAVAVARKLAVIMHAMLKTGEFFDPNAGAAA

SEQ ID NO: 16866 - protein, 418 aa, unidentified
  source 1..418: note = protein_5e5525a
  REGION 10..174: note = RuvC_domain
  SITE 13: note = RuvC_P1
  SITE 67: note = RuvC_P2
  SITE 113: note = RuvC_P3
  SITE 115: note = RuvC_P4
  SITE 118: note = RuvC_P5
  REGION 292..378: note = Tnp_domain
  SITE 299: note = Tnp_P1
  SITE 329: note = Tnp_P2
  SITE 337: note = Tnp_P3
  SITE 338: note = Tnp_P4
  SITE 351: note = Tnp_P5
MTQELSTLYVGIDVSKESNYVYITDFHQSFHQSFNTVNNIHGAELIETKLLEILYDSDYSNITCVLESTGIYSAHIATYLSASEKLFRYNVLVYCINPKISRNYRASFSDMDKTDPKDSYILADIARVGRTKGLTPFKGSQKLALQRLTRHRVHLAELLSKEKTYVLTNIYLKFSEFGKPDAKFTSNNWSNTALSVLEEFSSPEEIVNTSLEDLVAFIMKSSKNRFSNPEDVATLLKKAARASYRLDKVAYEPINYAISSSLIIIRTYETEIKKINQSIEELMRGFAINEYISLRSIPGIGPVYAAGILSEIGSIHQFKNEESLAKYAGITWRKNQSGKFEADDTSMTKTGNHYLRYYLIEATNLVKNYVSSYNTYYQKKYNEVNNHQHKRALALTTRKLIRLIYGLMSNGQLFNKNY

SEQ ID NO: 16867 - protein, 343 aa, unidentified
  source 1..343: note = protein_656a0cf
  REGION 7..149: note = RuvC_domain
  SITE 10: note = RuvC_P1
  SITE 53: note = RuvC_P2
  SITE 88: note = RuvC_P3
  SITE 90: note = RuvC_P4
  SITE 93: note = RuvC_P5
  REGION 211..298: note = Tnp_domain
  SITE 219: note = Tnp_P1
  SITE 249: note = Tnp_P2
  SITE 257: note = Tnp_P3
  SITE 258: note = Tnp_P4
  SITE 270: note = Tnp_P5
MTKDTMIGVDLAKAVFQLHTASMTGEPKFRRKLSRRSFPKFMAEQPPAMVVMEVCGSAHYWAREMTKLGHEVKLIAPRYVKPFVKRQKNDAADAEAIVVAAQRPEMRFVDPKSAEQQSRAILFRARERLVHQRTELVNALRACLYEYGHLVPQGIHQITRIAEILNAPNNDLPDLMREECRDLLEQIAEQTLRINARTAKIKVLAAEADTARRLQTIPGVGPLTALAVEAFAPPMESFSCGRDFAAWLGLVPRQFSSGGKERLGRTSKAGQADIRRLLIIAAMSRLNWMGCKSIPDDSWLARMVARKPRMLVAIALANKTARTIWAMMTKNEDYRDPAQAVAA

SEQ ID NO: 16868 - protein, 341 aa, unidentified
  source 1..341: note = protein_791f60f
  REGION 6..148: note = RuvC_domain
  SITE 9: note = RuvC_P1
  SITE 52: note = RuvC_P2
  SITE 87: note = RuvC_P3
  SITE 89: note = RuvC_P4
  SITE 92: note = RuvC_P5
  REGION 211..297: note = Tnp_domain
  SITE 219: note = Tnp_P1
  SITE 249: note = Tnp_P2
  SITE 257: note = Tnp_P3
  SITE 258: note = Tnp_P4
  SITE 270: note = Tnp_P5
MQITTIGLDIAKNVFQVHGIDAAENVVVRKQLRRGQVIAFFKALPPCLIGMEACATSHYWARELAKLGHEVRLMPAKDVKAYIKRNKNDAADAEAICEAVRRPTMRFVEVKSAEQQAQLMQHRARDLLMRQRTQLINAMRSHLAELGIIAPQGREGVKELLAIISIEDDKHLPNDARASLIVLAAQLQALQTTIGAIEKRIVVQHRAKKESRRLQTIPGIGIIGASAIAATVTNPKIFRSGRDFAAWIGLVPRQMSTGGKPKLGPISKQGDRYLRRILVVGAVSVLRRAKNNPEKFPWITQMLTRRPFKVVAVALANKMARVAWALMMSGNTCRAARFATT

SEQ ID NO: 16869 - protein, 298 aa, unidentified
  source 1..298: note = protein_cb3092f
  REGION 1..50: note = RuvC_domain
  REGION 160..260: note = Tnp_domain
  SITE 168: note = Tnp_P1
  SITE 198: note = Tnp_P2
  SITE 206: note = Tnp_P3
  SITE 207: note = Tnp_P4
  SITE 220: note = Tnp_P5
MYYKEDLEPYKKRGIQLLNLRNLTRQHENITGIYVQTKLQFQAVLDQVFPVYRGVFGDLYSVVSLLTLLEFPTSQSILEAGEETVTNTIKKLCPRRSIKWAKTKAIALLAAASQNPFRENLYQSHILSVEMYIKMLLEYQKHLSKFEEEIDALAKDIEEYKIIQSIPGIGEKIAATIISEIGEIERFDHPKKLVAFAGIDPSIFESGKFRGTVNRITKRGSSRLRHTLYMAVRCAIRDSRKSKTTEELIPRNKRLREFYDKKREEGKPFKVAIIACANKLLQWIYALLKSRTTFQDLA

SEQ ID NO: 16870 - protein, 393 aa, unidentified
  source 1..393: note = protein_66d0785
  REGION 4..163: note = RuvC_domain
  SITE 7: note = RuvC_P1
  SITE 60: note = RuvC_P2
  SITE 101: note = RuvC_P3
  SITE 103: note = RuvC_P4
  SITE 106: note = RuvC_P5
  REGION 266..355: note = Tnp_domain
  SITE 274: note = Tnp_P1
  SITE 304: note = Tnp_P2
  SITE 312: note = Tnp_P3
  SITE 313: note = Tnp_P4
  SITE 328: note = Tnp_P5
MICVGIDVAKDKHDCFILSSEGEVLADVFTIPNNAEGFDTLLQTIRRYTRPTDKIKVGLEATGHYSYNILGYLLDKGLATYVINPLHTNLYRKSLSLRKTKTDRVDARTIATMLMSDVDLKSYTDTAYHNEELKSLTRYRFDKVKERAKLKQSVSRLVTILFPELEKLVPTLHMASVYALLNEFPGAKQVAEAHLTHLKTVLSDASKGRYGRDMATELRDAARRSVGSVMPAKSLELQHTIRLIRELDTEIEDIEAAIEAMMNEMRSPITTIPGIGVRMGAMILAEIGDFSRFDSPDKILAYAGMSPSTYQSGQLSLSGTYSHMEKRGSRYLRYALYNATKYVCLWDPTFATYLAKKRTEGKHYNVAISHAAKKLVRLIYAMEISRRPYTSAA

SEQ ID NO: 16871 - protein, 404 aa, unidentified
  source 1..404: note = protein_53a189d
  REGION 4..160: note = RuvC_domain
  SITE 7: note = RuvC_P1
  SITE 57: note = RuvC_P2
  SITE 97: note = RuvC_P3
  SITE 99: note = RuvC_P4
  SITE 102: note = RuvC_P5
  REGION 270..356: note = Tnp_domain
  SITE 278: note = Tnp_P1
  SITE 309: note = Tnp_P2
  SITE 317: note = Tnp_P3
  SITE 318: note = Tnp_P4
MVYLGIDWAEAHHDVCLLDEAGTRLGRARVPDGIEGLARIHELVGAHTSNPETVVVGIETDRGLLVQGLVATGYQVYALNPFAVSRYRDRHTVSRAKSDPGDAKVLADLVRTDRQNHRPLAGDSELAESLKVLARTHQTLVWARVRHVNQLRSALREFYPAALDALGTDLAGRDALALLGRAPTPEQGRRLSLTQLRTALKRGGRERGVAARAAQLQRALRTPQLQPPARLAGAYGSSVRALVHVLGEFNAQIAALEAELAEAFEDHPDAEILRSLPGLGVVLGARVLAEFGDDRTRYQDARARRCYAGSAPITRASGTRLVVLARVARNRRLADALHMWAFCTLTQSPGARSYYAAHRARGHTHHQALRALGNRLVGILHGCLEHRCCYSETVAWPSLGQAVA

SEQ ID NO: 16872 - protein, 300 aa, unidentified
  source 1..300: note = protein_843e796
  REGION 1..72: note = RuvC_domain
  SITE 10: note = RuvC_P3
  SITE 12: note = RuvC_P4
  SITE 15: note = RuvC_P5
  REGION 176..263: note = Tnp_domain
  SITE 184: note = Tnp_P1
  SITE 214: note = Tnp_P2
  SITE 222: note = Tnp_P3
  SITE 223: note = Tnp_P4
  SITE 236: note = Tnp_P5
MRKNNVRKTKTDKVDTFVIAKTLMMQDDLRFITFFDLDMMDLKALGRFRQKTIKQRTRLKIQLTTYVDQVFPEIQYFFKSGLHQNAVYALLKEAPSPKEIASMHMTHLANLLKVNSHGHFTKEQAKELRVLAQKSVGANDSAISIQITQTIQQIELLDSQLEKIEAEMTDIMKFNDSVIMTIPGIGYINGGMILGEIGDIHRFSNPNKLLAFAGLDPSVYQSGNFQAKTTRMSKRGSRVLRYALVNAAWNVVRNNATFKAYYDAKRSEGRSHYNALGHCAGKLVRVIWKMLTDEVEFNLE

SEQ ID NO: 16873 - protein, 341 aa, unidentified
  source 1..341: note = protein_7073cb4
  REGION 7..149: note = RuvC_domain
  SITE 10: note = RuvC_P1
  SITE 53: note = RuvC_P2
  SITE 88: note = RuvC_P3
  SITE 90: note = RuvC_P4
  SITE 93: note = RuvC_P5
  REGION 212..299: note = Tnp_domain
  SITE 220: note = Tnp_P1
  SITE 250: note = Tnp_P2
  SITE 258: note = Tnp_P3
  SITE 259: note = Tnp_P4
  SITE 271: note = Tnp_P5
MEKVSTIGLDIAKQVFQVHGIDTNGAIVFRRKLRRNDVMAFFTALPPCLIGIEACATGHHWGRVLVALGHEVRLMPASYVKPYVKRQKNDATDAEAICEAVTRPTMRFVPVKSEEQQSVLMAHRVRELLIRQRTMLVNALRGHLAEFGIVTRQGTAGVGTLIELVEDKNCELIPPTARTAILPLVAQLREAHQKISEMDRQIQAWHRSNELSRRLETIPGIGPITASAIATTVTDPTLFKSGRQLAAWLGLVPRQNSSGGKDRLGRISKQGDPYLRRLLVVGAHAVLRFCRKGKTKPTQWAAELLTRKPYNVVAVALANKMARIVWALMITGKQFDPPTAA

SEQ ID NO: 16874 - protein, 411 aa, unidentified
  source 1..411: note = protein_e4057d2
  REGION 5..163: note = RuvC_domain
  SITE 8: note = RuvC_P1
  SITE 62: note = RuvC_P2
  SITE 102: note = RuvC_P3
  SITE 104: note = RuvC_P4
  SITE 107: note = RuvC_P5
  REGION 273..373: note = Tnp_domain
  SITE 281: note = Tnp_P1
  SITE 311: note = Tnp_P2
  SITE 319: note = Tnp_P3
  SITE 320: note = Tnp_P4
  SITE 333: note = Tnp_P5
MNPVVGLDVAKGESQVQAFLDKKKPYKRSFKVAHTIEGLESLHQYLREIENLAGIRPPVVLESTGHYHTPVVQYFEERGYLLIIINPLVSYRAKSSSLRKVKTDVIDAYHLCELYYKEDLEPNKKRGIQLLNLRNLTRQHENVTGIYVQTKLQFQAVLDQAFPEYHGVFGDLYSVVSLLTLLEFPTSKDVLVVDEEALGNKIDELCTSRSRKWANTKAKKLIAAAAKNPFQTTLYQSHIMSLEMYIKMLMEYQKHLSKLDEEIGALAKEIEEYKIIQSIPGIGEKIAATIISEIGEIDRFNHPKKLVAFAGIDPSIFESGRFKGSVNKITKRGSSRLRHALYMAVRCAIRDCRKKKTTDEVIPRNKRLREFYDKKRKEGKPYKVAVIACANKLLQWIYALLQNNSTFQDLD

SEQ ID NO: 16875 - protein, 353 aa, unidentified
  source 1..353: note = protein_95bc25f
  REGION 6..166: note = RuvC_domain
  SITE 9: note = RuvC_P1
  SITE 68: note = RuvC_P2
  SITE 106: note = RuvC_P3
  SITE 108: note = RuvC_P4
  SITE 111: note = RuvC_P5
  REGION 212..299: note = Tnp_domain
  SITE 220: note = Tnp_P1
  SITE 250: note = Tnp_P2
  SITE 258: note = Tnp_P3
  SITE 259: note = Tnp_P4
  SITE 272: note = Tnp_P5
MKKIVIGIDISKEKIDATAIDIRNIHLRVNKLDYQVFENRPMGFRRMLVWARHLAEGTELQDVLFCCETTGGYDRVMCDYLYAKGLDIWRESALQIKLRSGLRRGKDDKADSLVIAEYAMRYMDKAVMYQSPSETIRELKALLLYRHKLTQEKTAKKVRMAQLKETAAKSKSMTFILRDARKGIKMLEKSIKECEKQIQEVFKSDEDLQRSYNHLKSIRGVAIVNATAMIAYSNNFKNITTANKMATYYGVARFRKKSGTSIDKKDEVKQYSSSMLRAYLTQAAECTIEEHGIYHDYYIRKKAEGKPYGVILNNIKNKLIHLAFSLIENDIDYEENHEFLRAQKRNTNENISI

SEQ ID NO: 16876 - protein, 390 aa, unidentified
  source 1..390: note = protein_9c58b94
  REGION 4..162: note = RuvC_domain
  SITE 7: note = RuvC_P1
  SITE 60: note = RuvC_P2
  SITE 101: note = RuvC_P3
  SITE 103: note = RuvC_P4
  SITE 106: note = RuvC_P5
  REGION 265..352: note = Tnp_domain
  SITE 273: note = Tnp_P1
  SITE 303: note = Tnp_P2
  SITE 311: note = Tnp_P3
  SITE 312: note = Tnp_P4
  SITE 325: note = Tnp_P5
MFYAGIDVAMDKHDCVVLDSGGNCVVEVFTFENSGNGFKTLHKVLKSCSKKPENIKVGLEATGHYSDNLLAFLNSIGYSPVLFNPLHTNLFRKGQSLRKTKTDHVDAHTIATMLRTEDLKSYSQPSYHLNELKSLTRYRSTLVSDCSRRKISLVRLCQILFPELKNLVPSLHMSSVYTLLSELPSADKVAKCNLMHLTSLLSSASKGHYGRDKAIEIREQARSSIGIRSVVKELELQQTIELIRILQQQIEAVEEEINSLMDDIDSPITSIPGIANRMAAVIIAETNNFNDFERAEQVLAFAGLDPSVYQSGQLTSTHSKMVKRGSKYLRFAIFNATKYVCHWDPTFRAYLAKKRAEGKPYNVAVSHAAKKLTRVMFHLVKTNKEFVPQA

SEQ ID NO: 16877 - protein, 339 aa, unidentified
  source 1..339: note = protein_a4bb2b2
  REGION 4..148: note = RuvC_domain
  SITE 7: note = RuvC_P1
  SITE 53: note = RuvC_P2
  SITE 89: note = RuvC_P3
  SITE 91: note = RuvC_P4
  SITE 94: note = RuvC_P5
  REGION 211..297: note = Tnp_domain
  SITE 219: note = Tnp_P1
  SITE 249: note = Tnp_P2
  SITE 257: note = Tnp_P3
  SITE 258: note = Tnp_P4
  SITE 270: note = Tnp_P5
MYYTGIDLHKKTSFITTINERGQVVKKNNLKNIPSLILKYFDDLAANTRIVIESMSSWYWLYDLLTGKGMDVIISNPAKTKAIASAKIKNDKVDSHMLAQLLRADLIPESYVSSMDTRKLKELLRHRNRLVRDTVRMKNRIHALLMKNNLQQPCSDLFGKKGLSFLYSDIDLPDYHCEQLKTYLSLYESIKTEVDHLTKRIYAMAKTSPVANLLTTIPGIGPLVAMVIVSEVEDIERFPSYQNLSSYAGLVPSLDSSGSKERMGRITKQGSPYLRTALVESAQVIARLKNCRLNIFFRRRIVRSGYAKAVTATAHKILQIVYYVWKNQTPYLEEYNVCG

SEQ ID NO: 16878 - protein, 343 aa, unidentified
  source 1..343: note = protein_78b5109
  REGION 7..149: note = RuvC_domain
  SITE 10: note = RuvC_P1
  SITE 53: note = RuvC_P2
  SITE 88: note = RuvC_P3
  SITE 90: note = RuvC_P4
  SITE 93: note = RuvC_P5
  REGION 212..300: note = Tnp_domain
  SITE 220: note = Tnp_P1
  SITE 250: note = Tnp_P2
  SITE 258: note = Tnp_P3
  SITE 259: note = Tnp_P4
  SITE 271: note = Tnp_P5
MGAIATIGLDLAKSVFQVHAVDTAGKVVARRAIRRSQLLDFFERTSPCLVGMEACASAHYWTREIGKFGHQVRIMPASYVKAYVKRNKTDAADAEAICEAVTRPTMRFVPVRSDVEQSINMMLKTRDLLTRQRTKSVNALRSHLAELGIVAGAGFKASAKLIEIVRDNTDHRLPPVARFALAEIADQIERLTEKIMKLEKVIVSSVREDDVSRRLTSIPGVGPITAAAVRALVPDPAGFRTGRDFAAWVGLTPRSNSSGGKQKLGSISKRGNPQLRSLFMVGAMAILRMSRYGATMQPWVASLLKRRPFKVVAVAMANKTARIIWALMNKGGCYEPTSAVSHA

SEQ ID NO: 16879 - protein, 329 aa, unidentified
  source 1..329: note = protein_08cead7
  REGION 9..153: note = RuvC_domain
  SITE 12: note = RuvC_P1
  SITE 58: note = RuvC_P2
  SITE 98: note = RuvC_P3
  SITE 100: note = RuvC_P4
  SITE 103: note = RuvC_P5
  REGION 197..283: note = Tnp_domain
  SITE 205: note = Tnp_P1
  SITE 235: note = Tnp_P2
  SITE 243: note = Tnp_P3
  SITE 244: note = Tnp_P4
  SITE 256: note = Tnp_P5
MTKLPKKVIGVDVGAKILTMSFQDSNNQDQVCNIENNQRSILSFLKKISSDDYCLVIEATGNYSSRILHLSLGKRFETSLINCMSVKHFARMKNIIAKTDAEDAKLIRLYGEMFRPENYIPKSTEIEYLDQEIKLLNDLEEEKRRYAVKLKALRFNPYLNPNTEKHYERRLKQLEKEIKEVELRLPQLQDEEFKEVKDLIQSVSGIGEKTSLQLMTATSGFKNFDSAKSLVKYFGLAPRIYQSGKKSYSPGKCRTSKTHIRSLLYVCSWTAMKHNVHCKELYLRLLAKGKPKKLALIAVCNKLLRICFGVVKNRIKYQQDYQKNFKILT

SEQ ID NO: 16880 - protein, 321 aa, unidentified
  source 1..321: note = protein_a3210b5
  REGION 8..146: note = RuvC_domain
  SITE 11: note = RuvC_P1
  SITE 52: note = RuvC_P2
  SITE 92: note = RuvC_P3
  SITE 94: note = RuvC_P4
  SITE 97: note = RuvC_P5
  REGION 191..278: note = Tnp_domain
  SITE 199: note = Tnp_P1
  SITE 229: note = Tnp_P2
  SITE 237: note = Tnp_P3
  SITE 238: note = Tnp_P4
  SITE 251: note = Tnp_P5
MNKYKEIYGIDISKDVFDVYGSETGHNQFKNDEQGFKSFLKHLPEGSIVVMEATGYYHYRLAQFLYKSGVSVSVVNPLSVKRFIQMKLAKVKTDKSDAKAICEYGMVNEVPLYTALTDVQSECLQLFRLLDNYLKKRTQTKNKKHGEEVLGIPSKYVYKSLQRDLKHLDKEIKGIDARLLELVKQDQQAQLTLLKSIPGMGVKTALFLIVVTDGFKKFETASQLCSYVGITPTIRESGSSVRGRSRISKVGNKKLRNLLFLCSFSACKHNKACREIYERIVAKGKSKKLALIAVSNKLLKQAFAIAKSGRPYDENFVSKLA

SEQ ID NO: 16881 - protein, 390 aa, unidentified
  source 1..390: note = protein_8adea31
  REGION 4..163: note = RuvC_domain
  SITE 7: note = RuvC_P1
  SITE 60: note = RuvC_P2
  SITE 101: note = RuvC_P3
  SITE 103: note = RuvC_P4
  SITE 106: note = RuvC_P5
  REGION 266..353: note = Tnp_domain
  SITE 274: note = Tnp_P1
  SITE 304: note = Tnp_P2
  SITE 312: note = Tnp_P3
  SITE 313: note = Tnp_P4
  SITE 326: note = Tnp_P5
MIYIGIDVAKDKHDCCILGPDAQKLYPVFSIPNTRAGFDALYEKILAVEDDAENIKVGLEATGHYSYNLLSSLLDNGLASYVINPLHTNLFRKGQSLRKTKTDKVDAYSIAMMLMTDKTLRPYSETSYHNEELKSLTRYRFDKVRERAKLKTSVSRLVNILFPELESIVPSLHMNSVYTLLAEMPGASYVASAHLTHLTSLLSKTSKGHYGRDMALCIRDAAASSIGSVMHAKSMELKHTLRLIEVLSKEIEEIETSIKEIMDTCDSPITTIPGIKYRMGAMILAEIGDFSRFDNPDQILAYAGLSPSTYQSGQLTSSYSHMEKRGSRYLRYALFNATIYVCRWDPTFQAYLEKKKSEGKHYYVAISHAAKKLVRTIYRMEMNREVFRTA

SEQ ID NO: 16882 - protein, 406 aa, unidentified
  source 1..406: note = protein_7f28e67
  REGION 4..160: note = RuvC_domain
  SITE 7: note = RuvC_P1
  SITE 57: note = RuvC_P2
  SITE 97: note = RuvC_P3
  SITE 99: note = RuvC_P4
  SITE 102: note = RuvC_P5
  REGION 269..355: note = Tnp_domain
  SITE 277: note = Tnp_P1
  SITE 308: note = Tnp_P2
  SITE 316: note = Tnp_P3
  SITE 317: note = Tnp_P4
MIFVGVDWAEAHHDVLVQDEAGKRLGGGRLPEGVEGIARFHELVGNHVDEPSDVIVGIETDRGLFVSALVGAGYQVFAVNPMSTSRYRDRHSTSGAKSDPGDAKVLADMVRTDRHNHRVVAADSGTVQAVKVLARAHQSMTWSKVRQTNLLRSTLREFYPAALVAFDDLASADALEVLRVAPTPELGRTLSRSKIASALRRGGRQRRVDERAEEVQAALRADQLTAPGMVSAAMGASVAASVAVITTMSAQIAELARELEAGFELHPDAQVVRSLPGLGTILGARVLGEFGDEPDRYSTAKSRKNYAGTSPITRASGTKKAVLARHVRNRRLADAIYLWAFAALNASPGARALYDQHRATGGSHHAALRALGNRLVGILHGCLHHHTLYDETVAWGHRKGRFPQAA

SEQ ID NO: 16883 - protein, 389 aa, unidentified
  source 1..389: note = protein_8bf637d
  REGION 4..163: note = RuvC_domain
  SITE 7: note = RuvC_P1
  SITE 60: note = RuvC_P2
  SITE 101: note = RuvC_P3
  SITE 103: note = RuvC_P4
  SITE 106: note = RuvC_P5
  REGION 266..353: note = Tnp_domain
  SITE 274: note = Tnp_P1
  SITE 304: note = Tnp_P2
  SITE 312: note = Tnp_P3
  SITE 313: note = Tnp_P4
  SITE 326: note = Tnp_P5
MIYVGIDVAKDKHDCCILGSDAEKLYPVFSISNNRAGFNELYEKIHSVETDIDQIKVGLEATGHYSLNLLGSLIDKGLTTCVINPLHTNLYRKGLSLRKTKTDKVDASSIAMMLITDKTLKPYSDTSYHNEELKSLTRYRFIKVQERTKLKVSIARLVNILFPELEKLVPDIHMASVYALLSEFPGASLIAGCHLTRLKNLLETASRGRYGRNKAIEIRTAAQASIGSVMPVKSLELKHTIHLIHVLTEEIEEVEAAIKKIVDNSASPIMTIPGISYHMGAMILAEVGDFSRFENADQILAFAGLSPSTYQSGQLESSYAHMEKRSSHYLRYALFNATKFVCKWDETFGAYLAKKIREGKHYNVAVSHAAKKLVRTIYRMELTGETYRR

SEQ ID NO: 16884 - protein, 400 aa, unidentified
  source 1..400: note = protein_e557059
  REGION 4..160: note = RuvC_domain
  SITE 7: note = RuvC_P1
  SITE 57: note = RuvC_P2
  SITE 97: note = RuvC_P3
  SITE 99: note = RuvC_P4
  SITE 102: note = RuvC_P5
  REGION 275..361: note = Tnp_domain
  SITE 283: note = Tnp_P1
  SITE 313: note = Tnp_P2
  SITE 321: note = Tnp_P3
  SITE 322: note = Tnp_P4
  SITE 335: note = Tnp_P5
MTAVGIDVSKGKSTVALLSDTGEVLKKPYDAPHTRCALSELAKLIKECKDDVCVVMEATGNYHKPIANFLCEQGLSVSVVNPKLIRDFGDNTLRKPKTDKKDAIKICRYALTYRVQLPNYSPENDERSALKILNRQYSLAEKTLTMHKNLLISYLELVFPEINKMFTSHIRNSDGHEKWIDFLVRFPHADMVAKVSLNEFRLKYKNWCKTAKYRFCESKAEELHQFARECVCAVQNDEKMRFLVKEQAKMVNQLLEHMQNIRTKMTAIAQTLPEYDTVIEMYGLGSTLAVQMMAEVGDVRRFQNRRAVTAYFGYDSESDQSGTHESKSNPMTKKGSAYLRRTLFLVMVAHMQNQPDNAVYQFLDKKRSEGKNYYSYMAAGSAKFLRIYYAKVKKVMEQIT

SEQ ID NO: 16885 - protein, 352 aa, unidentified
  source 1..352: note = protein_1ef5e1a
  REGION 5..163: note = RuvC_domain
  SITE 8: note = RuvC_P1
  SITE 62: note = RuvC_P2
  SITE 102: note = RuvC_P3
  SITE 104: note = RuvC_P4
  SITE 107: note = RuvC_P5
  REGION 226..315: note = Tnp_domain
  SITE 234: note = Tnp_P1
  SITE 264: note = Tnp_P2
  SITE 272: note = Tnp_P3
  SITE 273: note = Tnp_P4
  SITE 286: note = Tnp_P5
MNPVIGLDISKEESHGKAFLERGKPFKGTFHFEHTRDGLANLHQALKDVESVSKQRPSLILEATGHYQSPVVQFLEEHHYIYIIINPLISNRLRKSQLRKVKTDAADAYLLSELYYKEEFEPFRKRAVQLLNLRYLTRQYESLSKMCVQTKLQFQAVLDQVFPAYKGVFGAMYSGISLRFLSEFPTSHSVLQTDEDTIKAKIKAKMKELLFSKRGRSEDWINQRVQELIQSIPGIGHKIAATILSEVGEVVRFDHPKKLVAFAGIDPSVFASGKFTATRNRITKRGFRQLRYALVMAVQWGLIRSRNTRLKEFYERKRTEGKPHKVAFVACANKLVHWLHAILKSKKVFRLA

SEQ ID NO: 16886 - protein, 387 aa, unidentified
  source 1..387: note = protein_8605b96
  REGION 4..159: note = RuvC_domain
  SITE 7: note = RuvC_P1
  SITE 58: note = RuvC_P2
  SITE 98: note = RuvC_P3
  SITE 100: note = RuvC_P4
  SITE 103: note = RuvC_P5
  REGION 263..350: note = Tnp_domain
  SITE 271: note = Tnp_P1
  SITE 301: note = Tnp_P2
  SITE 309: note = Tnp_P3
  SITE 310: note = Tnp_P4
  SITE 323: note = Tnp_P5
MIFIGIDIAKSSHFASAVNSDGEVFIEPFKFSNNDEGFQKFINTFSNFNISDCLVGLESTGIYGDNLTAFLFDKGFKIGRINPIQTDSLRSSNIRKTKNDKIDTFLIAQCLMLKHYTLVTQKDIELIKLRCLCRFKSDVLKSQSKAKTQLVNCLDIAFPELANFFNGNLHIKSSYALLSKYPTAKIIANVKVKTLTNLLYSASKGHFKEDKAISLKNLAKRSIAMDNPAIGTQIKMLIEQIQMLQKQIDLLDIDISNIMEQLETTISSIPGIGIWLGAIIISEIGDINRFNSPKKLLAFAGLDPSVRQSGNFNATNTKMSKRGSKHLRYAIGRASQLIIWNDDTFYQYYSTKLAQGKSYLNAIGHVSHKLTRVIFKLLKTNTTFIKS

SEQ ID NO: 16887 - protein, 438 aa, unidentified
  source 1..438: note = protein_ace086a
  REGION 16..175: note = RuvC_domain
  SITE 19: note = RuvC_P1
  SITE 74: note = RuvC_P2
  SITE 114: note = RuvC_P3
  SITE 116: note = RuvC_P4
  SITE 119: note = RuvC_P5
  REGION 290..384: note = Tnp_domain
  SITE 298: note = Tnp_P1
  SITE 328: note = Tnp_P2
  SITE 336: note = Tnp_P3
  SITE 337: note = Tnp_P4
  SITE 350: note = Tnp_P5
MSNNVIFNLDELFISVGIDVGADFSWMSIALPNQQLVGKPYKILHSSMNSLTTAVSKIKEAEELYSLESRIFLESTGIYHYPLFCYLRDKGFNCSVINPIITKNSTNMNIRKVHNDRFDSKKAALVGLKPDLKVSLMPSDLALNCRNLCREYYDLMDNRSAYVNKLQGELRMAFPQYLGIFSKVTINTSLTLLETYTSPNAFIEADKQEIIDTIKSTARFGLTYAEKKYNAIIQAAHDANEFGYIIDSNIKRIRLYISFIRKYDEEIAGIMDALHDLVDSNEDTDFVKQIHLIETFKGAGFLSAVSLMGEIGDFSAFTKPKQLFAYFGLDPAVKQSGKFEGTKVQMSKRGSAIARRVIHVLTLQSISTSRTGEAKNPVLRDYYLKKCESKTKLVAMGAVSHKVCNMIFAILRDNKPFEIITPQEHIKQYNAAKCDKAA

SEQ ID NO: 16888 - protein, 393 aa, unidentified
  source 1..393: note = protein_9b78c6b
  REGION 4..162: note = RuvC_domain
  SITE 7: note = RuvC_P1
  SITE 59: note = RuvC_P2
  SITE 101: note = RuvC_P3
  SITE 103: note = RuvC_P4
  SITE 106: note = RuvC_P5
  REGION 267..354: note = Tnp_domain
  SITE 275: note = Tnp_P1
  SITE 305: note = Tnp_P2
  SITE 313: note = Tnp_P3
  SITE 314: note = Tnp_P4
  SITE 327: note = Tnp_P5
MFYLGIDIAKNTHVASLIDEKGKNIFKGFSFSNSTDGGKSLLDIIKKHVDFSDVTVGMEATGHYWLSIYSFLYDYNFHSIHVINPIQTDGWRKGTEIRKRKNDIIDSVLIADLIRYGDFVETSLSNEDLFSLRNICRMRNYLVQSTGDLKRKIICVLDQVFPEYQSIFSNTFGTTSKQLLLDFSSPADFEELSVDFLSETLQSLSRKKVGQSTAEKLINSAKNSFGITFSRESFTFQLKLLIEQIKFIEGQIKDCETKIKELMKKINSPITTIPGIGTVLGAVILSEFGDINRFDKPSQLVAYAGIDATVSQSGEYEGSHNVMSKRGSPYLRKSLFQAALVASNSDPVLKAYYQKKRAEGKHHKTCIGAVARKLCNIIYAVLKNDKPYQVPKQ

SEQ ID NO: 16889 - protein, 317 aa, unidentified
  source 1..317: note = protein_7189b12
  REGION 5..153: note = RuvC_domain
  SITE 8: note = RuvC_P1
  SITE 52: note = RuvC_P2
  SITE 92: note = RuvC_P3
  SITE 94: note = RuvC_P4
  SITE 97: note = RuvC_P5
  REGION 191..278: note = Tnp_domain
  SITE 199: note = Tnp_P1
  SITE 229: note = Tnp_P2
  SITE 237: note = Tnp_P3
  SITE 238: note = Tnp_P4
  SITE 251: note = Tnp_P5
MCKFIGIDISKQTFDVSFLEDEKWQHQVLENKPLGFKKISKILNSEDWVVMEASGSYYLPLAEYLTEKGFKVSVVNPLVIKRFSQTNLYRAKTDKKDAKTIAEYAEKYELKKWNPESENAKKLRQLYTRIEMLRKQVHQNKRQLEAFSASGFLDKILKNEINSSVRFLENKIKKLENEMNRISLEEYSETMENLQSIPGVGKQTAMMMCLITNNFEKFEHYKQLIAFVGFSPRIYQSGKSVKGKGHICKMGKSQIRKLLYLCSWSAKRWNKTCKEMYQRLKEKGKPERVIKIAIANKLIKQIFAIGKSKEKYQPNFC

SEQ ID NO: 16890 - protein, 423 aa, unidentified
  source 1..423: note = protein_707c465
  REGION 10..158: note = RuvC_domain
  SITE 13: note = RuvC_P1
  SITE 64: note = RuvC_P2
  SITE 98: note = RuvC_P3
  SITE 100: note = RuvC_P4
  SITE 103: note = RuvC_P5
  REGION 257..345: note = Tnp_domain
  SITE 265: note = Tnp_P1
  SITE 296: note = Tnp_P2
  SITE 304: note = Tnp_P3
  SITE 305: note = Tnp_P4
  SITE 317: note = Tnp_P5
MMKLKYSICCGLDVHKNVIVATIVITNADGISEYKQKSFSTFNSDIRKFHSWLIENNCYHVCMESTGKYWIPIFNYLENDIEVCLTHPKYVKAIKGKKTDKKDSKWIADLYKFDLVRCSFIPPKDFRQLREIARYRFKLVCMKSSEKNRIQNCMTVSNVGIASVLSDPFGKTATEIMSYLLTHTSDSIDEKAVRRLIKKGAKAKSDEIIEAIRGYNIESDQAKKLELARSHLEYLDSMITQSEVELYVRMKPYYKFVELVSTMPGMTELSSTIVLAETGVDMSIFDDAKHLCSWCGLSPTNNESAGKKKSVRISKAGDYLKPMMVQCALAAIKSKKQTYFAIKYGRVKKRRGHKKAIIAIARMMIVCIYHMVSEEKPFNPIDYEELMSPKNQIERVILNENNVFAYLESLGYDSSKLVKRNDN

SEQ ID NO: 16891 - protein, 278 aa, unidentified
  source 1..278: note = protein_26acc11
  REGION 6..149: note = RuvC_domain
  SITE 9: note = RuvC_P1
  SITE 54: note = RuvC_P2
  SITE 89: note = RuvC_P3
  SITE 91: note = RuvC_P4
  SITE 94: note = RuvC_P5
  REGION 213..276: note = Tnp_domain
  SITE 221: note = Tnp_P1
  SITE 251: note = Tnp_P2
  SITE 259: note = Tnp_P3
  SITE 260: note = Tnp_P4
  SITE 272: note = Tnp_P5
MKLMRIGVDLAKSVFQIHGVDCQERPVWRQRLSRERWLQAILEKAEPDCEIGLESCGGAHHWARQLEARGFRVKLIAPQFVKPYVKSNKNDANDAEAICEAMSRPSMRFVAIKTVEQQDIQAAHRIRAGLIEQRTAKANQVRGLVAEYGLIAPKELCALRRAIPCWLEDADNGLTLRFRHLLDGLWRDLRMLDERVKELDCEISGIAANEPSAQSLQQLRGVGPMIATALVAAIGDARQFANGRQFAASLGLTPRQHSSGGKDRLLGISKRGDATCEH

SEQ ID NO: 16892 - protein, 320 aa, unidentified
  source 1..320: note = protein_4702b37
  REGION 8..155: note = RuvC_domain
  SITE 11: note = RuvC_P1
  SITE 57: note = RuvC_P2
  SITE 97: note = RuvC_P3
  SITE 99: note = RuvC_P4
  SITE 102: note = RuvC_P5
  REGION 197..283: note = Tnp_domain
  SITE 204: note = Tnp_P1
  SITE 234: note = Tnp_P2
  SITE 242: note = Tnp_P3
  SITE 243: note = Tnp_P4
  SITE 256: note = Tnp_P5
MKKSKNYVGIDLSKLSFDVALCNSENKYTYHKFANNEKGFSSLLSLLNKSECICVMEASGSYYLKLATFLSTHEINVCVINALVIRRFSQMRMSRAKTDKKDAMLIAEYGRSENPGLWEPEANHTLELKQMQAYLEQLNKNRTGFILQKEAFAQNPVKSEAIEASISCVLEKIEQAIKTIECQMELIIKTHHQEMFDQLRSIPGMGGKTSLLLIVISGGFTKFEKYKQLVSYVGISPRIFESGTSVRGRSKICKMGMSKVRAMLYLCAWSAKRCNKACKDLYDRLVEKGKAKKLALIAVVNKLLKQAFAIATKKEYYSLK

SEQ ID NO: 16893 - protein, 277 aa, unidentified
  source 1..277: note = protein_73bb2d4
  REGION 6..148: note = RuvC_domain
  SITE 9: note = RuvC_P1
  SITE 52: note = RuvC_P2
  SITE 87: note = RuvC_P3
  SITE 89: note = RuvC_P4
  SITE 92: note = RuvC_P5
  REGION 211..267: note = Tnp_domain
  SITE 219: note = Tnp_P1
  SITE 249: note = Tnp_P2
  SITE 257: note = Tnp_P3
  SITE 258: note = Tnp_P4
MNITTAGLDLAKNVFQVHGIDERGNAKLCKQLKRAQVLGFFANLPPCLIGMEACASAHFWARKLSAFGHTVKLIAPQFVKPYVKSNKHDAADAEAICEAVARPNMRFVPVKNPEQQALLGLHRARQGFVAARTAQANQIRGLLAEFGIVFAKGIGCVTRKMPEVLEDAENGLPGTSRELFSRLFSHFRELDRQVKELEGQIQAWHHEDTASLRLQAIPGIGPLTASALVASIADARMFKNGRQLAAWLGLVPRQSSTGGKLSCLASANVEISTCACC

SEQ ID NO: 16894 - protein, 345 aa, unidentified
  source 1..345: note = protein_638ba0b
  REGION 7..149: note = RuvC_domain
  SITE 10: note = RuvC_P1
  SITE 53: note = RuvC_P2
  SITE 88: note = RuvC_P3
  SITE 90: note = RuvC_P4
  SITE 93: note = RuvC_P5
  REGION 212..300: note = Tnp_domain
  SITE 220: note = Tnp_P1
  SITE 250: note = Tnp_P2
  SITE 258: note = Tnp_P3
  SITE 259: note = Tnp_P4
  SITE 271: note = Tnp_P5
MKEVTTIGLDLAKQVFQVHGVDADGAPLFNRKLRRAEVLRFFERLPPCLVGIEACASAHYWAREISVFRHDVKLLPPQYVKPFVKRGKTDAADAEAISEAVTRKTMRFVPVKTAEQQAAVMVLKTRALHVRQRTQAINALRAHMGELGIIAPTGIANVKALAAIIRDEDDARLPPAARFALTEIVDQIEMLAARIDKLEREIVVQARRDDDMRRLTTIPGVGAIIATAVKAFVPDPAGFKSARHFAAWIGLTPKAHSSGGKERLGQISKMGNRDLRSLLTTGAASVLRHVRYHDRVWPWLKGMLGRRPFKVVAVALANKIARMIWALLNKGGVYRNPITADSAPA

SEQ ID NO: 16895 - protein, 403 aa, unidentified
  source 1..403: note = protein_39e58d2
  REGION 4..160: note = RuvC_domain
  SITE 7: note = RuvC_P1
  SITE 56: note = RuvC_P2
  SITE 97: note = RuvC_P3
  SITE 99: note = RuvC_P4
  SITE 102: note = RuvC_P5
  REGION 267..353: note = Tnp_domain
  SITE 275: note = Tnp_P1
  SITE 306: note = Tnp_P2
  SITE 314: note = Tnp_P3
  SITE 315: note = Tnp_P4
MLLIGVDQSHKEHEVCIIDVTGCQLARLSVPHSASGFRRLHECCQMLQTPPRECLVALESDHSLVVDYLLDHQYQVYVIPGKAVDRYRDRHRQSGSCSDKSDAAVLAHILRTDRELYTPWEADMPLTRQIRSQVKALLNLKRAVVRFGNQLRALLWRYYPLAAELFSDLDTQIALQFIQAYPTPQAAQRLTRAQFTAFCHAHQYRRSDYITRRYAQLLNAQTYASPDVAAAYAGQAQTLARVLGFLAAERDATQKELTHSFEQHPDGHIFASLPGAGQFLAPALLAKFRDCRARFPTAAVAQAIAGTSPVTSQSGKKRRVLFRQACDREFRYFATQLARTSVKEASWAAAYLATVRPRCDKASQAYRRLANRWIAIIWRLWMDRVEYDESIHLRNRFTNRTPS

SEQ ID NO: 16896 - protein, 344 aa, unidentified
  source 1..344: note = protein_a521d38
  REGION 6..148: note = RuvC_domain
  SITE 9: note = RuvC_P1
  SITE 52: note = RuvC_P2
  SITE 87: note = RuvC_P3
  SITE 89: note = RuvC_P4
  SITE 92: note = RuvC_P5
  REGION 211..298: note = Tnp_domain
  SITE 219: note = Tnp_P1
  SITE 249: note = Tnp_P2
  SITE 257: note = Tnp_P3
  SITE 258: note = Tnp_P4
  SITE 270: note = Tnp_P5
MEITTIGLDLAKSIFQVHGVDAAGKAVVRKALRRSQVLPFFERTPRCLVGIEACGTSHHWARELIALGHDVRLMPPAYVKPYVKRGKTDAADAEAICEAVTRPTMRFVSVKSRDQQAALSMHRTRNLLVKQRTQLVNMMRGLLAEFGIDIPKGLERALMMARGIVDGAAPDVPPEAVKIIGILSQQALDVHVRLREIDRDLLVWQRSSDVARRLITIPGIGPVGATAFAATVGDASQFRSGRQFAAWLGLTPLQMSSGGKERLGRITKMGDKYLRKLLIVGMTSLVRRAKYKPETVDPRLADLLARKPVRVATVAMANKAARVIWAIMTRGETYRSGHVPALAA

SEQ ID NO: 16897 - protein, 328 aa, unidentified
  source 1..328: note = protein_a932b15
  REGION 6..149: note = RuvC_domain
  SITE 9: note = RuvC_P1
  SITE 57: note = RuvC_P2
  SITE 95: note = RuvC_P3
  SITE 97: note = RuvC_P4
  SITE 100: note = RuvC_P5
  REGION 200..287: note = Tnp_domain
  SITE 208: note = Tnp_P1
  SITE 238: note = Tnp_P2
  SITE 246: note = Tnp_P3
  SITE 247: note = Tnp_P4
  SITE 260: note = Tnp_P5
MKNIFIGIDISSKTLDLCIKKDGQVAYSTIGNTIKECDKFFKKYAAIKDAAIYVAMENTGRYNYNLYEALEGFSFLVYVINPIHIKKSLGLVRGKNDRIDAERITLFIEKNHMDLPQWKPSTESIKQLKVLQAERKYRVKIKSGLLRQRSDYKVMNANGMDKELLKLNESLIRNIDAQISKIEAKIQFIIGNDERLREQVNRIRTIPGVGKVLAWMVLSKTEGFTKIDNPRRMACFAGVVPFEHQSGTSLKYRPRVSIFADKELKKVLHLAAMSAIRLENDLRVYYLRKIEEGKNKMSILNAIRNKIIHRIFALIKNQTFYKNDLVVS

SEQ ID NO: 16898 - protein, 339 aa, unidentified
  source 1..339: note = protein_deb09e5
  REGION 6..148: note = RuvC_domain
  SITE 9: note = RuvC_P1
  SITE 52: note = RuvC_P2
  SITE 87: note = RuvC_P3
  SITE 89: note = RuvC_P4
  SITE 92: note = RuvC_P5
  REGION 211..297: note = Tnp_domain
  SITE 219: note = Tnp_P1
  SITE 249: note = Tnp_P2
  SITE 257: note = Tnp_P3
  SITE 258: note = Tnp_P4
  SITE 270: note = Tnp_P5
MKLSVVGIDIAKRVFQVHWVETESGEVVSVQLKRERFLEHFANRAPCLIGMEACGGSQHWARELQKLGHQVKLLSGRMVKPFVGGNKNDAADARAIWTAMQQPGIKSVAVKSEAQQAILALHRMRAQLVKFRTAQINGLRGLLTEYGEVMPQGRAGIERDIPAALGRLAQRLPAVVIDTLREQYARLGQLDQQVQSIERRLRQWHSEEPASRRIAEIPGVGVLTATAAIATMGDARVFKSGREFAAWLGLVPRQSGTGGRVRLLGISKRGDTYLRTLLIHGARAAMTHSKEPSQWAKGIAERRPKNVAIVALANKMARTIWALSAHGRAYQSGYVSRPM

SEQ ID NO: 16899 - protein, 431 aa, unidentified
  source 1..431: note = protein_d4124eb
  REGION 12..177: note = RuvC_domain
  SITE 15: note = RuvC_P1
  SITE 70: note = RuvC_P2
  SITE 116: note = RuvC_P3
  SITE 118: note = RuvC_P4
  SITE 121: note = RuvC_P5
  REGION 296..382: note = Tnp_domain
  SITE 303: note = Tnp_P1
  SITE 333: note = Tnp_P2
  SITE 341: note = Tnp_P3
  SITE 342: note = Tnp_P4
  SITE 355: note = Tnp_P5
MLKINPLSTLYVGIDVSSKSNYVCALDFFKNKYINSSFANNQPGAEELALKILECLNQHPDLTMVVAALESTSVYSIHIANYLSSCEELMRFKPYVFVLNPKCTANYKKSYIGLGKSDPIDAFVIADYARAGNIESEPWRGSQFLALKRLTRHRLHLVECMTREKTYLISNLYLKFSELQMLEGDDQPFCDIYGATSSSVLMEYLSPEEILASSEENLIAFLAEKSRNRIKDISKTADLLKKAARDSYRLDKALYEPLNVSIASSFNCIETFKREIKVIDNAIEKEIKGLNPNAFIILQSIDGIGPVFAGGIIAEIGDITAFHSSDALAKYAGLTWKSNQSGDFYGEDTPMIKAGNRYLRYYLGEAANSMRKHNVEYGAYYRKKYNEVPKHQHKRALALTSRKFVRLVYGLLARNQLYSGVSLDTSIKDSN

SEQ ID NO: 16900 - protein, 302 aa, unidentified
  source 1..302: note = protein_591c089
  REGION 2..107: note = RuvC_domain
  SITE 12: note = RuvC_P2
  SITE 47: note = RuvC_P3
  SITE 49: note = RuvC_P4
  SITE 52: note = RuvC_P5
  REGION 171..255: note = Tnp_domain
  SITE 179: note = Tnp_P1
  SITE 209: note = Tnp_P2
  SITE 217: note = Tnp_P3
  SITE 218: note = Tnp_P4
  SITE 230: note = Tnp_P5
MGQQPSCLIAMEACSGAHHWAREFAAIGHEVRLIPPAYVKPFVKRQKNDAADAEAICEAAQRPNMRFVAVKSEEQQAAGMVFRTRDLLVRQRTQLVNAIRGHLSEYGWVAPKGRAYVTMLGDLLDEELGAALPPAAKAMLEVMTDMLRHLDDKIADLDKEIDRRASADAVCRRLMTIPGIGPIAATALVALAPPAETFRRGRDFAAWLGLTPVQRSTGGKTRLGRTSKMGERTLRRLLIIGSSSCVLAASKRGAPAGSWLEGMMARKPRMLTVVANANKMARIVWALLTREENYKAPAPAMA

SEQ ID NO: 16901 - protein, 311 aa, unidentified
  source 1..311: note = protein_ba098b0
  REGION 4..163: note = RuvC_domain
  SITE 7: note = RuvC_P1
  SITE 60: note = RuvC_P2
  SITE 101: note = RuvC_P3
  SITE 103: note = RuvC_P4
  SITE 106: note = RuvC_P5
  REGION 268..308: note = Tnp_domain
  SITE 274: note = Tnp_P1
MVCVEIDVAKDKHHCFILSSEGEVLADVFTVANNRDGFETLLPRIQSCTHPTDKIKVRLEATGHYSYNILGFLLEKGLATFLINPLHTNLYRKSLSLCQTKTDRIDAQTIASMLMSNVDLKSYTDTAYHNEELKSLTRYRFDKVKERAKLKQSVSRLVNILFPELETLVPTLHMASVYAMLGEFPGARQIADAHLTHFKAVLSDASKGRYDRDKAAEIREAARRSLGSAMPAKSLELQHTIRLIRELDKEIDEIESTIKAIIDEMAPPILIIPGISYRMGAMILAEIGDITRFDSPDKLLAFRRLLTNPAS

SEQ ID NO: 16902 - protein, 348 aa, unidentified
  source 1..348: note = protein_3119f98
  REGION 7..150: note = RuvC_domain
  SITE 10: note = RuvC_P1
  SITE 53: note = RuvC_P2
  SITE 88: note = RuvC_P3
  SITE 90: note = RuvC_P4
  SITE 93: note = RuvC_P5
  REGION 212..296: note = Tnp_domain
  SITE 220: note = Tnp_P1
  SITE 250: note = Tnp_P2
  SITE 258: note = Tnp_P3
  SITE 259: note = Tnp_P4
  SITE 271: note = Tnp_P5
MDEITRIGMDTSKHVFQLHGVDPREEPVLRKRLRRGQVETFFARLAPTVVGLEACGGAHHWARVLQALGHEVKLLPPQYVKPYVKRGKNDAADAEAICEAMSRPRLRERFVPVKTPEAQTVLMLMVVRDRLVRQRTQLTNAIRGHAAEFGVVEAKGLNRIAPLLARLAADETLPELARELFAALGEEAAELEARLEAVEARLLAWHRSNETSRRLAKIPGLGPIGAAMLAMKAPDPGAFRSGRQFAAWLGLTPKDHSTAGKTRLGVITRAGDEALRSVLVAGAMAVIQQTRRGRGAPSPWLAGLLKRKEPKEAAVALANKTARIAWKLMVTGEAYDPHRLQPARAAAA

SEQ ID NO: 16903 - protein, 299 aa, unidentified
  source 1..299: note = protein_30a6143
  REGION 1..93: note = RuvC_domain
  SITE 2: note = RuvC_P2
  SITE 37: note = RuvC_P3
  SITE 39: note = RuvC_P4
  REGION 190..278: note = Tnp_domain
  SITE 198: note = Tnp_P1
  SITE 229: note = Tnp_P2
  SITE 237: note = Tnp_P3
  SITE 238: note = Tnp_P4
  SITE 249: note = Tnp_P5
MESTGKNYIPVYNALEGFISNVVVTNPKWGKAIKGKKDDKWIADLFKFGIVRSSYIPEKDIRILREFTCYQYKLVNMRSSEKNRFQNALTTGNCKLDLVFTDVFGKSASSIVDTILSNDPYTSEDILSKVHGRCKASHEDILSTVDGIQLNQFQKARIQIVQKHMEYLDSLLNEIQHHIDLMVANYEDYIQLLCTIPGINRKSAITIISEVGTDMSQWSSHRKLAAWAGLAPGCNQSAGKKKSVKISKAGVYLKPCLVQVAHAAIKDKKCDYYLTKYTKISKRHDKQLQEKYLLLSITF

SEQ ID NO: 16904 - protein, 339 aa, unidentified
  source 1..339: note = protein_b0819a8
  REGION 6..148: note = RuvC_domain
  SITE 9: note = RuvC_P1
  SITE 52: note = RuvC_P2
  SITE 87: note = RuvC_P3
  SITE 89: note = RuvC_P4
  SITE 92: note = RuvC_P5
  REGION 211..296: note = Tnp_domain
  SITE 219: note = Tnp_P1
  SITE 249: note = Tnp_P2
  SITE 257: note = Tnp_P3
  SITE 258: note = Tnp_P4
  SITE 270: note = Tnp_P5
MTNTVVGVDIAKSVFQIHEVSSVTGEVVSIQVKRARFLQYFANRKRSLIGIEACGGAQHWARQLTAMGHTVKLLPAQMVKPFACGNKSDMADAKAIWIAVQQPGIREAAIKTEAQQAVLALHRMRQQLVKFRTAQINALRGLLTEYGEVMPLGRDALAKMLPGVFARVAERLPAVLIETLREQYARIRQIDEQVSEIERRLREWHKEDEACKRIAAIPGVGLLTATATVAAMGDPKAFKSGREFAAWLGLVPRQTGTGGRVKLLGISKRGDTYLRTLLIHGARAVLTSSKAPPEWAVNLAKRRPMNVAVVALANKMARTLWALLAYQRSYQAGYAGRPV

SEQ ID NO: 16905 - protein, 343 aa, unidentified
  source 1..343: note = protein_27bbae3
  REGION 6..147: note = RuvC_domain
  SITE 9: note = RuvC_P1
  SITE 52: note = RuvC_P2
  SITE 87: note = RuvC_P3
  SITE 89: note = RuvC_P4
  SITE 92: note = RuvC_P5
  REGION 212..296: note = Tnp_domain
  SITE 220: note = Tnp_P1
  SITE 250: note = Tnp_P2
  SITE 258: note = Tnp_P3
  SITE 259: note = Tnp_P4
  SITE 271: note = Tnp_P5
MNVDVLGIDLGKNSCSVVGLDPTGRVMLRRRMRRESIVPLAAKLSGCVVAMEACCGAHHLGRLLAAQGHEVRLMSPEYVRPYVKAQKNDDRDAEAIAEAATRPTMRFVALKTEAQLDVQVLHRVRDRLVGQRTALMNQVRSILLERGIVVPQGRRSLLNALGELSAESDGDGVGPRVRLLLDDMLDQWRGLDRRIAALDDEFAGMARNDPAARRLATIPGVGVLNATALVAAIGDGRTFSRARDLSAWLGLVPRQASTGGKAKLLGITKRGSKYLRKLIIQGARAALPSLSRTATPLGNWLRGLLSRAHGNTVVVALASKLVRIAWALLRNETAFAAGGLAAA

SEQ ID NO: 16906 - protein, 341 aa, unidentified
  source 1..341: note = protein_9de754a
  REGION 6..152: note = RuvC_domain
  SITE 9: note = RuvC_P1
  SITE 53: note = RuvC_P2
  SITE 91: note = RuvC_P3
  SITE 93: note = RuvC_P4
  SITE 96: note = RuvC_P5
  REGION 211..299: note = Tnp_domain
  SITE 219: note = Tnp_P1
  SITE 249: note = Tnp_P2
  SITE 257: note = Tnp_P3
  SITE 258: note = Tnp_P4
  SITE 270: note = Tnp_P5
MPIVTVGIDLAKNVFAVHGVDEAGKAVLIKPRVSRDQLGALIAQLPPCVIGMEACSGAHYWARVFQRCGHTAKLMAPKLVAPYRMSGKRGKNDAADAAAICEAVTRPSMRFVPLKDEHQQATLCLHRTRQGFVEERTATYNRLRGLLSEFGVVLPQSPERLRLDIATHLDLLPSWARRCISDLLEHAGNIEDRLGEYDRAIAEIAREDERSKRLMQLRGIGPTTASALLASIGAGHDFRNGRQVAAWLGLTPGQHSSGGKARLGSITKAGDAYLRSLLVLGARAVMANLGDKQDRFSRWIRNLMERRGYWRAAIAIAAKNARMAWAVLKYGDDFRNEPVAA

SEQ ID NO: 16907 - protein, 334 aa, unidentified
  source 1..334: note = protein_c3b1cd4
  REGION 7..157: note = RuvC_domain
  SITE 10: note = RuvC_P1
  SITE 59: note = RuvC_P2
  SITE 99: note = RuvC_P3
  SITE 101: note = RuvC_P4
  SITE 104: note = RuvC_P5
  REGION 198..284: note = Tnp_domain
  SITE 206: note = Tnp_P1
  SITE 236: note = Tnp_P2
  SITE 244: note = Tnp_P3
  SITE 245: note = Tnp_P4
  SITE 257: note = Tnp_P5
MKYQHVVGMDIAKDSVQASCFDGTTFLDFSFPNQEKSFLKKVQKSIPKSDPSHILFVMEATGVYHLKLATALYKEGYSVAVVNPFIIKKYAEMLLKRAKTDRNDARLIAQFGFYQEVTLFAPKENLAEEITQVLKGLDQLKKERTNLKNYQEALTHHNEINSVVRDIYQKQLKEVEKAIKTLEAEAKRLVCQYAPKEYQLLLSIKGIGKCSATALLGFLQKMDRFSRGKEVASFLGLAPQISQSGKDKGKAWLSKKGNGYLRRLLYLAALSASRSNAQCRELYQRLLAKGKPKKVALIAVANKLLRQAFAVLKSGCPYDPHYLKLKSNLEVVLT

SEQ ID NO: 16908 - protein, 362 aa, unidentified
  source 1..362: note = protein_bf02287
  REGION 12..160: note = RuvC_domain
  SITE 15: note = RuvC_P1
  SITE 64: note = RuvC_P2
  SITE 100: note = RuvC_P3
  SITE 102: note = RuvC_P4
  SITE 105: note = RuvC_P5
  REGION 229..316: note = Tnp_domain
  SITE 237: note = Tnp_P1
  SITE 268: note = Tnp_P2
  SITE 276: note = Tnp_P3
  SITE 277: note = Tnp_P4
  SITE 289: note = Tnp_P5
MTNDLMALDVFGGVDTHSRTHHVAVVDGLGRELGDREFPATPAGYDALHSWLVGFGQLVLVGVEGTGSYGAGLMRTLTRAGTKLVEVDRPDRTARRAQGKSDPLDAYAAARAAASGRAAGTPKSRDGIVESIRCLRLAQRSAIKARTQCINQIRALLVNGPIDLREQMRPLSTSQMLKRLSHLRPTADFTRPDSACRLALRSLARRHGDLDREIKELHHVIADLTEQAAPELLERPGVGVQVAAQLLITAGDNPDRLGSEASFAHLAGVAPVPASSGKRQNRHRLNRGGDRAANNALYTVALVRMRYHEPTRAYVQRRTAEGLSKKDIIRCLKRAIAREMFRVLTTPSKPITQSAPPVLLAA

SEQ ID NO: 16909 - protein, 347 aa, unidentified
  source 1..347: note = protein_2b2d6e0
  REGION 13..155: note = RuvC_domain
  SITE 16: note = RuvC_P1
  SITE 59: note = RuvC_P2
  SITE 94: note = RuvC_P3
  SITE 96: note = RuvC_P4
  SITE 99: note = RuvC_P5
  REGION 218..305: note = Tnp_domain
  SITE 226: note = Tnp_P1
  SITE 256: note = Tnp_P2
  SITE 264: note = Tnp_P3
  SITE 265: note = Tnp_P4
  SITE 277: note = Tnp_P5
MGKIIPNGEIKVLGIDLAKHSFQLHGVNEKGETVLQRNFTRAKLLELMACLKPCLVAMEACGGAHFFARKFKEFGHDVRLMAPQFVKPYVKSNKNDSIDAEAICEAVQRPNMRFVPIKSVEQQDLQSLHRMRSLVVANRTASINQTRGILAEYGITLPKGADQLRTHLSEILDDSANGLTMEMRQLMGLLRDEVVHLDERIAEYDSKIKAISQQHEPCRLLMTIPGIGPLIATALIAAVGDVSVFRNGREMAAWLGLVPRQHSTGGKQRLLGISKRGDVYLRMLLIHGARAALRVSGKKEDRRSRWLVDLEKRRGANVATVALANKNVRTAWAMLKKGEKYQIQKAA

SEQ ID NO: 16910 - protein, 406 aa, unidentified
  source 1..406: note = protein_9f39cd1
  REGION 6..170: note = RuvC_domain
  SITE 9: note = RuvC_P1
  SITE 63: note = RuvC_P2
  SITE 109: note = RuvC_P3
  SITE 111: note = RuvC_P4
  SITE 114: note = RuvC_P5
  REGION 281..367: note = Tnp_domain
  SITE 288: note = Tnp_P1
  SITE 318: note = Tnp_P2
  SITE 326: note = Tnp_P3
  SITE 327: note = Tnp_P4
  SITE 340: note = Tnp_P5
MNQLYVGIDVGSKNNVAYIMLPNGDMHSRFPIENNLGGYRSTAKRIVSALESQSLTAVQIGMEATSVYGEHFVHSFREDGALGRFDRTIHVLKPKQVRKFKEAYNDLPKNDYVDAFVIADCLRFGRIRNEVYMDDYRYEALKNLTRARFYAVQNLAREKQRFGNLLFKKCSGLAQSADIKNTASSTFALMEHFETVDELANCSLEELSSFLHTASRGRFADSDETAKIIQAAARGSFRLPKTLNDSVNQAMSVSIASIRAIEKQVKDLEKAIDQMFEIIPNTLTSIPGIGKVYSAGIIAELGDINRFKSQASVAKYAGLVWSQNQSAEFEAEDTHLIKSGNRFLRYYLLEAANSVRGCDPELQRYYDLKFKEVNKHQHKRALALTARKLVRLVLRLLKDNRLYNAR

SEQ ID NO: 16911 - protein, 380 aa, unidentified
  source 1..380: note = protein_03a0bc3
  REGION 34..179: note = RuvC_domain
  SITE 37: note = RuvC_P1
  SITE 86: note = RuvC_P2
  SITE 122: note = RuvC_P3
  SITE 124: note = RuvC_P4
  SITE 127: note = RuvC_P5
  REGION 252..338: note = Tnp_domain
  SITE 260: note = Tnp_P1
  SITE 291: note = Tnp_P2
  SITE 299: note = Tnp_P3
  SITE 300: note = Tnp_P4
  SITE 311: note = Tnp_P5
MTVLSVHFCQRSKSATAGKDDPIARSKQTTPVVGGVDTHKDLHVAAVVDDNDQVLGTQSFATTRQGYKLMLTWIRSFGDLQRIGIECTGSYGAGLLRYMQVAGVDVLEVTAPDKLDRRRRGKNDDFDAQSAAHAAFAERRTVTPRSRDGMVESLRVLRVCRKTAVQARRVALQIIQTTIICAPDRLRDLLRNMTRMQLIRTLAAWRPDLTGFRDVEESYKIALKSLARRYLELHDEVADLDDMIEAIVTDLAPYLIACSGIGFTSAAQLLLTAGDNPERLRSEASFAALCGVSSVPASSGKTTRHRLNRSGDRAANSALHIIAIGRLRLDSKTKEYVARRIAQGHSKLEAIRCLKRYIAREVFNIIARRHKQINQAQIAA

SEQ ID NO: 16912 - protein, 341 aa, unidentified
  source 1..341: note = protein_901c3a9
  REGION 7..149: note = RuvC_domain
  SITE 10: note = RuvC_P1
  SITE 53: note = RuvC_P2
  SITE 88: note = RuvC_P3
  SITE 90: note = RuvC_P4
  SITE 93: note = RuvC_P5
  REGION 210..293: note = Tnp_domain
  SITE 218: note = Tnp_P1
  SITE 248: note = Tnp_P2
  SITE 256: note = Tnp_P3
  SITE 257: note = Tnp_P4
  SITE 269: note = Tnp_P5
MKKFIRIGVDLAKNYFQVHALESENGPAVTRKLKRSKMHEFFSQIEPCLIGMEACGSAHYWARELKAMGHEVLLMPPAYTKPYVKRGKNDAVDADAICEAMSRPGMRFVPIKSAEQQATLMLHKTRELLIKQRTMSVNALRSHLSEFGIVAAKGIGRVDELLDLAESDATLPAAARAGVKVLAQALEGLDKAIDDLEDEITSADAQNEMVRLLDKVPGIGKLIASVIAASVPDPSVFKSGRDFAAWLGLTPRQNSSGGKQTLGGITKQGNRYIRKLLILGGTSLLNVLGKRKGALRDWIVGLLAKKPARLVTVALANKLARILWAMMKTGECFRTEMFAKA

SEQ ID NO: 16913 - protein, 309 aa, unidentified
  source 1..309: note = protein_cdfb253
  REGION 5..147: note = RuvC_domain
  SITE 8: note = RuvC_P1
  SITE 52: note = RuvC_P2
  SITE 92: note = RuvC_P3
  SITE 94: note = RuvC_P4
  SITE 97: note = RuvC_P5
  REGION 186..270: note = Tnp_domain
  SITE 194: note = Tnp_P1
  SITE 223: note = Tnp_P2
  SITE 231: note = Tnp_P3
  SITE 232: note = Tnp_P4
  SITE 243: note = Tnp_P5
MSSWVGIDVSKNTLAVWVRPSGVNFIVCNSSEGHQALLLNLADIQVERVLLEATGGYERAVMGCLAQAGYPVVRINPRRARAFAQAMGKLVKTDPVDACVLAHLAQVIEPSACQTVSLARDELQELVRRREQVVKLRDDERRRLTLARSAVVQESLQTNISQLNEQIARLNSAIEAAAQRTDNQLVKQLGAIAGIGPVTVASLLAYLPELGQLNRRQIAALAGLAPYNNDSGQHSGKRCIKGGRASIRRVLYMATWSVIRCHSSFGARYASLRARGKCAKVALVACMRVLLIRLNAMVRDHSSWRAEAV

SEQ ID NO: 16914 - protein, 392 aa, unidentified
  source 1..392: note = protein_1ea3463
  REGION 4..162: note = RuvC_domain
  SITE 7: note = RuvC_P1
  SITE 60: note = RuvC_P2
  SITE 101: note = RuvC_P3
  SITE 103: note = RuvC_P4
  SITE 106: note = RuvC_P5
  REGION 267..354: note = Tnp_domain
  SITE 275: note = Tnp_P1
  SITE 305: note = Tnp_P2
  SITE 313: note = Tnp_P3
  SITE 314: note = Tnp_P4
  SITE 327: note = Tnp_P5
MIYAGVDIAKMDHVIGAVDETGAEVARPMPFKNSEAGFERCVAWLESVAESEDGVFVGMEATGHYWMACFAYLTAAGYRVCVVNPMQVRAMRSLKGMPGVKNDRVDAWLIAETLRQGDYDETRLATDEVQALKQLTRYHQGLKQELATVKTQAICVLDAYFPEYAGLFSDMFGSASLKVLAECPTPSEVERRRAATIAKLLSEGSRGRFGEAKAAQVKAAAKSSVGIRLGEDAASFQLKTMVSQIEFLNRTIAKVEREVAALLEEIEPNITTIPGVSTTTGAQIVAEIGDVRRFGSAASIVKYAGLNSGVDESGKFSAQGVPITKHGSPYLRRSLWLAANRARQHDDRLREFYEKKRREGKPHRVAVTAVARKLCHIVYAVMRDGEPYDPAK

SEQ ID NO: 16915 - protein, 408 aa, unidentified
  source 1..408: note = protein_b0f5be4
  REGION 4..160: note = RuvC_domain
  SITE 7: note = RuvC_P1
  SITE 57: note = RuvC_P2
  SITE 97: note = RuvC_P3
  SITE 99: note = RuvC_P4
  SITE 102: note = RuvC_P5
  REGION 274..361: note = Tnp_domain
  SITE 282: note = Tnp_P1
  SITE 312: note = Tnp_P2
  SITE 320: note = Tnp_P3
  SITE 321: note = Tnp_P4
  SITE 334: note = Tnp_P5
MNAVGIDVSKGKSMVAALRPMGEVALMPQEFLHTEVGLEQMAYAILALGEDTRVVMEATGRYHEPVAAALYACGIHVCVLNPLYIKQSGGGSIRKVKTDKADAMKIAKYALDNWVDLREYTPMDTIRQQLKLCSRQYNLYMKTVVSLQNNLISLTDKTFPGVNELFSSLERTDGHQKWMDFVMTFWHCDCICHVSENAFTERYQKWCNRKGYHFSEEKAKDIYAGSCGHFTTLPKNDNTKLLITTAARQLLAGKMTLAALRTEMTRLAKQLPEYETVRAMYGVGETTAAQLIAEIGDVRRFPRRSSIVGFAGVDPGVDSSGKHNAKSVPTTKRGSTHLRKTLYQIVCTYLKKSPIDEPVYKFLDKKRNEGKPYFVYMTAAQNKFLRIYYARVKECLETFDAHQKAAQD

SEQ ID NO: 16916 - protein, 411 aa, unidentified
  source 1..411: note = protein_7ee04d0
  REGION 5..163: note = RuvC_domain
  SITE 8: note = RuvC_P1
  SITE 62: note = RuvC_P2
  SITE 102: note = RuvC_P3
  SITE 104: note = RuvC_P4
  SITE 107: note = RuvC_P5
  REGION 273..373: note = Tnp_domain
  SITE 281: note = Tnp_P1
  SITE 311: note = Tnp_P2
  SITE 319: note = Tnp_P3
  SITE 320: note = Tnp_P4
  SITE 333: note = Tnp_P5
MNPVIGLDVSKGESQIQAFLDKGKPYRKNFSIKHDIKGLGNLLEFLHEVEKSANNQPTVVLESTGHYHYPVIQFLEEQKYVYIIVNPLISHRAKSSSLRKVKTDAVDAYHLCELFYKEELEPYKKRGVQLLNLRNLTRQQESIAEISAKTKIQLHSLLDQVFPEYRGVFGSLYSRVSLLTLLAFPTSEAVLSASESELSEKISSLCKSRSDLWAQERAKKLKKAALRNPFQNNLYQSNIFNLEMLVNLVLQYQEHLSKIANEIDSLAKEIEEYHILQSIPGIGEKIAATIISEIGEIDRFNNAKKLVAFAGVDPSVYSSGKFTASVNRITKRGSNRLRHALYMAVQSGIRDARKKKTTDEIIARNKRLREFYDKKREEGKSFRVAVIACVNKLLHWIYALLKSRTTFQDIA

SEQ ID NO: 16917 - protein, 322 aa, unidentified
  source 1..322: note = protein_66c50ae
  REGION 9..156: note = RuvC_domain
  SITE 12: note = RuvC_P1
  SITE 56: note = RuvC_P2
  SITE 96: note = RuvC_P3
  SITE 98: note = RuvC_P4
  SITE 101: note = RuvC_P5
  REGION 195..279: note = Tnp_domain
  SITE 203: note = Tnp_P1
  SITE 232: note = Tnp_P2
  SITE 240: note = Tnp_P3
  SITE 241: note = Tnp_P4
  SITE 252: note = Tnp_P5
MSLPNPLCVGIDVSKATLDIAASHEFAQFTASNDSDGFDAVLAELRTHSVALILMEATGGLEAAVACSLQAEGFDVAVINPRQARDFARAMGYLAKTDRIDARVLAQMAEVINRHPERERFIRALPDAERQILVAMVVRRRQLITMLVAERNRLYPSHPQNRKSINIIIKALESELARIDTDMNQHLKSHFKALSERLSSVKGVGTMTVAALLAEVPELGHLSRREISALVGVAPVNRDSGTMRGRRTIFGGRAGVRTALYMSALVTARFNLVIKAFYMRLLAAGKAKKVVLVACMRKLLTILNAMLRKNEEWNESYHHVAP

SEQ ID NO: 16918 - protein, 403 aa, unidentified
  source 1..403: note = protein_35b4ea0
  REGION 4..160: note = RuvC_domain
  SITE 7: note = RuvC_P1
  SITE 57: note = RuvC_P2
  SITE 97: note = RuvC_P3
  SITE 99: note = RuvC_P4
  SITE 102: note = RuvC_P5
  REGION 274..361: note = Tnp_domain
  SITE 282: note = Tnp_P1
  SITE 312: note = Tnp_P2
  SITE 320: note = Tnp_P3
  SITE 321: note = Tnp_P4
  SITE 334: note = Tnp_P5
MSAVGIDVSKGKSMVAIMRPFGEIVSTPFEIKHTTSDINSLIDLINSIEGESRIVMEHTGRYYEVLAHQFSKANLFVSAVNPKLIKDFDNDSLRKVKSDKADAVKIARYALDKWQNLKQYSVMDELRNQLKIMNRQFGFYMKHRTAMKNNLIGILDQTYPGVNTYFDSPARSDGSQKWVDFASTYWHVDCVRKMSLNAFIDHYQKWCKRKKYNFSQAKTEEIYGKAKELVPVLPKDEITKLIIRQAIDQLNNASATVEKLRTLMNDTASKLPEYPVVMDMKGVGPAPGPQLMAEIGDVTRFTHKGAITAFAGVNPGVNESGSYAQKSVPASKRGSAALRRTLFQIMDALIKNMPQDDPVYQFLDKKRAQGKPYYVYMTAGANKFLRIYYGRVKEYLLSLPDSE

SEQ ID NO: 16919 - protein, 317 aa, unidentified
  source 1..317: note = protein_b80f42f
  REGION 7..149: note = RuvC_domain
  SITE 10: note = RuvC_P1
  SITE 50: note = RuvC_P2
  SITE 90: note = RuvC_P3
  SITE 92: note = RuvC_P4
  SITE 95: note = RuvC_P5
  REGION 186..270: note = Tnp_domain
  SITE 194: note = Tnp_P1
  SITE 223: note = Tnp_P2
  SITE 231: note = Tnp_P3
  SITE 232: note = Tnp_P4
  SITE 244: note = Tnp_P5
MTSEMLIGIDVAKDELVIDSEQGLLTLANTAEAINAWLKTLPTGSYIGLEATSDYHQLMAEQAVLMGMVVYVLNPRDMRHYALGLGRRGKTDRVDAQMIRRFITAERGHLRPYQPASAMQHQVTLLQRRRATVVKHRQALQKALRSVKELEAPLIDTVVALDGLLKHIDQQLDDLLTLQPALKAEARRLESIPGIGRQTSTQLAVLFDRVPLSRSDAVVAFVGLDPRACDSGQKRGRRRVSKRGPGELRRLLYNCAQAAAKTAVWKPYYQELRAREFSATQALVIIARKLLRIAFSLWQQADARFDAQKIACLNNAA

SEQ ID NO: 16920 - protein, 340 aa, unidentified
  source 1..340: note = protein_68b3a4c
  REGION 10..164: note = RuvC_domain
  SITE 13: note = RuvC_P1
  SITE 62: note = RuvC_P2
  SITE 102: note = RuvC_P3
  SITE 104: note = RuvC_P4
  SITE 107: note = RuvC_P5
  REGION 220..296: note = Tnp_domain
  SITE 248: note = Tnp_P2
  SITE 256: note = Tnp_P3
  SITE 257: note = Tnp_P4
  SITE 269: note = Tnp_P5
MTERRARIWVGIDAGKGHHWAAAVDESGFQVWSKKIDNDEAAILEAVAEALAMAGAVDWAIDLSGTASALLLALLASHGQKPVYVPGRTVNRMSGAYRGEAKTDARDAFVIAETSRLRRDFAAVDVPAQLVADLALLVAHRTDLVADRVRMVNRLRDVLTGIFPALERAFDWSGSKGALTLLTYRQTPAGIRRVGRARLESWLRKRGVRSADKVAATALEAAGAQHTVVAAGDLSAYADAGRLASAAGLVPVPRDSGRRTGNLHRPKRYSRRLRRVFYMSAQTSMIKDGPNRGFYLKKRAEGCGHVQALIALARRRVNVLWALLRDGREFTPAQPVAQAA

SEQ ID NO: 16921 - protein, 314 aa, unidentified
  source 1..314: note = protein_0f4c85c
  REGION 8..149: note = RuvC_domain
  SITE 11: note = RuvC_P1
  SITE 53: note = RuvC_P2
  SITE 93: note = RuvC_P3
  SITE 95: note = RuvC_P4
  SITE 98: note = RuvC_P5
  REGION 188..272: note = Tnp_domain
  SITE 196: note = Tnp_P1
  SITE 225: note = Tnp_P2
  SITE 233: note = Tnp_P3
  SITE 234: note = Tnp_P4
  SITE 246: note = Tnp_P5
MTTQPPIIGIDVAKDSLSLYRADLDQYCTLDNDARSIRAWLKTLPGDCALAVEATSTYHVQLVDLAHARGHRLYVIDGYRLSNYRKGIGGRIKTDASDARLLARYLAHEQAQLRVWQPAGKAYRLLQSLLRRRATLIRSATALRQSFGHDTQFKVSMKAALSSLKRLEQRLDQDIAQALKDAGLAEQAKRCRAIEGIGPLTAAALNMAFQRGPFRNSDAFIAFLGLDVRAKESGRYSGRRKLSKQGDPEVRRLLHNAAMAASRTKAWQKLYLGYLERGLKKTEALTILARKLARIAFALMKTQQPYRSPTCTAG

SEQ ID NO: 16922 - protein, 334 aa, unidentified
  source 1..334: note = protein_98e610c
  REGION 7..148: note = RuvC_domain
  SITE 10: note = RuvC_P1
  SITE 53: note = RuvC_P2
  SITE 88: note = RuvC_P3
  SITE 90: note = RuvC_P4
  SITE 93: note = RuvC_P5
  REGION 209..297: note = Tnp_domain
  SITE 217: note = Tnp_P1
  SITE 247: note = Tnp_P2
  SITE 255: note = Tnp_P3
  SITE 256: note = Tnp_P4
  SITE 268: note = Tnp_P5
MENIALIGIDLGKNSFHIHCQDGNGRAVYRKKFTRQKLFEFLAQCPATTIVMEACGGANFMVRKLTELGHTPKLISPQFVRPFVKTNKNDFVDAEAICEAASRPSMRFVKPRTETQQAMHALHRVRESLVRDKVKTTNQMQAFLLEFGVSAPKGPTLIKRFAEILETNELPAYMAGLLQKLCEHYGYLVKQIKELETQLQISLDEDSAGQRLLSIPCVGPLTASLLSTQLGDGKQYGNSRDFAASTGLVPRQYSTGGRTTLLGISKRGNKKLRALLVQCARVYLRTLAHRSGKLADWVRELQLRKNNFVVTCALANKLARIAWALTTRQQSFAA

SEQ ID NO: 16923 - protein, 323 aa, unidentified
  source 1..323: note = protein_92d58d0
  REGION 8..150: note = RuvC_domain
  SITE 11: note = RuvC_P1
  SITE 52: note = RuvC_P2
  SITE 92: note = RuvC_P3
  SITE 94: note = RuvC_P4
  SITE 97: note = RuvC_P5
  REGION 191..278: note = Tnp_domain
  SITE 199: note = Tnp_P1
  SITE 229: note = Tnp_P2
  SITE 237: note = Tnp_P3
  SITE 238: note = Tnp_P4
  SITE 251: note = Tnp_P5
MNKDIKYFGIDISQKVFDVTDSDGNYYQFKNNELGFKKFSKLLDFNSYCVMEATGYYHYQLAYYLLETGFKVSVENPLSVKRYIQMRLSKLKTDKSDSKLICEYAMHVELKLWKGNSKEVQECLQITRALWVYTKQRTMLKNKLHGESVLGEPSKIVVRSLKRSLKQLYKTMQALEERLLFLVKDTHKDLFTRITTIPGIGRKTAIMLIVLTGGFERFSSASELCSYAGLTPMIRQSGSSVKGRPRISKMGNQKLRNLLFMCSFTACKYNKACRDLYERIVAKGKSKKLALIAVCNKLLKQAFAIAKSGLIFDATYKSTLVKN

SEQ ID NO: 16924 - protein, 404 aa, unidentified
  source 1..404: note = protein_db963b0
  REGION 4..159: note = RuvC_domain
  SITE 7: note = RuvC_P1
  SITE 58: note = RuvC_P2
  SITE 96: note = RuvC_P3
  SITE 98: note = RuvC_P4
  SITE 101: note = RuvC_P5
  REGION 267..353: note = Tnp_domain
  SITE 275: note = Tnp_P1
  SITE 306: note = Tnp_P2
  SITE 314: note = Tnp_P3
  SITE 315: note = Tnp_P4
MWYAGIDWADTHHDILVLDEQGQKVGIVRVAHSAEGLASLTGFLERLIGTQPKEQMACIIETTHGLLIAALLEAGWPVYPVNPRTVDRHRAASGAKTDLIDAYLLAKTGRADFADLRRLTPDSEMVAELKALTRDQDGLIQMQTRLVNQLTACLKAYYPVALSLFSKLHQPTSLAFLQAYPTPAAAAAATPAQLASVLKQAGHPTPDQAAATIMTALSQPHLVADTVTTRTKSRLMLAVVSQLLPLLEQIAAYDKEVNTLFLTHPDHDLFSSLPRAGKRLAPRLLAEIGDDRDRYDAAASIQALGGTSPVLFESGKYSKAHRRLGCIKPLRNALQQFAWQSTQSEPWARDYYQRKRTEGKSHTVALRALANVWVRIIFAVWQHHTSYEAAIFAAAQQQHARKAA

SEQ ID NO: 16925 - protein, 344 aa, unidentified
  source 1..344: note = protein_d5a6709
  REGION 6..146: note = RuvC_domain
  SITE 9: note = RuvC_P1
  SITE 52: note = RuvC_P2
  SITE 87: note = RuvC_P3
  SITE 89: note = RuvC_P4
  SITE 92: note = RuvC_P5
  REGION 211..295: note = Tnp_domain
  SITE 219: note = Tnp_P1
  SITE 249: note = Tnp_P2
  SITE 257: note = Tnp_P3
  SITE 258: note = Tnp_P4
  SITE 270: note = Tnp_P5
MTISILGIDIGKNSCSVVGVDDKGAVTIRRTMRRQTLLDFVSKIPTCIIAMEACCGAHHLGRLFVSQGHEVRLMSPEYVRPYVKAQKNDDRDAEGIAEAASRPTMRFVDLKSEEQLDIQSLHRVRSRLVAERTTLINQMRAILLERGLIFAAGRCKFESAVDALLNEQTISLSGRVQRLVAELRDEWKMLDTKIAALNAEFLSLARDDLATRRLTDIPGIGVLNATALIAAIGNASSFDRARDLGAWLGLVPRQFTTGGKPRLLGITKRGNVYLRTLLVHGARAAMPTLSQSDTPLGQWLRGLLSRGMHRNVVIVALANKLARIAWAVLRKERPFDRAYGATTA

SEQ ID NO: 16926 - protein, 346 aa, unidentified
  source 1..346: note = protein_362e136
  REGION 7..149: note = RuvC_domain
  SITE 10: note = RuvC_P1
  SITE 53: note = RuvC_P2
  SITE 88: note = RuvC_P3
  SITE 90: note = RuvC_P4
  SITE 93: note = RuvC_P5
  REGION 211..296: note = Tnp_domain
  SITE 219: note = Tnp_P1
  SITE 249: note = Tnp_P2
  SITE 257: note = Tnp_P3
  SITE 258: note = Tnp_P4
  SITE 270: note = Tnp_P5
MNNVTIIGVDLAKLVFQVHGAGSDGSVIYRKKLSRLQFSKFMADQPACVVAMEACGSAYYWARMMEDFGHEVRLVPPIYVKPFVKRQKNDAADAEAIAEAATRSNMRFVPIKTVQQQSRSIMFRTREMMIGQRTQTVNALRSHLAEFGVVVPKGVHNLKRLAAHIDDANDGLPAEVVQIGSVYLEQIAQHTNRIKTLEKSIKELGETSEISRRLRTVPGVGPITAMAIEAFAPEMERFEKGRNFSAWLGLVPRQHSTGGKQVLGRTSKMGQKDIRKLLIVGAMSVIKSELYKAKDEDSRPSWLGQLLERKPRMVVAIALANKMARAIWAMLTKGEDYRNPAAMTVA

SEQ ID NO: 16927 - protein, 387 aa, unidentified
  source 1..387: note = protein_8b4f6ca
  REGION 4..159: note = RuvC_domain
  SITE 7: note = RuvC_P1
  SITE 58: note = RuvC_P2
  SITE 98: note = RuvC_P3
  SITE 100: note = RuvC_P4
  SITE 103: note = RuvC_P5
  REGION 263..350: note = Tnp_domain
  SITE 271: note = Tnp_P1
  SITE 301: note = Tnp_P2
  SITE 309: note = Tnp_P3
  SITE 310: note = Tnp_P4
  SITE 323: note = Tnp_P5
MIYVGIDIAKQTHYAAIVNSDGEVLAEPFSFTNDHSGFQKLLKHLDSLSVKDTFVGMESTAHYAENLTSFLFTRGFQVCIINPIQTSSLRKSNIRKTKTDSVDTYLIIKALILNHYRLFTARDFDSLQLKNLCRFRQKLMKARTKVKIQLVTYVDLLFPELQYFFKSGIHGKACYALLKEQPNPDRIAKMHLTRLTNLLSKSSRGHFNQSNAVRLKELASQSVGIKNSTLSLQIFQSIQQIEMYTQQLAEVEHSIHEIMDKMDSVIKTIPGIGSLNGAMIIGEIGDITRFEKPCQLLAYAGLDPSVYQSGNFTAARTRMSKRGSKLLRYALINAAWQTTLVNQTFKDYYDLKISQGRRHYNALGHVAHKLVRVIHKMMTDNVAFNLA

SEQ ID NO: 16928 - protein, 397 aa, unidentified
  source 1..397: note = protein_fe69aaf
  REGION 4..162: note = RuvC_domain
  SITE 7: note = RuvC_P1
  SITE 60: note = RuvC_P2
  SITE 101: note = RuvC_P3
  SITE 103: note = RuvC_P4
  SITE 106: note = RuvC_P5
  REGION 267..354: note = Tnp_domain
  SITE 275: note = Tnp_P1
  SITE 305: note = Tnp_P2
  SITE 313: note = Tnp_P3
  SITE 314: note = Tnp_P4
  SITE 327: note = Tnp_P5
MLYLGIDIGKNNHVASLIDEKGKIVFKAFSFSNTTDGGESLLSKLNNFIPSVSDIEIGMEATGHYWLSIYSFLVEKGFVIHVVNPIQTDGWRKGTEIRKRKTDIIDSVLIAELIRYGDFLETSLADENTMSLRNLSRFRNYLISSIGDLKRKTICVLDQVFPEYQSVFSNIFGQTSKEILLSFSSPADFENISSDQLQNALSEITMKKFAANKINQLSSLAQRSFGVTFCLDSFALQLKLLIEQINFIENQVKDLENQICTLLDKINSTITTIPGIGKVTAATILGEIGDISRFSTPAKLVAYAGIDASISQSGEYHSTNNKMSKRGSPYLRKALFSAALVASNCDPVFKAFYQKKRAEGKHHLTAVGAVARKLCYTIHAILKNNSSYEVRLPDSNQ

SEQ ID NO: 16929 - protein, 334 aa, unidentified
  source 1..334: note = protein_d4e92fb
  REGION 7..149: note = RuvC_domain
  SITE 10: note = RuvC_P1
  SITE 53: note = RuvC_P2
  SITE 88: note = RuvC_P3
  SITE 90: note = RuvC_P4
  SITE 93: note = RuvC_P5
  REGION 209..296: note = Tnp_domain
  SITE 217: note = Tnp_P1
  SITE 247: note = Tnp_P2
  SITE 255: note = Tnp_P3
  SITE 256: note = Tnp_P4
  SITE 268: note = Tnp_P5
MRNVTLIGIDLGKHSFHIHCQDKFGKAILRKKFTRTKLMEFLAGSSFATVVMEACADAHFMARRVADLGHEAKLISPQFVRPFVKSNKNDCVDAEAICEAASRPSMRFVQPRTETQQAMRALHRVRESLVRDRVKTTNQMHAFLLEFGISLPKGEAVIKRLSLVLAEHDIPGYLSRLLMKLHAHYLYLVEQITALESELNQSIKSDETAQRIMTIPGVGPITARLLSSQLGDGKQFSCSRDFAASMGLVPRQYSTGGKPTLLGISKRGNKNLRRLLVQCARAFMMRLEHQKGRLAEWVQEQLSRKHSNVVACALANKLARIVWAITTRQNEYQA

SEQ ID NO: 16930 - protein, 345 aa, unidentified
  source 1..345: note = protein_f4cb833
  REGION 7..148: note = RuvC_domain
  SITE 10: note = RuvC_P1
  SITE 53: note = RuvC_P2
  SITE 88: note = RuvC_P3
  SITE 90: note = RuvC_P4
  SITE 93: note = RuvC_P5
  REGION 210..297: note = Tnp_domain
  SITE 218: note = Tnp_P1
  SITE 247: note = Tnp_P2
  SITE 255: note = Tnp_P3
  SITE 256: note = Tnp_P4
  SITE 268: note = Tnp_P5
MSKIKRIGLDTSKAVFTLHCVDEDGKAVLRINLRRAQMVTFFKNLAPAEIALEACGSSHHWARELTALGHEVRLIPPQYVKPFVKRAKNDRNDAEAICEAAGQPGMRFVPMKAATQQAQGMVLKVRETLVNQRTQLVNALRGHAAEFGIIAAKGISQINPLLEEIEAASAIPSDAKDMLALLGQEIEHLDTRLNEIDVKLRAAHKAYALSQRLATIPGVGRIIALTFATEIDPMAFESGRHLAAWIGLTPKEHSTGGKQRMGGISRAGNERLRRLPVTGATAVIRFAIRPGNKHAWEWLLKLLQHKPRKLVAVALANKIARIAWAMMKSGEAYRRPTAIAATVAA

SEQ ID NO: 16931 - protein, 390 aa, unidentified
  source 1..390: note = protein_23e6ff1
  REGION 5..160: note = RuvC_domain
  SITE 8: note = RuvC_P1
  SITE 59: note = RuvC_P2
  SITE 98: note = RuvC_P3
  SITE 100: note = RuvC_P4
  SITE 103: note = RuvC_P5
  REGION 263..350: note = Tnp_domain
  SITE 271: note = Tnp_P1
  SITE 301: note = Tnp_P2
  SITE 309: note = Tnp_P3
  SITE 310: note = Tnp_P4
  SITE 323: note = Tnp_P5
MFYFIGIDIAKFKHTACVLDQNGESCVEPFDFSNDLIGYNILWEVIKPYVGKEHRVGMEDTGHYADNLRMFLLDKGCTVCMINPLTSTHLRKAEGLAKNDRLDSTVIAGILMNPRLFRSVTKENFNYLTLRQYTRLHHKRTEEMSRYKVQLQKDIDHVFPEYNSIFPTAYSKTYIAVLKEFQSAATIAHTDIRRLRSVMNPKSRGKMISLSAEDLKAAAQKSVGRPDVAIEMEIVHLISFIELIESSLAEVDKKIEEFSKTLNSPILAISGISDFSAMSIISELGDISRFRNEKCVIKFAGVNPTVYESGTYSMTHTRLEKKGSKYLRRTLYQIIDSVIRCNTVFKAFYDKKISQGKSYRCAQGHCVRKLLRVLYKILSTNCRFDPALLR

SEQ ID NO: 16932 - protein, 339 aa, unidentified
  source 1..339: note = protein_118fc42
  REGION 6..148: note = RuvC_domain
  SITE 9: note = RuvC_P1
  SITE 52: note = RuvC_P2
  SITE 87: note = RuvC_P3
  SITE 89: note = RuvC_P4
  SITE 92: note = RuvC_P5
  REGION 211..301: note = Tnp_domain
  SITE 219: note = Tnp_P1
  SITE 249: note = Tnp_P2
  SITE 257: note = Tnp_P3
  SITE 258: note = Tnp_P4
  SITE 270: note = Tnp_P5
MQVTTVGLDLAKNIFQVHGITNDGEVVFNRALRRAQLLKFFECLDPCLVGIEACGTSHHWARELVRLGHDVKLIPPIYVKPYVKRGKSDAADAEAICEAVTRPTMRFVEIKTPDQQAILALHRTRNLVVRQRTQTINMLRAQLAEFGIVFPQGVGHATKFAKRLFEGECPELPDTAGGVIAKLCEQILFLHGKIANYTHEMTQVARREDRVALLQTIPGIGPITASAIVATIGTGKQFSTGRDFAAWLGLTPLNRSSGGKEKLGRISKMGDRYIRRLLVIGMMSRMRQITKTPERYDPWFADIMARKPGKVAAVAMANKTARMVWAVLTRNEPYRIRTI

SEQ ID NO: 16933 - protein, 344 aa, unidentified
  source 1..344: note = protein_0260eb0
  REGION 6..147: note = RuvC_domain
  SITE 9: note = RuvC_P1
  SITE 52: note = RuvC_P2
  SITE 87: note = RuvC_P3
  SITE 89: note = RuvC_P4
  SITE 92: note = RuvC_P5
  REGION 209..295: note = Tnp_domain
  SITE 217: note = Tnp_P1
  SITE 247: note = Tnp_P2
  SITE 255: note = Tnp_P3
  SITE 256: note = Tnp_P4
  SITE 268: note = Tnp_P5
MTIIRIGLDTSKHVFHVHGVDGDEQPALRRRLRRSQVEKFFAKLPPTRIGLEACGASHHWARVLRSLGHEVVLIPPQYIKPYVKRGKNDAIDAEAICEAMSRPGMHFVPVKSRDEQAALMLLKVRDLLMKQRTMLTNAIRGHAAEFGVIATKGPQNLAELLERLGEDANVPAPARELLNSLAGQIAALEVRLEALEAKLKAHHKADPRSRLLATIPGVGPITALSLTLKVPDATVFRSGRHFAAWLGITPREHSTAGRQRLGKISRQGDEGLRQSLVLGATAVIQQVKRRFKAQRVSRTDSPWLLQLLARKPEKVAAVALANKMARIIWAMLVSGELYRQPQAV

SEQ ID NO: 16934 - protein, 391 aa, unidentified
  source 1..391: note = protein_fd26167
  REGION 4..160: note = RuvC_domain
  SITE 7: note = RuvC_P1
  SITE 59: note = RuvC_P2
  SITE 99: note = RuvC_P3
  SITE 101: note = RuvC_P4
  SITE 104: note = RuvC_P5
  REGION 264..351: note = Tnp_domain
  SITE 272: note = Tnp_P1
  SITE 302: note = Tnp_P2
  SITE 310: note = Tnp_P3
  SITE 311: note = Tnp_P4
  SITE 324: note = Tnp_P5
MFLLGIDIAKLNHVASCIDSSTNEVVFSNFKFKNDFEGFSAFLDKMKSFDAKNLMIGLESTSHYGENLIHFLFQHGFKVVLMNPLQTSHLRKANIRDAKNDNLDSIHIAKSLLFTKLNFISEKNMDCFSLKKLTRFRSNLMKQRSKAKIQLTSLLDFIFPELQYLFSSKIHSKAIYALLKKYPSTEEIAALKEDEISSLLYASSKGHFKKEKSLELKSLAKTSVGMKDSSISFHVIQLIELIELYEKQIKDMESKIADIIHKLDSKLLSVPGISLVACAIILGETNNIDRFSTSKKLLAFAGLDPKIRQSGNFNASSCRMSKKGSPYLRYALIFTAWNCVRHSRKFNEYYLLKRSQGKSHYNALGHVAHKLVRVIFTLIKKDILYQEEELD

SEQ ID NO: 16935 - protein, 344 aa, unidentified
  source 1..344: note = protein_0e4ce8d
  REGION 7..149: note = RuvC_domain
  SITE 10: note = RuvC_P1
  SITE 53: note = RuvC_P2
  SITE 88: note = RuvC_P3
  SITE 90: note = RuvC_P4
  SITE 93: note = RuvC_P5
  REGION 212..303: note = Tnp_domain
  SITE 220: note = Tnp_P1
  SITE 250: note = Tnp_P2
  SITE 258: note = Tnp_P3
  SITE 259: note = Tnp_P4
  SITE 272: note = Tnp_P5
MRNPNILAIDLAKNVFQVCKTDSQGNVVFNREVTRLKLKALLCKQQSSLVAMEACASAHYWARYARDLGHQVKVISARSVKAFQTKQKTDKNDALAIATAASLQHIHSVKIHTVEEQALQALERARHLALAQQVAQSNQIRGLLSEFGIVIAQGMSALRVNIPLVLEDAENSLPDSFRAVLHRLWAQLNVQIEHVDMLTKQLELSVNTDPVCQQLMKLEGVGPLGALGLALRLGKGENFTNGREASANIGLTPKQHSSGGKERIGHISKRNADKRLRSILFQGALSVISNVIKRPARTTKEQWLKTLIERRGKKVAAIALANKTVRTAYALLKSNSVYQPQLLA

SEQ ID NO: 16936 - protein, 397 aa, unidentified
  source 1..397: note = protein_9e27519
  REGION 4..160: note = RuvC_domain
  SITE 7: note = RuvC_P1
  SITE 57: note = RuvC_P2
  SITE 97: note = RuvC_P3
  SITE 99: note = RuvC_P4
  SITE 102: note = RuvC_P5
  REGION 274..361: note = Tnp_domain
  SITE 282: note = Tnp_P1
  SITE 312: note = Tnp_P2
  SITE 320: note = Tnp_P3
  SITE 321: note = Tnp_P4
  SITE 334: note = Tnp_P5
MIAVGIDVSKYKSTVAILNCDRSIRAKPFNVQHNQTEMNVLVDYLKSLDEELIILMEYTGHYHYPVLKKLQEEGFQVCMANPYQMKKYGDVEIHKSKTDKKDAIRIATFALEKSYLLTPYSPLEQKFDDLKFLSRQYNQRISYLTKLKVQLLNLLDETMAGITKELKFRSRHPESCVLLLFIKRYGSYDVINKMGKSRFLATYATLMKKTKNRYAPRKGLVIFEQAKDSITTRGDNDYILSVQNQLVDLLSSAQNAADEEIYLMQNIAKTIPEYKILRAMNGVGDRLGPVILAEIGDIWRFHSAKALNSFAGNDAPPYQSGQFESKNRHISERGSAILRKVCYEVMQCLKASKPEDDPIYLFMIKKELEGKPLKVAKMAGVNKFLRIFYARAMELYS

SEQ ID NO: 16937 - protein, 323 aa, unidentified
  source 1..323: note = protein_3c70c80
  REGION 8..149: note = RuvC_domain
  SITE 11: note = RuvC_P1
  SITE 52: note = RuvC_P2
  SITE 92: note = RuvC_P3
  SITE 94: note = RuvC_P4
  SITE 97: note = RuvC_P5
  REGION 191..278: note = Tnp_domain
  SITE 199: note = Tnp_P1
  SITE 229: note = Tnp_P2
  SITE 237: note = Tnp_P3
  SITE 238: note = Tnp_P4
  SITE 251: note = Tnp_P5
MTKDIKYFGIDISKDVFDVWDNNAKYYQFKNSVSGFKKLVKLLDLNSVCVMEATGYYHSRLAYFLLESGFGVSVVNPLKIKRYIQMDLSKIKTDKSDAKMIQLYGKDREPKLWTGQSKTQQESLQLSRTLSIYSKQSTQLKNKIHGEDVLGNPSKIVVSSLKRSLKYLKKEMDTLEKALDKNVKKEYQESLTLLKSIPGIGDKTALMLLVFTDGFQRFESSKELCSYAGITPIIRQSGSSVKGRPRISKMGNPKLRNLLFMCSFNACKYNRACKALFDRIVAKGKSKKLALIAVCNKLLKQAFSIVKNGVPYNDEYRSTLVKN

SEQ ID NO: 16938 - protein, 407 aa, unidentified
  source 1..407: note = protein_70f94b9
  REGION 5..161: note = RuvC_domain
  SITE 8: note = RuvC_P1
  SITE 58: note = RuvC_P2
  SITE 98: note = RuvC_P3
  SITE 100: note = RuvC_P4
  SITE 103: note = RuvC_P5
  REGION 275..362: note = Tnp_domain
  SITE 283: note = Tnp_P1
  SITE 313: note = Tnp_P2
  SITE 321: note = Tnp_P3
  SITE 322: note = Tnp_P4
  SITE 335: note = Tnp_P5
MNTVVGIDVSKGKSVVAAMRTFGEVALPPREFLHTNKGLSMLTESLRLIDGDTRVILEATGRYHEPVVMALQESGFFVSTVNPKLIKDFGNNSLRKVKTDKADAVKIARYGLEYWEEMREYTQTDTARQQLKLFSRQYNLHMKTVVSLQNNLISLLDSVFPGINELFKSPVREDGRQKWVDFVCTFYHRDCVSGVSAAAFSQRYYKWCKRKDYNFSTAKAAEIYTTSSEMVVTMPKNALIKTLITSAAGQLTAATATLATLKAEFIRLAATLPEYEVVRSMYGVGDVTGAQLMAEIGDVRRFQSRGALIAFAGVDPGVNESGKHSAQSVRTTKRGSPHLRKTLFQIISTHLKRSPLDEPVYQFLDRKRVEGKPYLVYMTAAANKFLRIYHAKVRDYLNTLESVDLNT

SEQ ID NO: 16939 - protein, 344 aa, unidentified
  source 1..344: note = protein_3ca74c8
  REGION 6..149: note = RuvC_domain
  SITE 9: note = RuvC_P1
  SITE 53: note = RuvC_P2
  SITE 88: note = RuvC_P3
  SITE 90: note = RuvC_P4
  SITE 93: note = RuvC_P5
  REGION 212..297: note = Tnp_domain
  SITE 220: note = Tnp_P1
  SITE 250: note = Tnp_P2
  SITE 258: note = Tnp_P3
  SITE 259: note = Tnp_P4
  SITE 271: note = Tnp_P5
MSIKVVGIDLAKNYFQVCVLNIDGTISSNRKVHRDRLLHTIRQLPGNTPLAMESCASSHYWGRVFLGLGFKVSLIPAQHVKPFVGRQKNDANDARAICEAYSRPDIHFVPVKSIEQQDLKALRSVRSRLVEQRTGLANQIRGLTAEYGIVFPTSIRALRNHLPLIIEDAENELSHVMRNLLQTLYCDFINISGKIDDVTQDIITLSQQSPRYKAIKNIPGCGPILTAAIVSEVGSGQQFQNGRQFSAWCGLVPKQNSTGGKNSLGALSKSGNRDLRTLLIHGARAVLRCRTSSMDPMGAWLRGLIERRGKAKAIVALANKLGRIVWRVLTTDCEYDVNRAFKPA

SEQ ID NO: 16940 - protein, 422 aa, unidentified
  source 1..422: note = protein_e2cefff
  REGION 7..164: note = RuvC_domain
  SITE 10: note = RuvC_P1
  SITE 63: note = RuvC_P2
  SITE 103: note = RuvC_P3
  SITE 105: note = RuvC_P4
  SITE 108: note = RuvC_P5
  REGION 277..371: note = Tnp_domain
  SITE 285: note = Tnp_P1
  SITE 315: note = Tnp_P2
  SITE 323: note = Tnp_P3
  SITE 324: note = Tnp_P4
  SITE 337: note = Tnp_P5
MNFCPVAGIDVSKSFSDMCILSPDNKIFAQEKIYHDETSINRANALLQKAEQIFSSKPVIVMESTSHYHLILFQFFSEHGYDVIVVNPLQSSSMKDFAIRKRKTDRVDAFKLAMLYRTKTLHPSQIPQAAMRALRQLCRERVECLNDVTSYKNRLTAFLDQAFPGYDKIFSDVGGITSCAVLVHFPTPAILLAAEEAELVEVIAAASKSGYGFAKKKAELLISAAQKAQTLGIHSCADETLIVCTIQMLRTLSESVFQIEKAINNLLAQVKEVRNNVSLLQSIPGIGSHSAALLLGEIGDFTLFKKPKQLAAYFGLDPSERQSGTFRGTKNKLSKRGSPYARAALHMGVVNAICKHGKKTAPNPVLLSYYEKKCKNKPAKVAQAASMHKLVFIIFAVLRDQKPFELKTPEQHAFEQGFVKAA

SEQ ID NO: 16941 - protein, 421 aa, unidentified
  source 1..421: note = protein_e8a0253
  REGION 10..158: note = RuvC_domain
  SITE 13: note = RuvC_P1
  SITE 62: note = RuvC_P2
  SITE 98: note = RuvC_P3
  SITE 100: note = RuvC_P4
  SITE 103: note = RuvC_P5
  REGION 225..311: note = Tnp_domain
  SITE 233: note = Tnp_P1
  SITE 264: note = Tnp_P2
  SITE 272: note = Tnp_P3
  SITE 273: note = Tnp_P4
  SITE 284: note = Tnp_P5
MKSTIPTILAGVDTHSTTHTLALLDEHGRVTDTETFNADPKGYERLIAMIGDPALCLGVGVEGTNSYGAALSRRLAAAGYTVHEVLRPKRSVRRSDGKSDPIDAIAAARSVLAGDGISTPKASDGWCEALRHLIAAREQLVTSMTAISNCLAELLTTAPEGIRERYRSLPSKRRIGKLAACRPSGGIVERNVLSSLKTLASSWRELHDRADVLECRMRQILEENARPLLDVYCMGTMSAAQLAVIGGDNPERIRSEAAFAKLCGACPLPASSGKTNRHRLNRSGNRRGNRALYNVALVRMSHHQPTKDYVVRKTKEGKGKLEIMRCLKRYIAREVYRALIAIRNGEAGREPAVERGARLREVRVSLGKTQQQVGDALGVPSSRVSEIERGVRDLPELERQIIEWMDSILGQSQHSNTLDNV

SEQ ID NO: 16942 - protein, 339 aa, unidentified
  source 1..339: note = protein_493bbdc
  REGION 6..148: note = RuvC_domain
  SITE 9: note = RuvC_P1
  SITE 52: note = RuvC_P2
  SITE 87: note = RuvC_P3
  SITE 89: note = RuvC_P4
  SITE 92: note = RuvC_P5
  REGION 211..299: note = Tnp_domain
  SITE 219: note = Tnp_P1
  SITE 249: note = Tnp_P2
  SITE 257: note = Tnp_P3
  SITE 258: note = Tnp_P4
  SITE 270: note = Tnp_P5
MQVTTIGVDLAKNIFQVHGITDSDEVAFNRPLRRAQVLPFFARLNPCLVGMEACSTSHYWARELTRLGHEVRLIPPMYVKPYVKRGKSDAIDAEAICEAVTRPTMRFVEAKSVEQQALLSLHRARNLMVRQRTQLVNALRSMLAEFGVYIAKGLARAINFAQGVLAGAELELPEVAQDVAHRLCGQLGVLHGQVRWYEARLRLESKRDPRVKLLQTIPGVGPVTASAIAASIGSGHQFKNGREFAAWLGLTPSNRSSGGKERLGRITKMGDQYLRQLLVVGMTSLVRQTESHPERANKWLTSLLERKPARLATVAMANKTARIVWAVLTKNEPYMPRTT

SEQ ID NO: 16943 - protein, 351 aa, unidentified
  source 1..351: note = protein_cce0564
  REGION 6..147: note = RuvC_domain
  SITE 9: note = RuvC_P1
  SITE 52: note = RuvC_P2
  SITE 87: note = RuvC_P3
  SITE 89: note = RuvC_P4
  SITE 92: note = RuvC_P5
  REGION 211..296: note = Tnp_domain
  SITE 219: note = Tnp_P1
  SITE 249: note = Tnp_P2
  SITE 257: note = Tnp_P3
  SITE 258: note = Tnp_P4
  SITE 270: note = Tnp_P5
MQVSTLGIDLAKNVFQLHGIDHTGHTVLRIKLNRDKLVPFIMQLSPCLIGMEACASSHHFARLFSQYGHQVKLMPPQYVKPYVKTNKTDAADAEAICEAVTRPNMRFVQVKTAEQQAILALHSERDMLVRERGACVNSLRAMLAEFGLIMPTGHCAFHQGIPDILENGDITLSPFVRRSVARQFEHILALEDQVTLIEQELSQWAKSQPACQRVMKVPGVGLMTATYLVASVGNGQQFHCAKQFAAWLGLTPREHSSGGKQRLGRISKRGDRYFRYLLVHGARAVAAVIERHKETMPWLFALLQKKNYNVAVVAQASKTARILWSMLVKGTEYRPAAPIEASSMSASGQQA

SEQ ID NO: 16944 - protein, 348 aa, unidentified
  source 1..348: note = protein_be5aaf6
  REGION 1..119: note = RuvC_domain
  SITE 18: note = RuvC_P2
  SITE 58: note = RuvC_P3
  SITE 60: note = RuvC_P4
  SITE 63: note = RuvC_P5
  REGION 223..312: note = Tnp_domain
  SITE 231: note = Tnp_P1
  SITE 261: note = Tnp_P2
  SITE 269: note = Tnp_P3
  SITE 270: note = Tnp_P4
  SITE 283: note = Tnp_P5
MLTELCSTSGNEPVVVLEATGHYHRGLVSHLKHRGWKHVIINPLQSKRAKGTQLRKVKTDAADAWHLAEMYYRGDVKPHRTWEEAYTELQHVTRQNEFVTGMFVQAKLNSRALLEQVFPTYSQMFRDLFSVTSLLVLQRCLEGNVFRIDEVLREVTGKARSKQWAAEKAEKLQLLLADWSEQPKSHSQAKALSGMIALLLEFTKQLNNLEELMEQIAKELPEVELVKSVPGIGDKLAAVLVAEIGDARQFHDAKQLVAYAGLDPGIFSSGKFTATSSRITKRGSKRLRRALYLAVQCGIRRSANSRMKEYYDKKRKEGKPYKVVVIACANKLLHHVYAILSKSEPYRA

SEQ ID NO: 16945 - protein, 358 aa, unidentified
  source 1..358: note = protein_557edc3
  REGION 7..149: note = RuvC_domain
  SITE 10: note = RuvC_P1
  SITE 53: note = RuvC_P2
  SITE 88: note = RuvC_P3
  SITE 90: note = RuvC_P4
  SITE 93: note = RuvC_P5
  REGION 217..305: note = Tnp_domain
  SITE 225: note = Tnp_P1
  SITE 256: note = Tnp_P2
  SITE 264: note = Tnp_P3
  SITE 265: note = Tnp_P4
  SITE 277: note = Tnp_P5
MTQITTIGLDLAKNVFQVHGVDANGQVLLRKTLRRSQMLAFFEQLRPCLIGIEACATAHYWARTLQSLGHEVRLISPTYVKPYVKRQKNDVADAAAICEAVSRPSMRFAPVKSVEQQSHLMLHSARELLITQRTALINALRAHFSELGIVAAEGARNVRNLLNLLEQQKENVTETTNIPKVAITALQPLAEMLLETDKQIAKLDREILALHRDNGTSNRLATIPGIGVLTATYMTASLAAFANQFSCGREFAAYLGLVPRQYSSGGKPRLGRISKMGNRHLRKLLVVGATAALYSIRKGTSQSALAVWARQLLEKKPFRLVAVALANKMARIAWAVIVHERDYQADIKPNRLIHTQTA

SEQ ID NO: 16946 - protein, 400 aa, unidentified
  source 1..400: note = protein_f0670b8
  REGION 4..160: note = RuvC_domain
  SITE 7: note = RuvC_P1
  SITE 57: note = RuvC_P2
  SITE 97: note = RuvC_P3
  SITE 99: note = RuvC_P4
  SITE 102: note = RuvC_P5
  REGION 274..361: note = Tnp_domain
  SITE 282: note = Tnp_P1
  SITE 312: note = Tnp_P2
  SITE 320: note = Tnp_P3
  SITE 321: note = Tnp_P4
  SITE 334: note = Tnp_P5
MNAVGIDISKGKSMIAILRPCGEIVANPFEICHTSTEINDLVEHIQTLEGDTKIVIEHTGRYYEPMARCLTKAGLHVSAVNPKLIKDFGTNSLRKVKTDKADSVKIARYALDNWSDLRQYSIMDELRNQLKTMNRQFNFYTKQKTALKNNLIGILDQTYPGANTFFDSPARSDGNQKWIDFASTYWHVDCVRKKSLSGFTEHYRKWCKRKGYNFQPNKPKEIYSVSKDLITILPKDTMTKMLVMQAVGQSNLVSKTVEELRSQMNQVAAQLPEYPVVMAMKGVGTSLGPQLIAEIGDVTRFTHRGALTAFAGVDPGANQSGTYEQHSVRTSKRGSAQLRKTLFLVMDVLIKTSPVDDPVYAFMSKKRSEGKPYYVYMTAGSNKFLRIYYGRVKEYLASLS

SEQ ID NO: 16947 - protein, 302 aa, unidentified
  source 1..302: note = protein_d722943
  REGION 8..99: note = RuvC_domain
  SITE 11: note = RuvC_P1
  SITE 60: note = RuvC_P2
  REGION 171..258: note = Tnp_domain
  SITE 179: note = Tnp_P1
  SITE 210: note = Tnp_P2
  SITE 218: note = Tnp_P3
  SITE 219: note = Tnp_P4
  SITE 231: note = Tnp_P5
MPAPRIWAGVDIGKEHHHCVVIGPQGRRLLSRRVLNDEAELLELVGDVLALDDDVLWPVDLNHGEAALLTGLLLAHDQPVAYLTGYQTPAALRRLGTKRLETWLRARGVKGPAALAQTAAEAAQAQRTRLPGEKTAAAMVARLAGEVMRLNEEITETEALIQARFRDHRHAGLITSLPGMGALLGAEFLTATGGDMGMFGSADRLAGYAGLASAPRDSGKVSGNLRRPRRFHRGLLRAFYLSSMASLRSCPASKAYYDRKRAEGKGHKQALLALSHRRINVLWAMLRDGTPYQGSPPVTLAA

SEQ ID NO: 16948 - protein, 258 aa, unidentified
  source 1..258: note = protein_5ff063d
  REGION 1..66: note = RuvC_domain
  SITE 5: note = RuvC_P3
  SITE 7: note = RuvC_P4
  SITE 10: note = RuvC_P5
  REGION 128..213: note = Tnp_domain
  SITE 136: note = Tnp_P1
  SITE 166: note = Tnp_P2
  SITE 174: note = Tnp_P3
  SITE 175: note = Tnp_P4
  SITE 187: note = Tnp_P5
MKRQKNDVADAEAICEAATRPTMRFVAVKSEERQGIAVILRTRELLIRQRTQIINALRGHLAEFGVIVPKGVSNTGKLMDHICDPAMALPETARDALSHLTDSLSRLDDHIQGLDREITRRAKASGTARRLMTIPGIGPLIAVAIVALAAPPATFRRGRDFAAWLGLTPKQNSTGGKQRLGATTKMGERSLRRLLIIGANSVVSWRAKKGAMSGSWLERMLARKPAMLVRVALANKMARIVWAVMSSGQTYRAPAAQA

SEQ ID NO: 16949 - protein, 338 aa, unidentified
  source 1..338: note = protein_35812cb
  REGION 16..162: note = RuvC_domain
  SITE 19: note = RuvC_P1
  SITE 67: note = RuvC_P2
  SITE 105: note = RuvC_P3
  SITE 107: note = RuvC_P4
  SITE 110: note = RuvC_P5
  REGION 210..297: note = Tnp_domain
  SITE 218: note = Tnp_P1
  SITE 248: note = Tnp_P2
  SITE 256: note = Tnp_P3
  SITE 257: note = Tnp_P4
  SITE 270: note = Tnp_P5
MNYLTIQRYEKWNYTIGIDVSKNTLDIHCAEINQHIQIKNGTEGFRVFLKWCNTHKIILNQSFMIMEYTGGYEYKLIQFCESKQIQYSRIPGLEIKRSMGITRGKTDQVDAGRIAQYGEEKHKQLTPDRPLNKGIIKLKELLGFRKRIVRELGGYKASLKERKAMYPDLKKDLICKTLESKIKENEKVVAKFDKELMDEIHKDEAMKTNYELIRSIKGIGMVNALMTIAYTENFVGFTNPRSYAVYVGVVPFDYSSGTSIKGRKRVSSIANKELKQELTQAARSAIQWDPELKSYATRKMANKSYGVVLNNVKFKLILRIFAVVKRQEMYVDNYKNAA

SEQ ID NO: 16950 - protein, 391 aa, unidentified
  source 1..391: note = protein_3f09baa
  REGION 4..163: note = RuvC_domain
  SITE 7: note = RuvC_P1
  SITE 60: note = RuvC_P2
  SITE 101: note = RuvC_P3
  SITE 103: note = RuvC_P4
  SITE 106: note = RuvC_P5
  REGION 266..353: note = Tnp_domain
  SITE 274: note = Tnp_P1
  SITE 304: note = Tnp_P2
  SITE 312: note = Tnp_P3
  SITE 313: note = Tnp_P4
  SITE 326: note = Tnp_P5
MIYVGIDVAKDKHDCFITNSDGEVLFKSFTISNNRDGFETLFQKIESVSDDLTNVKVGLEATGHYSYNLLGFLLDKGLTTFVINPLYTNLYRKSLSLRKTKTDKVDAHTITSMIMSDVNLKSYSDTSYHNEELKSLTRYRFDKVKERAKLKSSVSRLVCILFPELEKLVPTLHMASVYALLSEFPSAHAVASVHLTRLTNLLSESSKNRYGKNTAVRFREAARNSIGSNMPAKSLELKHTIKLIQELTSEIDEIETESKSIMDTIHSPILTIPGISYRMGAMILAEIGDFSRFDSPNKMLAYAGMSPSTYQSGQLDNCYSHMEKRGSRYLRYALYNATKYVCHWDKSFGTYLAKKRAEGRHYNVALSHATKKLVRTIYAMEKSGQAYNNAS

SEQ ID NO: 16951 - protein, 332 aa, unidentified
  source 1..332: note = protein_a965c18
  REGION 1..71: note = RuvC_domain
  SITE 10: note = RuvC_P3
  SITE 12: note = RuvC_P4
  SITE 15: note = RuvC_P5
  REGION 186..279: note = Tnp_domain
  SITE 193: note = Tnp_P1
  SITE 223: note = Tnp_P2
  SITE 231: note = Tnp_P3
  SITE 232: note = Tnp_P4
  SITE 245: note = Tnp_P5
MKNINIRKIKSDKTDAYNIALLYRIKSYNETITHSDTVNSIKKLCRQHKELTDEIVEHINRLIAFLDISFPDFKKVFTDLQGKTPLSLLEKYPTIQEVLSPENKQDIIQLIKENSHKSSSYAEVKYEKLLKAAEKSIEVCIVSLSSAVLIQTTVRVIFSLQEALKAIDNEIKRLSLLDEKFHKEIVLLQSIPGVGEYTACVVLSELGDISNFSKPKELVAFFGLDPGVTQSGTYNRKNNKISKRGSPHVRSILHMLAKSNVYPNRNREYLNPVMRAYFEKKIAEKPYKVVMCAIMRKMVQIIFAVLRNQKSFELRTPEEHQKLIREKSKLVA

SEQ ID NO: 16952 - protein, 265 aa, unidentified
  source 1..265: note = protein_581f3b7
  REGION 2..70: note = RuvC_domain
  SITE 9: note = RuvC_P3
  SITE 11: note = RuvC_P4
  SITE 14: note = RuvC_P5
  REGION 134..219: note = Tnp_domain
  SITE 142: note = Tnp_P1
  SITE 172: note = Tnp_P2
  SITE 180: note = Tnp_P3
  SITE 181: note = Tnp_P4
  SITE 193: note = Tnp_P5
MKPFVKRNKNDAIDAEAICEAAQRPNMRFVAVKREEQQAAALVFRTRDLLVRQRTQLINAIRGHLTEYGWVAPKGPSYVAMLADLLDEDEMGSSLPPAALALIRLMLDLMADLDGRIAELDGEIARRAREDAVSRRLMTIPGVGPIPAAAIAALAPPAETFAKGRDFAAWLGLAPLQKSTGGKQKLGASSKMGERTLRRLLIIGSMAVIKQAARRGAPKGSWLEQMLARKPRMLVAVALANKMARIVWALLMKQESYKAPAAVTA

SEQ ID NO: 16953 - protein, 343 aa, unidentified
  source 1..343: note = protein_38eda4a
  REGION 6..149: note = RuvC_domain
  SITE 9: note = RuvC_P1
  SITE 54: note = RuvC_P2
  SITE 89: note = RuvC_P3
  SITE 91: note = RuvC_P4
  SITE 94: note = RuvC_P5
  REGION 213..301: note = Tnp_domain
  SITE 221: note = Tnp_P1
  SITE 251: note = Tnp_P2
  SITE 259: note = Tnp_P3
  SITE 260: note = Tnp_P4
  SITE 272: note = Tnp_P5
MKIIRVGVDLAKSVFQVHGVDRCEKVVWRKKLSRAEWLSALLEKIEPGCEIGMEACGGAYHWARQLQKRGFTVKLIAPQFVKPYVKSNKNDANDAEAICEAMSRPNMHFVAIKSVEQQDLQAIHRIRAELCNQRRAKGNQIRGLCSEYGLVAPREMIQLRAAVPCWLEDMENGLTIRLRRMLRGLWLDLMNLELRVKELDQEIEIAAATDPVATRLQQLRGVGPIIATAIVANVGDAKQFNSGRQMAASLGLTPRQNSSGGKERLLGITKRGDAQLRTLLIHGARSVLRTAASKNDRMSRWVTHIAQTRHHNIAAVALANKTARIAWAMMTKGTDYQPGPVTV

SEQ ID NO: 16954 - protein, 345 aa, unidentified
  source 1..345: note = protein_8b59ab2
  REGION 6..147: note = RuvC_domain
  SITE 9: note = RuvC_P1
  SITE 51: note = RuvC_P2
  SITE 86: note = RuvC_P3
  SITE 88: note = RuvC_P4
  SITE 91: note = RuvC_P5
  REGION 210..300: note = Tnp_domain
  SITE 218: note = Tnp_P1
  SITE 250: note = Tnp_P2
  SITE 258: note = Tnp_P3
  SITE 259: note = Tnp_P4
  SITE 272: note = Tnp_P5
MHNIITGVDLAKEEIQVCVCKRNKVQSNQAMTPIEFGSWLASSKPMTIVFEACSTSNYWKQKALEYGHDARLISAKLVASVRQNQKTDKNDALAVAQAAQLTDVSFINGKSKEQQELQTLVRLRELAVKHKVAMQQQIKSLLLEFNIRISPSQGGLSGVVEGVLEDAENGFSMVFRQALSTSWQQLQRGIESIKQYDLYLEKAANGHEICKSLQALEGVGPLNAVNLYMALGCGEMGQFEKGRDASACIGLTPIQHSSGGKVKLGSVGKYVKNNMLRSCLVSGAMSAVNQAMRRPAKTKKEMWIQQMVERRGKRCTAVALANKTVRTAFAMLTNGTEYKAELLAA

SEQ ID NO: 16955 - protein, 341 aa, unidentified
  source 1..341: note = protein_bef10b2
  REGION 6..148: note = RuvC_domain
  SITE 9: note = RuvC_P1
  SITE 52: note = RuvC_P2
  SITE 87: note = RuvC_P3
  SITE 89: note = RuvC_P4
  SITE 92: note = RuvC_P5
  REGION 211..295: note = Tnp_domain
  SITE 219: note = Tnp_P1
  SITE 249: note = Tnp_P2
  SITE 257: note = Tnp_P3
  SITE 258: note = Tnp_P4
  SITE 270: note = Tnp_P5
MDITTIGLDLAKNVFQVHGINAAGDIIVRRRLRRTQVCTYFAGLRPCLIGMEACGTSHFWARELVALGHEVKIIPPSYVKPYVRRGKNDAADAEAICEAVTRPNMRFVPIKTEDQQAALMLHKARELLVRQQTMLTNALRAHMAELGMVAPLGRGKLNDIIAVIEDTEDESIPALAKAALKPLVMQLSANEAATAALDAEIKTWHKSNAASQRLATIPGVGYLTASAIAATVPDPSFFKSGREFSAWLGLVPRQNSSGGKERLGRISKQGNPYIRRLLVIGATSMLRYARAKTAPGADWVNGLLERRPARLVTVAMANKTARIAWVLLAREETYHTPSPAL

SEQ ID NO: 16956 - protein, 343 aa, unidentified
  source 1..343: note = protein_622e052
  REGION 7..149: note = RuvC_domain
  SITE 10: note = RuvC_P1
  SITE 53: note = RuvC_P2
  SITE 88: note = RuvC_P3
  SITE 90: note = RuvC_P4
  SITE 93: note = RuvC_P5
  REGION 212..296: note = Tnp_domain
  SITE 220: note = Tnp_P1
  SITE 250: note = Tnp_P2
  SITE 258: note = Tnp_P3
  SITE 259: note = Tnp_P4
  SITE 271: note = Tnp_P5
MEKITTIGLDLAKSIFQVHAIAEDGSLVTRRALRRSQVLEFFRKLEPCLVGLEACASAHYWANSIMQFGHTVRMMPAAYVKAYVKRNKTDAADAEAICEAVTRPTMRFVPIKTRDEQAACIVLKTRELFVRQRSQTANALRAHMAEMGIIAATGMTSIAKLILVLRNNEDQRLPNAARAALLEMADQIEMLSARIEKLDATIGATVKADAAARRLTSIPGVGPLIAATVRASVQDPSSFKTGRDFSAWIGITPRAHSSGGKERLGKISKQGSKQLRTLLIVGATSILKLARRGAKLPAWVVSLMARRPYKVAAVALANKIARTIWALLVKGGIYQMPAIMMKA

SEQ ID NO: 16957 - protein, 304 aa, unidentified
  source 1..304: note = protein_a1ff7ce
  REGION 8..148: note = RuvC_domain
  SITE 11: note = RuvC_P1
  SITE 54: note = RuvC_P2
  SITE 89: note = RuvC_P3
  SITE 91: note = RuvC_P4
  SITE 94: note = RuvC_P5
  REGION 217..298: note = Tnp_domain
  SITE 225: note = Tnp_P1
  SITE 255: note = Tnp_P2
  SITE 263: note = Tnp_P3
  SITE 264: note = Tnp_P4
  SITE 276: note = Tnp_P5
MKTEIAVLGIDLGKNSCSLAGLDGTGAVIKRRRMRPETVVTFTKELPPCVIAMEACCGAHHLARLLAAQGHDVRLMSPEYVRPYVKAQKNDDRDAEAIAEAATRPTMRFVSMKTEEQLDMQTLHRARDRLVGERTALINQLRAILLERGVTVPQGRSKLERSLIEMFDGDEAEPPATLTPRLRALIADMRAEWRELDRRITAFEDEFVARTREDEAARRLISIPGIGVMNATALIAAIGNGETFSRGRDLAAWLGLVPRQITTGGRPRLVGISKRGNKYLRKLLIHGARAALPSLLTSSTPLGG

SEQ ID NO: 16958 - protein, 342 aa, unidentified
  source 1..342: note = protein_1dfefc1
  REGION 9..151: note = RuvC_domain
  SITE 12: note = RuvC_P1
  SITE 55: note = RuvC_P2
  SITE 90: note = RuvC_P3
  SITE 92: note = RuvC_P4
  SITE 95: note = RuvC_P5
  REGION 214..302: note = Tnp_domain
  SITE 222: note = Tnp_P1
  SITE 252: note = Tnp_P2
  SITE 260: note = Tnp_P3
  SITE 261: note = Tnp_P4
  SITE 273: note = Tnp_P5
MVDISRMIVGVDIAKRVFQLYWVEMDTGEEMNVRLSRAKFLNHFANRAPCLVAMEACGGSQHWARRLLSYGHEVQILPAKLVRGFVRGNKNDAHDARAIWTAVQQPGVRTVAVKTEEQQAVLALHRMRQQLVKFRTAQINGLRGLLAEYGEVMPKGRAGLKRDLPGALGRVSERLPGMATETLREQWARVLQLDEEIARIERRLGFWHRSNDASRRIAEIPGVGVLSATAAVAAMGDPKAFKSGREFAAWLGLVPRHVGTGGRVKMLGISKRGDTYLRTLLIHGARSVFTNSKAPPAWARRVAERRPANVATVALANKTARIIWALLAHDRTYQRDLVNQPG

SEQ ID NO: 16959 - protein, 341 aa, unidentified
  source 1..341: note = protein_1281f19
  REGION 7..149: note = RuvC_domain
  SITE 10: note = RuvC_P1
  SITE 53: note = RuvC_P2
  SITE 88: note = RuvC_P3
  SITE 90: note = RuvC_P4
  SITE 93: note = RuvC_P5
  REGION 210..296: note = Tnp_domain
  SITE 218: note = Tnp_P1
  SITE 248: note = Tnp_P2
  SITE 256: note = Tnp_P3
  SITE 257: note = Tnp_P4
  SITE 269: note = Tnp_P5
MSEVSIIGLDIAKHVFQAHGVDASGHAILRRKIARSKLLPFFAAHPPCLVVLEACGGAHHWARELLKLGHDVRLIAPAYVKPFVKRQKNDAADAEAICEAAQRPSMRFVPVKTEEQQAAAMVFRGRDLLVRQRTQISNALRGHMTEYGWIAPKGLAHLEKLRALLSDRSAVPEGVRSVCMVLLDNLAMLDRQIALLDKEIVRRSREDAVALRLMTIPGIGPITATAITALAPPSGTFSKGRDFAAWVGLTPRQHSTGGKQKLGSISKMGERTLRRLLIIGSSAVVLQASKRGAAKGSWLEQMLARKPRMLVTVALANKTARIVWALLTKDEVYKAPVAATA

SEQ ID NO: 16960 - protein, 340 aa, unidentified
  source 1..340: note = protein_cb78d32
  REGION 4..157: note = RuvC_domain
  SITE 7: note = RuvC_P1
  SITE 55: note = RuvC_P2
  SITE 96: note = RuvC_P3
  SITE 98: note = RuvC_P4
  SITE 101: note = RuvC_P5
  REGION 217..302: note = Tnp_domain
  SITE 225: note = Tnp_P1
  SITE 255: note = Tnp_P2
  SITE 263: note = Tnp_P3
  SITE 264: note = Tnp_P4
  SITE 275: note = Tnp_P5
MTMIGIDPHKATHTAVAVDDNEHVVDKFQLRASSLQAERLREWADRFTKREWAIESANGLGYLVAQQLVAAGEVVFDVPPVLASRVRVLGSGHSQKNDPNDARSIAIAAMRSDRLALVRPDDHSRVLRLLAKRHRDMARLRNKHCTRLHALLLELEPGGISSEITVTKANVLLNGVTVQVTRHRVMIANELVDDIARLDVALKASKKRVTVAIAASATTLTEIVGVGPICAAIIIGFTGDVTRFPTKGHYATYNATAPIEASSGPRPKHRLNPRGNRKLNHAIHIAAISQLRFDTEGRAYYERKLAEGKSSKDAIRALKRRISDRVYRHLISDTHRAATD

SEQ ID NO: 16961 - protein, 315 aa, unidentified
  source 1..315: note = protein_d1c296f
  REGION 12..162: note = RuvC_domain
  SITE 15: note = RuvC_P1
  SITE 57: note = RuvC_P2
  SITE 97: note = RuvC_P3
  SITE 99: note = RuvC_P4
  SITE 102: note = RuvC_P5
  REGION 193..276: note = Tnp_domain
  SITE 200: note = Tnp_P1
  SITE 229: note = Tnp_P2
  SITE 237: note = Tnp_P3
  SITE 238: note = Tnp_P4
  SITE 250: note = Tnp_P5
MAMPVSVTKPMVGVDVAKNELVIYHAKLDVLTAIPNDKAAIKRWLKALPGPVAVAIESTNIYHLEFADLAYEAGCEIYMVGGYELHHYREGVKIRAKTDALDAKLLARYLKNEGHELHPWTPPSALYRQLLSLFRRRAALVQARVALVQSWANEPLLKTAFAEQIAAMQRLETLIEKTIKDHLRDAGLLGQLNRCLKVEGIGFLTGARLLTAFQRGDFRNADAFIAFLGMDLRVSKSGQKDGRRSLSKRGDPEVRRLLHNAAMSASRTSAWRSFYEKQRARGFTTTQALVMLARKLARIVFALLKEQSEYQPKAA

SEQ ID NO: 16962 - protein, 337 aa, unidentified
  source 1..337: note = protein_66d6152
  REGION 14..165: note = RuvC_domain
  SITE 17: note = RuvC_P1
  SITE 65: note = RuvC_P2
  SITE 103: note = RuvC_P3
  SITE 105: note = RuvC_P4
  SITE 108: note = RuvC_P5
  REGION 208..295: note = Tnp_domain
  SITE 216: note = Tnp_P1
  SITE 246: note = Tnp_P2
  SITE 254: note = Tnp_P3
  SITE 255: note = Tnp_P4
  SITE 268: note = Tnp_P5
MKKIKEERLFLESVGIDVSKLTIDVFLYNKKHHRQFSNSSRGFVEMQKWIKAELGSLTDLIYCFEHTGWYCILLGHFLHEQGMNYSCINPIELKRSIGFKRGKSDKTDSYEIARFAWLRRDELKTSIPLPIKLLELQRLMSVREQLVKQSTSLKNLEKGLLVTIEKITGDIGLKTVRQSIKQLEQQIQKIEKAMESLIASEPKMKSNYKLTKSVKGVGRILAIQMLLHTHNYSRFEEWRQFSAYCGLVPYPYQSGTSIHGRKKIHAISDIKMKSLLSMSAISAIQHDAELKIYYQKRVEEGKPKMVVLNIIRNKIVSRVFATVKRGTPYVVINKFAA

SEQ ID NO: 16963 - protein, 341 aa, unidentified
  source 1..341: note = protein_8a4c600
  REGION 5..151: note = RuvC_domain
  SITE 8: note = RuvC_P1
  SITE 53: note = RuvC_P2
  SITE 91: note = RuvC_P3
  SITE 93: note = RuvC_P4
  SITE 96: note = RuvC_P5
  REGION 211..297: note = Tnp_domain
  SITE 219: note = Tnp_P1
  SITE 249: note = Tnp_P2
  SITE 257: note = Tnp_P3
  SITE 258: note = Tnp_P4
  SITE 270: note = Tnp_P5
MGEYIGLDVSLKDTAISVRRDGKRIWRGKCPSDPSLIADVLRKRAPEPKRVVFETGPLSVWFYHALQAEGLPAICIDARHAKAALDMAPNKTDANDADGLAHLAEVGFYREVRVKGYDSMLVRTLVAARSRLVQITTELSNQIRGLMKTFGLVMPRGKGGTFEAEVQRLLAGQEELARIILPVLEAWRSVRSRAAILGRQLLANARQSAACQRLMSIPGVGAITATSFTAAIEDPANFKTSRSVGAWLGLTTRRYQSGEVDYDGHISRRGDAHLRGLLYEAATVILTRTHAESDLRQWGLMLRERIGFKRAAVAVARKLAVIMHAMLKSGEPFNRVVGATA

SEQ ID NO: 16964 - protein, 327 aa, unidentified
  source 1..327: note = protein_cf83aba
  REGION 4..155: note = RuvC_domain
  SITE 7: note = RuvC_P1
  SITE 60: note = RuvC_P2
  SITE 100: note = RuvC_P3
  SITE 102: note = RuvC_P4
  SITE 105: note = RuvC_P5
  REGION 238..276: note = Tnp_domain
  SITE 249: note = Tnp_P5
MFQLGIDVSKKTLDLCLLREGVKGRVKNRKLKNDFNAVGTVVSWLRKQHCEPGDAHIIMEATGVYHESLAYGLHDAGAKVSLANPHRSREFARGMDILTKNDKVDAYMLACYGALKEPEPWEPPPENVRYLSALLRRHDALVTDSSREKNRLEKCRATDTPAAVAESIENVLRNLSAELQRLETLIQGYLDQHPELKKDFDLLTSIKSVGFQLGLNMLVILRSHRFDTAEQAAAKVLRHLGQSRLSKIGPPEIRAKLYLASLCGLRFNPAMKAMYERLCQRGKAKMCAIGALMRKLVHWCYGVLHTQQPFDTEYRSSDAHSVCKAAC

SEQ ID NO: 16965 - protein, 340 aa, unidentified
  source 1..340: note = protein_82a8f5a
  REGION 6..161: note = RuvC_domain
  SITE 9: note = RuvC_P1
  SITE 66: note = RuvC_P2
  SITE 104: note = RuvC_P3
  SITE 106: note = RuvC_P4
  SITE 109: note = RuvC_P5
  REGION 211..295: note = Tnp_domain
  SITE 217: note = Tnp_P1
  SITE 247: note = Tnp_P2
  SITE 255: note = Tnp_P3
  SITE 256: note = Tnp_P4
  SITE 268: note = Tnp_P5
MEKFIVGGDISKDKINFAVQYGNQIVHECEIKNSYATLKSFIKEVQQIAQDQSGSVDTVQLCFVMEYTGIYNNILLGCLVEQDIDAFVCSGLAIKNASGLIRGKNDKIDAARIADYGKRHADKLKKYEPSSEIINQLKIMNTQRARLVKMKTQLTQDHDDIKKFHSKEMYQMMKQSTEKVKAELEKSINEIEKKMMEVIDKDEAVKANFKFAVSVPGVGKVTAIALICYTNNFTSFASSKALGSYCGVVPFEHSSGRYKGREKVSYMANKKLKTLLHLCATSSIKTKSIFKEYYIRKIEIEKKNKMLVLNNLRNKILKTVFSCVKNKTKFDREYKYEMAA

SEQ ID NO: 16966 - protein, 270 aa, unidentified
  source 1..270: note = protein_f8f911e
  REGION 3..81: note = RuvC_domain
  SITE 21: note = RuvC_P3
  SITE 23: note = RuvC_P4
  SITE 26: note = RuvC_P5
  REGION 145..233: note = Tnp_domain
  SITE 153: note = Tnp_P1
  SITE 183: note = Tnp_P2
  SITE 191: note = Tnp_P3
  SITE 192: note = Tnp_P4
  SITE 204: note = Tnp_P5
MGHEVKLLPANYVKPYVKRGKNDEIDAEAVWEGLERPTMRFVPIKSCEQQGVLALHKVRSQLVGQRTRLVNLLRAYMAEFGLVAPQGIWRIAELKAIVGDKADERLPALGRVALTPVIQQLDLLASAIEDLDRAVVAHCRSNETSRRLSAIPGIGPITASALVATVGDATVFKSGRHFAAWLGLTPKQHASGFKDRKGRISKMGNPYLRTLLVLGATATMRQRSQTPASAFVRRLLAKKKSVRLITVALANKMARIVWVLMARGEPYRAA

SEQ ID NO: 16967 - protein, 271 aa, unidentified
  source 1..271: note = protein_fdb4299
  REGION 2..76: note = RuvC_domain
  SITE 17: note = RuvC_P3
  SITE 19: note = RuvC_P4
  SITE 22: note = RuvC_P5
  REGION 141..226: note = Tnp_domain
  SITE 149: note = Tnp_P1
  SITE 179: note = Tnp_P2
  SITE 187: note = Tnp_P3
  SITE 188: note = Tnp_P4
  SITE 200: note = Tnp_P5
MRLIAAQFVKPFVKSNKNDFIDAEAIAEAVERKNMRFVPIKTDDQLDLQAIHRVRDRLVSRRTAVINQIRAFLLERGLVFAKRPAQLKAAMADVRENAEADLTPMMRNLINVLWEEWKIVDQQIEELGDALERISAADAGCTRIRKIPGIGPVVATAIVAAIGNGAAFRKGREFAAWLGIVPRQYSTGGQARLLGISKRGNVYLRKILIHGARAAVLRIKRDRAPIGAWLDRLDARAHKNIVIVAMANKIARIAWAVLSSGNEYRPAAVPA

SEQ ID NO: 16968 - protein, 342 aa, unidentified
  source 1..342: note = protein_0774db6
  REGION 6..147: note = RuvC_domain
  SITE 9: note = RuvC_P1
  SITE 52: note = RuvC_P2
  SITE 87: note = RuvC_P3
  SITE 89: note = RuvC_P4
  SITE 92: note = RuvC_P5
  REGION 210..295: note = Tnp_domain
  SITE 218: note = Tnp_P1
  SITE 248: note = Tnp_P2
  SITE 256: note = Tnp_P3
  SITE 257: note = Tnp_P4
  SITE 269: note = Tnp_P5
MKDTIIGVDLAKRVFQLHGATATGHVMFRKKLTREQFRRFMAEHPSCMVVFEACGSASYWAREMEKLGHDAKLIAPQYVKAFVKRQKNDAADAEAIVIAARQPEMRFVAPKTEDQQARAMLFRSRERLVHQRTELVNALRAVLYEQGHVFPAGIGHLKRIEALVEDPTCDLPALITAECRDLLAQIAEQTDRIDAKTKALKELAAATNTARRLQTMPGVGPLTALAVEAFAPDVSQFKRGRDFAAWLGLVPRQYSSGGKERLGRISKAGQTDIRRLLIIGAMTRIMGRARHKIPADSWLGRMLARKPKMLVAIALANKMARQLWAMLTKNRDYRDPALATTV

SEQ ID NO: 16969 - protein, 321 aa, unidentified
  source 1..321: note = protein_3bee4fd
  REGION 9..164: note = RuvC_domain
  SITE 12: note = RuvC_P1
  SITE 57: note = RuvC_P2
  SITE 97: note = RuvC_P3
  SITE 99: note = RuvC_P4
  SITE 102: note = RuvC_P5
  REGION 196..280: note = Tnp_domain
  SITE 204: note = Tnp_P1
  SITE 233: note = Tnp_P2
  SITE 241: note = Tnp_P3
  SITE 242: note = Tnp_P4
  SITE 253: note = Tnp_P5
MSASSSVVVGIDVAKGHVDVAVLGAKFDAQRFDNKAEGHTALAVALTPLGVALVVMEATGGYEAALACALQAAGLSVAVVNPRQARDFAKSMGRLAKTDAIDARMLAEFASVLVRRDDLAHLLRPLTDPDQQALAAMVTRRRQLLAMLLSERQRLQLAMAVVRPSIEAMIEAIKKQLDDVEAQMVAHVQVHFAALDTLLRSTSGIGPVSSASLIAELPELGKLNRREIAALVGVAPMANDSGKARGRRRVQGGRFEIRRVLYMATLTAARHNPAIKAFYDRLKAAGKLPKVALVACMRKLLTMLNAMVKTNKPWDISLHGA

SEQ ID NO: 16970 - protein, 343 aa, unidentified
  source 1..343: note = protein_6ce98c6
  REGION 6..148: note = RuvC_domain
  SITE 9: note = RuvC_P1
  SITE 52: note = RuvC_P2
  SITE 87: note = RuvC_P3
  SITE 89: note = RuvC_P4
  SITE 92: note = RuvC_P5
  REGION 210..295: note = Tnp_domain
  SITE 218: note = Tnp_P1
  SITE 248: note = Tnp_P2
  SITE 256: note = Tnp_P3
  SITE 257: note = Tnp_P4
  SITE 269: note = Tnp_P5
MSIQVIGIDLGKSNFHLVGHDHKGQVVLRKKLSRQQLVQFVQNTPVSTIAFEACGGAHWLGRLCMSHGHSVKLLPPQYVKPYVKGNKNDFIDADAIAEAATRPSMRYVPVKSEEAQLLSAIHRIRQGYIKDRTACMSRIGALLLEFGVSFPQGHSVMKTLPAWLAIHARHLPILIQNELLGLHQHYQALMLKVAEQDSKLKRYLAQNEDAQLLKSIPGIGDITASQCIAELGNGSQFHNGRNLAAWLGLVPHQHSTGGKARLLGISKRGNKHLRTLFIHGARAILSRPEKTGAVFGSWLTQLRASKPFNVVCVALANKLARMVWAVLKYRQGFNAAKLQSGCA

SEQ ID NO: 16971 - protein, 329 aa, unidentified
  source 1..329: note = protein_46e7e8c
  REGION 12..169: note = RuvC_domain
  SITE 15: note = RuvC_P1
  SITE 66: note = RuvC_P2
  SITE 106: note = RuvC_P3
  SITE 108: note = RuvC_P4
  SITE 111: note = RuvC_P5
  REGION 201..287: note = Tnp_domain
  SITE 209: note = Tnp_P1
  SITE 239: note = Tnp_P2
  SITE 247: note = Tnp_P3
  SITE 248: note = Tnp_P4
  SITE 260: note = Tnp_P5
MSDELTQPVTWVGVDISKKKFDVFLERANGRGKSKVFSNNAAGVAQLLTWGQAQGLDWTRTGVCLEATGPYGTLLARTLHEAGVVIAIENPARIQAFARTLGVRVKTDKADAQWIARYAKQHPPRRWQPPSAQEERLQALVGRLDDLIVMRTMEMARAQQLTGEALASVTNILKALEEEIERLRAAICHHIDQDPTLRQPAQLLGSIPGMGQETISRVLAHLGTLTRFENVRQLVAFVGLNPRVRQSGQWIGTSPISKQGSSAIRRALYMPALVAKRYNPILRDFAERLAANGKRPKQIVVAIMRKLLHMMWGILKSGRPFDPAMGLQG

SEQ ID NO: 16972 - protein, 339 aa, unidentified
  source 1..339: note = protein_b837c8b
  REGION 6..147: note = RuvC_domain
  SITE 9: note = RuvC_P1
  SITE 52: note = RuvC_P2
  SITE 87: note = RuvC_P3
  SITE 89: note = RuvC_P4
  SITE 92: note = RuvC_P5
  REGION 210..298: note = Tnp_domain
  SITE 218: note = Tnp_P1
  SITE 248: note = Tnp_P2
  SITE 256: note = Tnp_P3
  SITE 257: note = Tnp_P4
  SITE 269: note = Tnp_P5
MNSTVVGVDIAKMVFQVHFVDQDSGEIVNKQIKRSKCLEFFGNRAPCLIGMEACGGAHHWARRLTKIGNQVKLMPAEFVKAFNICSKNDAADARAIWLAVQQPSEPVAIKTEMQQAVLALHRMREQLVKFRTMQINALRGLLTEYGEVMGKGRTALDKAMPEVLSRVAERLPAVLVDTMREQWNGLIALDEQIAGIERRMREWKKDDPAVKAISEIPGVGLLTATAAVAMMGDPKAFRSGREFAAWAGLVPRQTGSGGKVHLHGISKMGDAYLRKLLIHGARSVLTHAKDPGPWIDQISKRRPPNVVTVALANKMARTIWALLAHNRPYQKDYLSAKPA

SEQ ID NO: 16973 - protein, 347 aa, unidentified
  source 1..347: note = protein_b803d9f
  REGION 7..148: note = RuvC_domain
  SITE 10: note = RuvC_P1
  SITE 53: note = RuvC_P2
  SITE 88: note = RuvC_P3
  SITE 90: note = RuvC_P4
  SITE 93: note = RuvC_P5
  REGION 212..298: note = Tnp_domain
  SITE 220: note = Tnp_P1
  SITE 250: note = Tnp_P2
  SITE 258: note = Tnp_P3
  SITE 259: note = Tnp_P4
  SITE 271: note = Tnp_P5
MRNITTVGIDLAKLVFQVHGIDARGRVTLRKQLKRSQVVTFFAQLAPCLIGMEACAGAHFWSRKLVEFGHTVKLIAPQFVKPYVKTNKNDAADAEAICEAVGRPNMRFVPIKNTEQQALLGLHRARQGFVGARTAQANQVRGLLAEFGLVMPAGIRCIERKLPEVLQDADNGLSDASRALFARLLEHFRVLDRQVEELEREIGAWHREDSASRRLEAIPGIGPITASALVASVGDAKVFHNGRQFAAWLGLVPRQRSSGGKTNLQGISKRGDTYLRTLLIHGARSVLLSLKRDPARADGWLAHVANRRNPNIAAVALANKNARTVWALLAHGREYQAGYPSANAMTA

SEQ ID NO: 16974 - protein, 339 aa, unidentified
  source 1..339: note = protein_85e5cff
  REGION 6..147: note = RuvC_domain
  SITE 9: note = RuvC_P1
  SITE 52: note = RuvC_P2
  SITE 87: note = RuvC_P3
  SITE 89: note = RuvC_P4
  SITE 92: note = RuvC_P5
  REGION 210..295: note = Tnp_domain
  SITE 218: note = Tnp_P1
  SITE 248: note = Tnp_P2
  SITE 256: note = Tnp_P3
  SITE 257: note = Tnp_P4
  SITE 269: note = Tnp_P5
MNATPVGVDIAKSVFQVHYIDAETGEIVNKAIKRGQFLEHFVSRAPCLIGMEACGSAHHWARQLTSIGHEVKLMPAQFVKAFNIRNKSDAADARAIWLAVQQPCKAVAIKTEMQQAVLMMHRQREQLVKFRTMQINGLRGMLSEFGETMGRGRAAMCKAIPDALARVEARLPKVLIDTLREQWARVGTLDEEIATIERRLREWQKDDKAVRAVIEIPGVGLLTATAAVAMMGDPTAFKSGREFAAWVGLVPKQFGTGGKVDLRGISKRGDTYLRTLLIHGARAVLTNSKEPGKWVEDMKKRRPPNVVVVALANKMARTIWAVLAHDRPYQKGYASVKPV

SEQ ID NO: 16975 - protein, 288 aa, unidentified
  source 1..288: note = protein_5637a67
  REGION 1..98: note = RuvC_domain
  SITE 37: note = RuvC_P3
  SITE 39: note = RuvC_P4
  SITE 42: note = RuvC_P5
  REGION 161..247: note = Tnp_domain
  SITE 169: note = Tnp_P1
  SITE 199: note = Tnp_P2
  SITE 207: note = Tnp_P3
  SITE 208: note = Tnp_P4
  SITE 220: note = Tnp_P5
MEACGGANYWARTFIAMGHEVKLIAPQYVKPYVKGNKNDFNDAEAITEAAQRPSMRFVSIKSIERQDIQNYHRQRELIKKERKALASQIRGLLAEYGIVIKKGTYNLRMELPRILENADNELSFLSRELFSELYEALQIIEQRFKKCEKRIIRLNKDNDVCKRLDEILGIGPIIASATYAAAGDGKDFVNGRHFSAWLGLVLGQCSTGGVPKLLGITKRGNAYLRTQFIHGARSVLKSSAGKSDKFSLWAQALMLRRGHNKACVAIANKMARMAWVIMAKGETYKPDL

SEQ ID NO: 16976 - protein, 344 aa, unidentified
  source 1..344: note = protein_99bf5ea
  REGION 6..148: note = RuvC_domain
  SITE 9: note = RuvC_P1
  SITE 52: note = RuvC_P2
  SITE 87: note = RuvC_P3
  SITE 89: note = RuvC_P4
  SITE 92: note = RuvC_P5
  REGION 211..297: note = Tnp_domain
  SITE 219: note = Tnp_P1
  SITE 249: note = Tnp_P2
  SITE 257: note = Tnp_P3
  SITE 258: note = Tnp_P4
  SITE 270: note = Tnp_P5
MEITTVGIDLAKNVFQIHGIDQHGKAVLKKQLKRAQMAPFFVNLPPCLVGMEACGSAHHWARKLQAMGHTVRLMAPQFVKPYVKTNKNDAADAEAICEAVGRPTMRFVPTKNVEQQAVLALHRVRQGFVKARTAQGNQIRGLLAEFGIIIPQGISNIATRAPELIEDASNELPGAFRVLVQRLLDHLKDLDRQVDELEVQIQTWHRNSDLSTKIAQVPGIGPISASALIASIGDAKNFDSGRQLAAWLGLVPKQHSTGGKSKLLSISKRGDTYLRTLQIHGARSVIYHAAKKPESCSWVNAVVNRRNKNVAAVALANKNARIIWALLAHDQRYEAGYTRTVAVG

SEQ ID NO: 16977 - protein, 341 aa, unidentified
  source 1..341: note = protein_6559463
  REGION 6..148: note = RuvC_domain
  SITE 9: note = RuvC_P1
  SITE 52: note = RuvC_P2
  SITE 87: note = RuvC_P3
  SITE 89: note = RuvC_P4
  SITE 92: note = RuvC_P5
  REGION 211..297: note = Tnp_domain
  SITE 219: note = Tnp_P1
  SITE 249: note = Tnp_P2
  SITE 257: note = Tnp_P3
  SITE 258: note = Tnp_P4
  SITE 270: note = Tnp_P5
MQVITIGIDLAKNVFQVHGVDANDKVVFNKPLRRSQVLPFFAELAPCLIGMEACASAHYWARELKKLGHNVRLMPAKDVMAYVKRGKNDAIDAAACCEAVRRPTVRTVPVKTVDQQARLMQHRVRDLMIRQRTQSINALRSHMAELGIVAAQGYEGLKELLAIVADMSDARLPEDARASLSALVAQIASCQAEIGAIEKRLLAQHRKNADSKRLETIPSVGVIGASAIVATVPEASIFKTGRDFAAWIGIVPREDSTGGKQRLGPISKQGDQYLRRILIVGALAVLRQARAHPEKYPWVTQLLARKPAKVVAVAIANKTARIAWAVLTKKESYRVQTNAVA

SEQ ID NO: 16978 - protein, 340 aa, unidentified
  source 1..340: note = protein_81c5b30
  REGION 7..148: note = RuvC_domain
  SITE 10: note = RuvC_P1
  SITE 53: note = RuvC_P2
  SITE 88: note = RuvC_P3
  SITE 90: note = RuvC_P4
  SITE 93: note = RuvC_P5
  REGION 210..295: note = Tnp_domain
  SITE 218: note = Tnp_P1
  SITE 248: note = Tnp_P2
  SITE 256: note = Tnp_P3
  SITE 257: note = Tnp_P4
  SITE 269: note = Tnp_P5
MSEISIIGLDIAKHVFQAHGADASGRAVLRKKISRAKLLPFFASQPRCRVVLEACGGAHHWARELARLGHDVQLIAPAYVRPFVKRQKNDAADAEAICEAAQRPSMRFVPIKSEAQQAAAMVFRGRDLLVRQRTQISNALRGHMAEYGWVAPKGLAHLDKLATLLADPTAVPEGVRSVCTALLENLALLDRQIAALDKEIVRRSREDEIARRLMTIPGIGPITATAITALAPPPGTFAKGRDFAAWVGLTPRQHSTGGKQKLGAISKMGERTLRRLLIIGSSAVVLQASRRGAPRGSWLEQMLARKPRMLVTVALANKTARIVWALLMKNEDYRAPVVAA

SEQ ID NO: 16979 - protein, 329 aa, unidentified
  source 1..329: note = protein_fcca76f
  REGION 7..159: note = RuvC_domain
  SITE 10: note = RuvC_P1
  SITE 59: note = RuvC_P2
  SITE 97: note = RuvC_P3
  SITE 99: note = RuvC_P4
  SITE 102: note = RuvC_P5
  REGION 200..287: note = Tnp_domain
  SITE 208: note = Tnp_P1
  SITE 238: note = Tnp_P2
  SITE 246: note = Tnp_P3
  SITE 247: note = Tnp_P4
  SITE 260: note = Tnp_P5
MDIKEVIGIDASKLTLDCCIHGSGLQNVFSNNLKGIGQLADWALSNSSFKKKQVLFVFEDTGLYTFELINYLNDSNYYMFVGSGLEIKRSLGIARGKDDKADAKRIALYGYRIREEITPYHMPSKSLVTLKRLMSLRRKLVVHRGGYVANLKEQKRVLKNEEVLFAAQQAVVDAIAVQITGIEKEIERIIAQDPELERLQKLLTGITGIGKVTARFLIVYTVGFTAFENWRKFASYVGIAPFPNRSGTSIKGRNKVSNLANKEGKALLHMCATCAIRCNPEMKVYYKKRLEKGKHTMSTLNIIRNKLLARAFAVAGRGTPYVDTMKFAS

SEQ ID NO: 16980 - protein, 321 aa, unidentified
  source 1..321: note = protein_f4174f5
  REGION 4..149: note = RuvC_domain
  SITE 7: note = RuvC_P1
  SITE 52: note = RuvC_P2
  SITE 92: note = RuvC_P3
  SITE 94: note = RuvC_P4
  SITE 97: note = RuvC_P5
  REGION 191..278: note = Tnp_domain
  SITE 199: note = Tnp_P1
  SITE 229: note = Tnp_P2
  SITE 237: note = Tnp_P3
  SITE 238: note = Tnp_P4
  SITE 251: note = Tnp_P5
MNYVGIDVSKATFVVAYSSAKGSETKTFENTIKGVHKFIQTITPEDTHCVMEATGNYSMLLVYLLSKAGITVSMENPLKIKNFARVMLSVVKTDEIDARMIAMYGEKMNPAPFKLRSDSLMVLKQKRTVLRQLKKQLNANTNLQESMEALPFIDSVCKKILDKTMKFLRKQINEMEKELSSIANIEYRKQMDLLTSIKGIGVTLATALIVATGGFTYFDNAKQLTRYLGLSPTYQQSGTSVNRKGHINRNGDSYLRSQLYVAAFSSLRCNTECKACFDRLRANGKPGKVAVIAVANKLIRQAFAVVTQGKEYVDGFISAKK

SEQ ID NO: 16981 - protein, 260 aa, unidentified
  source 1..260: note = protein_d558dae
  REGION 1..66: note = RuvC_domain
  SITE 5: note = RuvC_P3
  SITE 7: note = RuvC_P4
  SITE 10: note = RuvC_P5
  REGION 129..221: note = Tnp_domain
  SITE 137: note = Tnp_P1
  SITE 167: note = Tnp_P2
  SITE 175: note = Tnp_P3
  SITE 176: note = Tnp_P4
  SITE 188: note = Tnp_P5
MKRQKNDVADAEAICEAVGRPTMRFVETKTPEQQGCLTLHRTRHLLIRQQTSVINAIRAHLAEFGIVAPVGRRGVDQLLAVVADASDKRLPEVARACVAALGAHLQLLKAPILEFDRMIRAWHRSNETSRRLDAIPGIGPALATALVASVADPQAFRSGRDFSAWIGLVPKQSSSGGKERLGNISKRGDRYLRSLFTAGALAVIRYAKIHGTTHRPWLTALLARRPTKVAAIALANKLARMAWAMMARGERYREPVALAA

SEQ ID NO: 16982 - protein, 341 aa, unidentified
  source 1..341: note = protein_e8cb9b8
  REGION 5..151: note = RuvC_domain
  SITE 8: note = RuvC_P1
  SITE 53: note = RuvC_P2
  SITE 91: note = RuvC_P3
  SITE 93: note = RuvC_P4
  SITE 96: note = RuvC_P5
  REGION 211..297: note = Tnp_domain
  SITE 219: note = Tnp_P1
  SITE 249: note = Tnp_P2
  SITE 257: note = Tnp_P3
  SITE 258: note = Tnp_P4
  SITE 270: note = Tnp_P5
MGEYIGLDVSMKDTSISVRREGKRIWRGKCTSDPETIARMIRKHAPSPERVIFETGPLSVWFYHALQAEALSAICVDARHAKAALDMATNKTDANDADGLAHLAEVGFYREVRVKSFDSMLTRTLVAARTKLVRIKTEISNQIRGLMKTFGLVIPAGKGSTFEANVRVRLSENSELAAIIMPLLEAWRSIRLRAAELTRRLIGDARQSESCQLLMSIPGVGVVTASAFATAVEDPANFRTSRSVGAWLGLTTRRYQSGQVDYNGHISRRGDHQVRSLLYEAASVILTRSSAQSALRDWGLKLRERIGFKRAAVAIARKLAVIMHAMLKSGELFDRSAGAPA

SEQ ID NO: 16983 - protein, 313 aa, unidentified
  source 1..313: note = protein_5b08717
  REGION 3..120: note = RuvC_domain
  SITE 26: note = RuvC_P2
  SITE 61: note = RuvC_P3
  SITE 63: note = RuvC_P4
  SITE 66: note = RuvC_P5
  REGION 183..270: note = Tnp_domain
  SITE 191: note = Tnp_P1
  SITE 221: note = Tnp_P2
  SITE 229: note = Tnp_P3
  SITE 230: note = Tnp_P4
  SITE 242: note = Tnp_P5
MFRKKLRREQVLRFLATQPACTVAMEACAGSHYWSREIAKLGHDVRLIAPGYVKPFVKRQKNDAADAEAICEAAQRPTMRFVTAKSEEQQAAMVFRIRDLVVRQRTQTINAMRGHLAEFGLVAAQGLFYVAKLVAAIEDKDSAIPEAVRPVLCLLVEQLRTLDERAAILNREIARRAKEDAEARRLMTIPGIGPIAATAVAALAPSARTFRRGRDFAAWLGLTPLQRPSGGKQKLGETSRMGERTLRRLLIVGASATVRWAMRKGAAADPWLSGMLSRKPPMLVIVALANRTARVVWALMAKGGTYRAPALAG

SEQ ID NO: 16984 - protein, 341 aa, unidentified
  source 1..341: note = protein_bbdb3be
  REGION 8..164: note = RuvC_domain
  SITE 11: note = RuvC_P1
  SITE 64: note = RuvC_P2
  SITE 102: note = RuvC_P3
  SITE 104: note = RuvC_P4
  SITE 107: note = RuvC_P5
  REGION 205..292: note = Tnp_domain
  SITE 213: note = Tnp_P1
  SITE 243: note = Tnp_P2
  SITE 251: note = Tnp_P3
  SITE 252: note = Tnp_P4
  SITE 265: note = Tnp_P5
MQTTKYFIGFDISADDFSASCITSPDNLVFSTQKFSNNIDGSNEFLTLLSNNNIKQSDAIICMEATGVYSENISYFLASKGFTISIEAPHKIKNKTKDSPRKNDFVDALSIAEYAYRYSDKLPIWKPINEIIEQTQVLLTTREHLSVQMIANVNALKTLKHKYYQTPLANQIYEQTISKLKEHIKQIDQEIKTLVDKDDSFKNNISLAKSVPGVGLLLAANLLVLTKGFTEQLNYKHIAAYSGICPYEQISGTSLHKPPRSRMCGPAKLRKLLYLAALSVRTHNQNFKKYFLRKQAEGKNNRLILNNIENKLLKITCAVINSGIAYTENFKSINPELLKTA

SEQ ID NO: 16985 - protein, 348 aa, unidentified
  source 1..348: note = protein_162cfa0
  REGION 6..147: note = RuvC_domain
  SITE 9: note = RuvC_P1
  SITE 52: note = RuvC_P2
  SITE 87: note = RuvC_P3
  SITE 89: note = RuvC_P4
  SITE 92: note = RuvC_P5
  REGION 214..295: note = Tnp_domain
  SITE 222: note = Tnp_P1
  SITE 252: note = Tnp_P2
  SITE 260: note = Tnp_P3
  SITE 261: note = Tnp_P4
  SITE 273: note = Tnp_P5
MQISVLGIDLGKNSCSVVGLDEAGRIVLRRRLSRARVIELSSQLPACVMAMEACCGAHHLGRILAAHGHRVRLMSPEYVQPYVKAQKNDERDAEAIAEAATRPTMRFVDLKSEEQLDMQSLHRARSRLVGERTALINQLRAVLLERGIIVAQGRGRLAQYLSQALDGDEAAPLQLSSRIRLLIEDMRAQWRESDRRVAEFDGEFVAAARSEAAARRLSTIPGIGAINATALVAAVGDARSFARARDLAAWLGLVPRQATTGGRPRLLGITKRGNKYLRTLLIHGARAALPSLLTVESPLGNWLRGLSARAHRNTVIVALASKLARIAWAVLRSSTSYNAAIGRSVIAA

SEQ ID NO: 16986 - protein, 339 aa, unidentified
  source 1..339: note = protein_de7b7f7
  REGION 21..165: note = RuvC_domain
  SITE 24: note = RuvC_P1
  SITE 68: note = RuvC_P2
  SITE 106: note = RuvC_P3
  SITE 108: note = RuvC_P4
  SITE 111: note = RuvC_P5
  REGION 211..298: note = Tnp_domain
  SITE 219: note = Tnp_P1
  SITE 249: note = Tnp_P2
  SITE 257: note = Tnp_P3
  SITE 258: note = Tnp_P4
  SITE 271: note = Tnp_P5
MMNFSNHLLNRKSKVMKNIIIGIDISSKTLDICIKNETVSYFSIENKVPVIKRFFKSYSGEKVIIAMENTGRYNWNLFEVLEKFDFKVYVISALHIKKSIGLVRGKNDKIDALRICNFIEKNHQESREWKPGSCSIKKIKILLTERASRIKIKKQLIVQQHDYKLMKSIGLDKQLKDLNNKLLKDIDVQIKIIENDIENIIQNQESLNQQQKLIKSVPGVGQVLSWTLLSKTEGFTTITDPRKMACYSGVVPFDFQSGTSLKRRPGVSMLADKNLKTILHMAAMSAIRSDNDLRTYYIRKVDEGKNKMSVLNAVRNKIIHRVFAVIKNQIPYQKDLVLS

SEQ ID NO: 16987 - protein, 269 aa, unidentified
  source 1..269: note = protein_2b967f2
  REGION 2..75: note = RuvC_domain
  SITE 14: note = RuvC_P3
  SITE 16: note = RuvC_P4
  SITE 19: note = RuvC_P5
  REGION 138..223: note = Tnp_domain
  SITE 146: note = Tnp_P1
  SITE 176: note = Tnp_P2
  SITE 184: note = Tnp_P3
  SITE 185: note = Tnp_P4
  SITE 197: note = Tnp_P5
MAPQFVKPYVKTNKNDAADAEAICEAVTRPTMRFMPIKSSEQLAILALHRARQGFIKARTAQANQIRGLLAEYGFILPQGITHIGKHVPDLLEDSENGLPGTFRHLLMRLHEHLKVLDMQVNELEDSIVRWHKDSAASQTLAQLPGIGPITASALVASIGNAKNFKNGRQLAAWLGLVPRQHSSGGKQNLLGISKRGDSYLRTLLIRGARAVLRVAERKESFSGSWLAGVMARRNPNVAAVAQANKTARIIWALLAHDRKYDAHYGMAA

SEQ ID NO: 16988 - protein, 344 aa, unidentified
  source 1..344: note = protein_9a1cabe
  REGION 5..152: note = RuvC_domain
  SITE 8: note = RuvC_P1
  SITE 55: note = RuvC_P2
  SITE 92: note = RuvC_P3
  SITE 94: note = RuvC_P4
  SITE 97: note = RuvC_P5
  REGION 212..299: note = Tnp_domain
  SITE 220: note = Tnp_P1
  SITE 250: note = Tnp_P2
  SITE 258: note = Tnp_P3
  SITE 259: note = Tnp_P4
  SITE 271: note = Tnp_P5
MDHFAGLDVSVKDTSVCVVDETGRIIREVKVASEPEALLAVLKNPAYHFKRIGLEAGPLSQWLFSSLAEAGLPVICVETRHMRAVLKAQINKTDRNDARGMAQMMRVGLYRPVHVKTLRSQKLRMLLTHRQLLLSKAIALENDLRGTLRNFGLKVGMVGKVKFEARIRELVESLPDLAVLVEPILIVRRVLREQIVILHRRLLAIVRDDEVCQRLMTTPGVGPVVSLTYRATVDIPARFRKSKSVGAVFGLTCAKYQSGEVDWDGRISRCGDGMMRTMLYEAAQAMMRSKKWSWLKAWAMQIARRRGMKKAIVALARRLAVIMHRIWVDGTEFRWTREKAAVAA

SEQ ID NO: 16989 - protein, 393 aa, unidentified
  source 1..393: note = protein_0f4c6a2
  REGION 4..164: note = RuvC_domain
  SITE 7: note = RuvC_P1
  SITE 59: note = RuvC_P2
  SITE 99: note = RuvC_P3
  SITE 101: note = RuvC_P4
  SITE 104: note = RuvC_P5
  REGION 266..353: note = Tnp_domain
  SITE 274: note = Tnp_P1
  SITE 304: note = Tnp_P2
  SITE 312: note = Tnp_P3
  SITE 313: note = Tnp_P4
  SITE 326: note = Tnp_P5
MYLVGIDIGKLKHSFCLLEKETGEILVEPVFFKNNRDGFNALLSSFKHLPQKDILIGTEDTGHYNLALLKFLLDRNYQVALINPVATNLTRKMQGGISKNDKLDTLTICDVLSSSQCVKSYRISKYNSFDLYEQKLLTREHHNLKEEENQLSNRLQKCIDVVFPEFNSLFKSKYGIVHMNILKEFGSADAIAHADIRTLRKCFDTGRGKHISLTAEELKEAARNSIGFSSSSEATQIKHLVAQIELIKEQIAEIDKKIEEFSLQNNSPILSIPGISHFSGTSILAELGDIHNYSKPSQIIKFAGVAPLTYESSQFTAQHTAITKKGCKYLRKTLYQIITPVIQYNPVFRKFYLLKIAQGKGHRCAQGHCVRKLMRVIYHLLSTGTQFDPALLR

SEQ ID NO: 16990 - protein, 410 aa, unidentified
  source 1..410: note = protein_3e8b4d7
  REGION 9..158: note = RuvC_domain
  SITE 12: note = RuvC_P1
  SITE 62: note = RuvC_P2
  SITE 97: note = RuvC_P3
  SITE 99: note = RuvC_P4
  SITE 102: note = RuvC_P5
  REGION 252..339: note = Tnp_domain
  SITE 260: note = Tnp_P1
  SITE 291: note = Tnp_P2
  SITE 299: note = Tnp_P3
  SITE 300: note = Tnp_P4
  SITE 311: note = Tnp_P5
MELLHPHCAGLDLHKETVVACIRHMVDGKVTTEVKSFQTTTQQLMELSDWLSTQGVTHIAMEATGVYWKPVWHILSDGEFVLVLANAAHVKNVPGRKTDVNDAAWLADLMAHGLIRASFVPGEPTQQMRDLLRTRKQFVRERSSHTQRIQKTLEDANIKLDSVISDIVGLSGRRMIEALIAGETDPGTLAALAHRRIHASAEELEAALRGRVTPHHRFMLQLHLDHLDAVNAAIARIDKEVDANVEPFRAAIEMLTTIPGVSSLAAEVIAAEIGIDMSRFETEGHLISWAGLCPKNDESAGKRRSNRMKKGAPWLKTTLIQCAWAASRTKRSYLQAQYLRIRSRRGPKKAIGAVAASILTAAYHMLKNGTLYQDLGANHFDNRDKGKQALRLLNRLQSLGFAVQITSMAA

SEQ ID NO: 16991 - protein, 403 aa, unidentified
  source 1..403: note = protein_5a6f86b
  REGION 11..165: note = RuvC_domain
  SITE 14: note = RuvC_P1
  SITE 63: note = RuvC_P2
  SITE 103: note = RuvC_P3
  SITE 105: note = RuvC_P4
  SITE 108: note = RuvC_P5
  REGION 271..357: note = Tnp_domain
  SITE 279: note = Tnp_P1
  SITE 309: note = Tnp_P2
  SITE 317: note = Tnp_P3
  SITE 318: note = Tnp_P4
  SITE 330: note = Tnp_P5
MLEARRLRVWVGVDVGKAHHWAAAVDESGTQVWSAKIVNDETAILDAIATALELAERVSWAVDISGTSSTLLLALLAAHGQETVYVPGRTVNAMTAGYRGEAKTDARDAFVIAETSRLRHDFAPVQVNAQLVAELRLLTAHRNDLVADRVRLVNRLRDVLTGVFPALERAFDYSSHQGAVVLLTGYQIPDALRRRGQNRLESWLSKRGVRNAAQVAQTALAAAAAQHTTLPGQDIAAQIIADLATQLLNLDDRLGRLEGQIKTTMAAHPQTAIITSMPGIGPMLAAEFVVAAGDLNAYPDAGHLASAAGLVPVPRDSGRRTNNLHRPNRYSRRLRRVFYLSAQSSIIRDGPNRDFYLKKRAEGLRHIQALIALARRRVNVLWALLRDNRTWTPTSPTKAINAA

SEQ ID NO: 16992 - protein, 399 aa, unidentified
  source 1..399: note = protein_db4a8cc
  REGION 5..163: note = RuvC_domain
  SITE 8: note = RuvC_P1
  SITE 62: note = RuvC_P2
  SITE 102: note = RuvC_P3
  SITE 104: note = RuvC_P4
  SITE 107: note = RuvC_P5
  REGION 273..361: note = Tnp_domain
  SITE 281: note = Tnp_P1
  SITE 311: note = Tnp_P2
  SITE 319: note = Tnp_P3
  SITE 320: note = Tnp_P4
  SITE 333: note = Tnp_P5
MNPVIGLDVSKGESEVQAFLDKRKPYKKSFSVLHNNKGLENLLGFLIEVEGETGVKPTVIFESTGHYHTSIVQFLEENDYLYIMVNPLLSYQAKKSSLRKVKTDAIDAYNLCELYYKEELEPYKQRGIQLLNLRNLSRQHETVTGIYVQTKLQFHAILDQVFPEYRGVFGDLFSKVSLNTLLEFSTSEAVLKAGENPLSDKIASECVTRSERWAKDRAKKLIEAAHRNPFKNTLYQSHLISLQMYIQMLLQYQEHLSKLDAQIDALAEEIEEYKIIQSIPGIGGKIAAKIISEIGEIERFNHPKKLVAFSGIDPSVHSSGKFTATINRISKRGSSRLRHALYMAALCGIRSSRNKLREFYDRKREEGKPFKVAMIGCTNKLIHWIFVLLKRKETFLDLA

SEQ ID NO: 16993 - protein, 347 aa, unidentified
  source 1..347: note = protein_c0eec76
  REGION 5..152: note = RuvC_domain
  SITE 8: note = RuvC_P1
  SITE 55: note = RuvC_P2
  SITE 92: note = RuvC_P3
  SITE 94: note = RuvC_P4
  SITE 97: note = RuvC_P5
  REGION 212..296: note = Tnp_domain
  SITE 220: note = Tnp_P1
  SITE 250: note = Tnp_P2
  SITE 258: note = Tnp_P3
  SITE 259: note = Tnp_P4
  SITE 271: note = Tnp_P5
MDYYAGIDVSLETSSVCVVDASGKIMREAKVLSEPENLIGWFRELGLTLTRIGLEAGPLSQWLFAALKKEGLAVELLETRHVRDAFKAMPVKSDRNDARGIAQLMRLGWFRPVHCKSMPAQEVRALLTARKLVQSKLFDIEMSLRGILRGFGLKIGRTTPNGFGPRVEELVAGHPTLDIIGKALLAAHQVLLRELNGFEKRVRQQARQDKRVRLIMTAPGVGPIVGLTFVAAIDDPARFKSSKQVGPHFGLTPKKYQSGETDYNGRISKIGDASVRTALYEAANVILTRPLKGATSLKSWAMKLAKRAGMSKAKVALARKLGIILHRMWVDGKQYADRAGSPKPAAA

SEQ ID NO: 16994 - protein, 338 aa, unidentified
  source 1..338: note = protein_5fb309a
  REGION 4..153: note = RuvC_domain
  SITE 7: note = RuvC_P1
  SITE 52: note = RuvC_P2
  SITE 92: note = RuvC_P3
  SITE 94: note = RuvC_P4
  SITE 97: note = RuvC_P5
  REGION 191..278: note = Tnp_domain
  SITE 199: note = Tnp_P1
  SITE 229: note = Tnp_P2
  SITE 237: note = Tnp_P3
  SITE 238: note = Tnp_P4
  SITE 251: note = Tnp_P5
MTYIGIDISKDSFVAAFPTVSGCQTQTYPNTVKGIRKFIGSLSVTEHHCVKEATGNYGFLLLYLLDKQGIASSMVNPKQIKHFSRMMMTVTKTDPKDACMIAMYGEKMNPPVYKMPSEAVMLLKQKKTIIRQLKKQLTASKNLKSSLVVLPFQDKNGMKALDKTISFLASQIESLESELADLASSEFDRQVKLLTSIKGIGITLATALIVATGGFSYFNNAKQVSRFIGICPTYQQSGTSVHIKGGINRNRDASLRSLFYVASWSALRGNTTCKECYARLKVNGKPSKVALIAVANKLVRQAFAVIKSDTPYVDGFVSTHQTNNLWWNFCSHFICLLI

SEQ ID NO: 16995 - protein, 343 aa, unidentified
  source 1..343: note = protein_b971e5e
  REGION 5..152: note = RuvC_domain
  SITE 8: note = RuvC_P1
  SITE 55: note = RuvC_P2
  SITE 92: note = RuvC_P3
  SITE 94: note = RuvC_P4
  SITE 97: note = RuvC_P5
  REGION 212..300: note = Tnp_domain
  SITE 220: note = Tnp_P1
  SITE 250: note = Tnp_P2
  SITE 258: note = Tnp_P3
  SITE 259: note = Tnp_P4
  SITE 271: note = Tnp_P5
MEHFGGLDVSVKETSVCIVDGTGGIVREVKVASEPEALLPVLTNPDYHFKRIGLEAGPLSQWLYSALAEVGLPVICVETRHMRAVLKAQINKTDRNDARGMAQMMRVGLYRPVHVKTLRSQKLRMLLTHRQLLQSKAIAIENELRGTLRNFGLKVGMVGAAKFEVRINELVANLPDLAVLVEPLLVVRRALREQIGVLHHRLLAIVRDDEVCRRLMTVPGVGPVVALTYRATVDVPARFRKSKSVGAVFGLTCSRDQSGERDRPGAISRCGDEMMRVMLYEAAQVMLTRTNRWSWLKAWAMKIARNRGKKKAIVALARRLAVIMHRIWVDGTEFRWTREIAAG

SEQ ID NO: 16996 - protein, 356 aa, unidentified
  source 1..356: note = protein_ae9842c
  REGION 8..162: note = RuvC_domain
  SITE 11: note = RuvC_P1
  SITE 67: note = RuvC_P2
  SITE 107: note = RuvC_P3
  SITE 109: note = RuvC_P4
  SITE 112: note = RuvC_P5
  REGION 208..295: note = Tnp_domain
  SITE 216: note = Tnp_P1
  SITE 246: note = Tnp_P2
  SITE 254: note = Tnp_P3
  SITE 255: note = Tnp_P4
  SITE 268: note = Tnp_P5
MRVQKQCIGIDISKDSFTACFCLLQQDGHIQFSDVKKFKNDKTGFNQLVRWTRKVKDPVLPISFLMEATGVYYENLAYHLYDIKQVVHVVLPNTSKHYFSSLNIKTKTDELDAKVLSQFGVERMHKKWIKPNETYLHLRNLCRYYVQLQEQKTALGNIKHSKESAHDVQKLIHRSNTKLIKEIDKQIAQIKKEIEKLIRQDEQLSARVDKLLTIKGVGILTIATIIAETLGFQFVKNIKQLASYAGYDVVQRESGTSIKGKTRISKKGNRYIRNALYFPAMVACRYNENLKKTYLRIIEKKPSKMIGQIAIQRKLLLLIYTLWKKDENYDSNFVIKSSSTEGCEATQDRIIETVLP

SEQ ID NO: 16997 - protein, 345 aa, unidentified
  source 1..345: note = protein_6e30a92
  REGION 6..147: note = RuvC_domain
  SITE 9: note = RuvC_P1
  SITE 53: note = RuvC_P2
  SITE 86: note = RuvC_P3
  SITE 88: note = RuvC_P4
  SITE 91: note = RuvC_P5
  REGION 210..302: note = Tnp_domain
  SITE 218: note = Tnp_P1
  SITE 250: note = Tnp_P2
  SITE 258: note = Tnp_P3
  SITE 259: note = Tnp_P4
  SITE 272: note = Tnp_P5
MYRTRVGVDLAKEVIQVCTYRNKKVQSNIEITPGEFLCWLIKTKPATIIFEACSTSNYWKQKAIEAGHDARLISAKLVSTVRQNQKTDKNDALAIVQAASLPDVTFIGGKTVEQQQLQSIKRLRELAVKQQGASQKQLVSLLLELNIRISNRKGGIIRAIEGVLEDATNGLSVECRAAIHTAKEQLSMLIKAAHRYDDCLEKSVAAHPDCKKLLKLEGVGSVNAINLYLALGCAEIGTFSKGRDASACIGVTPIQYSSGGTVKLGSIGKYTKNSLLRSQLICGAMATIRHVVKREAKTQKDVWLKALVERRGKKCAAVALANKTVRTAFSMLTKGTEYKAVLITA

SEQ ID NO: 16998 - protein, 342 aa, unidentified
  source 1..342: note = protein_3a2dd5d
  REGION 6..148: note = RuvC_domain
  SITE 9: note = RuvC_P1
  SITE 52: note = RuvC_P2
  SITE 87: note = RuvC_P3
  SITE 89: note = RuvC_P4
  SITE 92: note = RuvC_P5
  REGION 210..295: note = Tnp_domain
  SITE 218: note = Tnp_P1
  SITE 248: note = Tnp_P2
  SITE 256: note = Tnp_P3
  SITE 257: note = Tnp_P4
  SITE 269: note = Tnp_P5
MKDTIIGVDLAKRVFQVHGASIAGEVKFRKKLTREQFRLFIAQQPACIVVFEACGSANYWAREVEKLGHEPKLIAPQYVRPFVKRQKNDATDAEAIVIAARQPEMRFVLPKTAEQQAKSVLFRNRERLVRQRTELVSALRSALYEYGYVFPIGLAHLKRMDALVQGPDCDLPSLIITECQELLAQIAETTEKITMKTKRLKALADETDTARRLQTMPGVGPLTALAVEAFAPQMGQFRCGRDFAAWLGLVPRQHSSGGKERLGRVSKAGQTDIRRLLIIGAMTRILAHARYKGPAESWLGRMLAKKPKMLVGIALANKMARQLWAMLTRNEDYRDPAMAAAM

SEQ ID NO: 16999 - protein, 436 aa, unidentified
  source 1..436: note = protein_d350b1a
  REGION 28..177: note = RuvC_domain
  SITE 31: note = RuvC_P1
  SITE 82: note = RuvC_P2
  SITE 117: note = RuvC_P3
  SITE 119: note = RuvC_P4
  SITE 122: note = RuvC_P5
  REGION 272..362: note = Tnp_domain
  SITE 280: note = Tnp_P1
  SITE 313: note = Tnp_P2
  SITE 321: note = Tnp_P3
  SITE 322: note = Tnp_P4
  SITE 333: note = Tnp_P5
MTSHCQFYNYKFQEVILLSFKILKFNCCGFDVHKTWIYACIGITDSNNRTEYKQARFSSFTKGLNELCDWLAKYNCKDVCMESTGKYWIPVFNILEQHNLWVTLSHPKYTKPMKGNKTDRKDAKWICDLYMCGMVKPSFIPPADIRELRDLVRYRYKLTCMITGEKNRAQNCLTVSNLKLDDVFSDVFGKSSRSITEQILQHPGEKFDVALFVHGRCKTPIEEIQAAVDGAISIEQAVKLRQCLDHIDELNRHISEVEQEILRLSDKYEATLNLIRTVPGFDKNPMTAVQVLSEIGGDMSVFPTAKHLVSWAGCCPRNDQSNQKIKSTRISRAGSYFKPVLVQVANALIKSKKHLEFTNRYKRIKARRGHKKAIIAVCRMILTAIWHILSDLKPYTAESFLESRPVKEKKVLSTSQALNLLKQRGYIIKDEPLVVS

SEQ ID NO: 17000 - protein, 326 aa, unidentified
  source 1..326: note = protein_f983033
  REGION 1..156: note = RuvC_domain
  SITE 4: note = RuvC_P1
  SITE 58: note = RuvC_P2
  SITE 97: note = RuvC_P3
  SITE 99: note = RuvC_P4
  SITE 102: note = RuvC_P5
  REGION 201..286: note = Tnp_domain
  SITE 209: note = Tnp_P1
  SITE 238: note = Tnp_P2
  SITE 246: note = Tnp_P3
  SITE 247: note = Tnp_P4
  SITE 259: note = Tnp_P5
MGIDVSKHKLDCALINDLNIGKSRSKVVPNTDDGFYALIQWLKKKTDNDLAHLHIVMEATGVYHEAVAYFLAEAGFTLYVVNPADAAKFTQSCNVHKTDKTDSKALAQFGIQIILHGHVRPWQPEPKAIRELKALISRLDALEADLQRERNRMEKAEVSSASISVIQSIEVIQQNLMTEIKRLKQHINNHIDRHPQLKQDVRLLKSIPGVGEVVALRMTTLYRSRTFQNAGQMSAYVGLVPRLGESGLFRGRSMISKRGNPIIRAKLYMGAVVAKQYNPDIRRLIERLLTNGKTMMQALVAGMRRIVHICFGVLKHQREYQPQISM

SEQ ID NO: 17001 - protein, 344 aa, unidentified
  source 1..344: note = protein_4e26f20
  REGION 5..152: note = RuvC_domain
  SITE 8: note = RuvC_P1
  SITE 55: note = RuvC_P2
  SITE 92: note = RuvC_P3
  SITE 94: note = RuvC_P4
  SITE 97: note = RuvC_P5
  REGION 212..300: note = Tnp_domain
  SITE 220: note = Tnp_P1
  SITE 250: note = Tnp_P2
  SITE 258: note = Tnp_P3
  SITE 259: note = Tnp_P4
  SITE 271: note = Tnp_P5
MDHFAGLDVSVKETSVCIVDDAGRIVREVKVASEPAALLQVLGSPVYHFKRIGLEAGPLSQWLYSALAEAGLPVICVETRHMRAVLQAQINKTDRNDARGIAQMMRAGLYRPVHVKTLRSQKLRMLLTHRKLLQSKAIAIDNDLRGTLRNFGLKVGIAGKVKFEARIKELVENLPDLAVLVEPLLVVRRVLREQLGILHRRLLAIVRDDDVCRRLMTVPGVGPVVALTYRATVDVPARFRHSKAVGAVFGLTPSKYQSGEINRSGAISHCGDEMMRVMLYEAAQVMLTRTNKWSWLKAWAMKIARHRGMKKAIVALARRLAVIMHRIWVDGTEFRWTREEAAAA

SEQ ID NO: 17002 - protein, 404 aa, unidentified
  source 1..404: note = protein_d340a5d
  REGION 4..160: note = RuvC_domain
  SITE 7: note = RuvC_P1
  SITE 57: note = RuvC_P2
  SITE 97: note = RuvC_P3
  SITE 99: note = RuvC_P4
  SITE 102: note = RuvC_P5
  REGION 275..362: note = Tnp_domain
  SITE 283: note = Tnp_P1
  SITE 313: note = Tnp_P2
  SITE 321: note = Tnp_P3
  SITE 322: note = Tnp_P4
  SITE 335: note = Tnp_P5
MNAVGIDVSKGKSMIAIMRPLGEVVALPFEVSHTAAELDELARFILKIDGETRVIMEYTGSYYEPIAYALHEAGLYVSIVHAQLIHDFGNNTIRRVKTDKADAMKIAAYGLANWNVLPRYTPQEDIRRQLKAYSRQYAKYTKLKTMLKNNLISLTDSTFPGVNELFTSPPRKEDGHEKWLDFALKFWHAECVCGLSEKVFTDQYRRWCSKAGYRFSKNKATDIYAASCGHTGLLPKDDTTELLIQQSVIQLNSICSSLAVIAGKMSSLAAMLPEYPIVMGFFGVGDNLGPRIMAEIGDVRRFARKESLVCFAGLEAPPYQSGKFESTDRTISKKGSPHLRKALFQVMDCLVKKAPQDDPIFQFIDRKRAEGKHYYSYMTAGSAKFLRIYYARVKEHLNALEHTG

SEQ ID NO: 17003 - protein, 369 aa, unidentified
  source 1..369: note = protein_813acee
  REGION 7..152: note = RuvC_domain
  SITE 10: note = RuvC_P1
  SITE 55: note = RuvC_P2
  SITE 92: note = RuvC_P3
  SITE 94: note = RuvC_P4
  SITE 97: note = RuvC_P5
  REGION 223..308: note = Tnp_domain
  SITE 231: note = Tnp_P1
  SITE 261: note = Tnp_P2
  SITE 269: note = Tnp_P3
  SITE 270: note = Tnp_P4
  SITE 282: note = Tnp_P5
MPHVTSIGLDFHARSVAAAAFNPFTGEVVHRDFGTDAAEIAEWALGFEEPRACYESGPTGFHMARELRALGLDCAVAAVSKMQRPAADARRKNDRRDAEFIARMLATHNIVEVPLPDAAVEAARDLDRALDDATAEYRRARQRLNMFLIRLGHVWDERNADGTRKGSWTRAHWRWISGIRLEGPQRDVLEYYVTAARCAESDRRQLEKKVLALARTDRWRPAVEALSCIKGIDTLTAFRLAAEAGSFTRFRTAPAFASWCGLIPSERSSGETERRGGITKTGNRLARTALVESAWHYLTCTPRPKAPAPGADVPAAIRARADDCTARLCRRREALAAAGKSPCKANAAVARELACWVWEIGCRAEGTLG

SEQ ID NO: 17004 - protein, 340 aa, unidentified
  source 1..340: note = protein_9c54bba
  REGION 8..151: note = RuvC_domain
  SITE 11: note = RuvC_P1
  SITE 55: note = RuvC_P2
  SITE 90: note = RuvC_P3
  SITE 92: note = RuvC_P4
  SITE 95: note = RuvC_P5
  REGION 213..302: note = Tnp_domain
  SITE 221: note = Tnp_P1
  SITE 251: note = Tnp_P2
  SITE 259: note = Tnp_P3
  SITE 260: note = Tnp_P4
  SITE 272: note = Tnp_P5
MPQEIAVIGLDLAKNVFQVHAITHDGSPVVRRQLRRAEVLKFFAKLKQPCLVGMEACASAHYWGREIGALGHEVRLMPPAYVKPYVKRGKTDAADAEAICEAVTRPTMRFVAVKSEEQQAALMLHKTRDLLVRQRTMLINALRAHLGEYGIVKAQGPAGVTALLALVQEAQAVIPAHARSALSSIVTQFRALVREIDLLEKQILDWHRHDEVSQRLATVPGIGPITASAIAATVPDASIFRSGRQFAAWLGLTPRPHSSGGKERLGGITKQGDGYLRRLLVVGATAVMRMTRKDHARQPWLAKLLAKKPAKLASVALANKTARIAWVIMSRGEIYRPAAA

SEQ ID NO: 17005 - protein, 346 aa, unidentified
  source 1..346: note = protein_9d16a96
  REGION 6..148: note = RuvC_domain
  SITE 9: note = RuvC_P1
  SITE 52: note = RuvC_P2
  SITE 87: note = RuvC_P3
  SITE 89: note = RuvC_P4
  SITE 92: note = RuvC_P5
  REGION 211..297: note = Tnp_domain
  SITE 219: note = Tnp_P1
  SITE 249: note = Tnp_P2
  SITE 257: note = Tnp_P3
  SITE 258: note = Tnp_P4
  SITE 270: note = Tnp_P5
MKITTIGIDLAKEVFQIHGVDIHGKAMLRKQLRRSEMARFFANLTPCLIGMEACGSSHHWARKLGEFDHIVKLMSPQFVKPYVKTNKHDMADAEAVCEAVSRPNMRFVPIKNVEQQAILSIHRARQGFVKARTAQANQMRGLLSEFGIVMSQGIRSINKRMPDILEDAENGLPGTMCRLLERLNNHFKELDPPVEELALQIKLWHKKNQVSQKLEAIPGIGPITASAIVATVGNATEFKNGRQLSAWIGLVPKQRSSGSKQILLGISKRGDTYLRTLLIHGVPAVIRFTGNKVEPESWLHRLMARRNKNVAAVALANKNARIIWALLAKDTKFHPNHTSAASAAKA

SEQ ID NO: 17006 - protein, 343 aa, unidentified
  source 1..343: note = protein_c5d65cf
  REGION 7..149: note = RuvC_domain
  SITE 10: note = RuvC_P1
  SITE 53: note = RuvC_P2
  SITE 88: note = RuvC_P3
  SITE 90: note = RuvC_P4
  SITE 93: note = RuvC_P5
  REGION 212..304: note = Tnp_domain
  SITE 220: note = Tnp_P1
  SITE 250: note = Tnp_P2
  SITE 258: note = Tnp_P3
  SITE 259: note = Tnp_P4
  SITE 271: note = Tnp_P5
MQVITTVGLDIAKSVFQVHGVDAAGKVLIRRQLKRRQVLPFFQRLPACVVGIEACATSHHWSRQLRALGHTVRLMPPAYVKPYVKRQKNDAADAEAICEAVTRANMRFVETKTPEQQACLMLHRTRHLFIRQQTSVINAIRAHMAEFGIVARVGRTGVAELLAVAGDPRDRRLPEVARTCVAALGVQLRMLKAQILEFDRRIGAWHRSNQTSQRLDQIPGIGPALATALVASVPDPKAFRSGRNFSAWIGLVPKQHSSGGKDRLGSISKQGDRYLRGLFTAGALAVIRYAKLHGTEHRPWLTALLARRPTKVAAIALANKLARMAWAVMAKGERYKEPAALAA

SEQ ID NO: 17007 - protein, 341 aa, unidentified
  source 1..341: note = protein_8c3f2e0
  REGION 7..149: note = RuvC_domain
  SITE 10: note = RuvC_P1
  SITE 53: note = RuvC_P2
  SITE 88: note = RuvC_P3
  SITE 90: note = RuvC_P4
  SITE 93: note = RuvC_P5
  REGION 211..296: note = Tnp_domain
  SITE 219: note = Tnp_P1
  SITE 249: note = Tnp_P2
  SITE 257: note = Tnp_P3
  SITE 258: note = Tnp_P4
  SITE 270: note = Tnp_P5
MEQATTIGLDIAKHVFHVHGADAAGHVLFRKRITRAKLLGFLAVQARCVVAMEACAGAHYWAREIAKLGHHVRLIAPVYVKPFIKRQKNDAADAEAICEASQRPSMRFVPVKSEEQQANGIVFRARDLLVRQRTQCVNALRGHLMEYGYVFPKGITHVETLVAVVEDLQSSLPDSVRVILKLLVDTFTALEAQIAALDAEIRQRSKSDPTARRLMTIPGVGPIASTAITALVPAAEGFPAGRDFAAWLGLTPLQKSTGGKQKLGAVSKRGERTIRRLLIIGASAVVQQASRRGAPKGSWLAQMLARKPKMLVTVALASKMARIIWALLVKGGTYRTPAAAA

SEQ ID NO: 17008 - protein, 340 aa, unidentified
  source 1..340: note = protein_11e375a
  REGION 7..149: note = RuvC_domain
  SITE 10: note = RuvC_P1
  SITE 53: note = RuvC_P2
  SITE 88: note = RuvC_P3
  SITE 90: note = RuvC_P4
  SITE 93: note = RuvC_P5
  REGION 211..296: note = Tnp_domain
  SITE 219: note = Tnp_P1
  SITE 249: note = Tnp_P2
  SITE 257: note = Tnp_P3
  SITE 258: note = Tnp_P4
  SITE 270: note = Tnp_P5
MGQATIIGIDLAKNVFQIHGATADGAVAFRKKVSRSKLLPFLSSQALCLVAMEACGSSHHWGSEIQALGHDVRLIAPAYVKPFVKRQKNDMADAEAIAEAASRPTMRFVAVKSVAKQASAMVFKTRDLLVRQRTQTINALRGHLTEYGVIAPQGLPNLDRLVSEVRSSSSGLPAIVTELSELLLEHIAALDERIAGLDRQLREQVRTDETAKRLVTVPGIGPICAAAILALAPAPETFAKGRDFAAWLGLTPRQHSTGGKAKLGSVSRMGQRDLRRLLIIGAMSVVRWAARRGAPAGSWLARMMAKKPRMLVATALANKMARVAWALLAHGGIYEVPAGA

SEQ ID NO: 17009 - protein, 339 aa, unidentified
  source 1..339: note = protein_b2ef954
  REGION 4..157: note = RuvC_domain
  SITE 7: note = RuvC_P1
  SITE 55: note = RuvC_P2
  SITE 96: note = RuvC_P3
  SITE 98: note = RuvC_P4
  SITE 101: note = RuvC_P5
  REGION 220..305: note = Tnp_domain
  SITE 228: note = Tnp_P1
  SITE 258: note = Tnp_P2
  SITE 266: note = Tnp_P3
  SITE 267: note = Tnp_P4
  SITE 278: note = Tnp_P5
MFIIGIDPHKGSHTAAAVDHSETVIDTLRVVADCHQRERLLAWAVPFTPRTWAVEGATGMGALLAQQLVAAGEHVVDVPPKLSSRVRLLENGKIDKTDPNDARSAAIVAWHNRSLNVVAALDEHRVVLRLLADRDHQITAQRTRTICRLHALLCLLIEGGTSRALSLQRAEQLLVNIDIDGPVTRERIAAGHQLLEEARVLDASRVEVRKRTAETIIASATTVTDVYGIGPLMAAIIIGRVGDIRRFPTSGHFARHNGTAPIEASPGPKKRHRLNPRGDRQLNHAIHMAAVTQISYDTFGRVYYLRKQAEGKTRKEAMRALKRHISDAVYQRLITDTRR

SEQ ID NO: 17010 - protein, 416 aa, unidentified
  source 1..416: note = protein_cd83820
  REGION 9..158: note = RuvC_domain
  SITE 12: note = RuvC_P1
  SITE 64: note = RuvC_P2
  SITE 98: note = RuvC_P3
  SITE 100: note = RuvC_P4
  SITE 103: note = RuvC_P5
  REGION 255..342: note = Tnp_domain
  SITE 262: note = Tnp_P1
  SITE 293: note = Tnp_P2
  SITE 301: note = Tnp_P3
  SITE 302: note = Tnp_P4
  SITE 313: note = Tnp_P5
MKIVRPICCGMDVHKNIIVATIGITNKKTRITEYIQETFSTLNPDLLNLKQWLINHKCFDACMESTGKYWIPIFNILEDEINIYLTHPKYVKAIKGKKTDKKDSKWICDLFKHDLIKFSFIPPKEIRALREISRYRYKLVGMRSSERNRYQNCMTVSNIGIGSVFSDPFGKSAQAIMKEVLESNIIEDEKILKCIHRSCKNKDKILDSIKHCNIETDQRFKMNESMTHMEELQVHINNCEIEMMKRAAPMFDQFKHITQLPGISTLSAILIISEIGVDMKQFESDKQLTCWAGLAPANNESANKKKSVRISKAGQYLKPLLVQCALGAIKDKEGYFGIKYSRIKKRRGHKKAIIAIARMMLVSIYHMILTGETFNPSDYESFRNPNPPIKQQVLTEESAIEFLKKSGFDVSKLTKP

SEQ ID NO: 17011 - protein, 344 aa, unidentified
  source 1..344: note = protein_0a2c7b8
  REGION 6..147: note = RuvC_domain
  SITE 9: note = RuvC_P1
  SITE 52: note = RuvC_P2
  SITE 87: note = RuvC_P3
  SITE 89: note = RuvC_P4
  SITE 92: note = RuvC_P5
  REGION 212..296: note = Tnp_domain
  SITE 220: note = Tnp_P1
  SITE 250: note = Tnp_P2
  SITE 258: note = Tnp_P3
  SITE 259: note = Tnp_P4
  SITE 271: note = Tnp_P5
MRIAVLGVDLGKNVCSIVGLDEAGAVVLRRRARRDTLIKFVGNLPACIVAMEACCGAHDLGRLFAAQGHDVRLMSPEYVRPYVKAQKNDDRDAEGIAEAATRPTMRFVEVKTQAQLDMQTLHRSRDRLVGERTALINQLRAILLERGIVVPQGKRKLEHYLVTLMEEPEGDALTARMRMLIADMQAQWRDLDRRIAAFEGEFVAFAKEDEDARRLTTIPGVGVMIASALMAAIGKAETFEHGRDLAAWLGLVPRQWTTGGAPRLMGISKRGNKYLRKLLIHGARAALPHLAERDTSLGRWAKGLLARVHPNVAVVALANKLARICWAVLRSGRNFSAKGAPMAA

SEQ ID NO: 17012 - protein, 340 aa, unidentified
  source 1..340: note = protein_4016684
  REGION 6..148: note = RuvC_domain
  SITE 9: note = RuvC_P1
  SITE 52: note = RuvC_P2
  SITE 87: note = RuvC_P3
  SITE 89: note = RuvC_P4
  SITE 92: note = RuvC_P5
  REGION 211..297: note = Tnp_domain
  SITE 219: note = Tnp_P1
  SITE 249: note = Tnp_P2
  SITE 257: note = Tnp_P3
  SITE 258: note = Tnp_P4
  SITE 270: note = Tnp_P5
MDITTLGIDLAKSVFQLHGVDADGTVVLQKKLRRNAVLDFLGKLEPCLIGMEACATSHFWAREVAALGHDVRLIPPAYVKPYVKRQKNDAADAEAICEAVTRPNMRFVPVKTAEQQAVLVLHRSRDLLIRQKTMILNAIRAHLAEFGIVTAQGPRKIVEIIGRLEDPDNIELPSFARSALLSLAAQLRSLTEEIVRIERQLMAWHRQSQASQRLETIPGVGLITATALAASVPDPSVFKSGRQFAAWLGLVPRQNSSGGKERLGRVSKMGNGYLRRLLVVGATSVTRRAAETDTRTGAWVRSLLERKPTRLVTVAIANKTVRTAWALLAKGESYKAALTI

SEQ ID NO: 17013 - protein, 342 aa, unidentified
  source 1..342: note = protein_ab9cc8b
  REGION 6..148: note = RuvC_domain
  SITE 9: note = RuvC_P1
  SITE 52: note = RuvC_P2
  SITE 87: note = RuvC_P3
  SITE 89: note = RuvC_P4
  SITE 92: note = RuvC_P5
  REGION 213..297: note = Tnp_domain
  SITE 221: note = Tnp_P1
  SITE 251: note = Tnp_P2
  SITE 259: note = Tnp_P3
  SITE 260: note = Tnp_P4
  SITE 272: note = Tnp_P5
MSGMIIGLDLAKSVFQVHAVDAEGKVVITRKVRRSQMLEFFTRLEPCLVGMEACPSAHHWARELSALGHEVRLMVASYVKPYVKRQKNDMVDAEAICEAVTRPTMRFVPIKSESQQAILMVHKTRALLVRQRTMLVNALRGHLTEMGVVAPKGIRRHADLVERVLAHGADEIDLPPLVRDIVFSSARQIGSLNAEIKELERKILEWHRTSEASQRLATIPGVGVITASAMAATVVDPAAFRSGRDLAAWLGLTPRSNSSGGKERLGRITKAGNRYLRTLLVIGATAVVGFSRRTTEGPLMNWVRKLLQAKSARLTTVALANKMARICWAVMAHKTVFGEAAA

SEQ ID NO: 17014 - protein, 366 aa, unidentified
  source 1..366: note = protein_0078451
  REGION 52..172: note = RuvC_domain
  SITE 76: note = RuvC_P2
  SITE 111: note = RuvC_P3
  SITE 113: note = RuvC_P4
  SITE 116: note = RuvC_P5
  REGION 235..320: note = Tnp_domain
  SITE 243: note = Tnp_P1
  SITE 273: note = Tnp_P2
  SITE 281: note = Tnp_P3
  SITE 282: note = Tnp_P4
  SITE 294: note = Tnp_P5
MGWTPPTASLCQHGCFNSFTGGVRVRGYHDRPGYREDRVPRSWRRRARPGGVSKRLTRAKLLAFFAAQPRCTVALEACGGAHHWARELTALGHEVRLIPPAYVKPFVKRHKNDAVDAEAICEAAQRPTMRFVAVKSEEQQASALVFRTRDLLVRQRTQLINAIRGHLTEYGWVAPKGPAYVSMLGDLLEDEMGASLPPAAFSMFRVMLDLLADVDERIAALDKEIAQRAGEEETARRLMTIPGIGPITATALIALAPAAETFAKGRDFAAWVGLTPTQHSTGGKQKLGATSKMGERTLRRLLIIGASAVILQATRRGTAKGSWLEQMLVRKPRMLVTVALANKMARIVWALLVKGGTYRAPTAVAA

SEQ ID NO: 17015 - protein, 341 aa, unidentified
  source 1..341: note = protein_6fc2501
  REGION 7..149: note = RuvC_domain
  SITE 10: note = RuvC_P1
  SITE 53: note = RuvC_P2
  SITE 88: note = RuvC_P3
  SITE 90: note = RuvC_P4
  SITE 93: note = RuvC_P5
  REGION 211..296: note = Tnp_domain
  SITE 219: note = Tnp_P1
  SITE 249: note = Tnp_P2
  SITE 257: note = Tnp_P3
  SITE 258: note = Tnp_P4
  SITE 270: note = Tnp_P5
MSEVSTIGLDLAKRVFQAHGADASGKVVFRKRLRREQVVAFFAGRPACVVAMEACSSAHYWAREIGELGHTVRLIPPAYVKPFVKRQKNDTTDAEAICEAAQRPTMRFVSVKSKAAQANAVVFRVRDLLVRQRTQAINALRGHLGEYGVVVAKGPSHVAKLIAHVEDPAADLPEAARTVLRALTASLQFLSERIDLLDREVARRAREDKEVRRLTTIPGVGPVIATALAALAPPADAFRRGRDFAAWVGLTPSQHSSGGKQKLGATSKMGERTLRRLLIIGASSVVQKAIKHGTRSGSWLGRMLARKPRMLVIVALANKMARTVWALQATGEIYRAPVVAA

SEQ ID NO: 17016 - protein, 344 aa, unidentified
  source 1..344: note = protein_6779282
  REGION 6..150: note = RuvC_domain
  SITE 9: note = RuvC_P1
  SITE 53: note = RuvC_P2
  SITE 89: note = RuvC_P3
  SITE 91: note = RuvC_P4
  SITE 94: note = RuvC_P5
  REGION 212..297: note = Tnp_domain
  SITE 220: note = Tnp_P1
  SITE 250: note = Tnp_P2
  SITE 258: note = Tnp_P3
  SITE 259: note = Tnp_P4
  SITE 271: note = Tnp_P5
MNDMIIGVDLAKSIFQVHGALMATGEIQFKKKLTREQFRVFMPKLAPSVVIFEACGSANYWAGQMEAMGHQAKLIAPQFVRPFVKRHKKNDAADADAIIIAARQPEMLFVTPKTVDQQARAALFRGRERLIRQRTEDVNAVRAILYEHGHVFPIGIGHIKRMQDLVESETCDLCGIVREECRDLLAQIAEKTARITSRDGKLKELAAQSDTARRVQTLPGVGPLTALAVEAFAPDMSQFKRGRDFAAWLGLVPRQHSSGGKERLGRISKAGQADIRRLLIIGAMSRIIGRARHKIPAESWIGRILERKPKLLVGIALANKMARQIWAMLTKNEDYRDPTLAATA

SEQ ID NO: 17017 - protein, 312 aa, unidentified
  source 1..312: note = protein_be6a4f7
  REGION 7..155: note = RuvC_domain
  SITE 10: note = RuvC_P1
  SITE 54: note = RuvC_P2
  SITE 93: note = RuvC_P3
  SITE 95: note = RuvC_P4
  SITE 98: note = RuvC_P5
  REGION 189..273: note = Tnp_domain
  SITE 197: note = Tnp_P1
  SITE 226: note = Tnp_P2
  SITE 234: note = Tnp_P3
  SITE 235: note = Tnp_P4
  SITE 246: note = Tnp_P5
MKTDDSVGIDISKDFLDIHRLRSGKVARFPNAPSGFRSLSKWLGRDIPTRVIFEATGPYHRCFELAFSGKLPLVKVNPLQARRFAQACGTRVKTDAVDARMLASMGRALTLEPDRPIDGKQQELKELFSARGGLIRDRSRSLNRLKTQSLALVCRQTKARIDQITRQLKVLRFDIDARLQDCPQRARAQTILRSIPGIGEIAAAAILIEMPEIGTLQKKRPASLTGLAPMTRQSGKWRGKASIQGGRKHLRDALYMPALVAARFNPDMRKKYEAMIKQGKPQKVALTTIMRKLIELANTLVKHDREWVQKSA

SEQ ID NO: 17018 - protein, 314 aa, unidentified
  source 1..314: note = protein_34a1da1
  REGION 8..157: note = RuvC_domain
  SITE 11: note = RuvC_P1
  SITE 53: note = RuvC_P2
  SITE 93: note = RuvC_P3
  SITE 95: note = RuvC_P4
  SITE 98: note = RuvC_P5
  REGION 188..272: note = Tnp_domain
  SITE 196: note = Tnp_P1
  SITE 225: note = Tnp_P2
  SITE 233: note = Tnp_P3
  SITE 234: note = Tnp_P4
  SITE 246: note = Tnp_P5
MRVSKSIVGVDVAKAELVIYLADPDLLTSITNEKPVIKRWLKTLPGPTAIAVEATNVYHVDLVELAHESGHDVFIIDGFQLSNYRKGVGGRSKTDASDARLLARFLKNEGEDLRPWTPPPAVYGKLQSLLRRRASLIQAKTSLTQSWANDASLKAVFATFVKSMERLDLLVQKKLKEILREAGLLEEVARCQAIEGIGFLTATALVMAYNRGDFTSGDSYVAFLGMDLRVSDSGQKNGRRYLTKRGCSEVRRLLHNAAMSACRSNAWKAFYNHHLSCGKATTQVLVMLSRKLARIAFALMRNQSEYQSKGAVIA

SEQ ID NO: 17019 - protein, 419 aa, unidentified
  source 1..419: note = protein_e101e6f
  REGION 19..171: note = RuvC_domain
  SITE 22: note = RuvC_P1
  SITE 70: note = RuvC_P2
  SITE 108: note = RuvC_P3
  SITE 110: note = RuvC_P4
  SITE 113: note = RuvC_P5
  REGION 278..364: note = Tnp_domain
  SITE 286: note = Tnp_P1
  SITE 317: note = Tnp_P2
  SITE 325: note = Tnp_P3
  SITE 326: note = Tnp_P4
  SITE 337: note = Tnp_P5
MIVTEEIVTEAPTGARVCGGVDWAKDDHAVCIVGTEGQALQRFMATHDRSGLKDMVRRLLRAGVEEVGIERPDGPIVDALLAAGLTVLVIPPGQVKNLRSRYGSAGNKDDRFDAYVLADVVRTDRRRLRPLERDTVATTALRTTVRARRDMVVHRVATANQLRSHLQIVFPGAVGLFDAIDSDVSLRFLERFSTQGQADWLSPKRLGSWLASIGYSGGTDPEVIYARITAAPRGTTGTDAATHAVTTQSYIAVLRTLNTQIRTLAASIAEQLDVHPDAKIFTSLPRSGSVRAARLLAEIGDARGRFPTASSLACLAGVAPSTRQSGKVKAVTFRWGADKELRDALCDFAGDSRLNNPWAADLYAKALARKCDHQHAVRILARAWVNVIWRCWQDHTVYNPADHGALQRILNQDQQPMAA

SEQ ID NO: 17020 - protein, 338 aa, unidentified
  source 1..338: note = protein_dad8d11
  REGION 6..148: note = RuvC_domain
  SITE 9: note = RuvC_P1
  SITE 52: note = RuvC_P2
  SITE 87: note = RuvC_P3
  SITE 89: note = RuvC_P4
  SITE 92: note = RuvC_P5
  REGION 211..297: note = Tnp_domain
  SITE 219: note = Tnp_P1
  SITE 249: note = Tnp_P2
  SITE 257: note = Tnp_P3
  SITE 258: note = Tnp_P4
  SITE 270: note = Tnp_P5
MKITTIGLDIAKSIFHMFAVNKNGRFVKKKQLRRKQVLSFMATLEPCLIVMEACGSANYWARKFIELGHQVKLIAPQYVNPFVKGNKNDYNDAEGIAEAAQRPTMRFVPIKSIEQQDIQNFHRQRERIKKERKALASQVRGLLGEYGIVINKGISAIRNELPDILEDATNELTYLSREIFNELWLEFQVTEVKFKACEVRLNTMNKENEICVRLDEILGIGAITASATYAAAGDGKDFVNGRHFSAWLGLVPGQHSTGGKATLLGISKRGNSYLRTLYIHGARAVLRHSENKTDRFSLWAQALKSRRGHNKACVAVANKIARMAWVIMAKGESYRPAI

SEQ ID NO: 17021 - protein, 343 aa, unidentified
  source 1..343: note = protein_e4cc053
  REGION 7..149: note = RuvC_domain
  SITE 10: note = RuvC_P1
  SITE 53: note = RuvC_P2
  SITE 88: note = RuvC_P3
  SITE 90: note = RuvC_P4
  SITE 93: note = RuvC_P5
  REGION 211..295: note = Tnp_domain
  SITE 219: note = Tnp_P1
  SITE 249: note = Tnp_P2
  SITE 257: note = Tnp_P3
  SITE 258: note = Tnp_P4
  SITE 270: note = Tnp_P5
MTNDVMIGVDLAKNVFQLHAASMAGQPQFRKKLSRQSFGKFMAQQPPAVVVMEACGSAHYWAREMIRLGHVVKLIAPQYVKPFVKRQKNDAADAEAIVIAAQRPEMRFVEPKTAEQQSRAILFRARERLVHQRTEMVNALRACLYEYGHAVPQGIHQIKRIAEILDAPNSDLPDLMREECRDLLEQIAEKTVRINARTGKIKALAAEADTARRLQTIPGVGPLTALAVEAFAPPMENFRCGRDFAAWLGLVPRQFSSGGKERLGRISKAGQADIRRLLIIGAMSRLNWLGRKSIPEGSWLARIAARKPRMLVAIALANKMARTIWALMTKNEDYRDPAQAAAA

SEQ ID NO: 17022 - protein, 342 aa, unidentified
  source 1..342: note = protein_849e917
  REGION 8..162: note = RuvC_domain
  SITE 11: note = RuvC_P1
  SITE 67: note = RuvC_P2
  SITE 107: note = RuvC_P3
  SITE 109: note = RuvC_P4
  SITE 112: note = RuvC_P5
  REGION 208..295: note = Tnp_domain
  SITE 216: note = Tnp_P1
  SITE 246: note = Tnp_P2
  SITE 254: note = Tnp_P3
  SITE 255: note = Tnp_P4
  SITE 268: note = Tnp_P5
MKVLKQVLGIDVAQKELVVTLGRLNDDLSIELCAYSVFKNTDKGFLKLSQWIDKLTDKTTKVRYVMEATGVYHEKFAHYLDEKKEDLSIVLPNKISNYIRTLEIKTITDKTCSEAIARFGLERKLDNWKKPKAIYRTLKQLTRERRQITDERTIVKNQLHAEEAEAMPHISSIERSNRRIHFLNTLEKEIKNEIESSIKENKELSKDISNICTIPGISILTAATVIGETNGFELIRSKKQLTSYAGLDVKEKLSGTSVKGKPSISKRGNRYLRSCLHLPALSSIKWDDNFRDQYSRIVAKHGIKMKGCVAVQRKLLELIYILYKNKAVYDKDFESKKNSVPA

SEQ ID NO: 17023 - protein, 362 aa, unidentified
  source 1..362: note = protein_82dcd1d
  REGION 41..167: note = RuvC_domain
  SITE 70: note = RuvC_P2
  SITE 107: note = RuvC_P3
  SITE 109: note = RuvC_P4
  SITE 112: note = RuvC_P5
  REGION 227..310: note = Tnp_domain
  SITE 235: note = Tnp_P1
  SITE 265: note = Tnp_P2
  SITE 273: note = Tnp_P3
  SITE 274: note = Tnp_P4
  SITE 286: note = Tnp_P5
MVSLTESDFRPLQASSEDDHRLLCGDRRVFGSIERLRRGCRREAKIASEPDALMGWFASLGLDLARIGLEAGPLSQWLFAAMKEAGLAVELLETRHVRTALQTMPVKTDRNDARGIAQLMRLGWFRPVHCKSMAAQETRALLTARKLVQSKLYDIEMSLRGILRGFGLKVGPTTPKRFAWRIHELVAGHPTLEIVAKALLSAHTVLLREFGMFEKRVRAMARQDKRARLIMSAPGVGPIVALTYVSAIDDPSRFSSSKPVGPHFGLTPRKYPSGETDVTGRITKIGDAGVRTALYEAANVILTRPVKGAGLKSWAMKLARRAGMKKAKVALARKLAVILHRMWIDGTTFDARRAAFSAPTAA

SEQ ID NO: 17024 - protein, 326 aa, unidentified
  source 1..326: note = protein_a1a88e4
  REGION 9..151: note = RuvC_domain
  SITE 12: note = RuvC_P1
  SITE 56: note = RuvC_P2
  SITE 96: note = RuvC_P3
  SITE 98: note = RuvC_P4
  SITE 101: note = RuvC_P5
  REGION 191..276: note = Tnp_domain
  SITE 199: note = Tnp_P1
  SITE 228: note = Tnp_P2
  SITE 236: note = Tnp_P3
  SITE 237: note = Tnp_P4
  SITE 248: note = Tnp_P5
MAKRITICAGIDTGKRKLDVALDGSPEQLQVDNTPEGYKILSDWLRQHRVRRIGIEASGGYEQAVVAELRRKRFVVVMFQPAQVRAYAKFHLQRAKNDKIDAALIAACTAAVKKIHAPPDPRLLPFAERLTMIDQLGEDIARLKTRLESCRDPRIQQTWKQDVAGLNKRERTEFKALVAAIREHRDLAERLDLIYSVGGVGLSTSVAILVRMSEIGKLSREQAAALAGLAPYDDDSGKHVGARHIDGGRERLRRALYTAALPASFRWNPQLIALYQRLIAAGKGHKRALIACARKLLIFVNTVVARGTPWQDQPPPLAVMTSIPAR

SEQ ID NO: 17025 - protein, 343 aa, unidentified
  source 1..343: note = protein_79f05f8
  REGION 6..146: note = RuvC_domain
  SITE 9: note = RuvC_P1
  SITE 52: note = RuvC_P2
  SITE 87: note = RuvC_P3
  SITE 89: note = RuvC_P4
  SITE 92: note = RuvC_P5
  REGION 211..296: note = Tnp_domain
  SITE 219: note = Tnp_P1
  SITE 249: note = Tnp_P2
  SITE 257: note = Tnp_P3
  SITE 258: note = Tnp_P4
  SITE 270: note = Tnp_P5
MQIRSVGIDLGKTTFHLVALGDNGKVLLKKRFTQKQLITFTANMQTCLIGMEACSGAHFLGRTLREQGHDVKLIPAQFVKPFVKSNKNDFIDAEAIAEAVERQNMRFVPIKTDDQLDLQALHRVRDRLITRRTSVINQLRAFLLERGLVFAKSPAKLRERMPEILENAEEDLTPRMRNLLALLWNEWKDLELQIVQMNDEVEQIASSDAACTRLRQIPGIGPLVATAIVAAIGNGAAFRKGREFAAWMGLVPKQYSTGGKAKLAGISKRGNLYLRKILIHGARAVVLRSKRERIAMGEWMAALEARAPRNVLIVAMANKLARIAWAVLSSGQDYRAVQEPVAA

SEQ ID NO: 17026 - protein, 322 aa, unidentified
  source 1..322: note = protein_c224e6e
  REGION 8..155: note = RuvC_domain
  SITE 11: note = RuvC_P1
  SITE 60: note = RuvC_P2
  SITE 100: note = RuvC_P3
  SITE 102: note = RuvC_P4
  SITE 105: note = RuvC_P5
  REGION 195..280: note = Tnp_domain
  SITE 203: note = Tnp_P1
  SITE 233: note = Tnp_P2
  SITE 241: note = Tnp_P3
  SITE 242: note = Tnp_P4
  SITE 254: note = Tnp_P5
MTTPTTYVGIDIAKAKFDVALLNPLGKYRSKVYANTPEGYNQFLTWLQKHEALDAHLCMETTGAYGRGLARFLTQQNPLVSVVNPAQIHAFGKTELVRAKTDKADARLIARYCQMHRPAHWVPLTDEIVTLQALVQRLDDLLGLHNMENNRLETAEAAAQPSIEAVLVTINQQVDAVRRQIQEHIDDHPDLKSQKKLLLSIPGIGDNTTATLLAFINPFERFHSAKQLVAYAGLNPRIRQSGQWAGKTPIAKTGNVLLRKALYMPALTAKRYNPVITVFCDRLIAHGKRPMQVIIAAMRKLLHIAYGVLKSGQPFDPEKALA

SEQ ID NO: 17027 - protein, 314 aa, unidentified
  source 1..314: note = protein_381cd09
  REGION 6..159: note = RuvC_domain
  SITE 50: note = RuvC_P2
  SITE 90: note = RuvC_P3
  SITE 92: note = RuvC_P4
  SITE 95: note = RuvC_P5
  REGION 186..270: note = Tnp_domain
  SITE 194: note = Tnp_P1
  SITE 223: note = Tnp_P2
  SITE 231: note = Tnp_P3
  SITE 232: note = Tnp_P4
  SITE 244: note = Tnp_P5
MQTSFIGVDVSESELVISVDDLPPLSVVNDLAHITRWLAQLPRDCCIAMESTGRYHLLLAQLALQAGLMVYVLNARDVYFYAKALGARAKSNALDCVVIRRYVQEHFQNLYPWQPGTKVQQQLHALLTRRAQVSTHQAAIKQTLKDTPLPQEHLTQLMQSFKDLIAAMDRQVIDLIAKVEVMQQGCVRLQTITGIGPQTGALLTELLSRVHFANSDALVAYSGLDPRANDSGTKKGRRCLSKRGPALLRRQMYLAAFAASHSKALKPLYTQIRAKGFSTTESMVILARKLLRVAFAIWKSQETFNPEQLLPNAA

SEQ ID NO: 17028 - protein, 404 aa, unidentified
  source 1..404: note = protein_9113005
  REGION 4..159: note = RuvC_domain
  SITE 7: note = RuvC_P1
  SITE 59: note = RuvC_P2
  SITE 96: note = RuvC_P3
  SITE 98: note = RuvC_P4
  SITE 101: note = RuvC_P5
  REGION 267..353: note = Tnp_domain
  SITE 275: note = Tnp_P1
  SITE 306: note = Tnp_P2
  SITE 314: note = Tnp_P3
  SITE 315: note = Tnp_P4
MWYTGIDWADEHHDALTLDEKGHQVGSLRVDHTAQGLNKLNAFLEQIIGTAPKDQMACIIETTHGLLIAFLLDAGWFVYPVNPRTVDRRRSASGAKTDLIDAYLLAKTGRADFADLHRLTPDSEKVAELKMLTRDQTALVQMQTRLVNQITACLKAYYPVALELFGKVQQKCTLVFLQTYPTPQEARAASVDQIRALLKQCRHPQAASAALTMVEQLSQPQLQATAATVRAKSRLLLALVSQLLPLIEQIANYDKEIDTLFLTHEDHAIFASLPRAGERLAPSLLAEIGDDRKRYLDASSLQALGGTSPVLYQSGMYSKAHRRLGCIKPLRNTLHHFAWQSTQSEAWAKDYYQRKRAEGKSHTVAIRALSNVWVRIIFAMWVHRECYQTATFERAQLQHARRAA

SEQ ID NO: 17029 - protein, 342 aa, unidentified
  source 1..342: note = protein_df676d1
  REGION 7..149: note = RuvC_domain
  SITE 10: note = RuvC_P1
  SITE 53: note = RuvC_P2
  SITE 88: note = RuvC_P3
  SITE 90: note = RuvC_P4
  SITE 93: note = RuvC_P5
  REGION 212..296: note = Tnp_domain
  SITE 220: note = Tnp_P1
  SITE 250: note = Tnp_P2
  SITE 258: note = Tnp_P3
  SITE 259: note = Tnp_P4
  SITE 271: note = Tnp_P5
MEKITIIGLDLAKSVFQIHAITEDGHIAVRRALRRSQVLEFFRHIEPCLVGMEACGSAHYWANAIGEFGYTVRLMPPTYVKPYVKRNKTDAADAEAICEAVTRPTMRFVPVKSPEEQAAGMVLKTRELLVRQRSQTANAMRGHMAELGIIAAAGMTSIAKLIAILRDDQDGRLPHSAKAALLEMADQIERLTERVEVLDSKIIAAVKADDAARRLTTIPGVGPIIAATVRAAVQDPAAFRTGRDLAAWIGITPTANSSGGKERLGKISKRGNKQLRTLLIVGATSILKQARRGSKLPGWVVSLMARRPYKVAAVALANKMARTIWALLVKGGTYQAPSMAKA

SEQ ID NO: 17030 - protein, 330 aa, unidentified
  source 1..330: note = protein_0728a46
  REGION 7..158: note = RuvC_domain
  SITE 10: note = RuvC_P1
  SITE 59: note = RuvC_P2
  SITE 97: note = RuvC_P3
  SITE 99: note = RuvC_P4
  SITE 102: note = RuvC_P5
  REGION 201..288: note = Tnp_domain
  SITE 209: note = Tnp_P1
  SITE 239: note = Tnp_P2
  SITE 247: note = Tnp_P3
  SITE 248: note = Tnp_P4
  SITE 261: note = Tnp_P5
MKTNEIIGIDVSKLLIDVCIYSKQIVQQFENSKSGFKLMLKWSFKNSSFSKEETMFVFEHTGMYSHLLSVSLTEQKLSFFIASGLEIKRSIGIARGKDDQIDAKRIAHGYRLKEELKPSKLPKRSILQLKSLLSLRTKLNKQRAGFKVTLKEQKRIYKAKEYKIIFDVQQKMIAELTKQIHKINTQMQAIIDQNIMLKETYNLVTSVKGIGMQTAIMMIVFTDNFSKFENWRKFASYCGVAPFPYQSGTSIKGRTKVSHLANKKLKAIINMCAISAIQHNPEMKLYYHKRIKQGKSKMSTVNIIRNKLIARVFAVVKRQTPYVDTFKFAA

SEQ ID NO: 17031 - protein, 408 aa, unidentified
  source 1..408: note = protein_b556a80
  REGION 6..159: note = RuvC_domain
  SITE 9: note = RuvC_P1
  SITE 57: note = RuvC_P2
  SITE 98: note = RuvC_P3
  SITE 100: note = RuvC_P4
  SITE 103: note = RuvC_P5
  REGION 221..306: note = Tnp_domain
  SITE 229: note = Tnp_P1
  SITE 259: note = Tnp_P2
  SITE 267: note = Tnp_P3
  SITE 268: note = Tnp_P4
  SITE 279: note = Tnp_P5
MSQVVIGMDPHKRTATIEVMAGDETVVGGGRYATDAVGYRAMRAEVKHWPERIWAIEGCQGIGRHLANRLLADGEQVVDVPPKLSARTRVFATGQGRKTDATDAHSVALAATRMQGLRPVVDNQQLAVLRILADRRRSLGEDHTRMISQLHQLLLELIPGGAKKDLSAAQAKALLARVRPRDAAGKTRRRVAAELISDLERIYQRKKAANKELNDLLKATATTLPSLHGIGPSGAARLLVEVAGITRFPTRAHFASWNGTAPIDASSGDQVRHRLSRAGNRQINRVLHIMAVVQLHNPTEGRAYYDRKVAAGKTPREAMRALKRRLSDIVYRQMITDARAAATGPGGHLGAATGSSAAGLHPSAGTSEKSLPGPAAHDLTPAKPIPSAGRFRRPSPAPDRSRRQAHSA

SEQ ID NO: 17032 - protein, 338 aa, unidentified
  source 1..338: note = protein_afdcbc7
  REGION 6..147: note = RuvC_domain
  SITE 9: note = RuvC_P1
  SITE 52: note = RuvC_P2
  SITE 87: note = RuvC_P3
  SITE 89: note = RuvC_P4
  SITE 92: note = RuvC_P5
  REGION 210..294: note = Tnp_domain
  SITE 218: note = Tnp_P1
  SITE 248: note = Tnp_P2
  SITE 256: note = Tnp_P3
  SITE 257: note = Tnp_P4
  SITE 269: note = Tnp_P5
MKDTMIGVDLAKSVFQIHAASLTGALAFRKKGRRRQFLQFMASQPPALVVMEACGSAHYWARELTKAGHEVKLLAPQYVRPFVKRQKNDAADAEAIAIAARQPEMRFVAPKSEDQQARAVLFRCRDRLVHQRTELVNALRATLYEFGLVVPKGIAHLRRIEAFVADESVEIPTLVRSECRDLLEQIDEQSVRIKEKTRAMAGLSDESGVAQRLETMPGVGPLTALAVEAFAPSMETFSSGRDFAAWLGLVPRKFSSGGKERLGRVSKAGQADIRRLLIIGAMARVNWASRKPPVPGSWLARKPRMLVAIALANKMARTIWAMLTKQENYRDPVLSAAA

SEQ ID NO: 17033 - protein, 343 aa, unidentified
  source 1..343: note = protein_08d66d1
  REGION 6..149: note = RuvC_domain
  SITE 9: note = RuvC_P1
  SITE 54: note = RuvC_P2
  SITE 89: note = RuvC_P3
  SITE 91: note = RuvC_P4
  SITE 94: note = RuvC_P5
  REGION 213..301: note = Tnp_domain
  SITE 221: note = Tnp_P1
  SITE 251: note = Tnp_P2
  SITE 259: note = Tnp_P3
  SITE 260: note = Tnp_P4
  SITE 272: note = Tnp_P5
MKIIRVGVDLAKSVFQVHGVDRCEKVVWRKKLGRAEWLSALLEKIEPGCEIGMEACGGAHHWARQLQKRGFTVKLIAPQFVKPYVKSNKNDANDAEAICEAMSRPSMRYVAVKSVEQQDLQAIHRIRAELVSQRSAKGNQIRGLCSEYGLVAPREMIQLRAAIPLWLEDLENGLTQRFRRMLRGLWLDLLNLELRVKELDQEIEIAAATDPVATRLQQLRGVGPIIATALVANVGDAKQFSSGRQMAASLGLTPRQNSSGGKERLLGITKRGDAQLRTLLIHGARSVLRTAASKNDRMSRWVTHIAQTRHHNIAAVALANKMARIAWAMMTKGTDYQPGLVAV

SEQ ID NO: 17034 - protein, 388 aa, unidentified
  source 1..388: note = protein_18762e6
  REGION 1..141: note = RuvC_domain
  SITE 39: note = RuvC_P2
  SITE 80: note = RuvC_P3
  SITE 82: note = RuvC_P4
  SITE 85: note = RuvC_P5
  REGION 253..341: note = Tnp_domain
  SITE 260: note = Tnp_P1
  SITE 290: note = Tnp_P2
  SITE 298: note = Tnp_P3
  SITE 299: note = Tnp_P4
  SITE 311: note = Tnp_P5
MYQEMTCLYEGEITHTKSGFQELHALIKNLPEVPEIVFESTGIYSRPVETFCQKNQLIYYVLNPLQAKQQMEKESLRKWKTDKRDAHRLAQTHWNNSRTKSVSAEPLYKELRDLSRFYQEIMDEIGRMRMHLHNAIQLTFPELEQVLSNRLTPYGLTMIAQYPHPSFVLKQSRTIIKNRLMASTAKKISENRARNKADELIAYAKDSYPAVSETAIPVAKTRYYAEQLQALLNQKERLANQMIETAKQLEEFSVIASFPGIGELSAAQFIGELGDLRRFSDPRKANAYIGIDIRRYQSGNYLAQDHINKRGNPKGRKILFFIVKNMIKAQHAAPNHIVDYYYKLKKQPLPKKEKVAIVACMNKLLKCLHAMIRNGTKYDYSYTVSTDH

SEQ ID NO: 17035 - protein, 351 aa, unidentified
  source 1..351: note = protein_2ebf921
  REGION 2..115: note = RuvC_domain
  SITE 14: note = RuvC_P2
  SITE 54: note = RuvC_P3
  SITE 56: note = RuvC_P4
  SITE 59: note = RuvC_P5
  REGION 225..314: note = Tnp_domain
  SITE 233: note = Tnp_P1
  SITE 263: note = Tnp_P2
  SITE 271: note = Tnp_P3
  SITE 272: note = Tnp_P4
  SITE 285: note = Tnp_P5
MEQVSGQSPAVIFESTGHYHEPVLQFLEDHDITYYLINPVVSYEARKTSLRKVKTDKIDAFHLGELYYKEDLEVFQKKTEQYLNLRQLTRQHSALTDSYVEIKLQFQAAVDHIFPEYHGVFSDLCGNLSLNTLLHYPTASDIQKVSQQTLAVEMRQFGAKRSYKWFLDKADQLKAAANRNPFQHPVCHGHIVSLQMYIQMLFQYQEHLSKLKKEIDALAQAFENCGLIQSIPGIGDKIAATITSEMGDINQFPHAKNLTAYAGLDPSVFESGKYKASINRITKRGSSRLRQALYTAVQCGLAKNRNKKLIAYYDCKRNEGKPHKVAVIACANKLVHWIHAMLKRQEAFVDQ

SEQ ID NO: 17036 - protein, 343 aa, unidentified
  source 1..343: note = protein_bdc748d
  REGION 6..147: note = RuvC_domain
  SITE 9: note = RuvC_P1
  SITE 52: note = RuvC_P2
  SITE 87: note = RuvC_P3
  SITE 89: note = RuvC_P4
  SITE 92: note = RuvC_P5
  REGION 211..294: note = Tnp_domain
  SITE 219: note = Tnp_P1
  SITE 249: note = Tnp_P2
  SITE 257: note = Tnp_P3
  SITE 258: note = Tnp_P4
  SITE 270: note = Tnp_P5
MTICTLGVDLGENSCSAAGLDTTGKVVLRRLMRPSTIPGFTAKLAPCVIAMEACYGAHHLGRLLAAQGHTVWLMSPEYVRPYVKAQKNDDRDAEAIAEAATRPTMRFVEMKTQDQLDVQSLHRVRSRLVGARTNLINQARAILMERGIVVPQGRQKFERALDAMLADTDRLPEGRIRRFMMETREEWKTLDDRIAALDMEFLELTRTDELARRLLTIPGIGSLNATALAAAVGDASTFERSRDLSAWLGLVPKQYTTGGKPKIRGISKRGNRYPRTLLIHGARAALPSLAKSETPLGSWLLGLLARCHYNTVTVALANKLARIAWVTLRRGDTFSIDRAAMPI

SEQ ID NO: 17037 - protein, 391 aa, unidentified
  source 1..391: note = protein_3a6e27c
  REGION 4..163: note = RuvC_domain
  SITE 7: note = RuvC_P1
  SITE 60: note = RuvC_P2
  SITE 101: note = RuvC_P3
  SITE 103: note = RuvC_P4
  SITE 106: note = RuvC_P5
  REGION 266..353: note = Tnp_domain
  SITE 274: note = Tnp_P1
  SITE 304: note = Tnp_P2
  SITE 312: note = Tnp_P3
  SITE 313: note = Tnp_P4
  SITE 326: note = Tnp_P5
MIFVGIDVSKDKHDCFITNSDGEILFDSFTIANNIEGFEDLFHKIKSISNDLTKVKVGLEATGHYSYNILGFLLNKNLTVYVINPLHTSLYRKSLSLKKTKTDKVDSQTITTMLMSDVDLKPYSNELYHNEELKSLSRYRFDKVQERAKLKSSIARLVNILFPELEKLFCTIHLATVYQLLSEYPGASYIANSNLNDLSILLSSSSKGRFDYSQAELVHSVAKKSIGSIMPAKSLELKHTIKLIKELDSEVDEIEKEIKIIMDKINSPILTIPGISYRMGAMILSEIGCFSKFDSPDKILAFAGLSPSTYQSGKLDSSHSHMEKRGSRYLRYALFNATKFVCNWDPIFNAYLLKKRSEGKHYNVAISHATKKLVRVMFQLEKTGQVFQRVA

SEQ ID NO: 17038 - protein, 391 aa, unidentified
  source 1..391: note = protein_c1d14c8
  REGION 4..163: note = RuvC_domain
  SITE 7: note = RuvC_P1
  SITE 60: note = RuvC_P2
  SITE 101: note = RuvC_P3
  SITE 103: note = RuvC_P4
  SITE 106: note = RuvC_P5
  REGION 266..353: note = Tnp_domain
  SITE 274: note = Tnp_P1
  SITE 304: note = Tnp_P2
  SITE 312: note = Tnp_P3
  SITE 313: note = Tnp_P4
  SITE 326: note = Tnp_P5
MICVGIDVAKDKHDCFILSSEGAVLADVFTIPNNLEGFNTLLDKLRACSTPQDSIKVGLEATGHYSYNILGFLLDNGLATYVLNPLRTNLYRKSLSLRKTKTDRVDARTIAALLLSDTGLKPYTDTAYHNEELKSLTRYRFDKVKERAKLKTSVSRLVCILFPELEKLVPTLHMASVYELLSEFPGAKQVAAAHLTRLKALLAEASRGRYGRDMAVELRDAARRSIGSRMPAKSLELQHTIRLIRELDAEIEEIEAAIQAIMEELHSPITTIPGIGYRMGAMILAEVGDFSRFDSPDKLLAYAGMSPSTYQSGQLKNCYPHMEKRGSRYLRYALYNATKYVCLWNPAFAAYLAKKRSEGKHYNVALSHAAKKLVRLIFALEKSRQSYCPAA

SEQ ID NO: 17039 - protein, 342 aa, unidentified
  source 1..342: note = protein_1e6a87c
  REGION 7..149: note = RuvC_domain
  SITE 10: note = RuvC_P1
  SITE 53: note = RuvC_P2
  SITE 88: note = RuvC_P3
  SITE 90: note = RuvC_P4
  SITE 93: note = RuvC_P5
  REGION 212..300: note = Tnp_domain
  SITE 220: note = Tnp_P1
  SITE 250: note = Tnp_P2
  SITE 258: note = Tnp_P3
  SITE 259: note = Tnp_P4
  SITE 271: note = Tnp_P5
MMQAVAVGLDIAKNVFHAYGVGAEGQRVFSRKLRRAQVEVFFSKLEPCLIGIEACATAHHWARTFGAMGHEVRLMPPAYVKPYVKTQKNDEADAEAICEAVTRPNMRFADIKTVDQQSVLVLHRTRTMLIKHRTRMGNTIRAHLAEFGIAEAIGREGLARLIDLIVTGEDTRVTGITRRAMMCLVEQYRLLQDQILDLDRQVMACHRSSEASKRLATIPGVGPLAASALVASIGDASSFKNGRSFAAFIGLVPRQSSSGGKERLGKISKRGDHYLRWLLVVGSLAVIRYAQRHGTKRPWLIKLLQRRTTKIAAVAMANKIARIAWVLMTRGDVYREPAAQAA

SEQ ID NO: 17040 - protein, 338 aa, unidentified
  source 1..338: note = protein_e86c3c2
  REGION 7..149: note = RuvC_domain
  SITE 10: note = RuvC_P1
  SITE 53: note = RuvC_P2
  SITE 88: note = RuvC_P3
  SITE 90: note = RuvC_P4
  SITE 93: note = RuvC_P5
  REGION 212..300: note = Tnp_domain
  SITE 220: note = Tnp_P1
  SITE 250: note = Tnp_P2
  SITE 258: note = Tnp_P3
  SITE 259: note = Tnp_P4
  SITE 271: note = Tnp_P5
MDKITTIGLDLAKNVFHAVCCDERGKVIKKKMLRRSGLLAWFATLPPSLVGMEACASAHYWARELKALGHQVKLIPPQYVKPFVRGNKNDYNDALAIAEAVTRPEMRFVSIKTPEQQDIQALHRLRERRLRDRTALCNQLRGLLGEYGLVFSRGVNTLRQRIPEILEDSENGLSDFFRGLLSQGYQQLTELDAHIDAYTQTLEAHSKRNDACQRLRTIPGYGPIVSSAFYSVVGNGEAYRRGRDVSASLGIVPKQHSSGGKEVLLGISKRGDRYLRSLLIHGARAVVIQAINKEDALSRWINKTRAARGFNKAVVALANKLARIGWAILANNTVYQAR

SEQ ID NO: 17041 - protein, 341 aa, unidentified
  source 1..341: note = protein_3caa3e9
  REGION 7..148: note = RuvC_domain
  SITE 10: note = RuvC_P1
  SITE 53: note = RuvC_P2
  SITE 88: note = RuvC_P3
  SITE 90: note = RuvC_P4
  SITE 93: note = RuvC_P5
  REGION 209..311: note = Tnp_domain
  SITE 217: note = Tnp_P1
  SITE 247: note = Tnp_P2
  SITE 255: note = Tnp_P3
  SITE 256: note = Tnp_P4
  SITE 268: note = Tnp_P5
MDHATLVGIDLGKHSFHLHGQDRNGKAVFRKKLGRKQLIEFFAMYEVCTVVMEACAGSHHMARKLANFGHEVKLISPQFVRPFVKSNKNDFVDAEAICEAAARPAMRFLTPKTESQQTLSVLHRVRESMVRDRTRTTNQMDAFLLESGVRLPVGKTAVARRPEFLDAQALPPRLIAILERLHEHLKYLEKQIGEIERERAHQLADDDVGQRLMSIPGIGPITARVLAAEMGDGRQYGCSRDFAASVGLVPRQYSTGGRSNLLGISRRGDKHVRCLLVLCARAYLRGLEKRTGRLAEWARAMMTRRHSNVVACALANKLARTAWAIVARHSTFDSEFARPSA

SEQ ID NO: 17042 - protein, 341 aa, unidentified
  source 1..341: note = protein_ce38db9
  REGION 7..149: note = RuvC_domain
  SITE 10: note = RuvC_P1
  SITE 53: note = RuvC_P2
  SITE 88: note = RuvC_P3
  SITE 90: note = RuvC_P4
  SITE 93: note = RuvC_P5
  REGION 212..297: note = Tnp_domain
  SITE 219: note = Tnp_P1
  SITE 249: note = Tnp_P2
  SITE 257: note = Tnp_P3
  SITE 258: note = Tnp_P4
  SITE 270: note = Tnp_P5
MEEVTVIGIDLAKSVFQLPGATVTGAPMFRKKLSRAQVLKFLGEQPPCLVAMEACASSHYWGREIMKLGHEVRLIPPIYVKPFVKRQKNDANDAEAIAEAVVRPTMRFVPVKSAEQQARSMVFKTRDLFVRQRNAIINALRGHLMEYGIIAPPGRTFVKRLAKQIDAPNSDLPPVVIELCRLHLDQLDAVTEKIKRIEKRLKEAAGSDPETIRLQTAPGVGPVSAMAIQAFAPPLEGFRRGRDFAAWLGLVPVQKSTGGKQVLGRTSKMGQRDIRRLLIIGAMTRVRWAVRNGAPKGSWLEQMLARKPRMLVAIALANKTARAIWAMMTKKEDFKDPVAVA

SEQ ID NO: 17043 - protein, 341 aa, unidentified
  source 1..341: note = protein_0c3430f
  REGION 7..149: note = RuvC_domain
  SITE 10: note = RuvC_P1
  SITE 53: note = RuvC_P2
  SITE 88: note = RuvC_P3
  SITE 90: note = RuvC_P4
  SITE 93: note = RuvC_P5
  REGION 209..298: note = Tnp_domain
  SITE 217: note = Tnp_P1
  SITE 247: note = Tnp_P2
  SITE 255: note = Tnp_P3
  SITE 256: note = Tnp_P4
  SITE 268: note = Tnp_P5
MQDTTLVGIDLGKHSFHLHGQDKRGKAVFRKKMSRKQLVEFFATFHACTVVMEACAGAHYMARKLTALGHQVKLISPQFVRPFVKANKNDFVDAEAICEAASRPAMRFVTPKTESQQTLSALHRVRDSLVRERTQASNQVHGFLLEFGISLPVGHAVMKRLPAVLAEHALPPRLVAILERLHVHFKYLGEQIDEVNREIGLQLADDAVGQRLMTIPGVGPITASVLAAEIGDGKQYRCSRDFAASVGLVPKQYSTGGRANLLGISKRGNKHIRRLLVLCARAYMRQLDRQSGRLATWVRAMLTRRHSNVVACALANKLARMAWALTTRNTTFNSESVAMPA

SEQ ID NO: 17044 - protein, 346 aa, unidentified
  source 1..346: note = protein_f3e96a0
  REGION 7..149: note = RuvC_domain
  SITE 10: note = RuvC_P1
  SITE 53: note = RuvC_P2
  SITE 88: note = RuvC_P3
  SITE 90: note = RuvC_P4
  SITE 93: note = RuvC_P5
  REGION 212..304: note = Tnp_domain
  SITE 220: note = Tnp_P1
  SITE 250: note = Tnp_P2
  SITE 258: note = Tnp_P3
  SITE 259: note = Tnp_P4
  SITE 271: note = Tnp_P5
MKQVSTIGLDLAKHVFQVHGADIEGSALFNRKLRRTEVLRFFERLPPCLVGMEACGGAHYWAREIAQFGHDVRLIPPAYVKPFVKRGKTDAADAEAISEAVIRKTMRFVPIKTAEQQADAMVLKTRALLVQQRTQSVNALRAHLAELGIIAAGGLPNVAALVAIVREADDTRLPPAARFALTAIVDQIDALAVQIDVLERTIVAESKRDESMRRLTTIPGVGAITAATIKALVPDPGGFKSGRHFAAWMGLTPRPYSSGGKERLGGISKMGNPELRVLLVLGATAVLRIARNDERARPWLKALLARRPFKVAAVALANKTARIIWALLNKGGVYNPPETSPIAAAT

SEQ ID NO: 17045 - protein, 396 aa, unidentified
  source 1..396: note = protein_efa15d6
  REGION 19..174: note = RuvC_domain
  SITE 22: note = RuvC_P1
  SITE 72: note = RuvC_P2
  SITE 113: note = RuvC_P3
  SITE 115: note = RuvC_P4
  SITE 118: note = RuvC_P5
  REGION 270..356: note = Tnp_domain
  SITE 278: note = Tnp_P1
  SITE 308: note = Tnp_P2
  SITE 316: note = Tnp_P3
  SITE 317: note = Tnp_P4
  SITE 329: note = Tnp_P5
MDNQVRLNNLYGGTHMIFVGIDVAKNKHDVAVLNDKGKLILKPLTFSNTRAGFNLFINTLSQLKQDYLIALEDTGHYAFNLLDFLHEHGATVYTYNPLLIKEFAKSLSLRKTKTDKKDARTIALKLLSDPNREQFRHDNRKEELKILTRHIHRLKKKQSDWKVQYTRCLDIIFPEIDKIIGKHSDYAYELLSHYPSPQKMSEAGFEKLLEIKRLTMPKIQDILKVAPNSIGTTSEAREFELIEIIENIKHYKRLISKAENKVDELMAEFTSVITTVAGIGNRLGSIILAEIRNIHTFDKPAQLQAFAGLEPSIYQSGQLDTQGKMVKRGSPHLRWALIQAAKSVARFSPAFKAYLRIKLDQGKHYNVAVAHVAKKLVRVLFHLLKNNTPFDESKVR

SEQ ID NO: 17046 - protein, 352 aa, unidentified
  source 1..352: note = protein_f864527
  REGION 6..168: note = RuvC_domain
  SITE 9: note = RuvC_P1
  SITE 68: note = RuvC_P2
  SITE 106: note = RuvC_P3
  SITE 108: note = RuvC_P4
  SITE 111: note = RuvC_P5
  REGION 213..299: note = Tnp_domain
  SITE 220: note = Tnp_P1
  SITE 250: note = Tnp_P2
  SITE 258: note = Tnp_P3
  SITE 259: note = Tnp_P4
  SITE 272: note = Tnp_P5
MKKIVVGIDISKEKIDVSAIDVRESQTGMVKLDYQVFENRPLGFRRMLVWARHLIKGIGLEDILFCCETTGGYDRCLCDYIYAKGLYIWREGALQIKRSMGVRKGKDDKADSLMIAEYAMRHMDKAVMYETPSETIRELKALFLYRHKLVQEKAEKKVRASHLDDTAAKSKSMRFILRDAKKSVKALEKSIKECEKQIMELIEGDEDLKRNYGHIVSIKGINIVNATAMIAYSNNFKGITTANKMASYYGVASFREQSGTSVDKKACVKYYSSSLLRATITQAAEWTIKENGIYHDYYLRLKADGKPYGIIINNVKNKLIHLAYSLVTNDIDYENNHEFLRAKRKCEQAESD

SEQ ID NO: 17047 - protein, 334 aa, unidentified
  source 1..334: note = protein_fce85af
  REGION 7..149: note = RuvC_domain
  SITE 10: note = RuvC_P1
  SITE 53: note = RuvC_P2
  SITE 88: note = RuvC_P3
  SITE 90: note = RuvC_P4
  SITE 93: note = RuvC_P5
  REGION 208..294: note = Tnp_domain
  SITE 216: note = Tnp_P1
  SITE 246: note = Tnp_P2
  SITE 254: note = Tnp_P3
  SITE 255: note = Tnp_P4
  SITE 267: note = Tnp_P5
MEQVTTVGIDLAKNVFSLHGVDGTGKTVLRRTVRRDRLLESVAALTPCLIGMEACSGAHEWGRRFQQHGHTVRLMAPKFVAPYRKSDKNDGNDAEAICEAVARPNMRFVPVKSVEQQALLALHRVRQGFVVERTAIINRLRGLLSEFGVVMPLRSVTVRRQAAAAAEALPQLARTAIGDLLEQLRLLDERIERYDTQIHEQARLSEPARRLMQIRGIGATTALAIVATVGNAREFRNGRQFAAWIGLVPGQYSTGGRTRLGHISKRGDAYLRDLLVQGARSVLQTAPMHQDRLSRWALELQARRGYYRTLMAIANKNARIAWALLAKDMPPRKD

SEQ ID NO: 17048 - protein, 345 aa, unidentified
  source 1..345: note = protein_79176e8
  REGION 6..147: note = RuvC_domain
  SITE 9: note = RuvC_P1
  SITE 52: note = RuvC_P2
  SITE 87: note = RuvC_P3
  SITE 89: note = RuvC_P4
  SITE 92: note = RuvC_P5
  REGION 211..298: note = Tnp_domain
  SITE 219: note = Tnp_P1
  SITE 249: note = Tnp_P2
  SITE 257: note = Tnp_P3
  SITE 258: note = Tnp_P4
  SITE 270: note = Tnp_P5
MKITTVGIDLAKNVFQVHGIDEHGKAVLKKQLRRDQMATFFVNLTSCLIGMEACGSAHHWARKLQSFGHTVRLMAPQFVKPYVKTNKNDAADAEAICEAVGRPNMRYVPVKNIEQQAVLALHRVRQGFVRARTAQANQIRGLLGEFGLIIPQGIGYIATRVPELIEDGANELPGAFRMLVQRLLDHLKELDRQVDELEAKIQAWHRSNDLSRKLAQVPGIGPITASALVASIGDAKNFDSDRQVAAWLGLVPRQHSSGGKSNLLGMSKRGDTYLRTLLIHGARSVIYRVTQKVDACSNWIGAVVNRRNKNVAAVALANKNARIVWALLAHDRQYDEGYARKAAMA

SEQ ID NO: 17049 - protein, 329 aa, unidentified
  source 1..329: note = protein_3d4bc73
  REGION 7..159: note = RuvC_domain
  SITE 10: note = RuvC_P1
  SITE 59: note = RuvC_P2
  SITE 97: note = RuvC_P3
  SITE 99: note = RuvC_P4
  SITE 102: note = RuvC_P5
  REGION 200..287: note = Tnp_domain
  SITE 208: note = Tnp_P1
  SITE 238: note = Tnp_P2
  SITE 246: note = Tnp_P3
  SITE 247: note = Tnp_P4
  SITE 260: note = Tnp_P5
MEIKEVIGIDVSKLTLDCCIHKSQEFKVFNNDSGGIEKLIEWSLKKSKLDKENLLFVLEHTGLYSDHLVRLLDGGDCLMNIVSGLEVKRSLGITRGKDDRTDAKRLALYGYRTREEFSPNKIPSSTLARLKRLMSMRRKLVGQRAGHMATLREQKRVLEEDPLLFWVQEDVINLLSWRISDLEREMDKLIQGDLELKQMLALLTGIKGIGKVTARFMIVHTVGFTSFATWRKFASYCGIAPFPHTSGTSVRGRTRVSRLANREGKALLHQCSLSAVKCNPEMKAYYERRLEIGKSKMSTLNIIRNKLVARAFAVVSRGTPYVQLMGHAS

SEQ ID NO: 17050 - protein, 321 aa, unidentified
  source 1..321: note = protein_c84e739
  REGION 8..147: note = RuvC_domain
  SITE 11: note = RuvC_P1
  SITE 52: note = RuvC_P2
  SITE 92: note = RuvC_P3
  SITE 94: note = RuvC_P4
  SITE 97: note = RuvC_P5
  REGION 191..278: note = Tnp_domain
  SITE 199: note = Tnp_P1
  SITE 229: note = Tnp_P2
  SITE 237: note = Tnp_P3
  SITE 238: note = Tnp_P4
  SITE 251: note = Tnp_P5
MNKYKEIYGIDISKDVFDVYVPETGFSQFKNDYQGFKKFLKQISKGSLVVMEATGYYHYRLAQFLHAQGILVSVVNPLSVKRFIQMKLAKVKTDKSDAKAISEYGQMNEVPLYNALTEVQAECLQLFRLLDSYMKHRTATKNKLKGEEALGIPSRFVYQSLKRNLRHLNKEVESLESRLLALVKQEQQSQLTLLKSIPGMGVKTALFLIVVSDGFSKFETASQLCSYVGVTPTIRESGSSVRGRSRISKVGNKKLRNLLFLCAFSACKHNKACRELYERIVAKGKSKKLALIAVSNKLLKQAFAIVKSGLPYDENFVSKLA

SEQ ID NO: 17051 - protein, 387 aa, unidentified
  source 1..387: note = protein_1e66b8d
  REGION 4..159: note = RuvC_domain
  SITE 7: note = RuvC_P1
  SITE 58: note = RuvC_P2
  SITE 98: note = RuvC_P3
  SITE 100: note = RuvC_P4
  SITE 103: note = RuvC_P5
  REGION 263..350: note = Tnp_domain
  SITE 271: note = Tnp_P1
  SITE 301: note = Tnp_P2
  SITE 309: note = Tnp_P3
  SITE 310: note = Tnp_P4
  SITE 323: note = Tnp_P5
MIYVGIDIAKLNHYASAISSDGEVLLEPFKFSNDNDGFYTLISKLDQFEKDKVIIGLESTAHYGNNLLAFLVPKGYHVCLINPIETSTMRKNNIRKTKTDKVDTYIICKVLNMQPHRFVTLYDIGLMQLKNLGRFRQKTVKQRSRLKIQLTSYVDQVFPELQYFFKSGIHQKGCYALLKEAPSPEAIASMHLTHLTNVLKSSSHGHFKKETAVELRVLAQKSVGTSDNSLSIQITQSIEQIELLDRQLELIESEMKDIVTSLDSVIMTIPGIGYTNGGMILGEIGDVTRFSNPSKLLAFAGLDPSVYQSGNFEAKRTRMSKRGSRALRFALINAAHNVVKNNSTFASYYNQKRSEGRTHYSALGHCAGKLVRIIYKMLTDNVAFNLD

SEQ ID NO: 17052 - protein, 342 aa, unidentified
  source 1..342: note = protein_be74cac
  REGION 6..148: note = RuvC_domain
  SITE 9: note = RuvC_P1
  SITE 52: note = RuvC_P2
  SITE 87: note = RuvC_P3
  SITE 89: note = RuvC_P4
  SITE 92: note = RuvC_P5
  REGION 210..295: note = Tnp_domain
  SITE 218: note = Tnp_P1
  SITE 248: note = Tnp_P2
  SITE 256: note = Tnp_P3
  SITE 257: note = Tnp_P4
  SITE 269: note = Tnp_P5
MEHTTIAVDLAKSVFQVAVSHRPGHLDEERRLSRDRLVSFFAQRPPATIVLEACGSAHYWARQLQPFGHTVRLLPPHDVCPYVRRNKTDRTDAKGLLEANRNEEIHPVPVKSIEHQAIASLHRLRSTWLATRTARLNTVRGLLREFGIFIPVGAQRVVPHVRTLLVEPTPVPVLLHTTLAAACDEIEMLEMNMRAVERQLGALAAEMADVTLLQTVPGVGVITATALVALVADIRRFPSGRHFASFLGLTPKEDSSGSRRRLGAISKQGDVYVRMLLTHGARSVVWHAKTAARPTPLQQWAVQAEQRRGRNVAAVAVANKLARIVWAVWAQHRPFAADHRPG

SEQ ID NO: 17053 - protein, 338 aa, unidentified
  source 1..338: note = protein_f1dfd00
  REGION 7..149: note = RuvC_domain
  SITE 10: note = RuvC_P1
  SITE 53: note = RuvC_P2
  SITE 88: note = RuvC_P3
  SITE 90: note = RuvC_P4
  SITE 93: note = RuvC_P5
  REGION 209..294: note = Tnp_domain
  SITE 217: note = Tnp_P1
  SITE 247: note = Tnp_P2
  SITE 255: note = Tnp_P3
  SITE 256: note = Tnp_P4
  SITE 268: note = Tnp_P5
MNSVTLLGIDIGKNSFHLHGQDAQGHQVLRKKLNRSQLLPLLAQMPPCKVAMESCGGSQFLAREITKLGHQVQLIAPQHVKAYVTGNKNDFIDAEAICEAASRPRTRSVQVKSVDQQVLSTVHKLRKSLVSRRTGVINQVHGFLLEFGVIFPAGYAALDRVPALMEEHNLPLRLRQAISRMLDNIRQLTSEIKALDIEIKQQVNGSDAGKRLQSIPGIGPLIASALVADVGDASIYKSSRDFSASLGLVPRQYSTGGQTTLLGISKRGDRYLRTLLMQGAQTLLYRIDKRNDALGVWARNLLARKPLNKVACALANKMARIVWALLTKGGTYNGHFTV

SEQ ID NO: 17054 - protein, 290 aa, unidentified
  source 1..290: note = protein_6b17c83
  REGION 4..97: note = RuvC_domain
  SITE 38: note = RuvC_P3
  SITE 40: note = RuvC_P4
  SITE 43: note = RuvC_P5
  REGION 162..249: note = Tnp_domain
  SITE 170: note = Tnp_P1
  SITE 200: note = Tnp_P2
  SITE 208: note = Tnp_P3
  SITE 209: note = Tnp_P4
  SITE 221: note = Tnp_P5
MWGASTGAFYWQREFEKLGHKVKVISPQYVKPFARGQKNDGNDAQAIAIALMQPTMQFVPPKSPEQQDIQAQHRARQRIVNHRTATVCQIRGLLLDPGITIGTAVSRVRHAVPLILEDAENGLSVRMRRTIAELYDLFNDLGRRIGFFDKEIDAVFRQSEACQRIAKVKGIGPKTATAVVAAIGKGTEFKNGRHFAAWLGLVPRQHSSGDRQVLMNMTKKGDKHLRTLFIHGARAVVRVAANNNEGYLNQWVNQLKERRGFNKTTVAVANKNARIIWSILHNETEYRPAV

SEQ ID NO: 17055 - protein, 351 aa, unidentified
  source 1..351: note = protein_f180ad8
  REGION 12..153: note = RuvC_domain
  SITE 15: note = RuvC_P1
  SITE 58: note = RuvC_P2
  SITE 93: note = RuvC_P3
  SITE 95: note = RuvC_P4
  SITE 98: note = RuvC_P5
  REGION 217..304: note = Tnp_domain
  SITE 225: note = Tnp_P1
  SITE 255: note = Tnp_P2
  SITE 263: note = Tnp_P3
  SITE 264: note = Tnp_P4
  SITE 276: note = Tnp_P5
MSHKLNSAIAVIGIDIGKNSFHVVGHDNRGAITLREKWSRGQVERRLANLPPCLIGMEACVGAHHLSRQLRMLGHDARLMPAKYVRPYSKGQKNDFRDAEAIAEAVQRPTMKFVATKTAEQLDLQALHRVRERLVSQRTGIINQIRAFLLERGIAVRQGLRFLRAELPRILAAPCDALSPRMLRVVEDLAGDWRRLDERIEGLSSEIEAQARQDKGCERLMTVPGIGPIISSAMVAAIGTGDAFSKGRDFGAWLGLVPKQISTGDRTILGSISKRGNRYLRALFVQAAWVVLVKVGPKHWERYGLKSWIEAAKKRLHHNVLAVALANKLARIAWSVLAHGRTFETSKIQAA

SEQ ID NO: 17056 - protein, 407 aa, unidentified
  source 1..407: note = protein_99e4089
  REGION 6..159: note = RuvC_domain
  SITE 9: note = RuvC_P1
  SITE 57: note = RuvC_P2
  SITE 98: note = RuvC_P3
  SITE 100: note = RuvC_P4
  SITE 103: note = RuvC_P5
  REGION 221..306: note = Tnp_domain
  SITE 229: note = Tnp_P1
  SITE 259: note = Tnp_P2
  SITE 267: note = Tnp_P3
  SITE 268: note = Tnp_P4
  SITE 279: note = Tnp_P5
MAKVIIGVDPHKLSATIEVVDRREKLLGSGRFSTDQAGYTAMRAYVKAWPERVWAVEGSNGAGRPLAQRLLEAGEYVVDVPAKLAARVRLFDTGHNRKTDARDAHSIAGVAVRTKALRVLSADGELEALRMLCDRREELTRLRVQTVNRLQRLLAELIPGQGKKDLTALQAKTILATVRPRDIAGKTRRRIAVEELADLVAVEAKMKKATAELKTIVLARGSRLMDIHGVGAVVSARILADVGDITRFADRNRFASWTGTAPLDASSGEQDRHRLSRAGNRRMNHMLHIAAVTQIRLDTEGRTYYRRKRTAGKKPLEAIRCLKRRLSDVVYRQLVADAQRAALANSPEVTGTGPGGHCGATQESSAVDLPPHIDTSDQPLPGPAKPTLQPSRTVRKSPSRKTPQTTG

SEQ ID NO: 17057 - protein, 341 aa, unidentified
  source 1..341: note = protein_77cef68
  REGION 7..149: note = RuvC_domain
  SITE 10: note = RuvC_P1
  SITE 53: note = RuvC_P2
  SITE 88: note = RuvC_P3
  SITE 90: note = RuvC_P4
  SITE 93: note = RuvC_P5
  REGION 211..296: note = Tnp_domain
  SITE 219: note = Tnp_P1
  SITE 249: note = Tnp_P2
  SITE 257: note = Tnp_P3
  SITE 258: note = Tnp_P4
  SITE 270: note = Tnp_P5
MEEVTTIGLDLAKQVFQAHGADRSGAVVFRKTLRRHKVLAFFASQPPCRVAMEACGGAHYWAREIRKLGHDVRLIAPAFVKPFVKRQKNDAADAEAICEAAQRPTMRFVAVKSEAVQASATIFRTRDLLVRQRTQNINALRGHLAEYGLITRQGIGQVSKLIDMIDSPACELPDAARSMLRVLSGMIEVLESQVKLLDQEIARRAKTEDVSRRLMTIPGIGPITATALAALAPPPEVFRKGRDFAAWLGLTPLQKSTGGKQKLGATSKMGERTLRRLLIIGASAVVCQATRRGAQPGSWLARMLARKPRMLVITALANKMARTVWALIAKNEIYRAPLVAA

SEQ ID NO: 17058 - protein, 325 aa, unidentified
  source 1..325: note = protein_7a500bf
  REGION 6..151: note = RuvC_domain
  SITE 9: note = RuvC_P1
  SITE 54: note = RuvC_P2
  SITE 92: note = RuvC_P3
  SITE 94: note = RuvC_P4
  SITE 97: note = RuvC_P5
  REGION 197..284: note = Tnp_domain
  SITE 205: note = Tnp_P1
  SITE 235: note = Tnp_P2
  SITE 243: note = Tnp_P3
  SITE 244: note = Tnp_P4
  SITE 257: note = Tnp_P5
MKKIFIGIDISSKTLDICVKIDGKVQYFNIQNEIKAIRSLFKKYASVETVVAMENTGRYNWNLLEVLACMNLSVYVLSPMHLKKSLGLTRGKNDKVDSLRICSFIERNQQESRPWKPSSMPIKKLKVLLAERASRIRMKGQLARQQHDYKLMKSLGMDKELLRLNKKLIEAIDVQIKKIEADIEKNIMADGTLKEKTELIRSVPGVGKVVSWMMIAKTEAFTSISEPRKMACYCGVVPFDHQSGTSLRYRPRVSVFADKPMKSLLHLAAMSAIRLKNDLSIYYKRKVQDGKNKMSVLNAVRNKIIHRIFAVIKNQTIYKNDLVLS

SEQ ID NO: 17059 - protein, 391 aa, unidentified
  source 1..391: note = protein_111c272
  REGION 4..163: note = RuvC_domain
  SITE 7: note = RuvC_P1
  SITE 60: note = RuvC_P2
  SITE 101: note = RuvC_P3
  SITE 103: note = RuvC_P4
  SITE 106: note = RuvC_P5
  REGION 266..353: note = Tnp_domain
  SITE 274: note = Tnp_P1
  SITE 304: note = Tnp_P2
  SITE 312: note = Tnp_P3
  SITE 313: note = Tnp_P4
  SITE 326: note = Tnp_P5
MIYAGIDVAKNKHDCFITNSDGEVLFKAFTIPNNRDGFDELYQKISSVTDDLTKVKVGLEATGHYSYNILGYLLDKGLTTFVINPLHTNLYRKSLSLRKTKTDKVDAHTIATMLMSDVNLKSYSDTSYHNEELKSLTRYRFDKVKERAKLRTSISRLVSILFPELESLVPTLHMASISALLSEFPGALQIASAHLTRLTNLLSVTSRGHYDRDTAILFREAARISIGSTMPAKSLELRHTLKLIGELDAEIDEIEWEIKRIMDDLHSPILTIPGISYRMGAMILAEIGDFSRFDSPDKILAYAGLSPSTYQSGQLESAYSHMEKRGSRYLRYALFNAAKFVCNWDPVFAAYLAKKRAEGKHYNVAVSHAAKKLVRIIYQLEKSGQAYAKSS

SEQ ID NO: 17060 - protein, 345 aa, unidentified
  source 1..345: note = protein_3826ac5
  REGION 5..153: note = RuvC_domain
  SITE 8: note = RuvC_P1
  SITE 55: note = RuvC_P2
  SITE 93: note = RuvC_P3
  SITE 95: note = RuvC_P4
  SITE 98: note = RuvC_P5
  REGION 213..301: note = Tnp_domain
  SITE 221: note = Tnp_P1
  SITE 251: note = Tnp_P2
  SITE 259: note = Tnp_P3
  SITE 260: note = Tnp_P4
  SITE 272: note = Tnp_P5
MKYYAGLDVSVKETSVCIVDERGTIIRERKTVSHPADLVAILSDPQLLLERVGLEAGPLSQWLYEGMAKAGLPVICIETRHTKAFLKAHTPNKSDRNDARGIAQMMRVNLFRPVHVKTLTSQKRRALLTARKMLQEKAIAIENDIRGILRNFGLKVGAVGTFKFEDRIRELVEGAPDLVAIIEPLLAGRGKLREEFKKLDRQVLREVKVDPVCRRLMTVPGVGPIVALAYTSTIDIPARFRSSRSVGAVLGLTPILNQSGESHRIGRVSRCGDAMMRGLLYEAAQTLLTRVAKWSWLKAWAMSVAKRRGARKAIVALARRLGVILHRMWSDESEFRWSREELAAV

SEQ ID NO: 17061 - protein, 262 aa, unidentified
  source 1..262: note = protein_87f33bf
  REGION 20..152: note = RuvC_domain
  SITE 57: note = RuvC_P2
  SITE 97: note = RuvC_P3
  SITE 99: note = RuvC_P4
  SITE 102: note = RuvC_P5
  REGION 196..259: note = Tnp_domain
  SITE 204: note = Tnp_P1
  SITE 234: note = Tnp_P2
  SITE 242: note = Tnp_P3
  SITE 243: note = Tnp_P4
MNIRKLLELTSASLPAAGRDVFDLHGSTSGHDQFKNNEKGFAAFLKILPEDSIVVMEATGYYHYRLAQFLYKNNVVVSVVNPLSVKRFIQMKLAKVKTDKSDAKAICEYALANEVPLYSALTDVQAECLQLFRLMDSYLKKRTATKNKLHGEETLGIPSKFVYRSLKRDRKHLDKEIAGIEERLLSLVKMEQQQQLTLLTTVPGIGTKTALFLIVITDGFSKFETAAQLCSYVGITPTIRESGSSVRGRSRISKDLHPTSEF

SEQ ID NO: 17062 - protein, 392 aa, unidentified
  source 1..392: note = protein_093b78e
  REGION 4..164: note = RuvC_domain
  SITE 7: note = RuvC_P1
  SITE 62: note = RuvC_P2
  SITE 103: note = RuvC_P3
  SITE 105: note = RuvC_P4
  SITE 108: note = RuvC_P5
  REGION 267..354: note = Tnp_domain
  SITE 275: note = Tnp_P1
  SITE 305: note = Tnp_P2
  SITE 313: note = Tnp_P3
  SITE 314: note = Tnp_P4
  SITE 327: note = Tnp_P5
MIYIGIDVAKEKHDCCIVDSDGVIINDSLRISNSREGFEILYSTILSALPNKDISNVKIGLESTGHYSTNLQNFLYAKGFKLFILNPLATNLFRKAQTLRKTKTDKTDALVIAKMLFSDDTKSYSPVSYQIQELKSLTRHRYRLIGYRGKLKISVTRLIDIIFPELPKYVWSIHQNSSYCLLSELPSPKDVANCHLTKLTNILSKASRGKYGKDKAIDLKEAAGSSIGTSTRSLSFELQQTIRLIQSVQAEIDALDLQIKEVVTEINSPIMSIPGISYTLAAIILSEIGDIEKFTSPAKLLAFAGLDPSTYQSGKYSASYTPMVKRGSTYLRWAILTASRTVSMRDSTFSSYLSKKQSEGKHYYVAMSHVAKKLIRVVFYLLKTNTAFVPQM

SEQ ID NO: 17063 - protein, 338 aa, unidentified
  source 1..338: note = protein_81e8402
  REGION 7..149: note = RuvC_domain
  SITE 10: note = RuvC_P1
  SITE 53: note = RuvC_P2
  SITE 88: note = RuvC_P3
  SITE 90: note = RuvC_P4
  SITE 93: note = RuvC_P5
  REGION 211..297: note = Tnp_domain
  SITE 219: note = Tnp_P1
  SITE 249: note = Tnp_P2
  SITE 257: note = Tnp_P3
  SITE 258: note = Tnp_P4
  SITE 270: note = Tnp_P5
MNNSHIIGIDLGKNSFHLVGHDHAGNQLFKKKLTRQKLLEFLSCHEPVIIAMESCGGSHWLARKCTEFGHTAKLIPPQYVKPYVKTNKNDFIDANAIAEAASRPTMRFSSAKTESAQVISAIRKIRSGYIRERTACMNRIGSILLEFGISLPKGHASMKGLFQWLVDKNQNLPPLIIFELSELHEHYQNLNERIDSQADKVERILADNEQMKQLQSVPGIGPVIASACLSSVGNPSDFKNGRNFAAWIGLVPIQYSTGGKSTLLGISKRGNKELRTLFIHATRSILWRDKSVEKYFGSWLVELKKRKPFNVAVVALANKIARIAWAVLVSKKSFEIRT

SEQ ID NO: 17064 - protein, 331 aa, unidentified
  source 1..331: note = protein_97cc6b9
  REGION 7..154: note = RuvC_domain
  SITE 10: note = RuvC_P1
  SITE 59: note = RuvC_P2
  SITE 97: note = RuvC_P3
  SITE 99: note = RuvC_P4
  SITE 102: note = RuvC_P5
  REGION 202..289: note = Tnp_domain
  SITE 210: note = Tnp_P1
  SITE 240: note = Tnp_P2
  SITE 248: note = Tnp_P3
  SITE 249: note = Tnp_P4
  SITE 262: note = Tnp_P5
MKTKRIIGIDVSKLTMDCCDHNSGSQKKFDNTLAAIAEMVEWSLRISGATKKQLWFVFEHTGLYSQELIQYFGGNGYQFHVAPGMEIKRSLGVVRGKSDKADAKRIALYGYRFREELEPFQMASDTLASLKRLMSMRRKLVAQRAGHIATLGEQERILNKENEKILFQAQQEVINTLDLQITNIEEELNRLIEEDPELQNLYRLLTSIKGIGKVTARFLIVYTVGFTAFATWRKFASYCGIAPFPNTSGTSIRGKTKVSHLANKEGKAQLSLCAGSAIQYNPEMKAFYERRIKEGKNKMSTLNIIRNKILARAFAVINRGTPYVDTMKYAS

SEQ ID NO: 17065 - protein, 389 aa, unidentified
  source 1..389: note = protein_f9d172b
  REGION 4..159: note = RuvC_domain
  SITE 7: note = RuvC_P1
  SITE 57: note = RuvC_P2
  SITE 98: note = RuvC_P3
  SITE 100: note = RuvC_P4
  SITE 103: note = RuvC_P5
  REGION 264..351: note = Tnp_domain
  SITE 272: note = Tnp_P1
  SITE 302: note = Tnp_P2
  SITE 310: note = Tnp_P3
  SITE 311: note = Tnp_P4
  SITE 324: note = Tnp_P5
MFYLGIDIGKNTHVASLIDDKKKVIFKAFSFSNSIDGAESLICKLENFKNELEIGMEATGHYWLSIYSYLCEKNFTVRVINPIQTDGWRQSIEIRKRKTDIIDSLLIADLLRYGDFVETSLSNEDYLSLRNLSRFRSYLVSSIGDLKRKIIALLDQVFPEYASSFSNIFGKTSKEILSNFSTPSDFEDINSEDLQSFLDSVSKKKYASRKLEELSKKASKSFGVNFCMDSFSLQIKMLIEQISFIQNQVLDVEKEIEILLKKLNSPITTIPGIGAVNAATILGEIGDIKRFSNPSKLVAYAGLDASISQSGEFESTSNHMTKRGSPYLRRALFQSALRAEFYDPVFSNYYQKKISEGKHHLVATNAVARKLCHTIFAVLTKNEPYQIQR

SEQ ID NO: 17066 - protein, 339 aa, unidentified
  source 1..339: note = protein_103bbc3
  REGION 14..165: note = RuvC_domain
  SITE 17: note = RuvC_P1
  SITE 65: note = RuvC_P2
  SITE 105: note = RuvC_P3
  SITE 107: note = RuvC_P4
  SITE 110: note = RuvC_P5
  REGION 206..293: note = Tnp_domain
  SITE 214: note = Tnp_P1
  SITE 244: note = Tnp_P2
  SITE 252: note = Tnp_P3
  SITE 253: note = Tnp_P4
  SITE 266: note = Tnp_P5
MSKLSKVFQATVFCGIDVSAESLAVAVQQEDRPLEQREFANSAGGHKALIAWLHKHQAPARVSLEATGIYSLDLAMALDAAEGIKVAVLNPKAVNRFAQSLRRSKTDRADAQALAEYSLRMPFVAWRAPQREGLQLRTISRHIAGLSVEHTREMNRLHAALESATTPRCVVEDLKRSLASVQRRMARLRRAARALVDSDDAMRRRFALLIGMPGIGEISALQLLGELAPLSPEMSVRQWVAHSGLDPAHRESGSSVHKPARISRAGNRHLRHALYMPALVAVQWDPHMKAFYELLQNRHKAKMQALVAVARKLLHAIYGIFKSGMPYDGRKLFPQLEIR

SEQ ID NO: 17067 - protein, 268 aa, unidentified
  source 1..268: note = protein_8bb6c5b
  REGION 2..78: note = RuvC_domain
  SITE 17: note = RuvC_P3
  SITE 19: note = RuvC_P4
  SITE 22: note = RuvC_P5
  REGION 141..229: note = Tnp_domain
  SITE 149: note = Tnp_P1
  SITE 179: note = Tnp_P2
  SITE 187: note = Tnp_P3
  SITE 188: note = Tnp_P4
  SITE 200: note = Tnp_P5
MKLIAPQYVKPYVKGNKNDYNDAEGIAEAVLRPNMRFVPIKSLEQHDVQMVHRLRERLTKSRTALANQIRGLLAEYGLVINKGLAAVRRELPLILEDADNGLSTMSRESFFTLLDELHALDVRHEQCEQKIKGINRSNDICRRLNDIQGIGPVTATAVFAAAGNGKDFSNGRHFSAWLGLVPRQHSSGGKNTLLGISKRGNAYLRTLFIHGARAVLRCVANKSDRFSRWASALMERRGHNRACVAVANKLARIAWVIMARGESYSPAI

SEQ ID NO: 17068 - protein, 372 aa, unidentified
  source 1..372: note = protein_8188be1
  REGION 9..157: note = RuvC_domain
  SITE 12: note = RuvC_P1
  SITE 63: note = RuvC_P2
  SITE 97: note = RuvC_P3
  SITE 99: note = RuvC_P4
  SITE 102: note = RuvC_P5
  REGION 207..295: note = Tnp_domain
  SITE 215: note = Tnp_P1
  SITE 246: note = Tnp_P2
  SITE 254: note = Tnp_P3
  SITE 255: note = Tnp_P4
  SITE 266: note = Tnp_P5
MKVTYQTCCGVDVHKSFLVATIVKTTGGIEPSYQKKRFSTFNNSILEFKQWLLDNHCHDVCMESTGKYWVPVFNLLEDKINVVIANPKWVKAVKGNKDDTKDSKWIGDLFRLGLVKGSYIPCKKVRILREYTRYRYKLVSCRSSEKNRYQNALTVCNVALDSIVSDIFGKSSTSIIDYLLEQSGTSINHEEIASKLLRRLKSKEDAVQFLCTIPGVKRDSAITVISEIGTDMSQFSSSKRLCCWAGLTPGSNESAGKKKSVRITRAGIYLKPALVQCAHAAVKSDKSPYYKKKYESLVKRRGKKRAIIAIARMILTAIYQMLSTGEQWNPSDLYKIDMPVALVEKQKAKAIKQAKKLLQREGLFPPDEPLAS

SEQ ID NO: 17069 - protein, 354 aa, unidentified
  source 1..354: note = protein_9f786b2
  REGION 8..161: note = RuvC_domain
  SITE 11: note = RuvC_P1
  SITE 67: note = RuvC_P2
  SITE 107: note = RuvC_P3
  SITE 109: note = RuvC_P4
  SITE 112: note = RuvC_P5
  REGION 208..295: note = Tnp_domain
  SITE 216: note = Tnp_P1
  SITE 246: note = Tnp_P2
  SITE 254: note = Tnp_P3
  SITE 255: note = Tnp_P4
  SITE 268: note = Tnp_P5
MAISKQCIGIDISKATFTACVCQRSDDGGLTFSKTVDFSNDTKGFNQFLRWSKGVIVRDAELVFLMEATGVYYENLAHHLHKIKKRVHVVLPNTSKHYFSSLNIKTKTDAVDARILSQFGVERIHKGWSPPPPVLLQLRNLTRYHVQLQEQKTALGNIKHSKDCSHAIQIFILKSNKKLIAEIDKEIARCIKEINRLVKSDVDLHRKIEKLATIKGIGMITMVTILAETMGFEQFSSAKQLVSYAGYDVVQRESGTSVKGKTRISKKGNRYIRNALYFPAMVSCRYNPLLKEAYMRIIQKKTSKMIGQVAIQRKLLILMYTLWKNDTVFIENYKVSSPGPKTETTLDSSEAELL

SEQ ID NO: 17070 - protein, 387 aa, unidentified
  source 1..387: note = protein_8eaa0bf
  REGION 4..159: note = RuvC_domain
  SITE 7: note = RuvC_P1
  SITE 57: note = RuvC_P2
  SITE 98: note = RuvC_P3
  SITE 100: note = RuvC_P4
  SITE 103: note = RuvC_P5
  REGION 263..347: note = Tnp_domain
  SITE 269: note = Tnp_P1
  SITE 299: note = Tnp_P2
  SITE 307: note = Tnp_P3
  SITE 308: note = Tnp_P4
  SITE 320: note = Tnp_P5
MYYIGIDISKFKHDCAVIDDAGDVVIPSWSFANDHEGFLQFKALLDSLGPETRIGLESTGHYGTNLKLFLESSGSTFMEFNPLLINRFVKSKTLRKTKTDAIDCEMIARYLMTVEYKPYPSSFYHTEKLKSLTRFRDSLIRQRSRQLVELTNILDKVFPEFKPFFKRKFSATALHILAAYSSPERIANMNARSYETLRKLSRGSFTVTDFTTLKRLARNTIGHPNDFLLNEMTMTIDIFSRLDSKVNETEALISECVSELNPPMLTIPGIGVDSAAVILAEFGDFSKYESPAQLLSFAGMEPGYFQSGTSESTGRMVKHGSSYLRYALMNCARSVVNYEPTFAEYYAKKRAEGKSYRVALSHTAKKLIRVLFTLQTKNLVYDPDSMR

SEQ ID NO: 17071 - protein, 389 aa, unidentified
  source 1..389: note = protein_31691d7
  REGION 6..162: note = RuvC_domain
  SITE 9: note = RuvC_P1
  SITE 62: note = RuvC_P2
  SITE 102: note = RuvC_P3
  SITE 104: note = RuvC_P4
  SITE 107: note = RuvC_P5
  REGION 264..351: note = Tnp_domain
  SITE 272: note = Tnp_P1
  SITE 302: note = Tnp_P2
  SITE 310: note = Tnp_P3
  SITE 311: note = Tnp_P4
  SITE 324: note = Tnp_P5
MAKPFCGIDVAKYEHVASIYNPSTGAIELDALHFENNDKGFKSLNSKLKPLSKGNDICVGFESTGHYHQTLFNYLTAKGYKCYLINPYMTSRFRSISLRDTKNDNIDSRAIAEFLSLEYSKLSNEEYQSNELKELAKQRDFLMTDSSKMKIKLKSYLDRTFPEAESLVDLNVSAIRAILKEYPTAKSIASTRIDKLKNIANEASKGKYSLKKIEELKQLAKKSIGIDSVALGLNIKQCIETLELKEKQIDEIEREIKQHPTVINSPLHQLKGINDIEIGYIMSAIISIDRFDSPEKLVAYAGLDPKVRQSGTWEASKTRMSKRGNKLLRYALIWSAFNMLRKEGSIKAYYELKKSQGKLHYNALGHCAAKLTRYIYWILKHPDKEFVYR

SEQ ID NO: 17072 - protein, 374 aa, unidentified
  source 1..374: note = protein_b61f59b
  REGION 39..185: note = RuvC_domain
  SITE 42: note = RuvC_P1
  SITE 86: note = RuvC_P2
  SITE 124: note = RuvC_P3
  SITE 126: note = RuvC_P4
  SITE 129: note = RuvC_P5
  REGION 244..331: note = Tnp_domain
  SITE 252: note = Tnp_P1
  SITE 282: note = Tnp_P2
  SITE 290: note = Tnp_P3
  SITE 291: note = Tnp_P4
  SITE 303: note = Tnp_P5
MKGPPRPEAAAKAGLTPRRKAKLPDQHEQARNLMSVATVGIDLAKNVFAIHGVDASGKAVLVKPRVMRDQLVALIAQLPPCVIGMEACSGAHHWARIFQQYGHTVKLMAPKLVAPYRMSGKQGKNDAADAAAICEAVTRPSMRFVPVKDEHQQATLCLHRTRQGFVQERTATYNRLRGLLSEFGIVLPQSPEKLRSNIAARLDALPGWANRCIRDMLEHVDRLDERLEEYDRAIGTLAREDERSRRLMQLRGVGPTTASALLATLGAARDFKNGRQVAAWFGLTPSQYSSGGKARLGGITKAGDSYVRTLLVSGARAVMSNLRDKQDRFSRWVRCLVERRGYWRAAIAIAAKNARMAWAVLRYGDDFKYEPVNA

SEQ ID NO: 17073 - protein, 430 aa, unidentified
  source 1..430: note = protein_e11a2ff
  REGION 6..159: note = RuvC_domain
  SITE 9: note = RuvC_P1
  SITE 57: note = RuvC_P2
  SITE 98: note = RuvC_P3
  SITE 100: note = RuvC_P4
  SITE 103: note = RuvC_P5
  REGION 221..306: note = Tnp_domain
  SITE 229: note = Tnp_P1
  SITE 259: note = Tnp_P2
  SITE 267: note = Tnp_P3
  SITE 268: note = Tnp_P4
  SITE 279: note = Tnp_P5
MGHVVIGMDPHKHSATIEIIDERGKVLCQGRFGTDRDGYKAMLAAGRRFKDRSWAVEGCNGIGRHIAQRLVADGEPVVDVPAKLSARARLFSTGQGRKTDPVDAHSVALAGLHAPGLRVITADDATVALRLLADRRDELGVARTQTVNRLHRLLLELLPGGAKKFLSAAQARELLATVRPRDIAGMTRRRLAAELITELTRTDKRIKAADAELKELVAATGSSLLTLHGIGPSGAARLLGDVGDIARFADKGRFASWNGTAPLDASSGDQNRHRLSRAGNRRINRVLHIMAIVALRSDTEGRAYYRRKLAAGKTTMEALRCLKRRLSDIACRQMTGDAHATATGPGGHPGTTTGSSVAGSSPCTGSSEKSLPGPAANDPTPAPASKPIRSPASSRRLSIKAGPQPLSSEVCLTTARTGAHSRGGNDALLT

SEQ ID NO: 17074 - protein, 431 aa, unidentified
  source 1..431: note = protein_6342641
  REGION 9..157: note = RuvC_domain
  SITE 12: note = RuvC_P1
  SITE 63: note = RuvC_P2
  SITE 97: note = RuvC_P3
  SITE 99: note = RuvC_P4
  SITE 102: note = RuvC_P5
  REGION 259..347: note = Tnp_domain
  SITE 267: note = Tnp_P1
  SITE 298: note = Tnp_P2
  SITE 306: note = Tnp_P3
  SITE 307: note = Tnp_P4
  SITE 318: note = Tnp_P5
MKVTYQTCCGVDVHKSFLVATIVKTTGGIEPSYQKKRFSTFNNSILEFKQWLLDNDCHDVCMESTGKYWVPVFNLLEDDINVVIANPKWVKAVKGNKDDTKDSKWIGDLFRLGLVKGSYIPCKKVRILREYTRYRYKLVSCRSSEKNRYQNALTVCNVALDSVVSDIFGKSSTSIIDYLLEQSGTSINHEEIASKLLRRLKSKEDAVIESIEGYQMTDTQKYRMRLVRAHMDYITAEISDVDKMIENMISSNPDFENAVQFLCTIPGVKRDSAITIISEIGTDMSQFSSSKRLCCWAGLTPGSNESAGKKKSVRITRAGIYLKPALVQCAHAAVKSDKSPYYKKKYDSLVKRRGKKRAIIAIARMILTAIYQMLSTGEQWNPSDLYKIDMPVALVEKQKAKAIKQAKKLLQREGLFPPDEPLASLFNFLTL

SEQ ID NO: 17075 - protein, 331 aa, unidentified
  source 1..331: note = protein_fde2b7a
  REGION 6..146: note = RuvC_domain
  SITE 9: note = RuvC_P1
  SITE 52: note = RuvC_P2
  SITE 87: note = RuvC_P3
  SITE 89: note = RuvC_P4
  SITE 92: note = RuvC_P5
  REGION 211..296: note = Tnp_domain
  SITE 219: note = Tnp_P1
  SITE 249: note = Tnp_P2
  SITE 257: note = Tnp_P3
  SITE 258: note = Tnp_P4
  SITE 270: note = Tnp_P5
MKIRSIGIDLGKTTFHLVALAERGKVIVRKKLSRKQLLAFTANLDSALIGMEACSGSHFLGRALREQGHDVRLIPAQFVKPFLKSNKNDFLDAEAIAEAVERENMRFVPIKTDDQLDLQALHRVRERLVSRRTAVINQIRAFLLERGVTFHKGSSSLRRQMPEILENADAQLSPRIRGLLATMWEEWKQLDEQVKSFDAQIETIGNDDPICQRLREIPGVGPLIASAVVASIGNGAAFHKGREFAAWLGLIPKQFSTGGKVKLLGISKRGNRYLRTMFIHGARSLVLRANRERSPVGAWDQQPGGQGASQRGDCSHGSQAGASHMGRVGER

SEQ ID NO: 17076 - protein, 342 aa, unidentified
  source 1..342: note = protein_f677c7f
  REGION 6..148: note = RuvC_domain
  SITE 9: note = RuvC_P1
  SITE 52: note = RuvC_P2
  SITE 87: note = RuvC_P3
  SITE 89: note = RuvC_P4
  SITE 92: note = RuvC_P5
  REGION 211..297: note = Tnp_domain
  SITE 219: note = Tnp_P1
  SITE 249: note = Tnp_P2
  SITE 257: note = Tnp_P3
  SITE 258: note = Tnp_P4
  SITE 270: note = Tnp_P5
MHIASVGIDLGKTTFHLVALDEHGKIIIKSKFSRQQLLAFTANLPASLVGIEACSGAHFIGAALREQGHDVRLIPAQFVKPFLKSNKNDFLDAEAIAEAVARENMRFVPIKTDDQLDLQALHRVRDRLVHRRTALINQIRGFLLERGIVFPAGASNLRNRMAAILEDAEQNLTPRMRKVLAHLWQEWKDLNAEIDSVSNEIDSIAESDPACQRLRKIPGVGPLVATATVAAIGNGAAFRKGREFAAWLGLIPRQHSTGGKARLLGISKRGSVYLRRMFIHGARAMLLRVKYDTGRLGQWAHELELRAPRNKVVVAVANKLARIAWAVLSTGNEYRNAAIAAA

SEQ ID NO: 17077 - protein, 332 aa, unidentified
  source 1..332: note = protein_5b7d69e
  REGION 24..168: note = RuvC_domain
  SITE 27: note = RuvC_P1
  SITE 71: note = RuvC_P2
  SITE 111: note = RuvC_P3
  SITE 113: note = RuvC_P4
  SITE 116: note = RuvC_P5
  REGION 206..291: note = Tnp_domain
  SITE 214: note = Tnp_P1
  SITE 243: note = Tnp_P2
  SITE 251: note = Tnp_P3
  SITE 252: note = Tnp_P4
  SITE 263: note = Tnp_P5
MVAGTVGSFNKAGSAKMTQISTTAGIDTSKAKLDVAVHGRDQHWQVANTAEGWLLLAAELSRNDVTRVGIEASGGYECGVVDHLRHHGFTVLVLQPIQVKAYARVHLRRAKNDKLDAALIAACTATINQPRIEPDQRLAKLAQHLTFVEQIEEDIARFKVRLEHVGDRRLRRMVMTDIARLKARRSAELSRIVRALRAHDDLARRLDLVLSIPGLGERTVLAIIIRMPEIGRVSREEAAALAGLAPYDDDSGKHKGQRHIAGGRGRLRRSLFAAALPAAFHWNKALIELYARLTARGKAHNAALIACARKLLIYANTVVQRGTPWTERPALI

SEQ ID NO: 17078 - protein, 335 aa, unidentified
  source 1..335: note = protein_8087a9a
  REGION 8..165: note = RuvC_domain
  SITE 11: note = RuvC_P1
  SITE 65: note = RuvC_P2
  SITE 106: note = RuvC_P3
  SITE 108: note = RuvC_P4
  SITE 111: note = RuvC_P5
  REGION 202..291: note = Tnp_domain
  SITE 210: note = Tnp_P1
  SITE 242: note = Tnp_P2
  SITE 250: note = Tnp_P3
  SITE 251: note = Tnp_P4
  SITE 264: note = Tnp_P5
MSKRTLYVGIDVSKKALEVATTVDGKEAEATKEIMNNLGGFRMLEEWTRKQSHKHGCEEIHYCIESTGVYSEKVVEYLQGRGDLMVSVVNPFVVKSFGKSLGVRTKTDRVDSELLALYAATVKPKVTEKRPEDLKELRSLVRHLEYLINRRGQEAGRLESTTNALVADSIKGIIKSYDKQIEKIKEAIEEHLRKHPDLRERTELLESIPGIGEITSKILLCELHMEGGGERISAKAQTAHAGLAPQHRISGSSVRGKPRICKTGNSRLRRCLYFPTMVAIKHNPVIRRFYRRMLENGKPKMVALVAAMRKLLVIAIGVLNNRTEFAENWDGREYA

SEQ ID NO: 17079 - protein, 419 aa, unidentified
  source 1..419: note = protein_766a256
  REGION 25..183: note = RuvC_domain
  SITE 28: note = RuvC_P1
  SITE 82: note = RuvC_P2
  SITE 122: note = RuvC_P3
  SITE 124: note = RuvC_P4
  SITE 127: note = RuvC_P5
  REGION 293..382: note = Tnp_domain
  SITE 301: note = Tnp_P1
  SITE 331: note = Tnp_P2
  SITE 339: note = Tnp_P3
  SITE 340: note = Tnp_P4
  SITE 353: note = Tnp_P5
MKLQEMKGRTGKSIKGVVFNMDPVIGLDIAKGESQVQAFLQRKKTYKQSFKFAHDLQGLNVFYQFYQEVEQVSGQPPAVIFESTGHYHMPVLQFLENQDITYYLINPVISYEARKTSLRKVKTDKADAFHLGELYYKEDLDSYQKKTEKALNLRLLTRQHSALTESYVDIKLQFQAALDQVFPEFQSVFSDLYGTLSLNTLAHYPTALDIQRAMPQELADGMRQFGARRSKAWFLDKASQLKEAAKRNPFQSPVCHGQLVSLNMYIQMLFQFQQHLSKLKKEIDALAKTFEDYELLKSIPGIGNKIAATIISEIGDINLFQHPKKLVAFAGLDPSVFESGKFKASISHITKRGSSRLRQVLYSAVQCGLAKNRNKKLIAYYQRKRNEGKPHKVAVIACANKLVHWIHAILKNKKVFVDL

SEQ ID NO: 17080 - protein, 331 aa, unidentified
  source 1..331: note = protein_ce8d7c3
  REGION 6..156: note = RuvC_domain
  SITE 9: note = RuvC_P1
  SITE 56: note = RuvC_P2
  SITE 94: note = RuvC_P3
  SITE 96: note = RuvC_P4
  SITE 99: note = RuvC_P5
  REGION 199..286: note = Tnp_domain
  SITE 207: note = Tnp_P1
  SITE 237: note = Tnp_P2
  SITE 245: note = Tnp_P3
  SITE 246: note = Tnp_P4
  SITE 259: note = Tnp_P5
MEKIVIGIDISAKTLDICIKKSNDYSFEVIDNDSKAIKIFFKKIQKTYSEIVVSMENTGRYNWNLYQALESFNFKVFVLNPLHLKKSLGLIRGKNDKIDARRICDFTDKNEQDLILWKPCSETIKKIKVLFSERNSKIKLKSSLLKQRVLYSQLEKMNIDSKLMKMNKKEVKLLEDHIAFLEAEIEKLIESDEDLSCKKKNIQSIPGVGKVVSWMIIAKTEGFTKIDNPRKMACYAGVVPFGYQSGTSLKYKPKVSYYADKSLKSILHMAAMRAIRLENDLKEYYERKIKEGKNKMAILNAVRNKIIHRIFALAKNGKSYEKNYINSLNMS

SEQ ID NO: 17081 - protein, 428 aa, unidentified
  source 1..428: note = protein_5ef7c61
  REGION 12..177: note = RuvC_domain
  SITE 15: note = RuvC_P1
  SITE 70: note = RuvC_P2
  SITE 116: note = RuvC_P3
  SITE 118: note = RuvC_P4
  SITE 121: note = RuvC_P5
  REGION 296..382: note = Tnp_domain
  SITE 303: note = Tnp_P1
  SITE 333: note = Tnp_P2
  SITE 341: note = Tnp_P3
  SITE 342: note = Tnp_P4
  SITE 355: note = Tnp_P5
MLKINPLSTLYVGIDVSSKSNVVCTMDFYRNKYVESSFANNQPGTDELVQKILGCLKEHPDLHTVVAALESTSVYSIHVANSLSSCEALLKFKTYVFVLNPKTTANYKKSFIGLGKTDPIDAFVIADYARAGCIETEPWRGCQFLALKRLTRHRLHLVECITREKAYLVSNLYLKFSELQMLDKDEQPFCDVYGATSSSVLTEYLSPEEIVSASEEQLLSFLAEKSRNRIKDVSKTAVLLKKAARDSYRLDKALYEPLNVSIASSFNCIETFKNEIKAIDVAIEREIKGLNPNAFIILQSIDGIGPVFAGGIIAEIGDISAFHSSDALAKYAGLYWKHNDSGDFTSEDNPMSKDGNRYLRYYLGEAANSMRTHNAEYGAYYRKKYIEVPKHQHKRALALTSRKFVRLVYGLLAKNQLYSGVSLDISIE

SEQ ID NO: 17082 - protein, 438 aa, unidentified
  source 1..438: note = protein_701b617
  REGION 16..175: note = RuvC_domain
  SITE 19: note = RuvC_P1
  SITE 74: note = RuvC_P2
  SITE 114: note = RuvC_P3
  SITE 116: note = RuvC_P4
  SITE 119: note = RuvC_P5
  REGION 290..384: note = Tnp_domain
  SITE 298: note = Tnp_P1
  SITE 328: note = Tnp_P2
  SITE 336: note = Tnp_P3
  SITE 337: note = Tnp_P4
  SITE 350: note = Tnp_P5
MSNKVIFNLDELFISVGIDVGADFSWMSIALPNQQFVGKPYKILHNKMSSLTTAVSKIKEAEELYSLESRIFLESTGIYHYPLFCYLRDKGFNCSVINPIITKNSTNINIRKVHNDRFDSKKAALVGLKPDLKVSLMPSDLALNCRNLCREYYDLMDNRSAYVNKLQGELRMAFPQYLGIFSKVTTNTSLTLLETYTSPSAFIAADRQEIIDTIKSTARFGLAYAQNKYNAIIQAANEANDFGYIIDSNIRRIRLYIRFIRKYDEEIASILDALHELVDTNEGTDFVRQIHLIETFKGSGFLSAVSLMGEIGDFSAFSKPKQLFAYFGLDPAVKQSGKFEGTKIQMSKRGSAIARRVIHTLALQSISTSRTGEAKNPVLRNYYLKKCESKPKLVAMGAVSHKVCNIIFAILRDNKPFEIITPQEHIKQYNADKCNIAA

SEQ ID NO: 17083 - protein, 393 aa, unidentified
  source 1..393: note = protein_8ac1e52
  REGION 4..163: note = RuvC_domain
  SITE 7: note = RuvC_P1
  SITE 60: note = RuvC_P2
  SITE 101: note = RuvC_P3
  SITE 103: note = RuvC_P4
  SITE 106: note = RuvC_P5
  REGION 266..355: note = Tnp_domain
  SITE 274: note = Tnp_P1
  SITE 304: note = Tnp_P2
  SITE 312: note = Tnp_P3
  SITE 313: note = Tnp_P4
  SITE 328: note = Tnp_P5
MICVGIDVAKDKHDCVILNSEGKILAGVFTIPNNADGFDTLLQKIRSCTSSDDKIKVGLEATGHYSYNILGFLINQGLPTYVINPLHTNLYRKSMSLRKTKTDRVDAKTIATMLMSNVDLKSYTDTAYHNEELKSLTRYRFDKVRERAQLKQSVSRLVTILFPELEKLVPTLHMSSIYALLIEFPGAKQITEAHLTHLKSLLKDASKGRYGRDMATEIRDAAKHSIGSVMSAKSLELRHTIRLIRELDSEIEDIEAAIEAIMEELQSPITTIPGMGFRMGAMILAEIGDFARFDSPDKILAYAGMSPSTYQSGQLSLAGTYSHMEKRGSRYLRYALYNATKYVCHWDPGFAAYLAKKRAEGKHYNVALSHAAKKLVRLIYAMEKSRQPYKRAA

SEQ ID NO: 17084 - protein, 391 aa, unidentified
  source 1..391: note = protein_9296598
  REGION 4..163: note = RuvC_domain
  SITE 7: note = RuvC_P1
  SITE 60: note = RuvC_P2
  SITE 101: note = RuvC_P3
  SITE 103: note = RuvC_P4
  SITE 106: note = RuvC_P5
  REGION 266..353: note = Tnp_domain
  SITE 274: note = Tnp_P1
  SITE 304: note = Tnp_P2
  SITE 312: note = Tnp_P3
  SITE 313: note = Tnp_P4
  SITE 326: note = Tnp_P5
MIFIGIDAAKDKHDCFVVSSEGEVLYDVFTISNTLNGFNDLLSKIKSVSSDFNKTKVGLEATGHYSYNLLGFLLDNGLPTYVLNPLHTNLYRKSLSLRKTKTDKVDARTIASMLMSCVDLKPYTRALYHNEELKSLTRYRFDKVSERAKLKSSISRLVTILFPELEKLVPVLHCVSVYALLSEFPSAKHVANANLTRLTNLLYSASKGHYNRDTAIRFREAARKSIGSVMPAKSLELKHTIKLICELNDEINEIEAEIKQIVDSLGTTILTIPGIGYSTAASILAEIGDFTNFETPDKILAFAGMSPSTYQSGQLTNCYAHMEKRGSKYLRFALYNATKYVCKWDSNFAIYLAKKRLEGKHYNVAISHATKKLVRLLFALEKSHLPYIPVA

SEQ ID NO: 17085 - protein, 330 aa, unidentified
  source 1..330: note = protein_c8cc646
  REGION 11..160: note = RuvC_domain
  SITE 14: note = RuvC_P1
  SITE 65: note = RuvC_P2
  SITE 100: note = RuvC_P3
  SITE 102: note = RuvC_P4
  SITE 105: note = RuvC_P5
  REGION 255..313: note = Tnp_domain
  SITE 263: note = Tnp_P1
  SITE 296: note = Tnp_P2
  SITE 304: note = Tnp_P3
  SITE 305: note = Tnp_P4
MSFKILKNNCCGLDVHKTWIFACIGITDSNNRTEYKQARFSSFSKGLQELCDWLAKYNCTDVCMESTGKYWIPVFNILEQHNLWVTLSHPKYTKPMKGNKTDRKDAKWICDLYMCGMVKPSFIPPADIRELRDLVRYRYKLTCMITGEKNRAQNCLTVSNLKLDDVFSDVFGKSSRSITEQILKHPGEKFDVAPFVHGRCKTPIEEIQAAVDGAISKEQAVKLRQCLYHIDELNKHISEVEQEILRLSDKYEIALNLIRTVPGFNKNPLTAIQVLSEIGGDMSVFPTAKHLVSWAGCCPRNDQSNQKSNPLGFPVLVPILNQFWYKLQML

SEQ ID NO: 17086 - protein, 421 aa, unidentified
  source 1..421: note = protein_d812913
  REGION 10..158: note = RuvC_domain
  SITE 13: note = RuvC_P1
  SITE 64: note = RuvC_P2
  SITE 98: note = RuvC_P3
  SITE 100: note = RuvC_P4
  SITE 103: note = RuvC_P5
  REGION 254..342: note = Tnp_domain
  SITE 262: note = Tnp_P1
  SITE 293: note = Tnp_P2
  SITE 301: note = Tnp_P3
  SITE 302: note = Tnp_P4
  SITE 313: note = Tnp_P5
MLKIVYPICCGIDVHKKFVIATIATTNDKNVTSYQTRRFNTFKNDLIALNNWLVENKCKDVCMESTGKYWIPVFNVLEDFCTITLANPRYVKNIPGKKTDKRDSIWLADLHKHALVKGSFIPSKPIRELRDLIRYKSKLTNVSSSEKNRVQNSLTVSNIMLANVVSDTFGKSASSIIKHMIENPDIIDFDYSSMLHKSLKKKSDEIEQAVAGKFSKEQAAKLSVCYEHYNSVEKCIEILEATILELSLPFKEQIDIIATLPGIKQASATAILSEIGTDMSVFTSDKHLCSWAGLTPQSNESAGKKKSVRISRAGVYIKPLLVQCANAAVKDKSCTVFKNRYEAIKKRRGHKRAIIATARMILTCIYHMLSKNEPFNPLLYDDNAKSKKRNQQDSLSIEQAIAFLQANGYTVNISDLVAITN

SEQ ID NO: 17087 - protein, 274 aa, unidentified
  source 1..274: note = protein_89bc8ae
  REGION 9..157: note = RuvC_domain
  SITE 12: note = RuvC_P1
  SITE 56: note = RuvC_P2
  SITE 96: note = RuvC_P3
  SITE 98: note = RuvC_P4
  SITE 101: note = RuvC_P5
  REGION 195..265: note = Tnp_domain
  SITE 203: note = Tnp_P1
  SITE 232: note = Tnp_P2
  SITE 240: note = Tnp_P3
  SITE 241: note = Tnp_P4
  SITE 252: note = Tnp_P5
MSVSNQRCAGIDVSKSTLDIAISSIAQQFTVPNEDGGFNQILKELKRNETQLILMEASGGLESGVAGYLQSEGFDVVVINPRQARDFARAMGYLAKTDQIDARVLLQMAKVINQHPEREKYIRPLPDVHRQLLAAMVVRRRQLTIMLTAERNRLHPSHPQNYENIRFIISVLKSEMARVEAEMSAYISKNFSELSALLSAVKGIGAATVAVLLAEVPELGTLSRREISALIGVAPINRDSGTMRGRRTVFGGRASVRTALYMSGPGRDKAQPSN

SEQ ID NO: 17088 - protein, 322 aa, unidentified
  source 1..322: note = protein_d288c9c
  REGION 9..157: note = RuvC_domain
  SITE 12: note = RuvC_P1
  SITE 56: note = RuvC_P2
  SITE 96: note = RuvC_P3
  SITE 98: note = RuvC_P4
  SITE 101: note = RuvC_P5
  REGION 195..279: note = Tnp_domain
  SITE 203: note = Tnp_P1
  SITE 232: note = Tnp_P2
  SITE 240: note = Tnp_P3
  SITE 241: note = Tnp_P4
  SITE 252: note = Tnp_P5
MSLPNPLCVGIDVSKATLDIATTSEFAQFTTGNDADGFDAIIAELRKHSVALILMEATGGLEAAVACSLQAEGFDVAVVNPRQARDFARAMGYLAKTDRIDARVLAQMAEVINRHPERERFIRALPDAERQLLAAMVVRRRQLITMLVAERNRLHPAHPQSRKSINIIIQALENELARIDEDMNRHIQSHFKELTERLSSIKGVGTMTAAALLAEVPELGNLSRREISALIGVVPVNRDSGTMRGRRTIFGGRAGARAALYMAALVATRFNPVIQAFYMRLLAAGKAKKVALVACMRKLLTILNAMLRKNEEWNESYHHVAP

SEQ ID NO: 17089 - protein, 323 aa, unidentified
  source 1..323: note = protein_b2f77db
  REGION 5..152: note = RuvC_domain
  SITE 8: note = RuvC_P1
  SITE 52: note = RuvC_P2
  SITE 92: note = RuvC_P3
  SITE 94: note = RuvC_P4
  SITE 97: note = RuvC_P5
  REGION 195..284: note = Tnp_domain
  SITE 203: note = Tnp_P1
  SITE 235: note = Tnp_P2
  SITE 243: note = Tnp_P3
  SITE 244: note = Tnp_P4
  SITE 257: note = Tnp_P5
MKKFVGIDISKETFDIYFEQEGKGCHVKLQQTEEDYKVLLRLISKDAICIMEATGNYHLKLAHYLHQAGIKVIAENPLKIKRFSQMSLQRTKTDKADAKLICEYGRLILSSNKLHCWQPDETEIGHLKQYDTVRHQLIKQRTALSNSEEALNALTHLNDEVTQVLNDMVTAVDKAIKQLDKGMLKLVKEHHSETFDLVTSVPGVGPKTATLMICLTDGFNKFSHDQVKQFISYIGMSPRTFESGTSVKGRAHISKVGNSRMRSMLYMCSWTAKRKNQQCIALYERLSGKGKPEKVIKVAIAHKLIRQVFGVIKSGEPFSKEYA

SEQ ID NO: 17090 - protein, 325 aa, unidentified
  source 1..325: note = protein_0b8b302
  REGION 4..148: note = RuvC_domain
  SITE 7: note = RuvC_P1
  SITE 52: note = RuvC_P2
  SITE 92: note = RuvC_P3
  SITE 94: note = RuvC_P4
  SITE 97: note = RuvC_P5
  REGION 191..278: note = Tnp_domain
  SITE 199: note = Tnp_P1
  SITE 229: note = Tnp_P2
  SITE 237: note = Tnp_P3
  SITE 238: note = Tnp_P4
  SITE 251: note = Tnp_P5
MTYIGIDISKATFVAAIPHGKSYRTETFSNDVKGIRRFISRLDPAIHQCVMEATGNYCFLLLYLLDKGGIRASLINPKKIKNYARVMMSVTKTDSKDACLIADFGERLKPEPYKFPSEQIMLLKQKRTVLRQLKKQLTATKNLHSSLEPLPVKDKKCVNSLKQTITFLEKQIKYMQQEMEAVVTDVFDRQLKLLTSVKGIGVTLATALIIATGGFTYFENAKQLSRFIGICPTIEQSGTSINIRGHINRNGDETLRSMLYVAAWSASQHNKACKECYQRLRGKGKSGKVVMIAVANKLVRQAFAVVTSDKPYSDGFVSKKPDAPV

SEQ ID NO: 17091 - protein, 391 aa, unidentified
  source 1..391: note = protein_75ee3e0
  REGION 4..161: note = RuvC_domain
  SITE 7: note = RuvC_P1
  SITE 59: note = RuvC_P2
  SITE 99: note = RuvC_P3
  SITE 101: note = RuvC_P4
  SITE 104: note = RuvC_P5
  REGION 265..351: note = Tnp_domain
  SITE 272: note = Tnp_P1
  SITE 302: note = Tnp_P2
  SITE 310: note = Tnp_P3
  SITE 311: note = Tnp_P4
  SITE 324: note = Tnp_P5
MINIGIDVGKFKHCATVLDDSTGEVLIKPFFLTNNRKGFDLLYSKTKQFIHRKHSVGMEDTGHYMINLTNYLLDKKFTVKYINPRATCLRRKGLGISAKNDRKDALLIAEMLSEKRFWRSISVRSIENSKFRDITRLYHQLQEQQNQDMNRLQRALDIVFPEVNSLSWTRYSKAYMKFLSTYPSASSIALEDIRILRKALKTEGRGRQCKVTAEEIRELAKNSVGEDNISIDLEVTSIIAIINTREEQIRMLEKKIEEFSHKLNSPIISIPGISHISGMTILAEIGDINQFQNTGNLISFAGMDPLVYQSGKYDAAHMPISKHGSRYMRKALYQAVFTVCKYSPTFHDYYTKKRNQGKSHRCAQGHCARKLLRVIYKLLSTNSPYDQNHIQ

SEQ ID NO: 17092 - protein, 399 aa, unidentified
  source 1..399: note = protein_636a922
  REGION 5..163: note = RuvC_domain
  SITE 8: note = RuvC_P1
  SITE 62: note = RuvC_P2
  SITE 102: note = RuvC_P3
  SITE 104: note = RuvC_P4
  SITE 107: note = RuvC_P5
  REGION 273..362: note = Tnp_domain
  SITE 281: note = Tnp_P1
  SITE 311: note = Tnp_P2
  SITE 319: note = Tnp_P3
  SITE 320: note = Tnp_P4
  SITE 333: note = Tnp_P5
MNPVIGLDVAKEESQVQAFLQRKKPYKKSFKFEHHLQGLHAFYQFYKEVEQVSGQPPAVIFESTGHYHEPVLQFLEDQAITYYLINPVVSYEARKTSLRKVKTDKIDAFHLGELYYKEDLEVFQRKTEQYLNLRQLTRQHSALTDSYVEIKLQFQAAVDHIFLEYHKVFSNLCGKLSLNTLLHYPTATDVQKVSQQTLADEMRQFGTRRSHAWFLDKAAQLKAAANRNPFQHPVCYGHVVSLQMYIQMLFQYQEHLSKLQKEIDALAKTFEDYDVVQSVPGIGEKIGATIISEIGGIDQFEHPKQLAACAGLDPSVFESGKYKASINRITKRGSSRLRQALYTAVQCGLAKNRNKKLIAFYNRKRNEGKPHKVAVIACANKLVHWIHAMLERQEVFVDP

SEQ ID NO: 17093 - protein, 388 aa, unidentified
  source 1..388: note = protein_68ff44d
  REGION 5..159: note = RuvC_domain
  SITE 8: note = RuvC_P1
  SITE 58: note = RuvC_P2
  SITE 98: note = RuvC_P3
  SITE 100: note = RuvC_P4
  SITE 103: note = RuvC_P5
  REGION 263..350: note = Tnp_domain
  SITE 271: note = Tnp_P1
  SITE 301: note = Tnp_P2
  SITE 309: note = Tnp_P3
  SITE 310: note = Tnp_P4
  SITE 323: note = Tnp_P5
MHVYVGVDIAKELHYAAIMDSDGVVTKPFSFENNDKGFNLLLSHLAPYNKESILIGYESTAHYQENLAYFLKSLGYRTAEINPLQTAALRKANIRNTKTDSVDARLICLALMNHHIQGDQRDSARLDDLYQLCKMRMDTMKKRTTCKIQFVAIMDRIFPELASFFDNNLHTNTIYRLIESFPLPSQIKKTRIDILTKLLHKASRGHFKKEKAQKLKDLADISVGIPSDIFAFQAQQLVHQIEFYTDQIQTIEERINTNPDVMSSPLMTIPGIGTFCVACILSAIKNINDFGAPCKILAYAGLDPVIRQSGKFNASHTRMSKRGNSLLRYALVWSAGNVVKNNNTFAEYYRHKTEDQGKSHYQALGHCAKKLVKSIYHMLKYNESFNLD

SEQ ID NO: 17094 - protein, 394 aa, unidentified
  source 1..394: note = protein_8270bb8
  REGION 9..164: note = RuvC_domain
  SITE 12: note = RuvC_P1
  SITE 62: note = RuvC_P2
  SITE 103: note = RuvC_P3
  SITE 105: note = RuvC_P4
  SITE 108: note = RuvC_P5
  REGION 269..356: note = Tnp_domain
  SITE 277: note = Tnp_P1
  SITE 307: note = Tnp_P2
  SITE 315: note = Tnp_P3
  SITE 316: note = Tnp_P4
  SITE 329: note = Tnp_P5
MNGDSMFYLGIDIGKNTHVASLIDEKGKTYFKAFSFSNSTDGAKSLISKLAPYVEDLAIGMEATGHYWLSLYSFLFEKGFKIHVINPIQTDGWRHGIEIRKRKTDKIDSLLIADLLRYGDFVETSLSSEDFMSLRNLSRFRSYLVSSIGDLKRKTIAVLDQVFPEYASSFSDVFGKTSKEILLSFSTSADFEDISASQLNKVLESIHLKKFAKNKIDELSLKAKDSFGITFCLDSFSLQIKLLIEQIIFIEEQISTIEEEIFTLMEKMDSPITTIPGIGKVNGATILGEIGDINRFSNASKLVAYAGLDASVSQSGEYQSTTNKMSKRGSPYLRKALFQSALRAEFCDPVFSEYYQKKISEGKHHLVATNAVARKLCHTIYAILTKKTPYEVQL

SEQ ID NO: 17095 - protein, 406 aa, unidentified
  source 1..406: note = protein_7f2fef0
  REGION 4..162: note = RuvC_domain
  SITE 7: note = RuvC_P1
  SITE 57: note = RuvC_P2
  SITE 99: note = RuvC_P3
  SITE 101: note = RuvC_P4
  SITE 104: note = RuvC_P5
  REGION 277..364: note = Tnp_domain
  SITE 285: note = Tnp_P1
  SITE 315: note = Tnp_P2
  SITE 323: note = Tnp_P3
  SITE 324: note = Tnp_P4
  SITE 337: note = Tnp_P5
MNAVGIDVSKGKSTVAVLRPFGEIVVSPFDVSHNPKELSELVTLLKTLDGHTKVVMEYTGNYYLPIALFLRNNGLFVSVVNPILVKDYGTKSLSVRKCKTDKKDSLKLAAFALDRWSDLPEFNSQSQSRLLLKSYSRQYNQYIKLKVMLKNNLISLLDQTFPAANTLFSTPTRKADGHEKWVDFVLKHPHSECISKKSFSSFSKSYLSWCRKYGYNFSESKARSIYDFACNRSPSLPFNESSSLLISNAVSQLNRINETIASLAKEMNALAATLPEYDVVMSFFGVGSVLGSQLIAEIGDVSRFSNKKALVGFAGLDAPPFQSGSFNSQSRKISKRGSSDLRKTLFQVMSVILQNAPADNSVFQFMDKKRAEGKHFYVYMTAAANKFLRIYYARVTELLNSLNPVA

SEQ ID NO: 17096 - protein, 390 aa, unidentified
  source 1..390: note = protein_fcfdb19
  REGION 4..163: note = RuvC_domain
  SITE 7: note = RuvC_P1
  SITE 60: note = RuvC_P2
  SITE 101: note = RuvC_P3
  SITE 103: note = RuvC_P4
  SITE 106: note = RuvC_P5
  REGION 266..353: note = Tnp_domain
  SITE 274: note = Tnp_P1
  SITE 304: note = Tnp_P2
  SITE 312: note = Tnp_P3
  SITE 313: note = Tnp_P4
  SITE 326: note = Tnp_P5
MIYVGIDVAKDKHDCCILGSDGEVLFSPFTIQNTLQGFDELYEKIWSLTYDLTEIKVGLEATGHYHLNLLRSLLDNGLPSFVINPLHTNLYRKGQSLRKTKTDKVDAASIAMMLLTDKTLKSYSDSSYHNEELKSLTRYRFDKVQERARLKTSVSRLVNILFPELEKLVPSLHMASVYTLLSEFPGASFISAAHLTRLKHLLHDASKGRYGRDMAVSIRDAASSSIGSVLPAKSLELKHTLHLIEVLTEEIDEIEDAINSIMDAIASPITTIPGLKNRMGAMILAEIGDFSRFDSPDQILAYAGLSPTTYQSGQLTSSYAHMEKRGSRYLRYALFNATRYACIWDPTFKAYLAKKRAEGKHYYVAISHACKKLVRVIYRMQLTGESYRTA

SEQ ID NO: 17097 - protein, 400 aa, unidentified
  source 1..400: note = protein_3181080
  REGION 5..164: note = RuvC_domain
  SITE 8: note = RuvC_P1
  SITE 59: note = RuvC_P2
  SITE 100: note = RuvC_P3
  SITE 102: note = RuvC_P4
  SITE 105: note = RuvC_P5
  REGION 226..311: note = Tnp_domain
  SITE 234: note = Tnp_P1
  SITE 264: note = Tnp_P2
  SITE 272: note = Tnp_P3
  SITE 273: note = Tnp_P4
  SITE 284: note = Tnp_P5
MGVIIGMDPHKRSATIEVIDQTGRVLEVGRFDTDQAGYAAMLAAGRGQGAVGERVWAVEGCNGIGRHIAHRLVHDGERVVDVPPKLSAQVRIFATGNGRKTDPVDAHSVALAALYAPGEPGLRRVLVEDDLVVMGLMVDRRDELGRARTQTLNRLHRLLLELIPGGAKTFLSAPQARALVATVKPRDLVGKTRRRFVVELITELEGIDRKIRTAERELAALVQERGSSLLELTGIGPTGAARLLADVGDIHRFRDKDRFASWNGTAPLDASSGAQQRHRLSRAGNRRINRTLHIMAVVQLRNPTPGREFYDARKAGGTPSLMAMRSLKRRLSNVVYARMVADQNRRDLTLDTDDVTGPGGHRGNDSDSSVTGSQPHTGSSEKPLPGPVTTERRTPIPARS

SEQ ID NO: 17098 - protein, 332 aa, unidentified
  source 1..332: note = protein_0a87ca9
  REGION 25..167: note = RuvC_domain
  SITE 28: note = RuvC_P1
  SITE 71: note = RuvC_P2
  SITE 111: note = RuvC_P3
  SITE 113: note = RuvC_P4
  SITE 116: note = RuvC_P5
  REGION 206..291: note = Tnp_domain
  SITE 214: note = Tnp_P1
  SITE 243: note = Tnp_P2
  SITE 251: note = Tnp_P3
  SITE 252: note = Tnp_P4
  SITE 263: note = Tnp_P5
MVEGTMGSHHKERSTKMNKHNMLCAGIDTGKRKLEVALTSGLRLQIDNNAEGHAALSGWLRKHRIKRVGIEASGGYEREVVAQLRRWRFVVVVFQPAQVRAYAKFHLQRAKNDKIDAALIALCTADVRKIHAPPDARLIPLAERLTFMEQITEDMARAKNRHESCRDPRTKRHWEAEIARLKGVLRIELKALVADIRQHSDLSKRLDLIASVDGLGIRTALAIAVRMPEIGRVTREQAAALVGLAPFDHDSGDQVGVRHIEGGRERLRKALYTAALPAVFLWNHQLKLMYRRLIAAGKPHKLALVACARKLLIYANTVVERGTSWTSLRAAA

SEQ ID NO: 17099 - protein, 341 aa, unidentified
  source 1..341: note = protein_1f7df43
  REGION 6..145: note = RuvC_domain
  SITE 9: note = RuvC_P1
  SITE 52: note = RuvC_P2
  SITE 87: note = RuvC_P3
  SITE 89: note = RuvC_P4
  SITE 92: note = RuvC_P5
  REGION 211..302: note = Tnp_domain
  SITE 219: note = Tnp_P1
  SITE 249: note = Tnp_P2
  SITE 257: note = Tnp_P3
  SITE 258: note = Tnp_P4
  SITE 270: note = Tnp_P5
MEIEILGIDLAKRVFQLHGADRHGHAQHRSKVTRAALLQAVHELRPRVIAMEACSSAHHWARRFQGLGIEVRLISPHYVTPFFKTNKNDRNDAEAIVEAACRPAMRFVTVKSVDQQDMMAAHRVRQLLVDQRTALINQVRGLFGERGIVIAQSPEALKRAMPEILKQCEGELTSFCQTLLMELLQQVHVLEERIAPAEAWIKSFMKSSALCKKITAIDGVGPITATAIVAAVGDAKEFKNGRHLAAWLGLVPRQYSSRGKSRLKGISKRGDSYLRTLLIHGARSVLRYAVGKVDARSRWLQELVARRGYNRAAVALANKNARVIQVLLSSEDVYRPTGAAL

SEQ ID NO: 17100 - protein, 411 aa, unidentified
  source 1..411: note = protein_028b083
  REGION 5..168: note = RuvC_domain
  SITE 8: note = RuvC_P1
  SITE 65: note = RuvC_P2
  SITE 105: note = RuvC_P3
  SITE 107: note = RuvC_P4
  SITE 110: note = RuvC_P5
  REGION 276..362: note = Tnp_domain
  SITE 284: note = Tnp_P1
  SITE 315: note = Tnp_P2
  SITE 323: note = Tnp_P3
  SITE 324: note = Tnp_P4
MLLFVGDDWAEDHHDVEVMDVSGRRLAKARLPEGMAGMARLHAMIGQALGTEVDTEDVATRVKVGIETDRGPWVQALVAAGYTVYPVNPLQAARYRQRLALSGAKSDAADAHMLADMVRTDSHQLRPIAGDSAGAEAVKVVTRMHKTLIWERTRATQRLRHALREYFPAALAAFEDLDAADTLELLGKAPDPAAAAKLSVSQISAALKRARRRDIAVKAATIQAALRTEQLGQPAVVTAAYAATVRALVALLGTLNEQVKALQGQVEDHFGRHPAAEIILSQPGLGVILGARVLAEFGDDHGRYASAKARKNYAATSPITRASGKKRTVAARFVHNDRLIDALMTQAFTALSNSPGARAYYDRQRTRGASYNAALRQLANRLVGILHGCLKTGTIYDETTAWSHHLTEAAA

SEQ ID NO: 17101 - protein, 350 aa, unidentified
  source 1..350: note = protein_29a9317
  REGION 13..155: note = RuvC_domain
  SITE 16: note = RuvC_P1
  SITE 59: note = RuvC_P2
  SITE 94: note = RuvC_P3
  SITE 96: note = RuvC_P4
  SITE 99: note = RuvC_P5
  REGION 218..303: note = Tnp_domain
  SITE 226: note = Tnp_P1
  SITE 256: note = Tnp_P2
  SITE 264: note = Tnp_P3
  SITE 265: note = Tnp_P4
  SITE 277: note = Tnp_P5
MSVRNKPREAAVFGVDIGKNVFHVVGLDPAGHPIQKATFRRDTVLQFFEGATPTIVGIEACPGSQWLARKLQGFGHTVRIVAAKFVKPFVKSNKSDIIDAEAIAEAVTRPTMRFVEVRTSDQIDVQALHRVRDRLVAQRTRVICQMRAFCLEYGIAMHQGAGKFKADMPRVLEDEDNDLSAPMRQLLMSLFEDIRYLEQRIAEVSRQIEAAADADDTARRLMTVPGIGALTATGLLAAAGTGRQFKRARDMAAWLGLVPREHSTGGKTTLLGISKRGSSYLRRLLIHGARTCLLHLDRTRDRLGVWLDGLQARMHNNKAAVALAAKIARVAWVIMTRPGAIYNRQDPAKT

SEQ ID NO: 17102 - protein, 314 aa, unidentified
  source 1..314: note = protein_60f6cc3
  REGION 7..148: note = RuvC_domain
  SITE 10: note = RuvC_P1
  SITE 53: note = RuvC_P2
  SITE 93: note = RuvC_P3
  SITE 95: note = RuvC_P4
  SITE 98: note = RuvC_P5
  REGION 188..272: note = Tnp_domain
  SITE 196: note = Tnp_P1
  SITE 225: note = Tnp_P2
  SITE 233: note = Tnp_P3
  SITE 234: note = Tnp_P4
  SITE 245: note = Tnp_P5
MSPLVFVGIDVSQARLDIAVRPGASFSVTHDESAIATLVEHLRTLSPTLIVLEATGGMEISLTSALATAQLPVVVVNPRQVRDFAKASGHLAKTDALDAQTLAQFAEVMRPTPRSLPDAAARALAAVLARRRQLVEMLTAEKNRLLTAPLATRKSLRTHIAWLERERGHIETDLAATIRRSPVWREKEELLRSVPGVGPVLTSTLLANLPELGTLTHKQIAALVGVAPLNRDSGTLRGRRTVWGGRAQVRAVLYMNAIVAARFNPVIRTFYERLCGAGKPKKVALTACMHKLLTMLNAMLKHHSPWRQEAAQHA

SEQ ID NO: 17103 - protein, 341 aa, unidentified
  source 1..341: note = protein_ff9180e
  REGION 5..160: note = RuvC_domain
  SITE 8: note = RuvC_P1
  SITE 58: note = RuvC_P2
  SITE 99: note = RuvC_P3
  SITE 101: note = RuvC_P4
  SITE 104: note = RuvC_P5
  REGION 222..307: note = Tnp_domain
  SITE 230: note = Tnp_P1
  SITE 260: note = Tnp_P2
  SITE 268: note = Tnp_P3
  SITE 269: note = Tnp_P4
  SITE 280: note = Tnp_P5
MVTTIGIDPHKATHTAVAIDGSETVLGELTVLADRYQTEKLIDWASQLNGDDRRWAVEAAGGLGYLLSQQLIAGGEEVVDVPAVLASRVRVLSSGRSDKNDPNDARAVAIAALHQPGLAVVRREDHTQVLRMLAKRHLELTALRTQTVCRLHAVLAQLKPGGMAQRLSVKQASRILQGIRTLDAVGHQRRLTARTHLADIRRLDRDIKTNKVLMSEAVIASNTTVTDVYGVGPVVAAFLIGYTGDPTRFASADHYAAYNGTAPIEYSSGGKTKHRLSMRGNRKLNHAIHMAAVTQIRHDTAGRVYYDKKQAEGKTRKEALRTLKRRISDAVYRKLVADEQR

SEQ ID NO: 17104 - protein, 388 aa, unidentified
  source 1..388: note = protein_1e7f5ee
  REGION 4..160: note = RuvC_domain
  SITE 7: note = RuvC_P1
  SITE 58: note = RuvC_P2
  SITE 99: note = RuvC_P3
  SITE 101: note = RuvC_P4
  SITE 104: note = RuvC_P5
  REGION 263..350: note = Tnp_domain
  SITE 271: note = Tnp_P1
  SITE 301: note = Tnp_P2
  SITE 309: note = Tnp_P3
  SITE 310: note = Tnp_P4
  SITE 323: note = Tnp_P5
MIYVGIDVAKEKHDCFIVSSEGEIIKDVFTFKNNSYGFKSLLAAIPDVPKDKIKVGIEATGHYSLNLMRFIIDNQLPLVVLNPLQTNLFRKAQTLRKSKTDKIDAKLIALMLQSDNFKPHSQLSYHLSELKSLTRHKSRIKENLSKYKISLHRILDIMFPELASVVYSINQKSTYALLKAFPSKEAISSAHLTKLTNTLKNSSRGKYGRAKALSIKEAAANSIGSDSRALSFELSQTIYFIELYADEISKIDQEIKTIMDELQSPILSIPGISYGLGSVILSEIGDINNFESPSKLLAFAGLEPSTFESGKFIAKDMRMVKRGSPHLRWAVLEAARLISMRDETFRAYYQKKKAEGKHHNVANSHVAKKLIRVIHHLLTNNIEFVPQN

SEQ ID NO: 17105 - protein, 403 aa, unidentified
  source 1..403: note = protein_3c47d23
  REGION 4..160: note = RuvC_domain
  SITE 7: note = RuvC_P1
  SITE 57: note = RuvC_P2
  SITE 97: note = RuvC_P3
  SITE 99: note = RuvC_P4
  SITE 102: note = RuvC_P5
  REGION 274..361: note = Tnp_domain
  SITE 282: note = Tnp_P1
  SITE 312: note = Tnp_P2
  SITE 320: note = Tnp_P3
  SITE 321: note = Tnp_P4
  SITE 334: note = Tnp_P5
MNAVGVDVSKGKSMIAILRPFGEIVSSPFEVLHTSSGINELISHILSLDGDTRIVMEHTGRYYEPMAHWLSGAGLFVSAVNPKLIKDFGNNSLRKVKTDKADAIKIARYTLDNWTDLKQYSLMDEIRTQLKTMNRQFDFYMKQKTSFKNNLISLLDQTYPGANDFFDSPVRSDGSQKWVDFASAYWHVDCVRKMSLPAFTEHYQKWCRRKGYNFQPDKPGEIYTASENLIAVLSKDPMTKMLIKQAIDQLDTASKIVEELRSKMNQTAAKLPEYPIVMAMKGVGPSLGPQLMAEIGDVARFSHRGAITAFAGVDPGANQSGAYEQQSVRTSKRGSAQLRKTLFQVMDVLIKTSPADDPVYEFMSKKRSQGKSYYVYMTAGANKFLRIYYGRVKEYLDSLPQSE

SEQ ID NO: 17106 - protein, 322 aa, unidentified
  source 1..322: note = protein_9f67ac6
  REGION 9..157: note = RuvC_domain
  SITE 12: note = RuvC_P1
  SITE 56: note = RuvC_P2
  SITE 96: note = RuvC_P3
  SITE 98: note = RuvC_P4
  SITE 101: note = RuvC_P5
  REGION 195..279: note = Tnp_domain
  SITE 203: note = Tnp_P1
  SITE 232: note = Tnp_P2
  SITE 240: note = Tnp_P3
  SITE 241: note = Tnp_P4
  SITE 252: note = Tnp_P5
MSQPSPLCVCIDVSKATLDIAANSAIEQFSVCNDADGFDSIIAELRKYAVVLVLMEATGGLESAVACALQSEGFEIAVVNPRQARDFARAMGYLAKTDRIDARVLAQMAEVIHRHPERERFIRAMPDAERQVLTAMVVCRRQLVTMLVAERNRLHPAHPQSRKSINIIIKALADELARIDEDMSNHICIHFKELSERLSSIKGVGIMTVAALLAEVPELGRLSRREISALVGVAPVNRDSGTMRGRRTIFGGRAGVRTALYMATLVATRFNPVIKAFYTRLVAAGKAKKVALVACMRKLLTILNAMLRKNEEWDESYHCVVP

SEQ ID NO: 17107 - protein, 305 aa, unidentified
  source 1..305: note = protein_626551a
  REGION 1..76: note = RuvC_domain
  SITE 13: note = RuvC_P3
  SITE 15: note = RuvC_P4
  SITE 18: note = RuvC_P5
  REGION 190..278: note = Tnp_domain
  SITE 198: note = Tnp_P1
  SITE 228: note = Tnp_P2
  SITE 236: note = Tnp_P3
  SITE 237: note = Tnp_P4
  SITE 250: note = Tnp_P5
MKQFANIDFRGGKTDKKDSRTIASYGISYWDKLVEWQIPKDTYFNLDLLNRTYMNAKKHRQIILQELQHYIDCAMPGMDKELHSLNLNTKKDFMLDFVEKFWHRDEIVNKTETEFTEVFTAWAKKKGYRPVEGKAAKIYAIAKSCIPYYPANPTVKTILQCIVDKLSGVNRTLVTIVTQMIEEAKKLPEYQIVREMPGVGDPLAARFFGYAGDIRRFKNSKALVAYAGIDSPPDESGDFSSTHRHITKKGSKVFRDTGYEIMMALRAQKRTWEKVRKNPEVYDYMLKKEAEGKPPPKLNELARFN

SEQ ID NO: 17108 - protein, 269 aa, unidentified
  source 1..269: note = protein_4e2ee4b
  REGION 2..73: note = RuvC_domain
  SITE 14: note = RuvC_P3
  SITE 16: note = RuvC_P4
  SITE 19: note = RuvC_P5
  REGION 138..223: note = Tnp_domain
  SITE 146: note = Tnp_P1
  SITE 176: note = Tnp_P2
  SITE 184: note = Tnp_P3
  SITE 185: note = Tnp_P4
  SITE 197: note = Tnp_P5
MSPEYVRPYVKAQKNDDRDAEAIAEAATRPTMRFVELKTEEQLDIQTLHRVRDRLVGERTSLTNQIRSLLLERGRIVAQGHARLRLLLRDLLDDGADSLSARMTFLLADMRARWDDLDRRIAAFDAEFATMARSDDRARRLTGIPGIGALNATALVAAVGSAATFGKGRDLAAWLGLAPRQATTGGKPRLLGITKRGSRYLRKMLIQGARSAMPSLMRSDTAAGVWLRALLRRAHPNVAVVALAAKMARTVWALLRHGGTYDPAPSAAG

SEQ ID NO: 17109 - protein, 347 aa, unidentified
  source 1..347: note = protein_644ddfd
  REGION 7..147: note = RuvC_domain
  SITE 10: note = RuvC_P1
  SITE 53: note = RuvC_P2
  SITE 88: note = RuvC_P3
  SITE 90: note = RuvC_P4
  SITE 93: note = RuvC_P5
  REGION 210..296: note = Tnp_domain
  SITE 218: note = Tnp_P1
  SITE 248: note = Tnp_P2
  SITE 256: note = Tnp_P3
  SITE 257: note = Tnp_P4
  SITE 269: note = Tnp_P5
MRQITRIGMDTSKHFFQLHGVDAAEQPILRKRLRRKEVLAFFAKLPPTVVGMEACGASHYWARELMQLGHAVKLIAPQHVKPYIKRNKNDGRDAEGLCEAMSRPTMQFVPVKTEEQQAALMLAGIRERLIARRTQLGNAIRGYAAEFGVTAAKGLNKIEPLLADIAQDECVPALARELFAMQGREYARLQVELKAIEAKLMAWHRANADSQRLAQIPGIGPIGATALVMKTPNPRAFSSGRHFAAWLGLTPKDHSTAGKTRIGKITRAGDEMLRSVLVAGATAVVQQAKRGRGRASPWLLALLARKSSPKLVAIALANKIARIAWKLMTTGESYDSARMPGTLAIAA

SEQ ID NO: 17110 - protein, 387 aa, unidentified
  source 1..387: note = protein_b9469f2
  REGION 4..159: note = RuvC_domain
  SITE 7: note = RuvC_P1
  SITE 58: note = RuvC_P2
  SITE 98: note = RuvC_P3
  SITE 100: note = RuvC_P4
  SITE 103: note = RuvC_P5
  REGION 263..350: note = Tnp_domain
  SITE 271: note = Tnp_P1
  SITE 301: note = Tnp_P2
  SITE 309: note = Tnp_P3
  SITE 310: note = Tnp_P4
  SITE 323: note = Tnp_P5
MYYVGIDVAKLNHFASVLSSDGEVLVKPFKFTNNNDGFCKLISALSQFERGNLIIGLESTAHYADNLVEFLVSNHYQVCVINPIQTSTMRKNNIRKTKTDKVDTLVIAKTLMTQPHRVLEQEDIDLMHLKYLGRTRQNLVKERTRKKIQLTAYVDRVFPELQYFFKSGLHQKAVYALLKEAPTAELVASMNLTHLTHLIEVSSHGHFTKDQAREFRVLAQKSGGFNDKALSIEVTQSVEQIELLDRQINETESLMTEIMLGLDSVIMTIPGIGYINGGMILGEIENIHRFAKPKQLLAFAGLDPSVHQSGNFNASHTRMSKRGSRVLRYALINAAHNGVKNNSTFKAYYNAKMAEGRSHYNALGHCAGKLVRVIHKMLTDDVAFNLE

SEQ ID NO: 17111 - protein, 365 aa, unidentified
  source 1..365: note = protein_3358074
  REGION 14..168: note = RuvC_domain
  SITE 17: note = RuvC_P1
  SITE 65: note = RuvC_P2
  SITE 105: note = RuvC_P3
  SITE 107: note = RuvC_P4
  SITE 110: note = RuvC_P5
  REGION 275..343: note = Tnp_domain
  SITE 283: note = Tnp_P1
  SITE 312: note = Tnp_P2
  SITE 320: note = Tnp_P3
  SITE 321: note = Tnp_P4
MTDIEQHDSVQVFVGLDVGKGAHHGVALDRKGKRLLDSALPNDEAKLRALIGKLKERGPILLVVDQPATIGALPVAVARDEGVLVAYLPGLAMRRIADLYAGEAKTDARDAYIIAEAARSLPHTLRSLKLADSQVAELTMLCGFDEDLAGQITQVSNRIRGLLTQLHPALERVIGPHLDHPAMLDLLERYPSPAQLAALTQKQLANRLVKLAPRMGKTWATQILQALSEQTVVVLGTQAASIVLPRLAQQLAALRIQRDEVAKEVERLVLAHSLHPVLTSMPGVGVRTAARLLIDVVSRVFASAGHLAAYAGLAPVTRRSGSQTGDVPVGLRSAARSDLQGLLRPQDRPGEASQPGPHRPRTASL

SEQ ID NO: 17112 - protein, 338 aa, unidentified
  source 1..338: note = protein_20a1c66
  REGION 6..148: note = RuvC_domain
  SITE 9: note = RuvC_P1
  SITE 52: note = RuvC_P2
  SITE 87: note = RuvC_P3
  SITE 89: note = RuvC_P4
  SITE 92: note = RuvC_P5
  REGION 211..297: note = Tnp_domain
  SITE 219: note = Tnp_P1
  SITE 249: note = Tnp_P2
  SITE 257: note = Tnp_P3
  SITE 258: note = Tnp_P4
  SITE 270: note = Tnp_P5
MNIKVLGIDLAKYSFSIHGVNEHDKPVFRKTVKRHKLLETLSHISPCTIGIEACSGAHHWARKMSSLGHTVKIMAPKFVVPYRHNEKNDANDARAICEAVTRPNTRFVSHKNQEQQAVLCIHRIRQGLIKDRTARLNRIRGLLEEFGFATPKGRYPGQKVIQTILEDAENDLPNLARELIDETWQSVLELNKDILHYDRKLYRLANQSNQAKRIMTIPGIGELSATAIVASVNDAKQFDNARQFSAWLGLVPKQYTTGGHIRLGRITKRGDKYLRTLLIHGARSVIAACKHKTDKTSLWIKDLIERRGFGRACVALASKNARLVWALLTSKQEYRINF

SEQ ID NO: 17113 - protein, 344 aa, unidentified
  source 1..344: note = protein_f51dc97
  REGION 6..147: note = RuvC_domain
  SITE 9: note = RuvC_P1
  SITE 52: note = RuvC_P2
  SITE 87: note = RuvC_P3
  SITE 89: note = RuvC_P4
  SITE 92: note = RuvC_P5
  REGION 211..299: note = Tnp_domain
  SITE 219: note = Tnp_P1
  SITE 249: note = Tnp_P2
  SITE 257: note = Tnp_P3
  SITE 258: note = Tnp_P4
  SITE 270: note = Tnp_P5
MQATTIGIDLAKNIFQVHGADAHGKKIFNKALKRDQMAAFFVNLPPALVGMEACGSAHYWARKLQSMGHTVRLMAPQFVKPYVKGNKHDAADAEAICEAVTRPTMRFVPIKNAEQQAVLSMHRVRQGFVRARTAQANQIRGLLSEFGLIVPQGIAHITGRVPPLIEDASNELPGGLRILIDRLLEHFKALQAQIQQLEAQILAWHRSNPASKRLEQIPGIGPITASALIASLGDARSFKDGRQVAAWLGLVPKQHSSGGKQNLLGISKRGDTYLRTLLIQGARSVIYHADRPSQEASATCQWVCRVAQRRNKNIAAVALANKNARICWALLTGDKDYDERSQTA

SEQ ID NO: 17114 - protein, 260 aa, unidentified
  source 1..260: note = protein_bca3860
  REGION 1..66: note = RuvC_domain
  SITE 5: note = RuvC_P3
  SITE 7: note = RuvC_P4
  SITE 10: note = RuvC_P5
  REGION 128..211: note = Tnp_domain
  SITE 136: note = Tnp_P1
  SITE 166: note = Tnp_P2
  SITE 174: note = Tnp_P3
  SITE 175: note = Tnp_P4
  SITE 187: note = Tnp_P5
MKRQKNDAADAEAIVVAAQRPEMRFVQPKSEAQQACAVLFRTRERLLHQRTELVNALRSVLYEYGHIVPKGIAHIKRIESILEAPNSDLPELVREECRDLIEQIAEKTARIEAKTKKARTLSMATDTARRLQTMPGVGPQTALAISGFAPPMESFKRGRDFAAWLGLVPRQYTSGGKERLGRVSKAGQTDIRSLLIIGAMSRLTVLARKSIVEGSWLGRMLRRKPLMLVAIALANKMARAIWGMMTKKEDYRDPTCVVAA

SEQ ID NO: 17115 - protein, 313 aa, unidentified
  source 1..313: note = protein_ddf83e6
  REGION 8..151: note = RuvC_domain
  SITE 11: note = RuvC_P1
  SITE 55: note = RuvC_P2
  SITE 95: note = RuvC_P3
  SITE 97: note = RuvC_P4
  SITE 100: note = RuvC_P5
  REGION 192..277: note = Tnp_domain
  SITE 200: note = Tnp_P1
  SITE 229: note = Tnp_P2
  SITE 237: note = Tnp_P3
  SITE 238: note = Tnp_P4
  SITE 249: note = Tnp_P5
MIHDIAVVGIDVSKQYFDIHIHPTGKSFRCGSSPDEIAQLARRLRELGPVAVGLEASGGYESRLADGLHAAGLEVYVVAPARVRGFARAIGQLAKTDRIDAAMIARYLMAVRSNLTPHAPDPSCRRLSAIGAHRRRLLAEKSGLVSQLDTIDEPLVRDLIEERLRTIAQDIATLDAAIGDVLAQTPRLRKSHARLRQVTGVGPVLATALLADMPELGKVSSKVAAALLGVAPYARQSGASDRNGRCAGGRKHLRDIAYMAVLSAIKVRDPVLGGFYQRLRTRGKPFKLAMIATVRKLITILNAIARSDPAFQQ

SEQ ID NO: 17116 - protein, 271 aa, unidentified
  source 1..271: note = protein_313b8d2
  REGION 1..112: note = RuvC_domain
  SITE 9: note = RuvC_P2
  SITE 50: note = RuvC_P3
  SITE 52: note = RuvC_P4
  SITE 55: note = RuvC_P5
  REGION 225..271: note = Tnp_domain
  SITE 254: note = Tnp_P2
  SITE 262: note = Tnp_P3
  SITE 263: note = Tnp_P4
MSEIKVGLEATGQYHLNLLRSLLDNSLPSFVINPLHTNLFTKGQSLRKTITDKVDAASIAIMLLSDRTLKPYLESSYHNEELKSLTRYRFDKVQERARLKTSVSRLVSILFPEPKKLVPTLHIASVYALLSEFPGASFIAAAHLTRLKKLLHNASNKDRYGRDMAVSIRDAVSLSIDSVLLAKSLELRHTIHLIETLTMEINEIEAAVKCNHGYDGFPHHHDLWAQKRMGAMILAEIGEFSRFDNPDQILTYAVLSPTIYQSSQLALPMRI

SEQ ID NO: 17117 - protein, 344 aa, unidentified
  source 1..344: note = protein_eca1753
  REGION 5..152: note = RuvC_domain
  SITE 8: note = RuvC_P1
  SITE 55: note = RuvC_P2
  SITE 92: note = RuvC_P3
  SITE 94: note = RuvC_P4
  SITE 97: note = RuvC_P5
  REGION 212..300: note = Tnp_domain
  SITE 220: note = Tnp_P1
  SITE 250: note = Tnp_P2
  SITE 258: note = Tnp_P3
  SITE 259: note = Tnp_P4
  SITE 271: note = Tnp_P5
MEHFAGLDVSVKETSVCIVDDMGRIVREAKVASEPEALLAVLNNPSYRFRRIGLEAGPLSQWLYSALGEANLPVICVETRHMRAVLKAQINKTDRNDARGIAQMMRAGLYRPVHVKTLRSQKLRILLTHRKLLQSKAIAIENDLRGTLRNFGLKVGVVGAVKFETRIKQLVENLPDLALLVEPLLVVRRVLREQIAVLHRRLLHIVRDDEVCRRLMTIPGVGPVVALTFRATIDVPARFRNSRAVGAVLGLTPCRHQSGESDRTGAISKCGDEMMRVMLYEAAQILLVRSTRWSWLKVWAMQIARRCGLKKAIVALARRLAVIMHRIWVDGTEFRWARQAAAAA

SEQ ID NO: 17118 - protein, 397 aa, unidentified
  source 1..397: note = protein_0cde5f7
  REGION 8..168: note = RuvC_domain
  SITE 11: note = RuvC_P1
  SITE 67: note = RuvC_P2
  SITE 108: note = RuvC_P3
  SITE 110: note = RuvC_P4
  SITE 113: note = RuvC_P5
  REGION 271..358: note = Tnp_domain
  SITE 279: note = Tnp_P1
  SITE 309: note = Tnp_P2
  SITE 317: note = Tnp_P3
  SITE 318: note = Tnp_P4
  SITE 331: note = Tnp_P5
MVFIMIYVGIDIAKNKHDCVILSDHATCLRPCFSLKNNSQGFALLINAIKEACGGDFNHGEVKAGLEATGHYAHNIVAFLNSNGIDTTIFNPFLVNQYRKSRSLRKTKTDKADAMLIAELLISTAANPATSSYHNQEMKTLCRYRFSLVKQRSKLKADMSRYVDLLFPELGSLGLNPTSSSVMAMLKELPGASYISICNISQLTDILSSSSRGRYGKETAEQVKAMAKESIATANKALSYIMSDTIEQICLLNKRIAKIDGELKNEVEKSGTKLTSIPGIGFCIASVILAEIGDINLFSSADKLQAFAGLDPSTFQSGNFTASHTHMVKRGSAYLRWAIMQGARLCSLNNLKYKQYLDKKIKEGKHYNSALGHLSKKLIRLIFHLLKENEEYDPKVA

SEQ ID NO: 17119 - protein, 319 aa, unidentified
  source 1..319: note = protein_aaf8d2b
  REGION 13..155: note = RuvC_domain
  SITE 16: note = RuvC_P1
  SITE 59: note = RuvC_P2
  SITE 94: note = RuvC_P3
  SITE 96: note = RuvC_P4
  SITE 99: note = RuvC_P5
  REGION 218..250: note = Tnp_domain
  SITE 226: note = Tnp_P1
MKYNSAKDEIKVVGIDLAKSVFHVHGVDEHGRVAVRKRMGRNKLAAFMVQLPPCLVGMEACGGSNDWARKLAAMGHDVRLISPQFVKPYVKSNKNDMADAAAICEAVSRPNMRFVPIKSVEQQDIQSLHRARSLAVSHRTAQANQTRGLLMEYGIVVAKSIAALRKGIPEILEDADNALSPMFRELLCGLWDEFLRLDARVAGYDAQIKYLSEQSDVCTRLMTIPGIGPMVSTALVAAVADGKSFKSGDVYLRKLLIHGARAALRWADRKHDRRSRWVSELKDRRGQNIAAVALANKTVRTAWVLMTRNEEYRTASATV

SEQ ID NO: 17120 - protein, 346 aa, unidentified
  source 1..346: note = protein_9a3cb90
  REGION 8..149: note = RuvC_domain
  SITE 11: note = RuvC_P1
  SITE 54: note = RuvC_P2
  SITE 89: note = RuvC_P3
  SITE 91: note = RuvC_P4
  SITE 94: note = RuvC_P5
  REGION 214..297: note = Tnp_domain
  SITE 222: note = Tnp_P1
  SITE 252: note = Tnp_P2
  SITE 260: note = Tnp_P3
  SITE 261: note = Tnp_P4
  SITE 273: note = Tnp_P5
MKTKISVLGIDIGKNLCSLVGLDASGAVVLRRRAKRETLVGLAAQLPPCIVAMEACYGAHHLGRLFATHGHEVRLMSPEYVRPYVKAQKNDDRDAEAIAEAGTRPTMRFVELKTQDQLDIQTLHRSRDRLIGERTALINQARAILLERGIVVPKGKRHLEERLGVLLDEPDEQELSGRMRRLIADVRVQWRELDKRIAAFDAEFAAFAKENEDARQLTTIPGVGALIASALIAAIGKAETFKHGRDLAAWLGLVPRQATTGGKPKLLGISKRGNAYLRKQLIHGARAALPHVAERDTGLGKWLKGLIARVHYNVAVVALANKLARIAWAVLRRGEKFAVGSLFVAA

SEQ ID NO: 17121 - protein, 315 aa, unidentified
  source 1..315: note = protein_9be9245
  REGION 9..153: note = RuvC_domain
  SITE 12: note = RuvC_P1
  SITE 56: note = RuvC_P2
  SITE 96: note = RuvC_P3
  SITE 98: note = RuvC_P4
  SITE 101: note = RuvC_P5
  REGION 191..276: note = Tnp_domain
  SITE 199: note = Tnp_P1
  SITE 228: note = Tnp_P2
  SITE 236: note = Tnp_P3
  SITE 237: note = Tnp_P4
  SITE 248: note = Tnp_P5
MTQTITTTAGIDTSKAKLDIAVHGRTERWQVANALPGWRALAANLAKAGVTRVGIEATGGYERGVVEHLRAAGFIMLVLQPVRVKAFGQVHLRRAKNDALDAELIAACTAAIDDPRIAPDPRLAELAGYLTFLEQIEEDIARLKTRLEHVEEPALRRIVNSDIARLKARKTAQIRSLAKRLRAHSDLERRLDLVLSIPGIGERTALALIIRMPELGQISREEAAALAGLAPFDDDSGKCRGQRHIAGGRGRLRRSLFAAALPAAFRWNKALVALYARLVAAGKAHKSALIACARKLLIYANTVVQRGTPWTEKAA

SEQ ID NO: 17122 - protein, 339 aa, unidentified
  source 1..339: note = protein_1186ff5
  REGION 6..148: note = RuvC_domain
  SITE 9: note = RuvC_P1
  SITE 52: note = RuvC_P2
  SITE 87: note = RuvC_P3
  SITE 89: note = RuvC_P4
  SITE 92: note = RuvC_P5
  REGION 211..297: note = Tnp_domain
  SITE 219: note = Tnp_P1
  SITE 249: note = Tnp_P2
  SITE 257: note = Tnp_P3
  SITE 258: note = Tnp_P4
  SITE 270: note = Tnp_P5
MQVTTVGLDLAKNIFQVHGITADGTVAFNKSLRRAQLLQFFENLEPCLIGMEACGSGHHWARQFQKLGHEVRLMPAMYVKACVKRGKSDAIDAEAICEAVTRPTMRFVAIKTEEQQGVLFLHRARDLVVRQRTQLSNMLRGLLGEFGIVIAQGIGGAVKFAKAVLDGDRPGIPEIAIDVLTNLCNQMVALHLRILWYDKRILLEGRRDPRVMLLRTIPRVGPVTASAIVATAGDGHQFRNGREFAAWLGLTPINRSSGGKERLGRISKMGDRYLRRLLVTGMTARLNQMKVNPDRVDPWAMSLRERKSPRVATVAMANKTARIIWAVLTRNERYRPHTA

SEQ ID NO: 17123 - protein, 339 aa, unidentified
  source 1..339: note = protein_5f35c81
  REGION 6..148: note = RuvC_domain
  SITE 9: note = RuvC_P1
  SITE 52: note = RuvC_P2
  SITE 87: note = RuvC_P3
  SITE 89: note = RuvC_P4
  SITE 92: note = RuvC_P5
  REGION 211..300: note = Tnp_domain
  SITE 219: note = Tnp_P1
  SITE 249: note = Tnp_P2
  SITE 257: note = Tnp_P3
  SITE 258: note = Tnp_P4
  SITE 270: note = Tnp_P5
MHVTTIGLDLAKNIFQIHGIYEDGEVAFNRALRRAQVLSFFEKLEPCLVGIEACGTSHHWARELIKLGHNVKLISPAYVKPYVKRGKSDAADAEAICEAVTRPTMRFVEVKTPEQQAILAVHRTRDLIVRQRTQTINMLRAQLAEFGIVLPQGIYHALQFAKDCLNGEQADLPEVAGDVIFELCDQLLFLHSKILRCSRQMTQIAKLEKRIALLRTIPGVGPITASAIVATVGSGRQFNNGREFAAWLGLTPLNKSSGGKERLGHISKMGDQYIRRLLVLGMISRIRSIRAKPEKFDPWFTDILSRKPSRVAAVAMANKTARMIWAVLTRNEPYKVRAV

SEQ ID NO: 17124 - protein, 316 aa, unidentified
  source 1..316: note = protein_45857ca
  REGION 6..153: note = RuvC_domain
  SITE 9: note = RuvC_P1
  SITE 54: note = RuvC_P2
  SITE 94: note = RuvC_P3
  SITE 96: note = RuvC_P4
  SITE 99: note = RuvC_P5
  REGION 188..272: note = Tnp_domain
  SITE 196: note = Tnp_P1
  SITE 225: note = Tnp_P2
  SITE 233: note = Tnp_P3
  SITE 234: note = Tnp_P4
  SITE 245: note = Tnp_P5
MISYFVGLDVSKATLDVGFLPESIPQFQVRNDSEGFAQLIACLNELEVERVLLEATGGYEQAVFKALRLEGLNVIRVNPKRCRDYASAMGKIAKTDKIDAQMLARFARDFEGLPQIEPNQDRDELGELIKLRGNLVQHRDDDKRRMKQTTSATAITVYTEHVAYLNDQIKALDKAIERASNVLDRTTAMRLRSVKGIGVISCGTFMAYLPELGSVTGREIAALAGLAPYNKDSGKKSGPRKIEGGRYRVRKAAYMSIWSMIQHVPEVRARYEALIARGKRAKVAAVACMRVLLVRLNAMLRDGTEWKELKPQVPAP

SEQ ID NO: 17125 - protein, 320 aa, unidentified
  source 1..320: note = protein_70956b0
  REGION 12..158: note = RuvC_domain
  SITE 15: note = RuvC_P1
  SITE 59: note = RuvC_P2
  SITE 99: note = RuvC_P3
  SITE 101: note = RuvC_P4
  SITE 104: note = RuvC_P5
  REGION 194..279: note = Tnp_domain
  SITE 202: note = Tnp_P1
  SITE 231: note = Tnp_P2
  SITE 239: note = Tnp_P3
  SITE 240: note = Tnp_P4
  SITE 251: note = Tnp_P5
MTKMSQTTMISAGIDIAKEKLDVAVDGNKQRWVMSNDPAGFLQLARLLRTHKVTRVGLEATGGYERHVTQYLRKAGFTVLVLQPRQVRAYAEALLRHAKNDRIDAGTIASFTALLKIARDAPDPRYQPLADLLTFIEQIEEDTARIKVRLEHVEDAAYRRIMEADIKRLKLRRTRMVKKLDTALRCHDDIAKRLDLVITIDGVGHRTALAFIIRMPELGCLTREQAAALAGVAPFDDDTGKHRGERHIWGGRARLRSSVYAATLPAAFQWNSQLIALYKRLIAAGKPHKVALVACTRKLVIFANTVLARGTPWTKSAPTI

SEQ ID NO: 17126 - protein, 419 aa, unidentified
  source 1..419: note = protein_b980c79
  REGION 11..160: note = RuvC_domain
  SITE 14: note = RuvC_P1
  SITE 65: note = RuvC_P2
  SITE 100: note = RuvC_P3
  SITE 102: note = RuvC_P4
  SITE 105: note = RuvC_P5
  REGION 255..345: note = Tnp_domain
  SITE 263: note = Tnp_P1
  SITE 296: note = Tnp_P2
  SITE 304: note = Tnp_P3
  SITE 305: note = Tnp_P4
  SITE 316: note = Tnp_P5
MSFKILKNNCCGLDVHKTWIFACIGITDSHSRTEYKQARFSSFSKGLQELCDWLAKYRCTDVCMESSGKYWIPVFNILEKNNLWVTLSHPKYTKPLKGNKTDRKDAKWICDLYMCGMVKPSFIPPASIRHLRDLVRYRFKLTCMITGEKNRAQNCLTVSNLKLDDVFSDVFGKSSRSITEQILAHPGETFDVTPFVHGHCKTPIEEIQAAVDGAISPEQAVKLRQCLDHIDELEKHIETVEQEILRLSDPYESALNLIRTVPGFHKNPMTAIQVLSEIGADMSVFPTAKHLVSWAGCCPRNDQSNKKIKSTRISRAGSYFKPILVQVANALIKSKKHPEFTNRYRRIKARRGHKKAIIAICRMILTAIWHILSDLNPYTPDGFLESRPVNESKTLTTSQALNLLKQRGYIIKDEPVTAS

SEQ ID NO: 17127 - protein, 418 aa, unidentified
  source 1..418: note = protein_09db0de
  REGION 21..177: note = RuvC_domain
  SITE 24: note = RuvC_P1
  SITE 74: note = RuvC_P2
  SITE 114: note = RuvC_P3
  SITE 116: note = RuvC_P4
  SITE 119: note = RuvC_P5
  REGION 291..377: note = Tnp_domain
  SITE 299: note = Tnp_P1
  SITE 329: note = Tnp_P2
  SITE 337: note = Tnp_P3
  SITE 338: note = Tnp_P4
  SITE 351: note = Tnp_P5
MSKADLTIDQTPIKENSMNAVGIDVSKSKSTIAILRPFGEIVAKPFDVKHTFSDITHLISQLKSLNGDTRIVMEHTGRYYEPMAQWLSDAGLFVSAVNPKLIKNFGNNSLRKVKTDKADALKIARYTLDNWCDLKPYNSMDELRRQLKNMNRQFDFYMKQKTAMKNNLIALLDETFHEINTFFDSPARNDGSQKWVDFATTFWHVDCVRKQSISSFSERYQSWCKKKKYNFQPQKPKEIYEFSQDLIATLPRDNMTKLLIKQAIDQLNMASKNVESLRLLMNQTAAKLPEYPIVLGMTGVGTTLGPQLIAEIGDVSRFSHKGALTAYAGVDPGANQSGDYEQQSVRTSKRGTPQLRKTLFLIMDSLMKLAPPDDPVYGFMMKKRAQGKDYYVYMTAGANKFLRIYYGRVNEYLVSLTT

SEQ ID NO: 17128 - protein, 391 aa, unidentified
  source 1..391: note = protein_1360bd2
  REGION 4..163: note = RuvC_domain
  SITE 7: note = RuvC_P1
  SITE 60: note = RuvC_P2
  SITE 101: note = RuvC_P3
  SITE 103: note = RuvC_P4
  SITE 106: note = RuvC_P5
  REGION 266..353: note = Tnp_domain
  SITE 274: note = Tnp_P1
  SITE 304: note = Tnp_P2
  SITE 312: note = Tnp_P3
  SITE 313: note = Tnp_P4
  SITE 326: note = Tnp_P5
MIYVGIDVAKDKHDCFISNSDGEILYNAFTIQNNREGFDELYQKILFVEVDMSNIKVGLEATGHYNYNLLGYLIDKGLPTYVINPLHTNLYRKSLSLRKTKTDKVDARTIAMLLMSDVNLKSYSVTSYHNEELKSLTRYRFDKVQERAQLKQSISRLVTILFPELEKLVPTLHLASVYALLGELPSADQIASCHLTHLTKLLQTASKGRYSREKAIEIRDAARTSIGSRMPAKSLELKHTLKLIGELDSEIAEIESEIKKIMDEINSPILTIPGIGYRMGAMILAEVGDFSRFDSPDKLLAYAGVSPSTYQSGQLESSYSHMEKRGSRYLRFALINAAKYVCHWDESFGTYLQKKISEGKHYNVAITHATKKLVRLIYAMEKSGKPYIKAA

SEQ ID NO: 17129 - protein, 343 aa, unidentified
  source 1..343: note = protein_f6f31b9
  REGION 6..149: note = RuvC_domain
  SITE 9: note = RuvC_P1
  SITE 54: note = RuvC_P2
  SITE 89: note = RuvC_P3
  SITE 91: note = RuvC_P4
  SITE 94: note = RuvC_P5
  REGION 213..299: note = Tnp_domain
  SITE 221: note = Tnp_P1
  SITE 251: note = Tnp_P2
  SITE 259: note = Tnp_P3
  SITE 260: note = Tnp_P4
  SITE 272: note = Tnp_P5
MKLIRVGVDLAKNVFQLHGVDRHGRAVWRRRLTRKQWLSALMAQADPAWESGMEACAGAHHLARTLQSRGYTVRLIPPQFVKPYVKSNKNDANDAEAICEAMSRPSMRFVAVKSIAQQDIQATHRIRAELMMQRRAKANQIRGLVAEYGLVAPLTLRALRSTIPVWLEEAENGLTDYFRSLLNGLWSDLILLDDRVLEMDRVIERLANSNEVTRRLQQLRGVGPMVATALVAAVGNAEQCPKGRQMAAALGLTPRQYSSGGKQRLLGISKRGDAYLRTLLIHGARAVVSQARHREDRLSRWVTGIATRRHPNVAAVALANKTARMAWAMLRNETDYDPDFAMS

SEQ ID NO: 17130 - protein, 343 aa, unidentified
  source 1..343: note = protein_4e4b74d
  REGION 7..149: note = RuvC_domain
  SITE 10: note = RuvC_P1
  SITE 53: note = RuvC_P2
  SITE 88: note = RuvC_P3
  SITE 90: note = RuvC_P4
  SITE 93: note = RuvC_P5
  REGION 212..300: note = Tnp_domain
  SITE 220: note = Tnp_P1
  SITE 250: note = Tnp_P2
  SITE 258: note = Tnp_P3
  SITE 259: note = Tnp_P4
  SITE 271: note = Tnp_P5
MNDVITIGVDLAKNVFQIHGVDAEGAVIVRRQLRRRQMLPFFKKQPSCLVGIEACATSHHWARQLVELGHQVKLMPPRYVKPYVKRNKNDMADAEAICEAVTRPTMRFVAIKTEEQQSVLMLHRTRQLFVRQRTTIINALRAHLAELGIIAGIGRNGLERLLDVIADDEDERVPPTARDCLLALRVQLELVKQQILEADRRVLAWHRASEASLRLDDIPGVGPLIASALVASVPDPHAFKSGRDLSAWIGLVPKQNSTGGKERLGHISKAGNRYLRMLLVVGALSVIRRAKQVGYTRRPWLTKLLERRSTKVAAIALANKIARTAWAMMAHGTYYKEPVVRAI

SEQ ID NO: 17131 - protein, 431 aa, unidentified
  source 1..431: note = protein_914b27e
  REGION 25..183: note = RuvC_domain
  SITE 28: note = RuvC_P1
  SITE 82: note = RuvC_P2
  SITE 122: note = RuvC_P3
  SITE 124: note = RuvC_P4
  SITE 127: note = RuvC_P5
  REGION 293..393: note = Tnp_domain
  SITE 301: note = Tnp_P1
  SITE 331: note = Tnp_P2
  SITE 339: note = Tnp_P3
  SITE 340: note = Tnp_P4
  SITE 353: note = Tnp_P5
MILLGGLGVTGKMNMRRRWRMNPVVGLDVSKGESEVQAFLDKGKPYGKSFSIKHNLEGLSSLLEFLESVKDKTGIQPSVVLEATGHYHAPVVQFLEQHNYLLIIVNPLISHRAKSSSLRKVKTDAIDAYRLCELYYKEDLEPYERRGIQLLNLRNLTRQHENITGIYVQTKLQFQAVLDQIFTEYRGVFGDLYSVVSLLLLKEFPASEDILAVSEDVLAEKIKEFCKSRSKRWAEEKARDLKQAAARNPFKKTLYQSHLLSLSMYIDMLLQYKEHLSRMESEIDTLAKEVEEYKIIQSIPGIGEKIAATIISEIGEIDRFNHPKKLVAFAGVDPEVFESGKFKATLVRITKRGSSRLRHALYLAVRSGIRDCRKQKTTDEIIPRNKRLRAFYDKKREEGKLYKVAVIACVNKLLHWIYAILKNRTTFQDIA

SEQ ID NO: 17132 - protein, 343 aa, unidentified
  source 1..343: note = protein_10d93eb
  REGION 7..148: note = RuvC_domain
  SITE 10: note = RuvC_P1
  SITE 53: note = RuvC_P2
  SITE 88: note = RuvC_P3
  SITE 90: note = RuvC_P4
  SITE 93: note = RuvC_P5
  REGION 212..297: note = Tnp_domain
  SITE 220: note = Tnp_P1
  SITE 250: note = Tnp_P2
  SITE 258: note = Tnp_P3
  SITE 259: note = Tnp_P4
  SITE 271: note = Tnp_P5
MEKITIVGLDLAKSIFQVHAITDDGHVAVRRALRRSQVLEFFRQISPCLVGMEACGSAHYWANAIGELGHTVRLMPPAYVKPYVKRNKTDAADAEAICEAVTRPTMRFVPVKSPEEQAASVVLKTRELFVRQRSQTANAMRAHMAELGVVAATGMTRIAKLIAILRDDRDGRLPNSARLALLEMAEQIEKLTARIEALDAKIIAAVKTDEAARRLTTIPGVGPIIAASVRAAVHDPEAFRTGRDLAAWIGITPRANSSGGKERLGKISKQGNKQLRTLLIVGATSVLKQARRGAKLPAWVVSLLARKAYKVAAVALANKIARTIWALLVKGGTYQAPGSMTRV

SEQ ID NO: 17133 - protein, 362 aa, unidentified
  source 1..362: note = protein_9c306c3
  REGION 29..187: note = RuvC_domain
  SITE 32: note = RuvC_P1
  SITE 85: note = RuvC_P2
  SITE 123: note = RuvC_P3
  SITE 125: note = RuvC_P4
  SITE 128: note = RuvC_P5
  REGION 226..313: note = Tnp_domain
  SITE 234: note = Tnp_P1
  SITE 264: note = Tnp_P2
  SITE 272: note = Tnp_P3
  SITE 273: note = Tnp_P4
  SITE 286: note = Tnp_P5
MEEAHIITHSVLKSNYERSPIMTKNVYFVGLDIAADDFVASIYQSPKQSVITKEGIKNTFDGFDVFIPWLKEHGLSKTNCIICMEATGVYNEAIAHYLVTQGFRVSVEPPLKVKRAFDPVGHKTDPVDSKQIAEYAYRYSDELRFWQPKDEIIEKIKHLLTAREQFTKQSTAIKNAMKSYEKHIVQVPLIVKAHRQTLREIKKHITEIDKELDRIIRQNPSISNMSNQLKSIPGFGLLLSASLITLTGAFSDISHYKTLAAFLGICPYQHQSGKSIYRQPHMRSFGPAYPRKLLTLAARSVATHNDVFKKYYARKLAEGKAKQLVLNNISNKLIKLACALIKNNSRYTVTYRSINPMFLNIS

SEQ ID NO: 17134 - protein, 395 aa, unidentified
  source 1..395: note = protein_f22b086
  REGION 5..156: note = RuvC_domain
  SITE 8: note = RuvC_P1
  SITE 57: note = RuvC_P2
  SITE 96: note = RuvC_P3
  SITE 98: note = RuvC_P4
  SITE 101: note = RuvC_P5
  REGION 266..351: note = Tnp_domain
  SITE 274: note = Tnp_P1
  SITE 304: note = Tnp_P2
  SITE 312: note = Tnp_P3
  SITE 313: note = Tnp_P4
  SITE 325: note = Tnp_P5
MKHILSFDIAKGKSVYCFIDELKNVIIDASLIEHKKDEFDNLFNLIKDYPNLIVVMESTSVYHLPVETYFRSKGVDTVVINPKLVKQFKDTLNKSKTDKLDCFKIARCFLGTIDNFYQKQDEYFMYSPLARQYWSLIEGQTRLKNRYRQLIDIVFPEFVLIFNDLYDDLALNFIHDFPHPVLFVNRRIDYLMNYLKEKNGTTQAYRFKNKVLKMKEFASNSLCFVAFDSYQVQNLVQVIEMIQYHKSEINKIKKQLINDMKDKELFKIINSIPGFGEFSTALFLAEVGDITRFDDKYQFISFIGIDSVTSQSGVSAYHGPISKTGCKFGRTILFNIVTTILQISAHTDKTNPIYLFFRKKQSEGKHHYKCIIACETKLCKIIYKLCSSNCLYENK

SEQ ID NO: 17135 - protein, 391 aa, unidentified
  source 1..391: note = protein_4048e22
  REGION 4..163: note = RuvC_domain
  SITE 7: note = RuvC_P1
  SITE 60: note = RuvC_P2
  SITE 101: note = RuvC_P3
  SITE 103: note = RuvC_P4
  SITE 106: note = RuvC_P5
  REGION 266..353: note = Tnp_domain
  SITE 274: note = Tnp_P1
  SITE 304: note = Tnp_P2
  SITE 312: note = Tnp_P3
  SITE 313: note = Tnp_P4
  SITE 326: note = Tnp_P5
MIYVGIDVAKDKHDCFIMNSEGIIIADGFTISNNMEGFNTLLDRIRCCSSRQDKIKVGLEATGHYSYNILGFLLDNGLPTYVLNPLHTNLYRKSLSLRKTKTDRVDARSIAAMLMSDVGLKPYTDTAYHNEELKSLTRYRFDKVKERGQLKQSIARLVCILFPELENLVSTLHMASVYALLEELPGARQISEAHLTHLKTLLSTASKGHYKRDMALLIRETAQSSIGSHRPAKSLELKHTIHLIRELDTEIQEIETAIQAIMDKLHSPITTIPGISYRMGAMILAEVGDFSRFDSPDKVLAYAGLSPSTYQSGKLANCYPHMEKRGSRYLRYALFNAAKYVCHWDAAFAAYLAKKRSEGKHYNVAVSHAAKKLVRLIFALEKSGEPYHLAA

SEQ ID NO: 17136 - protein, 350 aa, unidentified
  source 1..350: note = protein_f57ad83
  REGION 11..151: note = RuvC_domain
  SITE 14: note = RuvC_P1
  SITE 57: note = RuvC_P2
  SITE 92: note = RuvC_P3
  SITE 94: note = RuvC_P4
  SITE 97: note = RuvC_P5
  REGION 216..302: note = Tnp_domain
  SITE 224: note = Tnp_P1
  SITE 254: note = Tnp_P2
  SITE 262: note = Tnp_P3
  SITE 263: note = Tnp_P4
  SITE 275: note = Tnp_P5
MHHQPKICAVFGIDIGKSLFHVVGLDTSGAPIQKAKFRRETLLQFFARAAPTLVSMEACPGSQWLARKLKELGHEVRIIPAQFVKPYVKSHKNDIIDAEAIAEAATRPTMRFVGIKEAHQIDLQMLHRVRSRLVKGRTNLICQMRSYCLEHGVALRQGAGVFKLDIVRTIDDPENDLTERARVVLRELQADLLRLEERILSVSTEIKNIADRDETARRLMTIPGVGPLGATAILASIGDPSRFKKARDVAAWLGLVPRQHSTGGKQTLLGIAKRGSSYVRTLLIHGARSVLMHLDRTKDRLGQWADELRGRMHVNKVTVALAAKMARVVWVVLSKPGATYERRLPAGGGA

SEQ ID NO: 17137 - protein, 394 aa, unidentified
  source 1..394: note = protein_118978e
  REGION 4..164: note = RuvC_domain
  SITE 7: note = RuvC_P1
  SITE 59: note = RuvC_P2
  SITE 99: note = RuvC_P3
  SITE 101: note = RuvC_P4
  SITE 104: note = RuvC_P5
  REGION 267..354: note = Tnp_domain
  SITE 275: note = Tnp_P1
  SITE 305: note = Tnp_P2
  SITE 313: note = Tnp_P3
  SITE 314: note = Tnp_P4
  SITE 327: note = Tnp_P5
MKLIGIDIGKNKHFFCIMDKDSGEIVSQPASFSNDKEGFDFLLQKIKSYPNNSVLIGMENTGHYHFALLKYLLDLQYTVALINPKTTDFNRKMQGGITKNDKLDTINICDVLDTPERKKQYRITKVNKFDLYEQKQLTRQHHNLKEELNVYKNRLQKSIDIVFPEFNSLFKSKYGTVYMNILKTFGSAENIANTDIRTIRKCFEIGGRGNRISLTPERLKERARSSIGISSIAEVIQIKHLTAQIELIEEQLTEIDKKIEEFSIQNNSPILSIPGISHFSGTSILAELGDISNYSKPSQIIKFVGVAPLHYESSQFNAQHTAITKKGSKYLRKTLYQIILPVIRHNPVFNKYYQLKISQGKGHRCAQGHCVRKLLRIIYHLLKTNQQFDPQLLR

SEQ ID NO: 17138 - protein, 343 aa, unidentified
  source 1..343: note = protein_81b36d0
  REGION 7..149: note = RuvC_domain
  SITE 10: note = RuvC_P1
  SITE 53: note = RuvC_P2
  SITE 88: note = RuvC_P3
  SITE 90: note = RuvC_P4
  SITE 93: note = RuvC_P5
  REGION 212..301: note = Tnp_domain
  SITE 220: note = Tnp_P1
  SITE 250: note = Tnp_P2
  SITE 258: note = Tnp_P3
  SITE 259: note = Tnp_P4
  SITE 271: note = Tnp_P5
MNEVITIGVDLAKNVFQVHGIDGLGAVIIGRQLRRSQMLPFFKKQPPCLVGMEACATAHHWARQLVALGHAVKLMPPKYVKPYVKRNKNDMADAEAICEAVTRPTMRFVEIKTRDQQSVLMLHRTRQLFVRQRTTLINALRAHLAEFGIVAGVGRNGLERLLKVIEDGEDDRVPAAARDCLLALRDQLEMVKGQVLDADRHILAWHRSSEVSQRLDDIPGVGPLIATALVASVPDPHVFKSGRDLAAWIGLVPKQNSTGGKDRLGHISKAGNRYLRMLLVVGALSVIRRAKQVGYTRRPWLTKLLQRRSTKIAAIALANKIARTAWAMMAHGTFYQEPQSEVV

SEQ ID NO: 17139 - protein, 328 aa, unidentified
  source 1..328: note = protein_38456af
  REGION 4..159: note = RuvC_domain
  SITE 7: note = RuvC_P1
  SITE 60: note = RuvC_P2
  SITE 100: note = RuvC_P3
  SITE 102: note = RuvC_P4
  SITE 105: note = RuvC_P5
  REGION 200..286: note = Tnp_domain
  SITE 208: note = Tnp_P1
  SITE 237: note = Tnp_P2
  SITE 245: note = Tnp_P3
  SITE 246: note = Tnp_P4
  SITE 259: note = Tnp_P5
MIQLGIDVGKSKIDLCLKSDGPEGSKKTKVLPNGPDVAVTVLGWLMKQKISPSEVQVIMEPTGTYHDHLAYGLYDRAIRVVIANPARVRAFAQGMGILTKNDTVDADVLARYGAMRQPEAWLPPSPAIRELKALLSRRDALLQDVNRENNRLEKLLSTRGSAQVELSVRKILQALNGELEAVQALTDDHIDTHPDLKRDMEYLTSIKGVGAAVGSTLLTVLRGNHFRSAEQAAAWLGVVPKEKRSGSSIRGRTRLSKCGPPAVRAKLYMAALVAAKYNPHLKAFYERLVSTGKAKRSALGGVMRKLVHICYSVLMKQQKYDENYTAAA

SEQ ID NO: 17140 - protein, 343 aa, unidentified
  source 1..343: note = protein_3d6dab1
  REGION 6..149: note = RuvC_domain
  SITE 9: note = RuvC_P1
  SITE 54: note = RuvC_P2
  SITE 89: note = RuvC_P3
  SITE 91: note = RuvC_P4
  SITE 94: note = RuvC_P5
  REGION 213..298: note = Tnp_domain
  SITE 221: note = Tnp_P1
  SITE 251: note = Tnp_P2
  SITE 259: note = Tnp_P3
  SITE 260: note = Tnp_P4
  SITE 272: note = Tnp_P5
MKISRVGVDLAKNVFQLHGADAHGKAVWKRKLSRQKWIAALCKTVPADCEVGMEACAGAHHWARVLTKYGYQVKLIPPQFVKPYVKSNKNDANDAEAICEAMSRPNMRFVKMKSVEQQDIQAIHRVRSELMSHRTAKINQIRGLVAEYGLVASLQVSSLRTALPLWLEDADNGLTDRFRSLLNGLWGDLLHLDNRIAELNGEIEVIAKSDPVAKRLQQLRGVGPLVATALIATVGNGDQFSKGRQMAASIGLTPRQCSSGGKERLLGISKRGDAYLRTILIHGARSTIAHAKLKDDRLSVWITDLAKRRHPNIAAVALANKTVRMAWAMMRSESDYDPEIAAA

SEQ ID NO: 17141 - protein, 390 aa, unidentified
  source 1..390: note = protein_025e5da
  REGION 4..160: note = RuvC_domain
  SITE 7: note = RuvC_P1
  SITE 59: note = RuvC_P2
  SITE 99: note = RuvC_P3
  SITE 101: note = RuvC_P4
  SITE 104: note = RuvC_P5
  REGION 265..352: note = Tnp_domain
  SITE 273: note = Tnp_P1
  SITE 303: note = Tnp_P2
  SITE 311: note = Tnp_P3
  SITE 312: note = Tnp_P4
  SITE 325: note = Tnp_P5
MYIVGIDIGKRNHEASIMNAAGKQYGKPICFANSHTGFNKLMDWVKNISGADDVVFGMEATGHYWLALYTHLCHEGYTVHVINAVQSDALRGMYIRQAKNDSRDSFIIAEVIRFGRFCETAVSAPKLHALRELCRHRFWIVDSISDLKRKVIALLDQVFPEYENLFTNTFGKTSLQLLSEYTTPEELLAVDTDKLAETIYTASRGHHGIEKAQEIQNTARNSFGILLASESIALLIRQYIEQIRFVEKQVDRIDTEIARLLSAFDNQLTTITGIGPTLAATILSEIGDIRKFASPGKLAAFAGIDPTMKQSGNFVGSHVHMSKRGSPYLRRAIWLAATIAAFKDPSISVYYQRKRSEGKSHLTALGHVSRKMVNIIFAVLRDNTPYSPAI

SEQ ID NO: 17142 - protein, 324 aa, unidentified
  source 1..324: note = protein_53d3d74
  REGION 8..152: note = RuvC_domain
  SITE 11: note = RuvC_P1
  SITE 52: note = RuvC_P2
  SITE 92: note = RuvC_P3
  SITE 94: note = RuvC_P4
  SITE 97: note = RuvC_P5
  REGION 191..278: note = Tnp_domain
  SITE 199: note = Tnp_P1
  SITE 229: note = Tnp_P2
  SITE 237: note = Tnp_P3
  SITE 238: note = Tnp_P4
  SITE 251: note = Tnp_P5
MNKYKETFGVDISKAVFDVQGSKCGPHQFSNSPNGFRSFLKLLPDDSLVVMEATGYYHYRLSQFLCKNEIAVSVVNPLSVKRFIEMKLSRVKTDKSDAQSICDYGIYNKVPLYNQISAVQSECRQLLSLKSSYLKRRTSTKNKLHGERVLDVPSKLVVRSLLLDKKHIDRELVKIEKRLLLLVKQSSQRELTLLKSIPGIGDKTAVFLIVATDSFRKFSNASQLCSYLGTTPMIKRSGSSVRGRSRISKMGNRNLRNLMFMCSMSAYKHNRSCKAIHDRIVSKGKSSKLALMAVCNKLIHQAFAIVRSGVEYNPDYVSVRKRLI

SEQ ID NO: 17143 - protein, 313 aa, unidentified
  source 1..313: note = protein_1b0a640
  REGION 8..157: note = RuvC_domain
  SITE 11: note = RuvC_P1
  SITE 56: note = RuvC_P2
  SITE 96: note = RuvC_P3
  SITE 98: note = RuvC_P4
  SITE 101: note = RuvC_P5
  REGION 191..275: note = Tnp_domain
  SITE 199: note = Tnp_P1
  SITE 228: note = Tnp_P2
  SITE 236: note = Tnp_P3
  SITE 237: note = Tnp_P4
  SITE 248: note = Tnp_P5
MTDITRFVGIDISKSSFDVCVLPDGRSASFANSAEGIADFLVFIEPLCGIERLVLEPTGGYERHVFAALQAAQLPVARVNAKQVRQFAKACGQLSKTDKIDAFILADYARRMETRIVPQRSSQQGALVDLVRRYRQLSHMIVQEKNRREKQNETLKDWIEEMLHVLLEQRQAVVDAMEACLKADLELARKADILMSLKGIGLRTACFILADLPELGRIGKGQIAKLVGVAPLNRDSGLMRGKRMIAGGRQPVRDALYVAALPAIRFDPAIKAFFMHLKQKGKPGKVALVAVMRKMIIILNAKMRDAYATVLDH

SEQ ID NO: 17144 - protein, 329 aa, unidentified
  source 1..329: note = protein_b335cdd
  REGION 11..162: note = RuvC_domain
  SITE 14: note = RuvC_P1
  SITE 67: note = RuvC_P2
  SITE 107: note = RuvC_P3
  SITE 109: note = RuvC_P4
  SITE 112: note = RuvC_P5
  REGION 203..287: note = Tnp_domain
  SITE 211: note = Tnp_P1
  SITE 240: note = Tnp_P2
  SITE 248: note = Tnp_P3
  SITE 249: note = Tnp_P4
  SITE 260: note = Tnp_P5
MSSPSQQEIHVGIDVSKKTLDVYILPSEGKGGSQGESFVVTNDQEGIDELLRRLAEPGLSPKLVVLEATGRYERLAASSIAAKEIPVAVVNPRQARDFAKAIGKLAKTDKIDAFVLARFARAVEPRASVIPDEEATALRAILARRRQLIEMLVSENNRLKMAREKPLQKRIRSHIKWLDREIERTDSDLDHAIEENSAFKANEALLRCVPGVGKVLSRTLLAELPELGTLTHKRLCVLVGVAPFNRNSGQGRGKREVRGGRAPVRAALYMGALVATRHNPVIKEFYERLLAAGKPKKVALVACMRKLLSILNALMRDRSIWRCPHALTP

SEQ ID NO: 17145 - protein, 405 aa, unidentified
  source 1..405: note = protein_121c72d
  REGION 14..168: note = RuvC_domain
  SITE 17: note = RuvC_P1
  SITE 65: note = RuvC_P2
  SITE 105: note = RuvC_P3
  SITE 107: note = RuvC_P4
  SITE 110: note = RuvC_P5
  REGION 275..359: note = Tnp_domain
  SITE 283: note = Tnp_P1
  SITE 312: note = Tnp_P2
  SITE 320: note = Tnp_P3
  SITE 321: note = Tnp_P4
  SITE 333: note = Tnp_P5
MAVILDQQDIDVFIGLDVGKSGHHAVALNRSGKKLFDKALPNDETRLREILAGLSGHGRILLVVDQPATIGALPVAVARAAGAAVGYLPGLAMRRIADLHPGQAKTDARDAAIIAEAARSMPHTLRSIALDDEMLAELGVLCGFDDDLAAQITATSNRIRGLLTQIHPALERALGPHLDHPAVADLLTRYPTPAALKTAGRGHVRARLKKQAPRAAERLTDAVFAALNEQTVVVIGTSAAGIVLPKLAEQLLSLRHQRDDIAAQVEALVEAHPLYRVLTSMPGVGVRTCARILTEVTSKHFASAAHLASYAGIAPVTRRSGTSIRGEHTSRRGNKKLKRALFLSAFAALHHPPSRAYYDRKRAEGKRHNQALIALARRRSDVLFAMLRDGTLYQDPEPRNLPSAA

SEQ ID NO: 17146 - protein, 350 aa, unidentified
  source 1..350: note = protein_53c749d
  REGION 8..161: note = RuvC_domain
  SITE 11: note = RuvC_P1
  SITE 67: note = RuvC_P2
  SITE 107: note = RuvC_P3
  SITE 109: note = RuvC_P4
  SITE 112: note = RuvC_P5
  REGION 208..295: note = Tnp_domain
  SITE 216: note = Tnp_P1
  SITE 246: note = Tnp_P2
  SITE 254: note = Tnp_P3
  SITE 255: note = Tnp_P4
  SITE 268: note = Tnp_P5
MTRNKQSVGIDISKDSFTACLCTSQKDGSLQYSNVLSFKNEKQGYNQLLRWIRKHHQKETELVYLMEATGVYYESLAYHLNKIKQMVHVVLPNTSKHYFLSLNVKTKTDKIDAKILSRFGVERRHKAWEPPSPLLLELRNLTRYYVQLQEQKTAINNIKHSKEEAYAVQKFILQSNKKLIAQIDKQIELCKQKIEVLIGCNKELKAKVDNILTIKGVGIITIATIIAETLGFAQVRNVKQLVSYAGYDVVQRESGTSIKGKTRISKKGNRYIRNALYFPAMVACRYNPDLKTAYLRIIMKKPSKMIGQVAIQRKLLILIYTLWRNETVFVPGYKKVALPNAAKATQDSLS

SEQ ID NO: 17147 - protein, 321 aa, unidentified
  source 1..321: note = protein_ce9c4c3
  REGION 8..150: note = RuvC_domain
  SITE 11: note = RuvC_P1
  SITE 52: note = RuvC_P2
  SITE 92: note = RuvC_P3
  SITE 94: note = RuvC_P4
  SITE 97: note = RuvC_P5
  REGION 191..278: note = Tnp_domain
  SITE 199: note = Tnp_P1
  SITE 229: note = Tnp_P2
  SITE 237: note = Tnp_P3
  SITE 238: note = Tnp_P4
  SITE 251: note = Tnp_P5
MNKDKEIHGVDISKDVFDVFDHEGVHHQYPNTLKGFRDYFRCLNPNSLVVMEATGYYHYLLAQFLYDQGMAVSVVNPLSVKRFVQMKLSKVKTDKSDAKAIAEYAKVNAVPLYDGKGEDQAESLQLLALMDIYLKQRTQVKNKLHGEKVLGIPSRAVHSSLVRTLKSLDRELEALQSRLLALVKKTQQRQLTNLKSIPGLGDKTVALLIILTDGFTKFENAGQLCNYAGITPTTRRSGSSVRGKSRISKVGNRKLRNLLFLCAFSACKHNKACREMYERITAKGKSKKLALIAVSNKLLKQAFAIAKSGLPYDENYVSKLN

SEQ ID NO: 17148 - protein, 385 aa, unidentified
  source 1..385: note = protein_177fbd6
  REGION 6..136: note = RuvC_domain
  SITE 9: note = RuvC_P1
  SITE 58: note = RuvC_P2
  SITE 98: note = RuvC_P3
  SITE 100: note = RuvC_P4
  SITE 103: note = RuvC_P5
  REGION 265..352: note = Tnp_domain
  SITE 273: note = Tnp_P1
  SITE 304: note = Tnp_P2
  SITE 312: note = Tnp_P3
  SITE 313: note = Tnp_P4
  SITE 325: note = Tnp_P5
MAAIWAGIDAGKTHHHCVVIDESGRRLLSRRVANDEPELLRLLADVLALGDEVTWGIGLADGGAALVIAVLLGHGQRAFYISGRAVNRASEGYRGEGKTDAKDAAVIADQTRIRRDLQPLRTGDEIATDLKLSSPTAPIWSPTAPAPSTASAPSSPASSPRWTGPWASPNAGPLTLLTGYQTPAALRRLGARRLETRLRNRGVRGAGQIAETALEAASSQHTSVPGEKTAARMVHTLATQVIALNQQVAEMDKFIAARFREHRDAEILASLPGLGPILRAEFLAATGGDMATFASPDRLAGFGGVAPAPRDSGKISGNLHRPQRYNRKLQRVFYTSALISIRCCEESRRFYDRKRAEDKRHTQAVVALARRRVNVICALLHDQRR

SEQ ID NO: 17149 - protein, 427 aa, unidentified
  source 1..427: note = protein_dab142a
  REGION 11..176: note = RuvC_domain
  SITE 14: note = RuvC_P1
  SITE 67: note = RuvC_P2
  SITE 107: note = RuvC_P3
  SITE 109: note = RuvC_P4
  SITE 112: note = RuvC_P5
  REGION 276..361: note = Tnp_domain
  SITE 284: note = Tnp_P1
  SITE 314: note = Tnp_P2
  SITE 322: note = Tnp_P3
  SITE 323: note = Tnp_P4
  SITE 334: note = Tnp_P5
MSEEKSLELRVSVDVGYRRHSVAMGLSSGEVLEEFEIDHRPEGFQEFFSRIEKHRNKKNCAVAVAMEGYNGYARPLDSLVRERGYRLYNLNNLKFARFKEIFPGAAKSDRIDARKGLELFQLGDHLPLAKEVLQEVTGTPPENEVLKRLTRRRRRLVNERVRVVNNLQTDLQAVCPGLLEITGEASNQWFLNFLLCADTLPQLARLRRSTLLKIPSVGVKSAAIIEGWQKRSHFSQEVDWVGEMIQEDAKRCLELDEKIKRLEAKIVEVAKGSKIAKTLRSIPGFGAVCTSELAGEIGTIERFASEGSLSLYLGMSTLDNRSGKYQGTKAPKHVNTRAKAAMMIALDRHRKYVPESQRYYEKKRSEGKKHNQAIRALGRHLSRIIYKMLTEEREYEIRPEKGNTKAKVGPRSFVKTQIRRPKISAKS

SEQ ID NO: 17150 - protein, 339 aa, unidentified
  source 1..339: note = protein_73fc51d
  REGION 7..149: note = RuvC_domain
  SITE 10: note = RuvC_P1
  SITE 53: note = RuvC_P2
  SITE 88: note = RuvC_P3
  SITE 90: note = RuvC_P4
  SITE 93: note = RuvC_P5
  REGION 210..296: note = Tnp_domain
  SITE 218: note = Tnp_P1
  SITE 248: note = Tnp_P2
  SITE 256: note = Tnp_P3
  SITE 257: note = Tnp_P4
  SITE 269: note = Tnp_P5
MEHATTIGLDLAKNVLQVHGVNAAGQVVLRRKLRRAAVLEFFAALPPALVGMEACGGAHYWARELTRLGHTVRLMPPAYVKAYVKRGKTDAADAEAICEAVTRPTMRFVPIKTEAQQAGLVELKVRDLLVRQRTQAINPLRSHLAEYGIVAAQGRKVAELIALVRDDDTRLPDLAREALGELVAQIEALEDRIERLDRRMVRHARENETTRRLATIPGIGAIGATALAALVPDPHGFASARHFAAWLGLTPKPHSSGGKERLGRISRQGNSMLRRLLVLGATTCLRHARRSPEAADWATRLLARRPFKVAAVALANKMARIAWALLARGGSYNPSAAAA

SEQ ID NO: 17151 - protein, 330 aa, unidentified
  source 1..330: note = protein_b2989f7
  REGION 8..162: note = RuvC_domain
  SITE 11: note = RuvC_P1
  SITE 59: note = RuvC_P2
  SITE 97: note = RuvC_P3
  SITE 99: note = RuvC_P4
  SITE 102: note = RuvC_P5
  REGION 202..289: note = Tnp_domain
  SITE 210: note = Tnp_P1
  SITE 240: note = Tnp_P2
  SITE 248: note = Tnp_P3
  SITE 249: note = Tnp_P4
  SITE 262: note = Tnp_P5
MERWNVILGVDISKLKLDICCAERELHIKADNCSKGFADFKKWCKTNEIDLKEALIVMEYTGGYEYRFLQFCESKSIAYCRIPGLEIKQSMGMVRGKSDKADSFRIGRYGEEKSDRLVPDKPLDKNILALKQLLSFRKRLVREKAGYESTVKERQHMYEVKKTDTIFRIARTKIKENEKYISELEQEIMKLIKSNEDIWQNYRIITSIKGIGKVNAWMTIAYTENFTSFIDARAYGVYVGVIPFGHTSGTSIKKRDRVSHLANKELKSELNQAAKSAINCDPEIRAYAERKLKNKNYSLVLNNVKFKLILRMFSLVKRGELYVENYRRAA

SEQ ID NO: 17152 - protein, 341 aa, unidentified
  source 1..341: note = protein_6a5c327
  REGION 6..146: note = RuvC_domain
  SITE 9: note = RuvC_P1
  SITE 52: note = RuvC_P2
  SITE 87: note = RuvC_P3
  SITE 89: note = RuvC_P4
  SITE 92: note = RuvC_P5
  REGION 211..296: note = Tnp_domain
  SITE 219: note = Tnp_P1
  SITE 249: note = Tnp_P2
  SITE 257: note = Tnp_P3
  SITE 258: note = Tnp_P4
  SITE 270: note = Tnp_P5
MQIHSIGIDLGKTTFHLVALGASGKVLVKKKFTQKQLLAYTANLQTSLIGLEACSGAHFLGRALRKQGHEVRLIAAQFVKPFVKSNKNDFIDAEAIAEAVERKNMRFVPIKTDDQLDLQAIHRVRDRLVSRRTAVINQIRAFLLERGLVFAKRPAQLKAAMADVLENAEADLTPMMRNLINVLWDEWKIVDRQIEELGDELERISAADAGCTRIRKIPGIGPVVATAIVAAIGNGAAFRKGREFAAWLGIVPRQYSTGGNARLLGISKRGNVYLRKILIHGTRAAVLRIKRDRAPIGAWLDGLDARAHKNIVIVAMANKIARIAWAVLSSGNEYRPATVPA

SEQ ID NO: 17153 - protein, 389 aa, unidentified
  source 1..389: note = protein_6e112c7
  REGION 4..161: note = RuvC_domain
  SITE 7: note = RuvC_P1
  SITE 59: note = RuvC_P2
  SITE 99: note = RuvC_P3
  SITE 101: note = RuvC_P4
  SITE 104: note = RuvC_P5
  REGION 265..351: note = Tnp_domain
  SITE 272: note = Tnp_P1
  SITE 302: note = Tnp_P2
  SITE 310: note = Tnp_P3
  SITE 311: note = Tnp_P4
  SITE 324: note = Tnp_P5
MIYAGIDVAKNKHDCFITNSDGEVLFRAFTIANNLDGFNELYHKIESVMEDLTKVKVGQATGHYSYNLRYPIDKGLAAYVINPLHTNLYRKSLSLRQTKTDKVDARTIASMLMSDVNLKSYSDTSYHNEELKSLTRYRFDKVKERAKLKTSVSRLICILFPKLEKLVPTLHMASVYALLSEFPSAKHVANAHLTRLSNLLIEASKGRYGKDTAITFREAARSSIGSNMPAKSLELKHTIKLIQELNSEIDEIENEIEIIMDEITSPILSIPEINYRMGATTIAEIGVFNRFGSPDKILAYAGFSPSTYQSGQLDGAYSHMEKRGSRYLRYALYNAAKYVCHWDPAFAEYLAKKRSKVKHYHVAIPHAVKKLVRVIYHLEKTKQHYIKAS

SEQ ID NO: 17154 - protein, 387 aa, unidentified
  source 1..387: note = protein_05ecb7e
  REGION 4..159: note = RuvC_domain
  SITE 7: note = RuvC_P1
  SITE 57: note = RuvC_P2
  SITE 98: note = RuvC_P3
  SITE 100: note = RuvC_P4
  SITE 103: note = RuvC_P5
  REGION 262..347: note = Tnp_domain
  SITE 269: note = Tnp_P1
  SITE 299: note = Tnp_P2
  SITE 307: note = Tnp_P3
  SITE 308: note = Tnp_P4
  SITE 320: note = Tnp_P5
MYFVGIDISKFKHDCAVIDELGDVVTPSWSFSNDCEGFSLLKELLANLNSDIKIGFESTGHYGQNLKLFLESNSFTFMEFNPLLISRFVHSKSLRKTKTDSIDALIIAQYLMTVEYKPYPASFYHMDKLKSLTRFRDSLIRQRSRQLVELTNVLDKIFPEFKSFFKGRFSVTAMYILANYSTPEKISNMNSRSYDALRRLSRGKFTMSSFVQLKMLARDSVGHCNDYLLHEMGVLLDIYNQMDSRIQELDEQITACIKGIDPPILSIPGIGALSAAVILSEYGDMNTFDSPAKLLSFAGLEPGYYQSGQSEHTGRMVKHGSSHLRCALMNCCLPLVKNEPVFAEYYAKKRTEGKPHRVAITHVAKKLLRVIYTLQTKGIPYNADLIR

SEQ ID NO: 17155 - protein, 311 aa, unidentified
  source 1..311: note = protein_a24241c
  REGION 1..83: note = RuvC_domain
  SITE 21: note = RuvC_P3
  SITE 23: note = RuvC_P4
  SITE 26: note = RuvC_P5
  REGION 187..274: note = Tnp_domain
  SITE 195: note = Tnp_P1
  SITE 225: note = Tnp_P2
  SITE 233: note = Tnp_P3
  SITE 234: note = Tnp_P4
  SITE 247: note = Tnp_P5
MCVLNPLQTSSMRKNNVRKTKTDKVDTFVIAKTLIMQDSPRYITLENLDYIELKEFGRFRQKLVKQRTRLKIQLTSYVDQAFPELQYFFKSSLNQNSVYALLKEAPTPNAIASIHMTYLAHLLEVASHGHFGKEKARELGVLAQKSVDLNDSSLSIQISQTIEQIKLLDRQLFHTELEMANLVTCLNSVIMTIPGIGSVNCGMILGEIGDIHRFSEPKKLLAFAGLDLSVHQSGNFQAAKTRMSKRGSKVLRYALMNAAHNVVKNNATFKAYYNAKKAEGRSHYNALGHCAGKLVRVIWKMLTDNVEFNLD

SEQ ID NO: 17156 - protein, 345 aa, unidentified
  source 1..345: note = protein_52de529
  REGION 5..152: note = RuvC_domain
  SITE 8: note = RuvC_P1
  SITE 55: note = RuvC_P2
  SITE 92: note = RuvC_P3
  SITE 94: note = RuvC_P4
  SITE 97: note = RuvC_P5
  REGION 212..310: note = Tnp_domain
  SITE 220: note = Tnp_P1
  SITE 250: note = Tnp_P2
  SITE 258: note = Tnp_P3
  SITE 259: note = Tnp_P4
  SITE 271: note = Tnp_P5
MEQYAGLDVSLESTSVCVVDSTGRVIREAKVLSEPEALIGWFQEHGTPMTRIGLEAGPLSQWLYAAMENAGLPVELLETRHVRAAFKAMTIKTDRKDALGIAHLMRMGWFRPVHCKSVPAQEVRALLTARKLLQNKRIDIEMSLRGILRGFGLKVGPTTPKNFEGRIHELVEGHTVLSQIAHAMLTARAAIMKEFKAIESRLLAQSRRDERVRRLMSTPGVGAFTALTFVAAIDDPERFGSSRMVGAHFGLTPRKYQSGETDVTGRISKVGDHAVRVALYEAANIILTRSAKTSALKSWAQALAKRAGMKKAKVALARKLAVVLHQMLKSGSRFSLTGVPQSVAA

SEQ ID NO: 17157 - protein, 290 aa, unidentified
  source 1..290: note = protein_572be28
  REGION 1..98: note = RuvC_domain
  SITE 37: note = RuvC_P3
  SITE 39: note = RuvC_P4
  SITE 42: note = RuvC_P5
  REGION 160..245: note = Tnp_domain
  SITE 168: note = Tnp_P1
  SITE 198: note = Tnp_P2
  SITE 206: note = Tnp_P3
  SITE 207: note = Tnp_P4
  SITE 219: note = Tnp_P5
MEACAGAHYWAREVGKLGHSVRLIPPVYVKPFVKRQKNDAADAEAICEAAQRPSMRFVPVKTEEQQANGVVFRARDLLVHQRTQCVNALRGHLVEYGYVFPKGIRHVSTLVAHVEDPQSSLPESARIILKVLVDTFTALEAQITELDANINQRSKADPTARRLMTIPGVGPIASTAITALVPAAEGFRTGRDFAAWLGLTPLQKSTGGKQKLGAISKRGERTIRRLLILGASAVVRQASRRGAPTGSWLAQMLTRKPRMLVTVALANKMARVVGALLVKGGVYRTPVAAA

SEQ ID NO: 17158 - protein, 412 aa, unidentified
  source 1..412: note = protein_1db6bc1
  REGION 4..160: note = RuvC_domain
  SITE 7: note = RuvC_P1
  SITE 57: note = RuvC_P2
  SITE 97: note = RuvC_P3
  SITE 99: note = RuvC_P4
  SITE 102: note = RuvC_P5
  REGION 274..361: note = Tnp_domain
  SITE 282: note = Tnp_P1
  SITE 312: note = Tnp_P2
  SITE 320: note = Tnp_P3
  SITE 321: note = Tnp_P4
  SITE 334: note = Tnp_P5
MNAVGIDVSKGKSMVAVVRPFGELVVKPYEVRHTSSELSELASTLKSLKGETRVVLEHTGRYYEPVAQMLHDAGIFVSAVNPLLIKEYGNNSLRKVKTDKADSMKIARYGLDNWCDLRQHTSMDTIRYQLKTANRQYGLYTKNKTAFKNNLIALLDQIYPGVNALFDSPVRADGSQKWVDFAASFWHVDCVRSMSHSGFAERYRKWCKRHGYNFSAAKAFEIHREAKELITMLPKNALSKVMVQEAITQLNTVSKTVEVLRAEMNHLAAQLPEYPVVMALYGVGNSLGPQLMAEIGDVRRFAHKGSLTAFAGVDPGANQSGTYEAKSTRSSKRGSPELRKALFILMTVLLQKAPPDDPVFQFLNKKRSEGKPYHVYMTAGCNKFLRIYYGKVKEFMNTLDIPVDMDSTGLSQ

SEQ ID NO: 17159 - protein, 411 aa, unidentified
  source 1..411: note = protein_381aea3
  REGION 9..168: note = RuvC_domain
  SITE 12: note = RuvC_P1
  SITE 65: note = RuvC_P2
  SITE 105: note = RuvC_P3
  SITE 107: note = RuvC_P4
  SITE 110: note = RuvC_P5
  REGION 276..362: note = Tnp_domain
  SITE 284: note = Tnp_P1
  SITE 315: note = Tnp_P2
  SITE 323: note = Tnp_P3
  SITE 324: note = Tnp_P4
MGEALRLFVGDDWAEAHHDVELMDAAGRRLAKARLPEGVVGMARLHAMIGEQLGDEADQAEVVVGIETDRGPWVLALVAAGYTVLAVNPLQAARYRERLAVSGAKSDAADAHMLADMVRTDSHQLRPVAGDSAQAEAVKVVTRAHKTLIWERGRHTQRLRYALREYFPAALEAFEDLAAPDTLELLAKAPDPESAARLTITQVSAALKKAGRYKIAEKAARIQAALRTEHLGQPAAVTAAYAASARALIAVLGTVNQQVIAMHKEVEAHFGRHPAAEIILSQPGLGPILGARVLAEFGDAPDRYVTAKARKNYAGTSPITRASGKRKVVAARFVHNDRLIDALLMQASIAITKSPGARAYYERQRGRDANYNTALRQVANRLVGILHGCLKTGTLYDEATAWSHHLQSAVA

SEQ ID NO: 17160 - protein, 341 aa, unidentified
  source 1..341: note = protein_844a76e
  REGION 6..148: note = RuvC_domain
  SITE 9: note = RuvC_P1
  SITE 52: note = RuvC_P2
  SITE 87: note = RuvC_P3
  SITE 89: note = RuvC_P4
  SITE 92: note = RuvC_P5
  REGION 212..297: note = Tnp_domain
  SITE 220: note = Tnp_P1
  SITE 250: note = Tnp_P2
  SITE 258: note = Tnp_P3
  SITE 259: note = Tnp_P4
  SITE 271: note = Tnp_P5
MEITTLGIDLAKSVFQLHGVDRDGAIVLQKKVRRGALLDILSRLEPCLIGMEACPSSHFWAREIAALGHDVRLIPPAYVKPYVKRQKNDAADAEVICEAVTRPNMRFVPVKTEDQQAVLVLHRSRDLLMRQRTMILNAIRAHLAEFGMITAQGPRKVVELARRLSDPDDGLDLPAVARSALLSLAAQLESLADEIGKIERHLMAWHRQNQASQRLETIPGVGIITATALAASVPDPSVFKSGRQFAAWLGLVPRQNSSGGKDRLGHVSKMGNGYLRRLLVVGATSVTRRAPTTDSRTGAWVRSLLERKPTRLVTVAIANKTARTAWALLAKGESYRAAPAI

SEQ ID NO: 17161 - protein, 346 aa, unidentified
  source 1..346: note = protein_c47d168
  REGION 10..170: note = RuvC_domain
  SITE 13: note = RuvC_P1
  SITE 69: note = RuvC_P2
  SITE 109: note = RuvC_P3
  SITE 111: note = RuvC_P4
  SITE 114: note = RuvC_P5
  REGION 210..296: note = Tnp_domain
  SITE 218: note = Tnp_P1
  SITE 248: note = Tnp_P2
  SITE 256: note = Tnp_P3
  SITE 257: note = Tnp_P4
  SITE 270: note = Tnp_P5
MASRLLKQVVGIDVAQKELVVSIGKMDEQAVITVYANKIFPNNEKGFANLEVWINKQSIPQYPLRYVMEATGVYHERLAYYLAGKGYAVSIVMPNKISNFFKTLEIKTITDKSMSFAIAMFGLEKKLDNWVQPKRVFRTLRQITREREQLIAERTMIKNQLHAEQSEAFPGEDTIRRMMDRIKMIGEQLKEILTEIRTAVAQDKHLKQTLATITTIPGVGLLTATVIIAETNGFELIRSKKQLTSYAGLDVREKESGSSVKGKPKISKRGNKHLRKAMHLPALAAIRHSERYKAIFVRIVSRNSVKMKATVAVQRKLLEMVYTIYKTNKPFEKDYLQQNAHISENS

SEQ ID NO: 17162 - protein, 348 aa, unidentified
  source 1..348: note = protein_38d44a5
  REGION 9..151: note = RuvC_domain
  SITE 12: note = RuvC_P1
  SITE 55: note = RuvC_P2
  SITE 90: note = RuvC_P3
  SITE 92: note = RuvC_P4
  SITE 95: note = RuvC_P5
  REGION 214..304: note = Tnp_domain
  SITE 222: note = Tnp_P1
  SITE 252: note = Tnp_P2
  SITE 260: note = Tnp_P3
  SITE 261: note = Tnp_P4
  SITE 273: note = Tnp_P5
MNATRKTAVGVDTAKNVFQVYTVEQETGEVINKQLKRAQFLEWFANRAPCLVGMEACGGSQHWARKLQELGHEVKLMSGKMVKAFVCGNKNDAADARAIYMATQQPEVKAVAVKSEGQQAVLAMHRIRQQLVKVRTAQINELRGLLGEYGEVFGQGRKAFDAGVKAALERLAERLPAALIDTLRDQWNELRRLDERIARIERSLLEWMRQDRGAKAISAIPGVGLLTATAAVAAMGDAKAFRSGREFAAWIGLIPGQTGSGGKVRLLGMSKRGDTYLRTLLIHGARAVLQHAKTPSPWLQQLSQRRPPNVVIVALANKIARTIWAVLAHDRAYDKDHVSLRPLAATAA

SEQ ID NO: 17163 - protein, 320 aa, unidentified
  source 1..320: note = protein_f7878bb
  REGION 8..163: note = RuvC_domain
  SITE 11: note = RuvC_P1
  SITE 56: note = RuvC_P2
  SITE 96: note = RuvC_P3
  SITE 98: note = RuvC_P4
  SITE 101: note = RuvC_P5
  REGION 195..279: note = Tnp_domain
  SITE 203: note = Tnp_P1
  SITE 232: note = Tnp_P2
  SITE 240: note = Tnp_P3
  SITE 241: note = Tnp_P4
  SITE 252: note = Tnp_P5
MSASSVVVGIDVAKAHVDVAVLGAKFDAQRFDNQAEGHSALIAALKPLEVALVVMEATGGYETELACALQAAGLPVAVVNPRQARDFAKSMGRLAKTDAVDARMLAEFAAVLLRRDDLARFLRPLAEPQQQWLAALVTRRRQLLAMLLAERQRLQITPKGLHPSIEAIMAAIQAQLDDIEAQTVGHVREHFTELDRLLQSASGIGPVASATLVAELPELGRLNRREIAALVGVAPMANDSGASRGRRRIQGGRFDVRRVLYMAALTASRRNPVIKAFYERLIAAGKCPKVALVASMRKLLTTLNAMVRTNKPWDNSLHGA

SEQ ID NO: 17164 - protein, 338 aa, unidentified
  source 1..338: note = protein_64d1e32
  REGION 6..152: note = RuvC_domain
  SITE 9: note = RuvC_P1
  SITE 53: note = RuvC_P2
  SITE 91: note = RuvC_P3
  SITE 93: note = RuvC_P4
  SITE 96: note = RuvC_P5
  REGION 211..298: note = Tnp_domain
  SITE 219: note = Tnp_P1
  SITE 249: note = Tnp_P2
  SITE 257: note = Tnp_P3
  SITE 258: note = Tnp_P4
  SITE 270: note = Tnp_P5
MTIVYIGIDLAKNVFAVHGVDQAGKPALVRPSVPRGRLHELIASLPACTVAMEACSGAHHWARLFAQHGHTVRLIAPKFVAPYRMSGVRGKNDAADAAAICEAVQRPTMRFVPPKSLEQQSQLMVHRARQGYVENRTACINRIRGLLSEFGHVLETKADTVRRQACALLEELPGWANTVIGDLLSELHHLDERIAGYDRHIQAIVKEDARAQQLMQLRGVGPTTATTIVAMIGSGHEFRCGRQFAAWVGLTPGQYSSGGKTRLGRITKAGDAYLRTLLILGAREVLAAAKNKDDSISRWAMALEARCGYWKAVVAIAAKNARMAWAVLARGESFKMPA

SEQ ID NO: 17165 - protein, 401 aa, unidentified
  source 1..401: note = protein_8998724
  REGION 4..160: note = RuvC_domain
  SITE 7: note = RuvC_P1
  SITE 57: note = RuvC_P2
  SITE 97: note = RuvC_P3
  SITE 99: note = RuvC_P4
  SITE 102: note = RuvC_P5
  REGION 274..360: note = Tnp_domain
  SITE 281: note = Tnp_P1
  SITE 311: note = Tnp_P2
  SITE 319: note = Tnp_P3
  SITE 320: note = Tnp_P4
  SITE 333: note = Tnp_P5
MNAVGIDVSKGKSMVCVMRPFGEVVLEPFEVLHTAQSLNDLAGKLKALDGETRVVMEATGNYHKPVAFVLHDAGLFVSVVNPVLIHDYDNNSLRRVKTDRKDAVKIANYTLDKWTRLRQYLPEDDTRLALKNCYRQYQQAVAVRTMLKNNLISSLDLTFPDANKLFSSPAKSNGCEKWVDFIGDFWHSECVSSLSSDAFAKKYLKWCQKHGYNFTRSKSDTIYACAVNAASLPKSPTSKLLIQQQVAQLKAVSQSVAAFQQEMLRLSQQLPEFDTVMEMYGVGPSLGPQLMAEIGDVRRFSSKKSLIAFAGIEPQPNDSGKIVGNDSGISKVGSAVLRRTLFLIMTVILKTQPQDEPVFQFMNKKRSEGKPYKVYMMASANKFLRIYYARVKAVMDSKHSK

SEQ ID NO: 17166 - protein, 357 aa, unidentified
  source 1..357: note = protein_cf112c7
  REGION 6..162: note = RuvC_domain
  SITE 9: note = RuvC_P1
  SITE 67: note = RuvC_P2
  SITE 105: note = RuvC_P3
  SITE 107: note = RuvC_P4
  SITE 110: note = RuvC_P5
  REGION 210..298: note = Tnp_domain
  SITE 218: note = Tnp_P1
  SITE 249: note = Tnp_P2
  SITE 257: note = Tnp_P3
  SITE 258: note = Tnp_P4
  SITE 271: note = Tnp_P5
MKKLFIGIDFSKEKLDATIILACGMNEIGSREYGCFPNNNTGYRKLCNWVKTNAWDTISGEWLFCGEDTGSCSIGLSKWLYGKGYDIWIENAYNIKHSSGIQRVKNDKADSAIIAEYAWRQQDKAVPFEPLNESLAQLREVFLYRHKLVGQRVAMELRKEDKSQSNKSKAISFINRKSKHLIDEINKAIAECDKMIDNIIEADEELKENYAIITSIKGVARQNATCMLVYTNNFKKFGYDPRKIACYYGVAPFGKQSGTSVNTPAHTSHFANKLIKSLLGQAAHIAKIYNPEIRDYYQRLINKGKKPQVALNNVKNKLIRIIVALVRKKVPYDQNTYKYYEEREVMKEKKNEKLIYC

SEQ ID NO: 17167 - protein, 307 aa, unidentified
  source 1..307: note = protein_2b8b1f2
  REGION 1..76: note = RuvC_domain
  SITE 15: note = RuvC_P3
  SITE 17: note = RuvC_P4
  SITE 20: note = RuvC_P5
  REGION 180..267: note = Tnp_domain
  SITE 188: note = Tnp_P1
  SITE 218: note = Tnp_P2
  SITE 226: note = Tnp_P3
  SITE 227: note = Tnp_P4
  SITE 240: note = Tnp_P5
MQTSHLRKANIRDAKNDNLGSLNIAKSLIFAKLNFISEKNINCFSLKKLTRFRSSLIKQRSKAKIQLTSLLDLLFPELQYLFKSKIHSKAIYSLLKKYPSAEEIAALKDDKISNLLYASSKGHFKKEKSIELKSLAKTTVGIKDTSISLHVIQLIELIELYDKQIKDIVTKIADTVDKLDTKLLSVPGISIIACAIILGETNNFNNFSDSTKLLAFAGLDPKIRQSGNFNASSCRMSKKGSPYLRYALIFTAWNIVRHSEKFNKYYCLKRSQGKSHYNSLGHVAHKLVRVIFTLIKKNIVYQEENLE

SEQ ID NO: 17168 - protein, 322 aa, unidentified
  source 1..322: note = protein_e64ae98
  REGION 9..157: note = RuvC_domain
  SITE 12: note = RuvC_P1
  SITE 56: note = RuvC_P2
  SITE 96: note = RuvC_P3
  SITE 98: note = RuvC_P4
  SITE 101: note = RuvC_P5
  REGION 195..279: note = Tnp_domain
  SITE 203: note = Tnp_P1
  SITE 232: note = Tnp_P2
  SITE 240: note = Tnp_P3
  SITE 241: note = Tnp_P4
  SITE 252: note = Tnp_P5
MSQPNPLCVGIDVSKATLDIAASSYIEQFTVSNNDDGFGLITAELRKHAVSLVLLEATGGLEAAVACSLQAEGFDVVVINPRQARDFARAMGYLAKTDRIDARVLAQMADVINRHPERGRFIRALPDAERQTLAAMVVRRRQLIAMLVAERNRLHPAHPQSRESINIIIKALVDELARIDAGMNRHIETHFSELAERLSSIKGVGTMTTAALLAEVPELGSLSRREISALVGVAPVNRDSGTMRGRRTIFGGRAGVRTALYMAALVATRFNPVVKAFYMRLLEAGKPKKVALVACMRKLLTILNAMLRKNEEWDESYHHVAS

SEQ ID NO: 17169 - protein, 391 aa, unidentified
  source 1..391: note = protein_cafa773
  REGION 4..160: note = RuvC_domain
  SITE 7: note = RuvC_P1
  SITE 59: note = RuvC_P2
  SITE 99: note = RuvC_P3
  SITE 101: note = RuvC_P4
  SITE 104: note = RuvC_P5
  REGION 264..351: note = Tnp_domain
  SITE 272: note = Tnp_P1
  SITE 302: note = Tnp_P2
  SITE 310: note = Tnp_P3
  SITE 311: note = Tnp_P4
  SITE 324: note = Tnp_P5
MFLLGIDIAKLNHVASCINSSTNEVIFSNFKFKNDFKGFSALLDKIKSLDVKNLIIGLESTSHYGENLINFLFKQHFKVALINPLQTSHLRKANIRDAKNDRLDSLNIARSLIFGKLNFVSEKNIDCFSLKKLTRFRSNLIKQRSKAKIQLTSLLDLLFPELQYLFKSKIHSKTIYTLLKKYPSAEEIAALKDDEISNLLYASSKGHFKREKSIELKSLAKTTVGIKDTSVSLHVIQLIELIELFDRQIKDIVTKITDTVNKLDTKLLSVPGINIIACAIILGETNNFDNFSNATKLLAFAGLDPKIRQSGNFSATSCRMSKKGSPYLRYALIFTAWNTVRHSEKFNKYYCLKRSQSKSHYNALGHVAHKLVRVIFTLIKKDISYQEEKLE

SEQ ID NO: 17170 - protein, 452 aa, unidentified
  source 1..452: note = protein_81c7f83
  REGION 26..185: note = RuvC_domain
  SITE 29: note = RuvC_P1
  SITE 84: note = RuvC_P2
  SITE 124: note = RuvC_P3
  SITE 126: note = RuvC_P4
  SITE 129: note = RuvC_P5
  REGION 300..394: note = Tnp_domain
  SITE 308: note = Tnp_P1
  SITE 338: note = Tnp_P2
  SITE 346: note = Tnp_P3
  SITE 347: note = Tnp_P4
  SITE 360: note = Tnp_P5
MPAGKDKNMQYQKVLKMLENTPYLSVGLDVGADFTWMSIMLPNSTLTGKPFKIVHSDPQSRELAVTKIKEAQKAYSLESRCFLESTGIYHIPLLCFLRDKGFDCSVINPIITKNSTNMNVRKLHNDKFDSKKAAKVGLDASLKTSVIPDDEVIDLRNLVRDYYYFKDLQSAVILKLTAELKVSFPAYRKVFSKVTTQTSLKLLDAYPLAQELLAAPKETVVEMIRSTARFGEKYALAKYDALHDAAEDAAVFGRALQSNALRIRLYIKLYREYQEHLDSMLEELHKAVERLEGTPVRGRISLLQTLPGVGFLSAVVLIAEMGSFDLFSSPKKLYAYFGMDPGVNDSGKFHGDRVHMSKRGSSLARRILHMAAINNLKVDKAANAPVNPVIYDYYIRKCAGKKKIVAVGAVMHKICNTIFAMLRDNKPFELITPEEHCKRYAAEHSGTMNAAA

SEQ ID NO: 17171 - protein, 289 aa, unidentified
  source 1..289: note = protein_6a3d590
  REGION 2..93: note = RuvC_domain
  SITE 33: note = RuvC_P3
  SITE 35: note = RuvC_P4
  SITE 38: note = RuvC_P5
  REGION 158..243: note = Tnp_domain
  SITE 166: note = Tnp_P1
  SITE 196: note = Tnp_P2
  SITE 204: note = Tnp_P3
  SITE 205: note = Tnp_P4
  SITE 217: note = Tnp_P5
MEHTHWARELQAMGYKVRLIPPAYVKPFVKRHKNDAIDAEAICEAAQRPGMRFVAVKSEEQQAAGLVFRTRDLAVRQRTQLINAIRGHLAEYGWVAPRGTAHMAMLADLLDEEEMASSLPEAARPMFALMVDMLGELEKRISVLDREIARRAKEDEAPRRLMTMPGIGPIAATAIIALAPPIETFTKGRDFAAWLGLAPRQHSTGGKQKLGSISKMGERTIRRLLIIGGSSMVRSACRHGAPAGSWLERMLARKPRMLVSVALANKMAHMVWALLTKNEDYRAPAAVTA

SEQ ID NO: 17172 - protein, 347 aa, unidentified
  source 1..347: note = protein_6382079
  REGION 7..147: note = RuvC_domain
  SITE 10: note = RuvC_P1
  SITE 53: note = RuvC_P2
  SITE 88: note = RuvC_P3
  SITE 90: note = RuvC_P4
  SITE 93: note = RuvC_P5
  REGION 210..297: note = Tnp_domain
  SITE 218: note = Tnp_P1
  SITE 248: note = Tnp_P2
  SITE 256: note = Tnp_P3
  SITE 257: note = Tnp_P4
  SITE 269: note = Tnp_P5
MDQIIRIGMDTSKHVFQLHGVNAAEQPVLRKKMRRKEMVDFFAKCPPTVVAIEACGASHHWARLLRELGHEVKLIAPQLVKPYVKRGKNDAADAEALCEAMSRPTMRFVAVKSAEQQAALMLVGMRERAVAARTQLANTIRGYAAEFGLTAAKGVSHIPLLLERIMVDESVPALARDLFVSLADEFAQLKERLKEIEANLLAWYRSNECCRRLATIPGVGPIGAILLVMKAPAPEQFVSGRQFAAWMGLTPRDHSTAGKVRHGVITRAGDETLRKTLVVGATSLLRQVRAGKGRNASPWLIELLKRKPPKLVAVALANKIARIAWKMMMAGGTYKNNAAPPAMACAA

SEQ ID NO: 17173 - protein, 371 aa, unidentified
  source 1..371: note = protein_9f295db
  REGION 8..157: note = RuvC_domain
  SITE 11: note = RuvC_P1
  SITE 61: note = RuvC_P2
  SITE 100: note = RuvC_P4
  SITE 103: note = RuvC_P5
  REGION 222..307: note = Tnp_domain
  SITE 230: note = Tnp_P1
  SITE 260: note = Tnp_P2
  SITE 268: note = Tnp_P3
  SITE 269: note = Tnp_P4
  SITE 281: note = Tnp_P5
MGDGIRFVGLDVHKRQTVVALADSGREGEVRHYGAVETDRSSIEKLARKLARGGKPLRFCYEAGPCGYGIQRWLTGLGHDCEVVAPSLIPCRPGERVRTDRRDAIKLARLHRAGELTAVWVPEPAHEAMRDLVRARAVAVYAVRRARQQLSGFLLRHDRIYSRKAWTGAHRRWLAELKFEHAAQRIVLEDYINAVGAAEQRRDGLTEQIRELLPSWSLAPIVEAVQALRGVAAIVAIIIVAELGDPRRFDSPRQLMAYLGLVPSEASSGEKVYRGGITKAGNRTARRALIEAAWTYRFPARRSKHLLARCETVPPAIQAIAWKAQLRLSARYRKLVARGKLPTVAVTAVARELVGFIWAIARELPAIPARA

SEQ ID NO: 17174 - protein, 372 aa, unidentified
  source 1..372: note = protein_8d218cb
  REGION 33..174: note = RuvC_domain
  SITE 36: note = RuvC_P1
  SITE 79: note = RuvC_P2
  SITE 114: note = RuvC_P3
  SITE 116: note = RuvC_P4
  SITE 119: note = RuvC_P5
  REGION 238..324: note = Tnp_domain
  SITE 246: note = Tnp_P1
  SITE 276: note = Tnp_P2
  SITE 284: note = Tnp_P3
  SITE 285: note = Tnp_P4
  SITE 297: note = Tnp_P5
MDAPTRAGIDVPKWKCQQLLEPKGASTMKITTAGIDLAKNVFQVHAVDEHGKVAWRKQLRRDQMTAFFVNLPPCLIGMEACGSAHHWARTLQGFGHTVRLMSPQFVKLYVKSNKNEVADAEAICEAVTRPHMRFVPVKSVEQQAVFSLHRARQGFVIARTAQANQIRSLLGEFGLLIPKGICHVAKQVPELLEDASNQLPGTFRRLIARLTEHLKDLDKLVDEFEDQIKAWHRSSELSLRLEKIPGIGPLGASALVASIADANSFDNGRQLSAWLGLVPRPHSSGGKPTLLGISKRGDVYLRTLLIHGARSAIVAAQRKVVNTNVWLAGLLNRRHPNVAAVALANKNVRTVWALLAHGREFRPNYVPPQLAA

SEQ ID NO: 17175 - protein, 302 aa, unidentified
  source 1..302: note = protein_d6507dd
  REGION 3..108: note = RuvC_domain
  SITE 12: note = RuvC_P2
  SITE 47: note = RuvC_P3
  SITE 49: note = RuvC_P4
  SITE 52: note = RuvC_P5
  REGION 170..255: note = Tnp_domain
  SITE 178: note = Tnp_P1
  SITE 208: note = Tnp_P2
  SITE 216: note = Tnp_P3
  SITE 217: note = Tnp_P4
  SITE 229: note = Tnp_P5
MSIQPPSVVVMEACGSASYWAREMVKLGHEAKLIAPQYVRPFVKRQKNDAADAEAIVVAAQRPEMRFVEPKSEDQQACAVLFRTRERLLHQRTELVNALRSVLYEYGHVFPKGIAHIKRIEAVLVTPNSDLPQLVREECQDLTDQISEKTARIDAKTKKAKKLSLVTDTARRLQTMPGVGPQTALAISGFAPPMESFKRGRDFAAWLGLVPRQYTSGGKERLGRISKAGQTDIRSLLIIGAMSRLTCLARKKIVEGSWLARMLLRKPLMLVAIALANKMARAIWVIMTKKEDYRDPAQAVAA

SEQ ID NO: 17176 - protein, 401 aa, unidentified
  source 1..401: note = protein_4855543
  REGION 13..167: note = RuvC_domain
  SITE 16: note = RuvC_P1
  SITE 64: note = RuvC_P2
  SITE 104: note = RuvC_P3
  SITE 106: note = RuvC_P4
  SITE 109: note = RuvC_P5
  REGION 274..359: note = Tnp_domain
  SITE 282: note = Tnp_P1
  SITE 312: note = Tnp_P2
  SITE 320: note = Tnp_P3
  SITE 321: note = Tnp_P4
  SITE 333: note = Tnp_P5
MHGLPERDYKVWLGLDVGKGEHHACALDRAGKRVHDKPLPQDEARLRALFDSLAVHGPVLVIVDQPASIGALPVAVARAAGLDVAYLPGLAMRRIADLHPGNAKTDARDAYVIAEAGRTMPHTLRRVDLNDEALADLEVIVGFDDDLAGEVTRVANRIHGLLTQIHPALERALGPRLQHKAVLELLARFGGPTGLRAAGRRRLLAVARPRAPRSYERIVNDIQTALDQQTVLVPGTKAAEVVLPKLAGQLADLLQQRADAAAQVEEMLDAHPLSQVLISMPGIGIRTAARILLEVGDGSAFPTPGHLAAYAGLAPVTRRSGSSIRGEHPSRSGNKNLKRALFLSAFAALHDPTSRAYYDRKRAQGKRHNAALICLARRRCDVIYAMLRDGTLYHSPAPAAA

SEQ ID NO: 17177 - protein, 344 aa, unidentified
  source 1..344: note = protein_e1393b4
  REGION 7..148: note = RuvC_domain
  SITE 10: note = RuvC_P1
  SITE 53: note = RuvC_P2
  SITE 88: note = RuvC_P3
  SITE 90: note = RuvC_P4
  SITE 93: note = RuvC_P5
  REGION 213..298: note = Tnp_domain
  SITE 221: note = Tnp_P1
  SITE 251: note = Tnp_P2
  SITE 259: note = Tnp_P3
  SITE 260: note = Tnp_P4
  SITE 272: note = Tnp_P5
MLQASTIGLDIAKNVFHAHGADARGAMVFSRKLTRGKLLDFFAGQAPCIVALEACGGAHHWARELQAMGHEVRLIPPAYVKPFVKRSKNDAVDAEAICEAVQRPGMRFVAVKSEEQQAAGLVFRTRDLAVRQRTQLINAIRGHLAEYGWVAPRGTAHMTMLADLLDDAEMASSLPEAARPMFKLMVDMLAELTDRIAVLDREIARRAREDEAARRLMTIPGIGPIAATAILALAPAVETFRKGRDFAAWLGLAPRQHSTGGKQRLGSISKMGERTIRRLLIIGGSSMVRSACRHGAPAGSWLERMLARKPRMLVSVALANKMARMVWALLTKKEDYRAPAMVAA

SEQ ID NO: 17178 - protein, 321 aa, unidentified
  source 1..321: note = protein_551ae26
  REGION 4..148: note = RuvC_domain
  SITE 7: note = RuvC_P1
  SITE 52: note = RuvC_P2
  SITE 92: note = RuvC_P3
  SITE 94: note = RuvC_P4
  SITE 97: note = RuvC_P5
  REGION 191..278: note = Tnp_domain
  SITE 199: note = Tnp_P1
  SITE 229: note = Tnp_P2
  SITE 237: note = Tnp_P3
  SITE 238: note = Tnp_P4
  SITE 251: note = Tnp_P5
MTYVGIDVSKATFVVAYSSGKTNRTKTFKNTAKGVHEFIQTISPATHHCVLEATGNYSSLLVYLLSEAGITVSLENPLKIKNFARVMLTVTKTDEIDARLIAMYGEKMQPAPYKLRSNSILVLKQKRTVLRQLKKQLVATRNLKGSMEVLPFLDPKCKKTIEKTIAFLEKQIKGMEEELASLAQSEYKKQMDLLTSIKGIGITLAAALIVATGGFAYFDNAKQLTRYLGLSPTFQQSGTSVYVKGHINRNGDSSLRSQLYVAAFSSLRCNTECKACFDRLRSNGKPGKVAVIAVANKLVRQAFAVVTHGKNYVDGFKSEKP

SEQ ID NO: 17179 - protein, 326 aa, unidentified
  source 1..326: note = protein_60b4b62
  REGION 7..168: note = RuvC_domain
  SITE 10: note = RuvC_P1
  SITE 67: note = RuvC_P2
  SITE 107: note = RuvC_P3
  SITE 109: note = RuvC_P4
  SITE 112: note = RuvC_P5
  REGION 208..295: note = Tnp_domain
  SITE 216: note = Tnp_P1
  SITE 246: note = Tnp_P2
  SITE 254: note = Tnp_P3
  SITE 255: note = Tnp_P4
  SITE 267: note = Tnp_P5
MTLKYSVGLDVSSKKIDGSICVIDQNQQVQFMSKITFNNTVCGFKNLDSWITKWHKATELPLVVCMEATGVYHENCALYLFEKGYQLSIVLPNKAKKYLECLGLKSKNDSIDARGLAQMGAEQCLGLWQPLGRYYYELRNYTRQHQNIQELKTVISNQIHALKHGMYPCEMTIEQLKTTLALFDSQLKELSKKMKLHLKSDDVVYRKCLNILAMKGLGYLTIATLIAETNGFELFENYKQLVSYAGYDVVEAQSGTRVGKTKISKKGNSRIRRALHMPSLVVITCKEKPFLDLYNRTFEKHAIKMKSYVAVQKKNISDGLSFVEEK

SEQ ID NO: 17180 - protein, 342 aa, unidentified
  source 1..342: note = protein_a9d10e4
  REGION 6..148: note = RuvC_domain
  SITE 9: note = RuvC_P1
  SITE 52: note = RuvC_P2
  SITE 87: note = RuvC_P3
  SITE 89: note = RuvC_P4
  SITE 92: note = RuvC_P5
  REGION 211..297: note = Tnp_domain
  SITE 219: note = Tnp_P1
  SITE 249: note = Tnp_P2
  SITE 257: note = Tnp_P3
  SITE 258: note = Tnp_P4
  SITE 270: note = Tnp_P5
MQITTIGLDLAKHVFQVHGIDADDKVIVRKQLRRSRVIAFFEKLPACLVGIEACASAHYWARELAKLGHTVRLMPAKDVKAYVKRNKNDAADAAAICEAATRASVRSVPVKSPESQARLMQHRARDLLIRQRTQLINALRSHLAELGIVSAQGREGLKRLLAILADESDDQLPADARASLAVLVAQIEACQEQIGTLDKRIHTQHRANEASLRLETIPGIGVIGATAIEATVPDPAVFRSGRDFAAWIGLVPREDSSGGKQRLGHISKQGDRYVRRILIVGAHAVLKQARLRPEKYPWLVRLLARRPAKVVAVALANKMARIAWVLLARGGTYRVPPITAAS

SEQ ID NO: 17181 - protein, 345 aa, unidentified
  source 1..345: note = protein_8183422
  REGION 14..160: note = RuvC_domain
  SITE 17: note = RuvC_P1
  SITE 65: note = RuvC_P2
  SITE 105: note = RuvC_P3
  SITE 107: note = RuvC_P4
  SITE 110: note = RuvC_P5
  REGION 206..293: note = Tnp_domain
  SITE 214: note = Tnp_P1
  SITE 244: note = Tnp_P2
  SITE 252: note = Tnp_P3
  SITE 253: note = Tnp_P4
  SITE 266: note = Tnp_P5
MNKQVSTSQAMEFCGIDVSAASLSVALVKPDGSLAQREFANSASGHRALLVWLKKRNSQVRVSLEATGIYSLDVSLALDGEASIELGVLNPKLVNRFAQTLRRSKTDAADAVVLAEYSQRMPFVRWQRPAPSHLELRTMSRYIGSLVVEQAGLKNRLRSAESTDTTPRAVLVDLKRALAAVERRVERMRAEALKLVEAEVELRERYQLLTTVPGIAAVSALTMLSELILLAPGMTVRQWVASSGLDPAHQQSGTSLNKPSRISRAGNRRLRAALYMSALSAARYDRHLAAFYRALRARHKTGLQALMAVARKMLHAIYGIFKNGIPYDGRRLFPSIQTEVESIAG

SEQ ID NO: 17182 - protein, 317 aa, unidentified
  source 1..317: note = protein_83f429a
  REGION 9..150: note = RuvC_domain
  SITE 12: note = RuvC_P1
  SITE 56: note = RuvC_P2
  SITE 96: note = RuvC_P3
  SITE 98: note = RuvC_P4
  SITE 101: note = RuvC_P5
  REGION 191..276: note = Tnp_domain
  SITE 199: note = Tnp_P1
  SITE 228: note = Tnp_P2
  SITE 236: note = Tnp_P3
  SITE 237: note = Tnp_P4
  SITE 248: note = Tnp_P5
MSKHTTVSAGIDTGKCKLDIALDRCPERLQVDNTDDGHAVLWGWLRQHRVNRVGIEASGGYEQAVVSALRRKGFLVIMFQPAQVRAYAKYRLQLAKNDKIDAALIAACTAEAKKIHPPPDPRLAPFAELLTVIEQLTEDIARLKTRRATSRDEQTRRFWNEEIARLKRLQSQKLKQLVAAIREHRDLADRLELIVSVDGVGLRTAVAILVRMPEIGRITREQAAALVGVAPYDADSGSHVGLRHIEGGRERLRKSLYTAALPAAFKWNPELVAIYKRLTNAGKPHKLALVACARKMIIFVNTVVARGTPWVPREVLT

SEQ ID NO: 17183 - protein, 343 aa, unidentified
  source 1..343: note = protein_d391fa4
  REGION 6..147: note = RuvC_domain
  SITE 9: note = RuvC_P1
  SITE 52: note = RuvC_P2
  SITE 87: note = RuvC_P3
  SITE 89: note = RuvC_P4
  SITE 92: note = RuvC_P5
  REGION 211..296: note = Tnp_domain
  SITE 219: note = Tnp_P1
  SITE 249: note = Tnp_P2
  SITE 257: note = Tnp_P3
  SITE 258: note = Tnp_P4
  SITE 270: note = Tnp_P5
MHIASVGIDLGKTTFHLVALDDHSKVVIRKKFSRKQLLAYTANLPSSLIGIEACSGAHFIGAALRRQGHDARLIPAQFVKPFVKSNKNDFLDAEAIAEAVTRENMRFVPIKTDDQLDLQALHRVRDRLVQRRTAVINQIRGFLLERGITFGKGPAQLRNHMAEVLEDADSNLTPRMRTLLERLWVEWRQLESDLAVATADIEQICSEDAACQRLRQIPGVGPLVASATLAAIGNGAAFRKGREFAAWLGLVPRQHSTGGRTRLLGISKRGNIYLRRMFIHGARAVVFRIRYDTGGLGQWVQRLQQRAAPCKVIVAVANKLARIAWAVLFRGEPYRHAAVCGLA

SEQ ID NO: 17184 - protein, 337 aa, unidentified
  source 1..337: note = protein_882ee0d
  REGION 7..152: note = RuvC_domain
  SITE 10: note = RuvC_P1
  SITE 53: note = RuvC_P2
  SITE 88: note = RuvC_P3
  SITE 90: note = RuvC_P4
  SITE 93: note = RuvC_P5
  REGION 211..297: note = Tnp_domain
  SITE 219: note = Tnp_P1
  SITE 249: note = Tnp_P2
  SITE 257: note = Tnp_P3
  SITE 258: note = Tnp_P4
  SITE 270: note = Tnp_P5
MSSIHILGIDLGKHCFHAIAHNRSGAEVLRRKFNRNQLQHFLCKIEPTTIAFEACGGAHWLARKCGEYGHQVRLIPPQYVKPYVKGNKNDFIDASAIAEAAGRPTMRFVAVKSEEAQVIAAIHRVRDGYIKERTAAMSRIGAILLEFGLSFPKGHAKMKSLFQWLAEQKVSLPESLLCELVSIHEHYKYLNEQVKAQDSKLQVVVKNNESAQLLKTIPGVGDLTSTLCVADVSSPNNFTNGREMAAWLGLVPRQFSTGGKTKLLGMSKRGNKHLRTLFIHGARAVLSRLETTGKVFGEWLIKLRATKPFNVVVVALANKLARIAWAVLYHRQAFKAV

SEQ ID NO: 17185 - protein, 341 aa, unidentified
  source 1..341: note = protein_111fd91
  REGION 7..149: note = RuvC_domain
  SITE 10: note = RuvC_P1
  SITE 53: note = RuvC_P2
  SITE 88: note = RuvC_P3
  SITE 90: note = RuvC_P4
  SITE 93: note = RuvC_P5
  REGION 211..297: note = Tnp_domain
  SITE 219: note = Tnp_P1
  SITE 249: note = Tnp_P2
  SITE 257: note = Tnp_P3
  SITE 258: note = Tnp_P4
  SITE 270: note = Tnp_P5
MSEVSIVGVDLAKRVFQVHGATSNGTVVFRKKLSRAQFLPFLEQLPVCVVAMEACATAHYWGREVAKLGHRVRLIAPIYVKPFVKRQKNDAADAEAIVEAASRPTMRFVEVKTEEQQASAMVFRARDLLIRQRTQITNALRGHLAEYGIIAGKGIRQLKKLRDSICSQSTDLPQAVSEVALIYLDQIDDCSAKIAVLEKTVRARSSVTERATLLQTMPGVGPIGATAIEAFAPPMEEFRRGRDFAAWLGLVPRQQSTGGKQILGRTSKMGQRDIRRLLIIGAMSSIRAALRNGPQEGTWLARMLASKPRMVVAIALANKMARGIWAMLTKGEDYRDPEVMA

SEQ ID NO: 17186 - protein, 339 aa, unidentified
  source 1..339: note = protein_5597913
  REGION 6..145: note = RuvC_domain
  SITE 9: note = RuvC_P1
  SITE 51: note = RuvC_P2
  SITE 86: note = RuvC_P3
  SITE 88: note = RuvC_P4
  SITE 91: note = RuvC_P5
  REGION 210..296: note = Tnp_domain
  SITE 218: note = Tnp_P1
  SITE 248: note = Tnp_P2
  SITE 256: note = Tnp_P3
  SITE 257: note = Tnp_P4
  SITE 269: note = Tnp_P5
MSHSVIGLDIAKSVFHVYTIQEDGKVLKKMLRRQQVLEFFANYPVSLIGIEACGSSHYWARELIALGHNVKLLNARHVKAFVKGNKNDFNDAEAIFDAVSRPNARTIAIKTVEQQDIQLIHRIRQEAVKRRTALVNQIRGLLGERGIVIGQGIHQVRKRLPELLEDAENSLTTLSRAAFGEQYERLLELDKEIKRYDQKMGQLCQANELSKRLAEVPGVGPMTATIVAADLGEGQHYVNARHYSASLGIVPRQSSSGGKSVLLGISKRGNCYIRSLLIHGARAVLRTCHNKEDKLSLWLQKLIKRRGFNVAAVALANKNARILWALAHKSEHYEMPVGA

SEQ ID NO: 17187 - protein, 267 aa, unidentified
  source 1..267: note = protein_3bee175
  REGION 2..74: note = RuvC_domain
  SITE 14: note = RuvC_P3
  SITE 16: note = RuvC_P4
  SITE 19: note = RuvC_P5
  REGION 138..225: note = Tnp_domain
  SITE 146: note = Tnp_P1
  SITE 176: note = Tnp_P2
  SITE 184: note = Tnp_P3
  SITE 185: note = Tnp_P4
  SITE 197: note = Tnp_P5
MPPAYVKAYVRRQKNDAADAEAICEAVTRPTMRFVPVKSAERQSVLVLHRTRELLVRQRTMLVNAIRGHCAEFGLIAPQGVRCAADLVEQVRRAEASRLPEIARSALLMLADQLDALAVQINHLERRLLVWHRQDQASQRLATIPGVGIITATALAATITDPSAFRSGREFSAFLGLVPRQNSSGGKERLGRISKMGDGYLRKLLVVGATSVIRRARTSTSPSAAWIQSLLERRPARLVTVAQANKTARIAWAVLARGEVYRTTVAI

SEQ ID NO: 17188 - protein, 401 aa, unidentified
  source 1..401: note = protein_658f0e4
  REGION 6..160: note = RuvC_domain
  SITE 9: note = RuvC_P1
  SITE 58: note = RuvC_P2
  SITE 98: note = RuvC_P3
  SITE 100: note = RuvC_P4
  SITE 103: note = RuvC_P5
  REGION 265..352: note = Tnp_domain
  SITE 273: note = Tnp_P1
  SITE 304: note = Tnp_P2
  SITE 312: note = Tnp_P3
  SITE 313: note = Tnp_P4
  SITE 325: note = Tnp_P5
MTAIWAGIDAGKTHHHCVVIDGGGKRLLSRRVANDEPELLRLLADVLVLGDEVTWGIDLADGGAALLIDLLLNHGQLTLYIPGMAVNRASEGYRGEGKTDAKDAAVIADQARIRRDLHPLRHGDELVTELKILTVHRRDLTDDRTRAINRLRGHLTGIFPALERALDLTNAGPLVLLTGYQTPAALRRTGAKRLETWLRNRKVRSAAQLTETALAAAERQHTSVTGEKPTAQLVHTLVREVMRLNEQLAEIDKLIEARFREHKHAEVIASMPGIGSLLGAAFLAATSGDMTAFGTPDRLAGFAGVAPAPRDSGKISGNLHRPKRYSRGLQRVFYTSALISIRCCDESRRFYDRKRAEGKRAEGKRHTQAVLALARRRVNVLWTLLRDGRCYEPIPPVTAAA

SEQ ID NO: 17189 - protein, 341 aa, unidentified
  source 1..341: note = protein_c7e6158
  REGION 6..147: note = RuvC_domain
  SITE 9: note = RuvC_P1
  SITE 52: note = RuvC_P2
  SITE 87: note = RuvC_P3
  SITE 89: note = RuvC_P4
  SITE 92: note = RuvC_P5
  REGION 211..295: note = Tnp_domain
  SITE 219: note = Tnp_P1
  SITE 249: note = Tnp_P2
  SITE 257: note = Tnp_P3
  SITE 258: note = Tnp_P4
  SITE 270: note = Tnp_P5
MDVAVLGIDLGKNSCSVVGLDGSGKVVLRRRVQRKTIVGLAAKLSPCIIAMEACCGAHHLGRVLSADGHTVRLMSPEYVRPYVKAQKNDDRDAEAIAEAATRPTMRFVALKNEEQLDMQTLHRARDRTVVERTSLMNQLRAILLERGIIVPQGRAKLRLRLAELMRQGIEQLSSRIRRLIEDMLARWQTLDERIAAFDAEFSAEAKQNEAARRLTSIPGIGALNATALVAAVGDAQTFARARNLAAWLGLVPRQATTGGKPRLLGITKRGSKYLRKMLIQGARAALPSLSRSNTRLGGWLRGLLARAHSNTVVVALAAKMARIVWALLRYGTTFEPQAIAI

SEQ ID NO: 17190 - protein, 361 aa, unidentified
  source 1..361: note = protein_6594982
  REGION 6..146: note = RuvC_domain
  SITE 9: note = RuvC_P1
  SITE 52: note = RuvC_P2
  SITE 87: note = RuvC_P3
  SITE 89: note = RuvC_P4
  SITE 92: note = RuvC_P5
  REGION 211..300: note = Tnp_domain
  SITE 219: note = Tnp_P1
  SITE 249: note = Tnp_P2
  SITE 257: note = Tnp_P3
  SITE 258: note = Tnp_P4
  SITE 270: note = Tnp_P5
MELHTIGIDLGKTVFHLVGLNLRGEVVVRKKFSRTQLLRFTINRHVHLVGMEACGGAHFLGRALREQEHEVRLIPAQYVKPYVKTNKNDFIDAEAIAEAVGRPTMRFVPIKSDDQLDLQSLHRVRERWVMRRTAVVNQMRSLLLERGLTLRKGRCHLKAALPGILEDANAKLSGALRSLLAQLKLELEQLVQRVEEADQLIEKIAQESEVCRRLDAIPGIGPITATAVIAAIGNGAGFAKGRDFAAWVGLVPRQDSTGGKQKLLGISKRGNAYLRRLFVQGARAVLQFREKQSSGLRAWLAQLTSRVHHHVAGVALANKLARMVWAVLTKGEVYRPPMLVSSPAATTGFTFSCQVCWRSTR

SEQ ID NO: 17191 - protein, 375 aa, unidentified
  source 1..375: note = protein_db536de
  REGION 21..163: note = RuvC_domain
  SITE 54: note = RuvC_P2
  SITE 94: note = RuvC_P3
  SITE 96: note = RuvC_P4
  SITE 99: note = RuvC_P5
  REGION 263..348: note = Tnp_domain
  SITE 271: note = Tnp_P1
  SITE 301: note = Tnp_P2
  SITE 309: note = Tnp_P3
  SITE 310: note = Tnp_P4
  SITE 321: note = Tnp_P5
MLVAIATAWPLACRRAKCWRNSTCSTGRKASTCSLRGWNAASAATEARCRWPWKGTTAGRAPLDTLVRSHGYRLFNINNLKLARFKEIFPAAAKNDRIDARKGLELFQLCDHLPVARGVLQEVAATPLENDQLKRLTRRRRALVEERSRLLCRMQADLQAACPGLLAITPNADNVWFLNLLTHSDDLCKLARLRATTLLGIKGIGRKYAALITAWQKSAHFSHDVAWVGPMIIEDARRILELRAAIKALEARCAERVAQSEIAQCIDSIPGFGLVCAAEIAGELGTVARFANDGSLAVYMGMATLDNSSGKHRGSKNPKHVNTRAKAAMMVGIDRHRKQVPESQRYYEKNERRERRTTRPFARLDAISAASFFRC

SEQ ID NO: 17192 - protein, 402 aa, unidentified
  source 1..402: note = protein_f2a4d49
  REGION 4..160: note = RuvC_domain
  SITE 7: note = RuvC_P1
  SITE 57: note = RuvC_P2
  SITE 97: note = RuvC_P3
  SITE 99: note = RuvC_P4
  SITE 102: note = RuvC_P5
  REGION 274..361: note = Tnp_domain
  SITE 282: note = Tnp_P1
  SITE 312: note = Tnp_P2
  SITE 320: note = Tnp_P3
  SITE 321: note = Tnp_P4
  SITE 334: note = Tnp_P5
MNAVGIDVSKGKSMITVMRPGKEVVIEPFEVSHTDSELIDLAKVIQSLDGETRVVMEATGNYHLPIAWMLHDAGIYVSVVNAMLIRNYGNNTIRKGKTDKKDAQKIANYAIDNWTELPQYFPEEDVWMMLKNCYRQYEHFSKIRTMMKNNLISLLDVTFPDANRLFSSPRRADGSEKWLDFIETFWHCQCVCGLTPAAFTKKYQKWCKKHGYNFSEDKALDIYASACGHVCVMPKTDDTEFMMQQAILQLKTVSKTLAALQQQMQTLAEKLPEYPVVMQLFGVGPILGPQLMAEIGDVRRFHSKKVLVAFSGIDAPPCQSGTMEVRSRSISKRGSSSLRRTIFLVMSVILQQKPLDEPVYQFMDKKRAEGKPYKVYMMASANKFLRIYYATVKAYLDALDAE

SEQ ID NO: 17193 - protein, 346 aa, unidentified
  source 1..346: note = protein_a401d9e
  REGION 6..148: note = RuvC_domain
  SITE 9: note = RuvC_P1
  SITE 52: note = RuvC_P2
  SITE 87: note = RuvC_P3
  SITE 89: note = RuvC_P4
  SITE 92: note = RuvC_P5
  REGION 211..296: note = Tnp_domain
  SITE 219: note = Tnp_P1
  SITE 249: note = Tnp_P2
  SITE 257: note = Tnp_P3
  SITE 258: note = Tnp_P4
  SITE 270: note = Tnp_P5
MRIMRIGIDLAKQVFQIHGVDSSEKPVLRRQLTRHQMVKFFSKLTPCLIGMEACASSHYWARRLIGMGHTVKLIAPQFVKPYVKGNKNDANDADAICEALGRPNMRFVAIKTVAQQDIQALHRIRTELVHQRTAKVNQIRGLLGEYGIVVAQRVTSLRKALPEILEDAENGLTGDFKTLLNELRADLVYLDARVAAQDLAMQRLASAHADAKRLQTLRGVGPITATALIAALGDGRMFKRGRDAAAWVGLVPGQHSSGGKDNLLGISKRGNAYLRTLLIHGARSVLKTAKDKDDRLSCWVQSVCHRRNKNIAAVALANKTMRMAWALLTSGADYQPEFGQPDTQPA

SEQ ID NO: 17194 - protein, 306 aa, unidentified
  source 1..306: note = protein_ac8a7d0
  REGION 9..162: note = RuvC_domain
  SITE 12: note = RuvC_P1
  SITE 60: note = RuvC_P2
  SITE 101: note = RuvC_P3
  SITE 103: note = RuvC_P4
  SITE 106: note = RuvC_P5
  REGION 224..306: note = Tnp_domain
  SITE 232: note = Tnp_P1
  SITE 262: note = Tnp_P2
  SITE 270: note = Tnp_P3
  SITE 271: note = Tnp_P4
  SITE 282: note = Tnp_P5
MQHTEQIIIGVDPHKLSATIEVVDHHEKLLGSGRFTTDRAGYAAMRKYVAGWPDRVWAVEGSNGAGRPLAQRLLEDGERVVDVPAKLAARVRLFDTGHNRKTDARDAHSIAVVAVRTTTLRVLQLDGELEALRMLTDRREALTRRRVQTVDRLQALLAELLPGQAKKDITTGQAKVMLASVRPRDIAGKTRRRIAAEELAELVAVEAKIKKATAELKAIVLARGSHLMDLPGVGPVVAARVLADVGDVTRFADRNRFASWTGTAPLDASSGEQNRHRLSRAGNRRMNHMIHIAAISQIRLDTDGRA

SEQ ID NO: 17195 - protein, 370 aa, unidentified
  source 1..370: note = protein_d9ca7cb
  REGION 1..135: note = RuvC_domain
  SITE 32: note = RuvC_P2
  SITE 72: note = RuvC_P3
  SITE 74: note = RuvC_P4
  SITE 77: note = RuvC_P5
  REGION 242..327: note = Tnp_domain
  SITE 250: note = Tnp_P1
  SITE 279: note = Tnp_P2
  SITE 287: note = Tnp_P3
  SITE 288: note = Tnp_P4
  SITE 300: note = Tnp_P5
MLWNKTLPNNEQKLTDIYTNLSAKGSVLVVVDQPATIGALAIAVAQHMGIEVAYLPGLTMRRIADLYPGEAKTDEKDAFIIADAARSLPHTLRQLTKTDQDEAGLAMLTGFDLDLSRQVNQVSNRIRGLFTQIHPELERVLGPRLEHDAILEVLATWPTPQALRKAGRARMDAKLKKHGARRHAAWTEDILTALAKQSVIVTGTEAAGLVIPHLARQLVSLHAQRANVASEVEKIVATHPLYLVLRSMPGIGLRTAAVIIAELAGKTFTSSAALASYAGLAPTTRQSGSSIKSERVSHSGNKRLKRALFLSAFAVIRTDPVSRAYYDRKRAQGKRHNQAIIALAHRRLTVLYAMLRDGTLYDVPDTALAA

SEQ ID NO: 17196 - protein, 308 aa, unidentified
  source 1..308: note = protein_a1dbf50
  REGION 5..151: note = RuvC_domain
  SITE 8: note = RuvC_P1
  SITE 52: note = RuvC_P2
  SITE 91: note = RuvC_P3
  SITE 93: note = RuvC_P4
  SITE 96: note = RuvC_P5
  REGION 185..269: note = Tnp_domain
  SITE 193: note = Tnp_P1
  SITE 222: note = Tnp_P2
  SITE 230: note = Tnp_P3
  SITE 231: note = Tnp_P4
  SITE 242: note = Tnp_P5
MSAFVGIDVAKGSLAVAVIPGNLGFEVSNDAKGHARLVRWLGNQAVTRILLESTGGYESALVEVLASRWAVVRVPPHRARAFATAMGKSAKTDPIDALMLARMAAVTEGPAVTPPTPAQARLQALVRRRGQVVAHRDDERRRLHQANDAFVRQSLQRQIKHLQGEIARLDREIEACVPDCGDERAARLRAVPGVGAVTVATLLAFLPELGQLENRQISALVGLAPYNCDSGKHQGVRRIRGGRGAVRRVLYMAAWSAVRHQPDFKARYEALRAKGKCAKVALVACMRILAIRLNAMIRDQTDWRVHPA

SEQ ID NO: 17197 - protein, 412 aa, unidentified
  source 1..412: note = protein_bcd39d8
  REGION 9..158: note = RuvC_domain
  SITE 12: note = RuvC_P1
  SITE 63: note = RuvC_P2
  SITE 97: note = RuvC_P3
  SITE 99: note = RuvC_P4
  SITE 102: note = RuvC_P5
  REGION 252..339: note = Tnp_domain
  SITE 260: note = Tnp_P1
  SITE 291: note = Tnp_P2
  SITE 299: note = Tnp_P3
  SITE 300: note = Tnp_P4
  SITE 311: note = Tnp_P5
MEAIIERCCGIDVHKKNIVVCLAVGKPDEKPRTMVKTFSTMTCDLLACRDWLVSEGCTHAAMESTGIYWKPIYNILEGSMEIILAHARDVKNVPGRKTDVKDCEWIADLMRHGLIRGSFIPPKPIRELRDLTRYREKLIQQRSSELNRLQKFLEDANIKLSSVVSDINGVSAQDMIKHLIDDDMSSQEMAQLARGKLRDRVEELEKSLEGCLTEHHRLILQLALRMIASYDEAIAKLSVEIDNRMQPFRQESERLQTIPGVKKKTAEKVIAEIGVDMSRFPSDAHLSSWAGVSPGNNESAGKRRSGRVKPGNPWLKKTLTEAAWSASKTKQTYLSARYRRLAVRRGKKRAAVSVSHTILIMAYHIIKEQRTYKELGADYFDRLNEKHLIKRLTTRIAALGYAVNITKLPVAA

SEQ ID NO: 17198 - protein, 322 aa, unidentified
  source 1..322: note = protein_ea22cc3
  REGION 8..150: note = RuvC_domain
  SITE 11: note = RuvC_P1
  SITE 52: note = RuvC_P2
  SITE 92: note = RuvC_P3
  SITE 94: note = RuvC_P4
  SITE 97: note = RuvC_P5
  REGION 191..278: note = Tnp_domain
  SITE 199: note = Tnp_P1
  SITE 229: note = Tnp_P2
  SITE 237: note = Tnp_P3
  SITE 238: note = Tnp_P4
  SITE 251: note = Tnp_P5
MNKYKETYGVDISKDVFDVHGSNKGHDQYKNDEIGFKKFLKELPKGSLVVMEATGYYHYRLAQFLYKNGVLVSVVNPLSIKRFVQMKLAKVKTDKSDARAICEYALINEVPLYNALTDTQSECLQLFRLLDTYLKQRTATKNKIHGEAVLGIPSKFVYRSLIRNKKQLNKEVVAIESKILSLVKGDQQEQLTLLMSIPGIGQKTALFLIVATDGFSKFETASQLCSYVGITPTIRESGSSVRGRARISKVGNRKLRNLLFLCSFNACKHNKACREVYERIVNKGKSKKLALIAVANKLLKQSFAIAKSGRPYDETYVSILPR

SEQ ID NO: 17199 - protein, 321 aa, unidentified
  source 1..321: note = protein_b63e24e
  REGION 8..147: note = RuvC_domain
  SITE 11: note = RuvC_P1
  SITE 52: note = RuvC_P2
  SITE 92: note = RuvC_P3
  SITE 94: note = RuvC_P4
  SITE 97: note = RuvC_P5
  REGION 191..278: note = Tnp_domain
  SITE 199: note = Tnp_P1
  SITE 229: note = Tnp_P2
  SITE 237: note = Tnp_P3
  SITE 238: note = Tnp_P4
  SITE 251: note = Tnp_P5
MYKYNQIFGVDISKDVFDVMSSEEKHLQFENNSKGFNQLIKHLTKKDLIVMEATGYYHYCLAQHLYDQGYTVSVVNPLAVKRFVQMKLSKIKTDKSDALAICQYACSNEVPLFTSKDSNQAECLQLMSLIEIYLKQSTALKNKLHGEKTLGIPSKTVYHSINRSLKMIQKEIQLLEKKLLELVKEHQQKQLTLLKSIPGMGTKTSIILIVLTDGFTKFENAKQLCSYAGTTPTIRMSGSSVRGKSRISKMGNQKLRNLLFLCAFSACKYNKACRELYERIVAKGKSKKLALVAVINKLLKQAFAVAKSGLPYDENYVSNLS

SEQ ID NO: 17200 - protein, 340 aa, unidentified
  source 1..340: note = protein_0c7bf79
  REGION 6..147: note = RuvC_domain
  SITE 9: note = RuvC_P1
  SITE 52: note = RuvC_P2
  SITE 87: note = RuvC_P3
  SITE 89: note = RuvC_P4
  SITE 92: note = RuvC_P5
  REGION 211..296: note = Tnp_domain
  SITE 219: note = Tnp_P1
  SITE 249: note = Tnp_P2
  SITE 257: note = Tnp_P3
  SITE 258: note = Tnp_P4
  SITE 270: note = Tnp_P5
MDITTLGIDLAKSVFQLHGVDAQGVIVLQKKLRRGAVVKFLSKLEPCLIGIEACATSHYWAREIAALGHDVKMIPPAYVKPYVKRQKNDAADAEAICEAVTRPNMRFVPVKTEEQQAVLVLHRSRDLLMRQRTMILNAIRSHCAEFGIIAAQGARKVSELVTKLRNDDTLGVPEVGVSALLSLASQLDCLEQEVRKIEHQLLAWHRQNAASQRLETIPGIGLITATALAASVPDPAVFKSGRQFAAYLGLVPRQNSSGGKDRLGRISKMGNGYLRRLLVVGATSVTRRAPTIDTRTGTWVRSLLEHKPTRVVTVAIANKTARTAWALLSKGESYKAVPAI

SEQ ID NO: 17201 - protein, 346 aa, unidentified
  source 1..346: note = protein_947264b
  REGION 6..148: note = RuvC_domain
  SITE 9: note = RuvC_P1
  SITE 52: note = RuvC_P2
  SITE 87: note = RuvC_P3
  SITE 89: note = RuvC_P4
  SITE 92: note = RuvC_P5
  REGION 211..300: note = Tnp_domain
  SITE 219: note = Tnp_P1
  SITE 249: note = Tnp_P2
  SITE 257: note = Tnp_P3
  SITE 258: note = Tnp_P4
  SITE 270: note = Tnp_P5
MKITTIGIDLAKEVFQIHGVDEHGKIVLRKQLRRSEMAKFFVNLEPCLIGMEACGSSHHWARKLSEFGHTVKLMPPQFVKPYVKTNKHDMADAEAICEAVSRPNMRFVAIKNVEQQAILSVHRARQGLVKARTAQANQIRGLLSEFGIVIPQGIHSIAKRVPDILEDAENGFPGTMRHLLKRLNDHLKELSRQVEELELQIKLWHKENEASKKLEAIPGIGPITASAIVATVGNATEFKNGRQLSAWFGLVPKQRSSGGKQTLLGISKRGDTYLRTLLIHGARAVIRFAENKAEPESWLRKLITRRNKNIAAVALANKNARIIWALLAKGTTFHPDHASAACAAAA

SEQ ID NO: 17202 - protein, 403 aa, unidentified
  source 1..403: note = protein_9e2f941
  REGION 4..160: note = RuvC_domain
  SITE 7: note = RuvC_P1
  SITE 57: note = RuvC_P2
  SITE 97: note = RuvC_P3
  SITE 99: note = RuvC_P4
  SITE 102: note = RuvC_P5
  REGION 275..362: note = Tnp_domain
  SITE 282: note = Tnp_P1
  SITE 312: note = Tnp_P2
  SITE 320: note = Tnp_P3
  SITE 321: note = Tnp_P4
  SITE 334: note = Tnp_P5
MNAVGIDVSKGKSMVAALAPGGKLLARPFEVLHTKSGIKQLVSFVHTLGADTRIVMEHTGRYYEPLLQRLAKSGLFVAAVNPKLIKDFGNNTLRKVKTDKADAKKIARYALDNWCDLRQHTGMDTTRTQLKTLNRQFAFCMKQKTACKNNLIALIDQVYPGANTYFESPARADGSQKWVDYIATFRHVDYVCAMSLSAFTERYRKWCHRHGYNFQPDKPRMLWEKAKDLIAMLPMDKTTKMLVQNSIAQLNVLSKTVEALRTQMIELAEQLPEYPVVIDMNGVGPTLASQLIAEIGDITRFPRRGSLTAFAGVDPGAKQSGTMQLRSNKTSKAGSPHLRRALFQIVSGLLMRAPDDPVYNFMDKKRSEGKPYYVYMTAGANKFLRIYYGRVNEYLASCPKDHE

SEQ ID NO: 17203 - protein, 340 aa, unidentified
  source 1..340: note = protein_74e4c09
  REGION 7..149: note = RuvC_domain
  SITE 10: note = RuvC_P1
  SITE 53: note = RuvC_P2
  SITE 88: note = RuvC_P3
  SITE 90: note = RuvC_P4
  SITE 93: note = RuvC_P5
  REGION 211..297: note = Tnp_domain
  SITE 219: note = Tnp_P1
  SITE 249: note = Tnp_P2
  SITE 257: note = Tnp_P3
  SITE 258: note = Tnp_P4
  SITE 270: note = Tnp_P5
MSTIHILGIDIGKSTFHLVGHDSSGREVCRKKLSRPKIIQFLAKAESTTVAMESCGGSHWLARKCKEFGHKALLIPPQYVRPYVKTNKNDFIDADAIAEASTRPSMRFVSVKTEASQVISVIQRIRSSYLKDRTACMSRIGSMLLEFGMAFPNSHSKMKTLFQWLAEHGEPIPPMLLLELRDHHDYYLKLNQLILTQDKKLKDIVLNDELAQLLKTIPGVGDLTASRCLSDISNASDFKNGRHLAAWIGLVPRQHSTGGQTKLLGISKRGNKGLRELFIHGARAVLVRPEKAVASFGNWILELLSRKPYNVVVVALANKLARIAWSIFSTKQVFEVRVQA

SEQ ID NO: 17204 - protein, 345 aa, unidentified
  source 1..345: note = protein_a3c1768
  REGION 6..147: note = RuvC_domain
  SITE 9: note = RuvC_P1
  SITE 51: note = RuvC_P2
  SITE 86: note = RuvC_P3
  SITE 88: note = RuvC_P4
  SITE 91: note = RuvC_P5
  REGION 210..300: note = Tnp_domain
  SITE 218: note = Tnp_P1
  SITE 250: note = Tnp_P2
  SITE 258: note = Tnp_P3
  SITE 259: note = Tnp_P4
  SITE 272: note = Tnp_P5
MYRTKVGVDLAKEVIQVCIYRNKKVQSNIEMTPNEFLCWLVNAKPVTIIFEACGTSNYWKQKAISAGHDARLISAKLVATVRQNQKTDKNDALAIIQAASLPDVIFIGGKTVEQQQLQTIKRLRELAVKHQGACQKQLVSLLLELNIRISNRKGGIISAIDGVLEDATNGLSAECRIAIDTAKVYLKVSIEAVQHYDDCLEKSVTTHADCKKLLKLEGVGTMNAINLYLALGCSDIGVFSKGKDASACIGLTPIQHSSGGFVKLGSIGKHCKNSMLRSQLICGAMAAVNQAVIREAKTRKDVWLKGLVERRGKKCAAVALANKTVRTAFAMLTQGTEYKAELLAA

SEQ ID NO: 17205 - protein, 339 aa, unidentified
  source 1..339: note = protein_048fde6
  REGION 7..149: note = RuvC_domain
  SITE 10: note = RuvC_P1
  SITE 53: note = RuvC_P2
  SITE 88: note = RuvC_P3
  SITE 90: note = RuvC_P4
  SITE 93: note = RuvC_P5
  REGION 212..298: note = Tnp_domain
  SITE 220: note = Tnp_P1
  SITE 250: note = Tnp_P2
  SITE 258: note = Tnp_P3
  SITE 259: note = Tnp_P4
  SITE 271: note = Tnp_P5
MDTIHTIGIDLAKSVFQICAFNRAGKKLFNKMLRRNQLLRFLSNIESCLIGMEACGSSHYWAREIGKLGHTVKLMPPQYVNPCVKTNKNDAAEAEAICEAVSRPNMRFVSVKSEEQQALLLLHRERDGVVRDRTALINRIRASLQEFGVSIPAGRFRLQIWFREDFALVEDCLPKMLCNLIKSMQSRLMDLEKYLDGLDTQIDRASQESRQCQAIREIPGVGRLTSSALVASIGDAREFDSGRQLSAWLGLVPSQHSSGGKSLLLGISKRGDSYLRRMYIHGARAVIRHSKPGKPYYEWITNLLNRMHKNKVIVALANKLVRVVWAILARDQKYQAQTV

SEQ ID NO: 17206 - protein, 348 aa, unidentified
  source 1..348: note = protein_3bc48dc
  REGION 7..149: note = RuvC_domain
  SITE 10: note = RuvC_P1
  SITE 53: note = RuvC_P2
  SITE 88: note = RuvC_P3
  SITE 90: note = RuvC_P4
  SITE 93: note = RuvC_P5
  REGION 212..296: note = Tnp_domain
  SITE 220: note = Tnp_P1
  SITE 250: note = Tnp_P2
  SITE 258: note = Tnp_P3
  SITE 259: note = Tnp_P4
  SITE 271: note = Tnp_P5
MKEISTIGLDIAKRVFQVHGIDDRGRVVVRKKLSRNELLEWFGKIAPCLVGIESCATSTYWAREIGALGHNVKLIPPSYVKPYVRRQKNDRVDAEAICEAVGRPSMRFVTLKTIEQQAIQVLHRSRSLLITQRIQLVNALRAHMAEFGVIFPQGLAGAALAIKTLKEGKDKSIPAFAQNVLLSLVSQLEHLRQEIKKLDQQMMAWHKTNADSQRLATVPGIGHVTASAVLAAIGDGKQFNSAREFAAWLGLVPRQNSSGGKDCLGRISKKGDPYLRRLFVTGATTQLRGSHRDKTVGGAWFSSLLRRKAARVASVALANKMARVAWALLTKGQAYRPAPLPRSIEAAA

SEQ ID NO: 17207 - protein, 338 aa, unidentified
  source 1..338: note = protein_8443127
  REGION 16..169: note = RuvC_domain
  SITE 19: note = RuvC_P1
  SITE 66: note = RuvC_P2
  SITE 106: note = RuvC_P3
  SITE 108: note = RuvC_P4
  SITE 111: note = RuvC_P5
  REGION 212..295: note = Tnp_domain
  SITE 220: note = Tnp_P1
  SITE 247: note = Tnp_P2
  SITE 255: note = Tnp_P3
  SITE 256: note = Tnp_P4
  SITE 268: note = Tnp_P5
MKNASSINVFRDCLSVGVDVSKAELAIVGLTPDEHYLKRIGNQMKTIKAFLRQLQHSGYRGKIICESTGHYHLKLALVCHELGLELIVLNPLQSSKHSKARIRKTKTDPQDALTLATMALTEPKLPQPTQLTRAKALIRLKMGQLASVEKQLQQFNQSRAQYEETYAELGLPLSPQQLALREHSTSLKRLRKQLEKELEGLLAQALADDDRLAELRQIPGYSNVVAGLVASLDRQVKRADSWTAFVGLDVSVRQSGKWTGHGKLTKRGNAYMRKRLFQAAWGACLNYDYVRAYYDQLKAQGRKHVEAVCMIARKLLRIAYHVVTNKIQFDPNIAFAEH

SEQ ID NO: 17208 - protein, 387 aa, unidentified
  source 1..387: note = protein_7b49e27
  REGION 5..161: note = RuvC_domain
  SITE 8: note = RuvC_P1
  SITE 59: note = RuvC_P2
  SITE 100: note = RuvC_P3
  SITE 102: note = RuvC_P4
  SITE 105: note = RuvC_P5
  REGION 262..347: note = Tnp_domain
  SITE 269: note = Tnp_P1
  SITE 299: note = Tnp_P2
  SITE 307: note = Tnp_P3
  SITE 308: note = Tnp_P4
  SITE 320: note = Tnp_P5
MIYYVGIDISKYKHDFCIISNTGEVIVENLSFENNKKGFQELLEKLKPYNKSDVHIAFEATGHYSMNLELFLNDQGYSFMKMNPLVIHQFLKARSLRRTKTDKADSLTIANYLMSVPYKPNSDLLYNIFTLKSLCRSRELLIKERSKFQILLTNELDKTFPELKPFFNNTISSTLLYILEKYKNTYHISLMKDYESIRKVSHGKFTYAKFANLKQLAKNSVGQYNENTDLLISTYVSIINNFNDKLDPIEKQISTIIKELNPKMLTIPGLGEISAATILSEYGDISNFPTPGKMLAYAGLEPSVIESGTLQSNGKMVKHGSSHLRYSIMNISMTILKYSPTFYDYYLKKRSEGKCHRVALSHVSKKLIRVIYSLEKNNANFDPSLLK

SEQ ID NO: 17209 - protein, 401 aa, unidentified
  source 1..401: note = protein_40e9a4b
  REGION 4..160: note = RuvC_domain
  SITE 7: note = RuvC_P1
  SITE 57: note = RuvC_P2
  SITE 97: note = RuvC_P3
  SITE 99: note = RuvC_P4
  SITE 102: note = RuvC_P5
  REGION 275..362: note = Tnp_domain
  SITE 283: note = Tnp_P1
  SITE 313: note = Tnp_P2
  SITE 321: note = Tnp_P3
  SITE 322: note = Tnp_P4
  SITE 335: note = Tnp_P5
MNAVGIDVSKGKSMIAIMRPLGEVVATPFEVGHTAAELNELAKFILKISGETRVVMEYTGVYFEPIAMALYDAGLCVCVVHAQLIHNYGNNTIRKVKTDKADAIKIANYALDNWDKLKPYTPIDEIRRQLKAYSRQYRKFNKLKTMLKNNLIALTDSTFPGVNELFSSPPRKSDGHEKWLDFAMKFWHAECVCSLSQKAFTERYRKWCHKAGYYFLESKAEDIYAAACGHIGLLPKDENTKQLVQQTIIQLTSICSSLSVIEYRMTELAGLLPEYPVVMEFRGVGRILGPQIMAEVGDVLRFEKKESLVCFAGLEAPPYESGKFESHNRTISKKGSPHLRAALFQVMDCLLKTQPANDPVFQFIDRKRSEGKHYYSYMCAGSAKFLRIYYARVKEYLSALE

SEQ ID NO: 17210 - protein, 392 aa, unidentified
  source 1..392: note = protein_45349ce
  REGION 4..162: note = RuvC_domain
  SITE 7: note = RuvC_P1
  SITE 60: note = RuvC_P2
  SITE 101: note = RuvC_P3
  SITE 103: note = RuvC_P4
  SITE 106: note = RuvC_P5
  REGION 268..354: note = Tnp_domain
  SITE 275: note = Tnp_P1
  SITE 305: note = Tnp_P2
  SITE 313: note = Tnp_P3
  SITE 314: note = Tnp_P4
  SITE 327: note = Tnp_P5
MFFVGIDIGKNNHVASMMDDSGKIIFKAFSFSNTSDGADALLSKLSSYSSNTADFEIGMEATGHYWLSVYSFLYGKGFLIHVINPIQTDGWRKGVEIRKRKNDIIDSILIADLIRYGQFVETRLSDEDIFSLRNLTRFRSYLVESISDLKRKVVCVLDQVFPEYQYIFSNIFGKTSKEILCQFSSPIDFESVSADALAQLLTQLSRQKVGAEKAKQLKSAASNSFGITFAKDSFSFQLRALIEQISFIEQQVKDTEREISRLMEKLGSPITTITGIGNVTGATIIGEIGDISKFSSPRKLVAFAGIDASVSKSGEYESTHNVMSKRGSPYLRKAIFQAALIASFKDPVLSAFYQKKRAEGKHHLTCVGAVSRKMCNIIYAVLKNNQPYVPKA

SEQ ID NO: 17211 - protein, 392 aa, unidentified
  source 1..392: note = protein_d76bc45
  REGION 5..164: note = RuvC_domain
  SITE 8: note = RuvC_P1
  SITE 61: note = RuvC_P2
  SITE 102: note = RuvC_P3
  SITE 104: note = RuvC_P4
  SITE 107: note = RuvC_P5
  REGION 267..354: note = Tnp_domain
  SITE 275: note = Tnp_P1
  SITE 305: note = Tnp_P2
  SITE 313: note = Tnp_P3
  SITE 314: note = Tnp_P4
  SITE 327: note = Tnp_P5
MMVCVGIDVAKDKHDCYILSSEGEILADVFTIPNSRDGFEALLQRIHLCTKETDKIKVGLEATGHYSYNILGFLLDNGLDSFVINPLHTNLYRKSLSLRKTKTDRVDARTIATMLMSDVDLKSYTNAAYHNEELKSLTRYRFGKVQERAKLKSSVSRLVNILFPELEKLVPNLHLASVYALLSEFPGAGQVAAAHLTRLTNLLANASKGHYGKEEATNIRNVARSSIGSTMPAKSLELMHTIRLIRELNAEIDEIETEIKSIMDALHSPIMTIPGISYRMGAMILAEIGDFSNFDSPDKILAYAGLSPSTYQSGQLTNCYSHMEKRGSRYLRYAIFNATKFVCNWDPVFASYLAKKRAEGKHYNVAVSHAAKKLVRLICALEKSGQAYCSAA

SEQ ID NO: 17212 - protein, 397 aa, unidentified
  source 1..397: note = protein_aedfdb7
  REGION 4..162: note = RuvC_domain
  SITE 7: note = RuvC_P1
  SITE 60: note = RuvC_P2
  SITE 101: note = RuvC_P3
  SITE 103: note = RuvC_P4
  SITE 106: note = RuvC_P5
  REGION 267..354: note = Tnp_domain
  SITE 275: note = Tnp_P1
  SITE 305: note = Tnp_P2
  SITE 313: note = Tnp_P3
  SITE 314: note = Tnp_P4
  SITE 327: note = Tnp_P5
MFYLGIDIGKNNHVASLIDEKCNTIFKAFSFPNSYVGGNSLLDKLASFNISVNDVEIGMEATGHYWLSIYSFLVEKGFVIHVINPIQTDGWRKGTEIRKRKTDIIDSILIADLIRYGDFLETSLANEDTISLRNLSRFRNYLINSIGDLKRKTVCVLDQVFPEYQSIFSNIFGQTSKEILLHFNTPDDFENISSEQLQQVLSEITMKKFAMDKINEISSAAKKSFGIKFCLDSFSLQLRLLIEQINFIEKQVTDVEEQISALLDKINSPITTIPGIDNVTAATILGEIGDISRFKNPSKLVAYAGIDASISQSGEYNSTNNKMSKRGSPYLRKALFSAALVASNCDPVFKAFYQKKRSEGKHHLTAIGAVARKLCYTICAILKNNCAFEVKLPKNDC

SEQ ID NO: 17213 - protein, 388 aa, unidentified
  source 1..388: note = protein_24250bb
  REGION 4..162: note = RuvC_domain
  SITE 7: note = RuvC_P1
  SITE 60: note = RuvC_P2
  SITE 101: note = RuvC_P3
  SITE 103: note = RuvC_P4
  SITE 106: note = RuvC_P5
  REGION 265..352: note = Tnp_domain
  SITE 273: note = Tnp_P1
  SITE 303: note = Tnp_P2
  SITE 311: note = Tnp_P3
  SITE 312: note = Tnp_P4
  SITE 325: note = Tnp_P5
MIYAGIDVAKDKHDCLIVDSNGKVLTKVFTITNNKQGFDELFTNLRTHSKDLSELKVGLEATGHYSDNLLEFLIANDLPTTVINPLHTNLYRKGLSLRKTKTDKVDAHSIVTMLRTEDLKPYSQSSYHVRELKSLTRYRFSLVQDCARLKSSFARLCVILFPELEKLVPSLHMASVYALLAEFPNAKAISESHLTRLTNLLSEASKGRYSKDKAIEIRNAAKASIGSYSEVKSLELQQTIQLIQMMEEQIAQAEARINPIVDSLHSPIMTIPGIGYRMAAIIIAETGNFANFDKAEKVLAFAGLEPSVYQSGQLTSTHAKMVKRGSKYLRYALFNAAKYVCHWDDGFRQYLAKKRAEGKPYNIAVSHAAKKLTRVIFHLVKTNQSFSR

SEQ ID NO: 17214 - protein, 393 aa, unidentified
  source 1..393: note = protein_01de067
  REGION 4..163: note = RuvC_domain
  SITE 7: note = RuvC_P1
  SITE 60: note = RuvC_P2
  SITE 101: note = RuvC_P3
  SITE 103: note = RuvC_P4
  SITE 106: note = RuvC_P5
  REGION 266..355: note = Tnp_domain
  SITE 274: note = Tnp_P1
  SITE 304: note = Tnp_P2
  SITE 312: note = Tnp_P3
  SITE 313: note = Tnp_P4
  SITE 328: note = Tnp_P5
MICVGIDVAKDKHDCFIFNSEGEILADVFTIPNNAEGFDALLQTIRHCAKPADKIKVGLEATGHYSYNILGFLLDKGLPTYVINPLHTSLYRKSLSLRKTKTDRVDARTIATMLLSDVDLKPYTDTAYHNEELKSLTRYRFDKVKERAKLKQSVSRLVTILFPELEKMVPTLHAASVYAFLSEFPGAKQAARAHLTRLTNLLHVASKGRYGRNMAMGLRDAARCSVGSVMPAKSLELQHTIRLIRELDDEIEDIESAIQAMMEDIQSPITTIPGIGVRMGAMILAEIGDFSRFDSPDKILAYAGMSPSTYQSGQLSLSGAYSHMEKRGSKYLRYALYNATKYVCLWDPTFEAYLAKKRAEGKHYNVALSHATKKLVRLIYALENSRQPYNSVA

SEQ ID NO: 17215 - protein, 323 aa, unidentified
  source 1..323: note = protein_9105805
  REGION 8..150: note = RuvC_domain
  SITE 11: note = RuvC_P1
  SITE 52: note = RuvC_P2
  SITE 92: note = RuvC_P3
  SITE 94: note = RuvC_P4
  SITE 97: note = RuvC_P5
  REGION 191..278: note = Tnp_domain
  SITE 199: note = Tnp_P1
  SITE 229: note = Tnp_P2
  SITE 237: note = Tnp_P3
  SITE 238: note = Tnp_P4
  SITE 251: note = Tnp_P5
MNKDIKYFGIDISALVFDVTDSDGNYYQFRNNGLGFEKFTKLLNNTSHCVMEATGYYHYQLAYHLLESGIKVSVENPLSVKRFIQMGLSKIKTDKSDSKLICSYAEQVDLKLWKGNSKNEIECLQITRALSVYTKQSTMLKNKLHGESVLGNPSKVVLTSLKRSLRQLQREIKLLEDKLLVLVKEVHQDLLTRLKTIPGIGPKTAITLVVLTGGFDRFTSAGELCSYAGLTPVIRQSGSSVKGRPRISKIGNQKLRNLLFMCSFNACQYNKACRDLYERIVAKGKSKKLALIAVCNKLLKQAFAIAKSGLIFDQEYKSKLVRN

SEQ ID NO: 17216 - protein, 345 aa, unidentified
  source 1..345: note = protein_fded0f1
  REGION 9..169: note = RuvC_domain
  SITE 12: note = RuvC_P1
  SITE 68: note = RuvC_P2
  SITE 108: note = RuvC_P3
  SITE 110: note = RuvC_P4
  SITE 113: note = RuvC_P5
  REGION 209..295: note = Tnp_domain
  SITE 217: note = Tnp_P1
  SITE 247: note = Tnp_P2
  SITE 255: note = Tnp_P3
  SITE 256: note = Tnp_P4
  SITE 269: note = Tnp_P5
MTNIVKQVVGIDVAQKELVVSLGRIDQLIQKEVYACKTFANKPSGFAALLEWIKKHTDSSITVRYVMEATGVYHEQLAYYLTEQGFEVSIVLPNKISNYLKTLETKTITDKTVSQGICQYGLERTLEMWQRPKKIFRTLKQLTRERDQLIAERTMIKNQLHAEQAEAHPSEYSISRMNERINLINRQEKEIRSEMAENIKSDTGLIKQIANITSIPGVGKLTAVTVLAETNGFDLIRNKKQLVSYSGLDIKEKESGTSVKGKPKISKKGNRYLRKAMHLPALSAIRNEDRYKAVFVRLVSKHGIKMKATVAVQRKLLELIYIIWKTNQPYSKEHLQKASDNTNAA

SEQ ID NO: 17217 - protein, 391 aa, unidentified
  source 1..391: note = protein_b615c59
  REGION 5..162: note = RuvC_domain
  SITE 8: note = RuvC_P1
  SITE 60: note = RuvC_P2
  SITE 101: note = RuvC_P3
  SITE 103: note = RuvC_P4
  SITE 106: note = RuvC_P5
  REGION 265..351: note = Tnp_domain
  SITE 273: note = Tnp_P1
  SITE 303: note = Tnp_P2
  SITE 311: note = Tnp_P3
  SITE 312: note = Tnp_P4
  SITE 324: note = Tnp_P5
MTYFIGIDIAKYKHDCFIMDQDGTVIRDSFSFSNDKTGFALLLSVLDSLDPSHEKRIGFESTGHYGLNLMCFLESHDLSFMEINPILIKRFSSATTLRRTKTDKADAALITSYLTTVEYITYPTQSYHIHSLKSLTRSRDTLVRQRSQQLVMITNVMDKIFPEFKPFFNKSLKSSTAMYILKNYTVPSKIASMNSESYRKMSSKLRKTISYARFSKLRELAKNTVGQEDECLTFELHTYLELYQSLDSKIKEVEAYIEAEFKKVQSHIQTIKGIGWISAASIYSEYGGVENFQTPNQMLAYAGLDPSRNESGEHAYKGHMVKHGSSHLRYVLLNCAEMVIIHDSIFYEYYRKKREEGKHHRVALTHVARKLIRIIFFLEKNDTDYDPKKMR

SEQ ID NO: 17218 - protein, 397 aa, unidentified
  source 1..397: note = protein_9224b3f
  REGION 4..160: note = RuvC_domain
  SITE 7: note = RuvC_P1
  SITE 57: note = RuvC_P2
  SITE 97: note = RuvC_P3
  SITE 99: note = RuvC_P4
  SITE 102: note = RuvC_P5
  REGION 274..359: note = Tnp_domain
  SITE 282: note = Tnp_P1
  SITE 312: note = Tnp_P2
  SITE 320: note = Tnp_P3
  SITE 321: note = Tnp_P4
  SITE 334: note = Tnp_P5
MIAVGIDVSKSKSTVAILNSDGEILAKPYDIHHVESDIDNLITYLRSLHDDVKIVMEATGHYHLPVLKKLHNADLFICVMNPYLMKKYGDNEIRRGKTDKKDAMRMAFYALEKSYSLTRYSSLEQKYLDLKFLSRQYNQRVSTKVKNRIYLGNLLDETMPGIENILMSKTINPENNMLYKFIEKYHDFDTIKSMGQKRFLNSYAKLAEKIGCRNYQRKALQIYELASDSITTRGSDPYTILSIEQCLTLLKQSEVAAKATMVQMQSIAQTLPEYPTVHAMNGVGDNLAPRLIAEIGDVRRFTSGKALNAFAGNDAPPFQSGQYDSTNRNISKRGAPSLRKACYEVMQCLKMHKPDDPVYLFMIKKEEESKPLNVAKMAAVNKFLRIYYARVMEIYKS

SEQ ID NO: 17219 - protein, 385 aa, unidentified
  source 1..385: note = protein_988ad2e
  REGION 11..162: note = RuvC_domain
  SITE 14: note = RuvC_P1
  SITE 59: note = RuvC_P2
  SITE 99: note = RuvC_P3
  SITE 101: note = RuvC_P4
  SITE 104: note = RuvC_P5
  REGION 264..349: note = Tnp_domain
  SITE 272: note = Tnp_P1
  SITE 301: note = Tnp_P2
  SITE 309: note = Tnp_P3
  SITE 310: note = Tnp_P4
  SITE 322: note = Tnp_P5
MAPPRMPEAVIGLDVGKLSHWACVATRDGEIPLSAPVANREGDLDSLFGRFPDALVVVDQSRNIGALALARAKAAGMSAAYLPGLAAHGAARLFAGDAKTDERDAMVIAKTALGIPDALLPVGDPGPTVAAARALAAQRNFLTCENTRSKNRLRSILLESCPAFEALVDLSDGPQLRLMASLGGAWSVADAGPRRAAALTRGAARGKIEALVRSTASSTRPDAAAIAAEDRAVRLLARRISENSAEIDVITAEISALLEGDDTYRCLLTVPGIGPKTASELAISIDIEDFPSHDRLASYCGLAPRNRQSGTSISSVTASRQGNKRLKNLLIFSCNCLTRTEGRWGDYYARCRERGMPHGKALKALARKRLKVIYAIMRDRVPYAA

SEQ ID NO: 17220 - protein, 347 aa, unidentified
  source 1..347: note = protein_2d1cf9d
  REGION 1..105: note = RuvC_domain
  SITE 2: note = RuvC_P2
  SITE 42: note = RuvC_P3
  SITE 44: note = RuvC_P4
  SITE 47: note = RuvC_P5
  REGION 219..306: note = Tnp_domain
  SITE 227: note = Tnp_P1
  SITE 257: note = Tnp_P2
  SITE 265: note = Tnp_P3
  SITE 266: note = Tnp_P4
  SITE 279: note = Tnp_P5
MEHTGRYYEILAHQLSEANLFVSTINPKLIKDFDNDSLRKVKSDKADAVKIARYALDKWQNLKQYSVMDELRNQLKTMNRQFGFYMKHKTAMKNNLISILDQTYPGVNTYFDSPVRSDGNQKWVDFASTYWHVDCVRKMSLNAFIDHYQNWCKRKKYNFSQSKAEEIYGKAKELVPVLPKDAITKLIIKQAVDQLISVSTTVESLRTLMNETASKLPEYPVVMAMKGVGASLGPQLMAEIGDVSRFTHKGAITAFAGVDPGVNESGTYEQKSVPTSKRGSADLRKTLFQVMDVLIKTMPQDDPVYQFLDKKRAQGKPYYVYMTAGANKFLRIYYGRVKEYLASLPES

SEQ ID NO: 17221 - protein, 398 aa, unidentified
  source 1..398: note = protein_6e011d9
  REGION 4..160: note = RuvC_domain
  SITE 7: note = RuvC_P1
  SITE 57: note = RuvC_P2
  SITE 97: note = RuvC_P3
  SITE 99: note = RuvC_P4
  SITE 102: note = RuvC_P5
  REGION 271..358: note = Tnp_domain
  SITE 279: note = Tnp_P1
  SITE 309: note = Tnp_P2
  SITE 317: note = Tnp_P3
  SITE 318: note = Tnp_P4
  SITE 331: note = Tnp_P5
MISVGIDVSKGKSTVCFFKPGGEVLITPYEVTHTKDELGQLADRINSYGEEVRVVLENTGYYHWSVVKVLVDHGIFVSAVNPLKMKRFCSQNIRKVKNDRIDAIHIASYGLTYWHELIPIQSSEDTYRELLLLSRQYHNVISLLIKAKMNFGNLLDQVMPGITSIIRDDRGSKLTEFVKKYVHFQHIDSMGEARFVRDFCKWSQKQGYRVDHERQARKIFALVQNGIPVLPHTPTTKIVVLEALRRVNELENSRDIILAHMNELGKTLPEYSLISEMKCIGEGLTPRIIAEIGDVRRFHNKHSLIAYAGIDAPPFQSGSYTAMERHITKRGNKYLRKVIYEVCLSYIQHKPEGDPVYEFIEKKRSEGKCGKEALVAGINKFLRIYYGKVTDLYRELEL

SEQ ID NO: 17222 - protein, 405 aa, unidentified
  source 1..405: note = protein_65ab90e
  REGION 4..160: note = RuvC_domain
  SITE 7: note = RuvC_P1
  SITE 57: note = RuvC_P2
  SITE 97: note = RuvC_P3
  SITE 99: note = RuvC_P4
  SITE 102: note = RuvC_P5
  REGION 274..361: note = Tnp_domain
  SITE 282: note = Tnp_P1
  SITE 312: note = Tnp_P2
  SITE 320: note = Tnp_P3
  SITE 321: note = Tnp_P4
  SITE 334: note = Tnp_P5
MNAVGIDVSKGKSMVTILRPFGEIVSRPHEVRHSSAQINALIREIQSLDGDTRIVMEYTGRYHEPMARWLSDAGLFVSAVNPKLIKDFDNASLRKVKTDKADSVKIARYTLDKWHDLKQYGLMDELRNQLKTMNRQFGYFTKVKTAMKNNLISLLDQTFPGANTFFDSPARSDGSQKWVDFVDTYWHVDRIRCMSLSAFTEHYQKWCRRKGYAFQPDKPEEIYEAVRDIIAVLPKDEVTKFLVRQAVTQVNTVSAAVEELRARMNETASQLPEYPVVLAMKGVGTSLGPQLIAEIGDVTRFAHKGALTAFAGVDPGKNESGSYAQKSVRTSKRGSASLRKTLFQVMDVLIKTMPQDDPVYAFMDKKRSQGKPYYVYMTAGANKFLRVYYGRVKEYLLEHTESSEN

SEQ ID NO: 17223 - protein, 388 aa, unidentified
  source 1..388: note = protein_3caec02
  REGION 4..160: note = RuvC_domain
  SITE 7: note = RuvC_P1
  SITE 58: note = RuvC_P2
  SITE 98: note = RuvC_P3
  SITE 100: note = RuvC_P4
  SITE 103: note = RuvC_P5
  REGION 264..351: note = Tnp_domain
  SITE 272: note = Tnp_P1
  SITE 302: note = Tnp_P2
  SITE 310: note = Tnp_P3
  SITE 311: note = Tnp_P4
  SITE 324: note = Tnp_P5
MIYVGIDIAKLNHFAAAVSSEGEILIEPFQFSNDYDGFYLLLSKLAPLDQHSIIIGLESTTHYGDNLVRFLICKDFKVCVLNPIMTSSMRKNNVRKTKIDKVDTLVIAKTLMMQDSLRFSTLKDLDYIELKELGRFRQKTMKQRTRLKIQLTSYMDQVFPELQYFFKSGLHQKAVYALLKEAPMPKDIAYLHLTHLSNLLVKSSHGHFTKDMARELRVLAQRSVGLNDSSLSIQITQTIAQIELLDSQLFETELELANLVTCLHSVLMTIPGIGTVNGGMILGEIGDIHRFSTLGKLLAFAGLDPTVYQSGNFQAKRTHMSKRGSRVLRYALMNAAHNVVKNNATFKAYYDTKRAEGRTHYNALGHCAGKLVRVIWKMLTDEVEFNLE

SEQ ID NO: 17224 - protein, 387 aa, unidentified
  source 1..387: note = protein_ea25a3b
  REGION 4..159: note = RuvC_domain
  SITE 7: note = RuvC_P1
  SITE 57: note = RuvC_P2
  SITE 98: note = RuvC_P3
  SITE 100: note = RuvC_P4
  SITE 103: note = RuvC_P5
  REGION 263..347: note = Tnp_domain
  SITE 269: note = Tnp_P1
  SITE 299: note = Tnp_P2
  SITE 307: note = Tnp_P3
  SITE 308: note = Tnp_P4
  SITE 320: note = Tnp_P5
MYFVGIDISKFKHDCVVADSSGEVYCPSWSFANDQDGFSALAGLLSSIEGEKRIGFEATGHYGLNLKLFLEKQGYSFMELNPLLIKRFVHSKSLRKTKTDTLDALSIAQYMMTVEYKPYPTSFYHMDALKSLTRFRDSLVRQRSRQLTELTNILDKVFPEFKPFFKNRFSGTALYILCNYPSPENISSLNSRSYDILRKKSMGKFKMSDFVRLKELAKSTVGRTNKFLLFEMAAVLDIYSQLNSKVEEIEAKIKDHIIILNPPMLTMTGIGALSAAVILSEFGDFSNYESPSKMLSFAGLEPGYFQSGISEHTGRMVKHGSSHLRYAIMNCCVPLITHNIVFAEYYAKKRAEGKPYRVALSHVAKKLIRVIYALQTQNVPFNPEKLI

SEQ ID NO: 17225 - protein, 349 aa, unidentified
  source 1..349: note = protein_8a27a69
  REGION 12..153: note = RuvC_domain
  SITE 15: note = RuvC_P1
  SITE 58: note = RuvC_P2
  SITE 93: note = RuvC_P3
  SITE 95: note = RuvC_P4
  SITE 98: note = RuvC_P5
  REGION 217..317: note = Tnp_domain
  SITE 225: note = Tnp_P1
  SITE 255: note = Tnp_P2
  SITE 263: note = Tnp_P3
  SITE 264: note = Tnp_P4
  SITE 276: note = Tnp_P5
MSQTAQTAVAVIGIDIGKNSFHIVGHDERGAIVLRQKWSRGQMEARFANLPPCLIGMEACVGAHHLSRKLNGLGHDARLMPAKYVRPYSKGQKNDFRDAEAIAEAVQRPTMKFVATKTADQLDLQALHRVRERLVSQRTGIINQIRAFLLERGIAVRQGQRFLRAELPRILATPPDVLSPRMARVIEDLASDWRRLDERIEGLSAEIDVLARADSGCERLMSVPGIGPIISSAMVAAIGTGDAFTKGRDFAAWLGLVPRQMSTGDRTILGKISKRGNRYLRVLFVQAAWVVLIKPKSWERHGLKAWIEAAKKRLHHNVLAIALANKLARIAWSVLARGRGFEASKLQVA

SEQ ID NO: 17226 - protein, 321 aa, unidentified
  source 1..321: note = protein_72d086b
  REGION 8..150: note = RuvC_domain
  SITE 11: note = RuvC_P1
  SITE 52: note = RuvC_P2
  SITE 92: note = RuvC_P3
  SITE 94: note = RuvC_P4
  SITE 97: note = RuvC_P5
  REGION 191..278: note = Tnp_domain
  SITE 199: note = Tnp_P1
  SITE 229: note = Tnp_P2
  SITE 237: note = Tnp_P3
  SITE 238: note = Tnp_P4
  SITE 251: note = Tnp_P5
MSKNKQFLGIDVSKDVLDVYDYQGNWYQFKNDASGFKELLLITTDLTHCIMEATGYYHVRLAYFLTEKGVLLSVENPLKVKRFIQVNLSKVKTDKSDAKQLYNYGVSQSPSIWKGDSKEQQECLQIVRLLSVYTKQSTQLKNKLHGESVLGTPSKLVVNSLTRQLKNIQKEIVKLEDLLLENVKKSYQEEITLLKSIPGIGGKTALMLLVFTDGFKRFTSAKELCSYAGITPTIRESGSSIKGRPRISKMGNPKLRNLLFMCSFNACKYNKACRELYDRIVAKGKSKKLALIAVCNKLLKQAFAIVKSGLPYDANYKRMLD

SEQ ID NO: 17227 - protein, 344 aa, unidentified
  source 1..344: note = protein_2888371
  REGION 7..148: note = RuvC_domain
  SITE 10: note = RuvC_P1
  SITE 53: note = RuvC_P2
  SITE 88: note = RuvC_P3
  SITE 90: note = RuvC_P4
  SITE 93: note = RuvC_P5
  REGION 213..298: note = Tnp_domain
  SITE 221: note = Tnp_P1
  SITE 251: note = Tnp_P2
  SITE 259: note = Tnp_P3
  SITE 260: note = Tnp_P4
  SITE 272: note = Tnp_P5
MEQVSIIGLDLAKRSFQAHGALADGGVAFRKKLSREKVLAFFAEQPRCVVAMEACGSAHHWGRTIRDLGHEVRLIPPAYVKPFVKRQKNDAADAEAIAEAAVRPTMRFVAVKTEEQQGRAMLFRTRDLMVRQRTQLINALRGHLSEHGVVAAQGPANVKVLAEAVEDQGQGTSLPLLVVELARVFLDQIEGLSKRISELEKVTVHEAACGETTRRLQTMPGVGPITALAIETFAPPMDVFKRGRDFAAWLGLAPRQHSTGGKQVLGKVSKMGQRDIRRLLIIGAMAVVRSASRKGAPEGSWLQRLLARKPKMLVAIALANKMARSIWAMLAKAEDYRVPVAAAA

SEQ ID NO: 17228 - protein, 344 aa, unidentified
  source 1..344: note = protein_2699281
  REGION 8..162: note = RuvC_domain
  SITE 11: note = RuvC_P1
  SITE 64: note = RuvC_P2
  SITE 102: note = RuvC_P3
  SITE 104: note = RuvC_P4
  SITE 107: note = RuvC_P5
  REGION 205..292: note = Tnp_domain
  SITE 213: note = Tnp_P1
  SITE 243: note = Tnp_P2
  SITE 251: note = Tnp_P3
  SITE 252: note = Tnp_P4
  SITE 265: note = Tnp_P5
MKKNLFFIGLDISKADFAASIYQVPDQPIVTKEAIPNDRKGFEMLLLWLNDYHIDKKNCRICMEATGVYSQAIAYYLLFAGFPVSVEPPLKVKRAFDPVGHKTDPVDSKQIAEYAYRFQDELTSWKPKDEILEKIRQLLSVREQFTKQKVALDNSIQAYSKQRVQVALIKKAQKETLNQLKKQIARIDKELEKLIKQDPEIFQKASNLKSIPGYGMLLAAHLLVITENFTKIQNSKRLASFVGIVPYQHQSGTSVYKRAKIRHFGPGPSRKLLRLAAQSVATHNATFRRYYLRKLDQGKPKPLVLNNIANKLLKIACTIIRNNTRYIKDYRSINPMYLKSLKSA

SEQ ID NO: 17229 - protein, 325 aa, unidentified
  source 1..325: note = protein_8658120
  REGION 6..152: note = RuvC_domain
  SITE 9: note = RuvC_P1
  SITE 53: note = RuvC_P2
  SITE 91: note = RuvC_P3
  SITE 93: note = RuvC_P4
  SITE 96: note = RuvC_P5
  REGION 211..300: note = Tnp_domain
  SITE 219: note = Tnp_P1
  SITE 249: note = Tnp_P2
  SITE 257: note = Tnp_P3
  SITE 258: note = Tnp_P4
  SITE 270: note = Tnp_P5
MTIATIGIDLAKNVFAVHGVDHNGKTVLVKSRVTRAALPELIAGLPPSVIGMEACSGAHYWARLFRQYGHEPRLMAAKFVSPYRMAGKSGKNDAADAQAICEAVRRPHMRFLPVKDESQQAMQCMHRTRQGFIEEKTAIYNRLRGLISEFGVITPQSTDALRRIVSEQKSYLPLQVQQCVDDLLEHIDRIEDKVSEYDRTLSCMAKTDHRSQRLMELKGIGPTTDCALVASIGNAHDFKNGRQLAAWLGLTPSQYSSGGKSKLGRITKAGDSYLRTLLVQGARWVCSLVERRGYWRAVVAIAAKNARLCWASLHYGDDFKLYSVS

SEQ ID NO: 17230 - protein, 390 aa, unidentified
  source 1..390: note = protein_75df7cf
  REGION 4..163: note = RuvC_domain
  SITE 7: note = RuvC_P1
  SITE 60: note = RuvC_P2
  SITE 101: note = RuvC_P3
  SITE 103: note = RuvC_P4
  SITE 106: note = RuvC_P5
  REGION 266..353: note = Tnp_domain
  SITE 274: note = Tnp_P1
  SITE 304: note = Tnp_P2
  SITE 312: note = Tnp_P3
  SITE 313: note = Tnp_P4
  SITE 326: note = Tnp_P5
MIYAGIDVAKDKHDCFICNSDGEVLFNAFTIPNTMEGFDNLYQKILSVTDDLNKVKVGLEATGHYSYNLLGYLLDKGLPTFVINPLHTNLYRKSLTLRKTKTDKVDAHTIAMMLMSDVNLKSYSNTLYHNEELKSLTRYRFDKVSERAKLKQSIARLVNILFPELEKAVPTLHMKSIYALLSEFPSAHHIAEAHLTRLTNLLYEASKGRYNRDTAIRFRDIARNSIGSVMPAKSLELKHTIKLIKELDTEIKEIEEAIKSIMDKINSPILSIPGISYRMGAMIIAEIGDFDRFSSPDKILAYAGLSPSTYQSGQLTSTYSHMEKRGSRYLRYALFNATKYVCHWDSSFAEYLAKKQGEGKHYNVAISHAAKKLVRLVYHLEKTGQLYKAV

SEQ ID NO: 17231 - protein, 350 aa, unidentified
  source 1..350: note = protein_de671ca
  REGION 17..158: note = RuvC_domain
  SITE 20: note = RuvC_P1
  SITE 63: note = RuvC_P2
  SITE 98: note = RuvC_P3
  SITE 100: note = RuvC_P4
  SITE 103: note = RuvC_P5
  REGION 222..309: note = Tnp_domain
  SITE 230: note = Tnp_P1
  SITE 260: note = Tnp_P2
  SITE 268: note = Tnp_P3
  SITE 269: note = Tnp_P4
  SITE 281: note = Tnp_P5
MSKSAYERSHPIHVTTIGLDLAKNVFQVHGITLDDEVAFNRPLRRAQLLPFFSKLNPCLIGMEACSSAHHWARELTNFGHDVRLIPPIYVKPYVKRGKSDAIDAEAICEAVTRPTMRFVAIKTVEQQSLLSVHRARSLLVRQRTQLINGLRGMVAEFGVYIARGLARVIGFAENILTGEVLELPDIANEVIHNMCEHLMALHARVHWYEDRLKQVAKEDARVRLLRTIPGVGAVTASAIIASIGDGHQFSNGREFAAWLGLTPANKSSGGKEKLGRITKMGDQYLRSLLVVGMTSLVRQTKSHPERASKWLTSLLERKPARVATVAMANKTARIVWAVLTRNEPYTPHTA

SEQ ID NO: 17232 - protein, 341 aa, unidentified
  source 1..341: note = protein_56dd9cf
  REGION 5..150: note = RuvC_domain
  SITE 8: note = RuvC_P1
  SITE 53: note = RuvC_P2
  SITE 90: note = RuvC_P3
  SITE 92: note = RuvC_P4
  SITE 95: note = RuvC_P5
  REGION 210..298: note = Tnp_domain
  SITE 218: note = Tnp_P1
  SITE 248: note = Tnp_P2
  SITE 256: note = Tnp_P3
  SITE 257: note = Tnp_P4
  SITE 269: note = Tnp_P5
MDHFAGLDVSVKETSICIVDDTGRIVREVRVASEPEALLQVDPAYRLKRVGLEAGPLSQWLFSGLAEAGLPVICVETRHMRAVPKAQINKTDRNDARGMAQMMRAGLYRPVHVKTLRSQKLRMLLTHRKLLQSKAIAIDNDLRGTLRNFGLKVGVVGTVKFEARIKELVENLPDLAELVEPLLIVRRTLREQIGILHRRLLAIVRNDDVCRRLMTIPGVGPVVALTYRATVDVPARFRNSEAVGAVFGLTPSRYQSGEIDRPGAISRCGDEMMRAMLYEAAHIMLVRLAKWSWLKAWAMKIARHRGMKKAIVALARRLAVIMHRIWVDGTEFRWTREVTAA

SEQ ID NO: 17233 - protein, 341 aa, unidentified
  source 1..341: note = protein_123a990
  REGION 7..149: note = RuvC_domain
  SITE 10: note = RuvC_P1
  SITE 53: note = RuvC_P2
  SITE 88: note = RuvC_P3
  SITE 90: note = RuvC_P4
  SITE 93: note = RuvC_P5
  REGION 211..297: note = Tnp_domain
  SITE 219: note = Tnp_P1
  SITE 249: note = Tnp_P2
  SITE 257: note = Tnp_P3
  SITE 258: note = Tnp_P4
  SITE 270: note = Tnp_P5
MGEVSTIGLDLAKNVFQAHGADASGAVLFRKKLRRHQLLTFFAGQKPCTVAMEACSSSHYWAREIAKLGHSVRLISPAYVKPFVKRQKNDAADAEAICEAAQRPTMRFVAPKSEQAQAAAVVFRARDLLVKQRTQIINALRGHLAEFGIVVAKGPARVPQLVRAVADPEEPIPELARPILQMLIETLRGLDEQVARLDGEIAQRAKEDETARRLMTIPGVGPVIAVALAALAPPAETFRRGRDFAAWVGLTPLQRSTGGKQKLGATSKMGERTLRRLLIIGANTILIRAARNGVPASSWLARMMARKPPMLVRVALANKMARIVWALLARGEVHRAPAVGA

SEQ ID NO: 17234 - protein, 319 aa, unidentified
  source 1..319: note = protein_38f0d09
  REGION 3..148: note = RuvC_domain
  SITE 6: note = RuvC_P1
  SITE 50: note = RuvC_P2
  SITE 90: note = RuvC_P3
  SITE 92: note = RuvC_P4
  SITE 95: note = RuvC_P5
  REGION 189..273: note = Tnp_domain
  SITE 197: note = Tnp_P1
  SITE 226: note = Tnp_P2
  SITE 234: note = Tnp_P3
  SITE 235: note = Tnp_P4
  SITE 246: note = Tnp_P5
MFVGIDVAKAELVVSVRPTMERFTVANDERGVRTLVERLRAIGPELIVLEATGGYELLGVAALAAAALPVVVVNPRQVRDFAKATGQLAKTDRIDADILARFAEVVRPAVRVIPDAEAQELEALLARRRQLLEMLQAERNRLGQVFGKGKRLVRKSLKAHIAFLERELRMTDTDLGEMVKNSPAWRERDELLQSVPGVGPVLSRTLLADLPELGRLSRREIAKLVGVAPLSRDSGTMRGRRFVQGGRATVRAVLYMAALVATKRNAVIRGFYQRLVAAGKPKKLALVACMRKLLTILNTMVRMRTRWNPAAACGMLTTA

SEQ ID NO: 17235 - protein, 325 aa, unidentified
  source 1..325: note = protein_62f9b5c
  REGION 6..158: note = RuvC_domain
  SITE 9: note = RuvC_P1
  SITE 56: note = RuvC_P2
  SITE 94: note = RuvC_P3
  SITE 96: note = RuvC_P4
  SITE 99: note = RuvC_P5
  REGION 199..286: note = Tnp_domain
  SITE 207: note = Tnp_P1
  SITE 237: note = Tnp_P2
  SITE 245: note = Tnp_P3
  SITE 246: note = Tnp_P4
  SITE 259: note = Tnp_P5
MKNLVLGIDISKDTLDYCILNSQSIQVESRGIIDNTKKSIDQWLKKFDEHAIFALEHTGHYGAILIDCLSRNNFQFYVINPLELKKSLGIQRGKTDTKDAYRIAEYSITNKHKLAPYQLPSKKLSTLKALVTARERYVKISVQIQNSLKANEILNKSVDVKMLIREESKQYKSIEKSIKNIEAQMQELINQDENLKDSYKKITKVIGVGPVIAIKCIVETENFIKFSNARKFSCHCGLAPFPYQSGSSVKGRTKTHYLRDKSLKAMLTKGAISAIQHDPQIKAYYKRKIEEGKHHMNVKNAVANKIVLRIFAVAKREEPFVKLAA

SEQ ID NO: 17236 - protein, 389 aa, unidentified
  source 1..389: note = protein_b1c73a4
  REGION 4..159: note = RuvC_domain
  SITE 7: note = RuvC_P1
  SITE 57: note = RuvC_P2
  SITE 98: note = RuvC_P3
  SITE 100: note = RuvC_P4
  SITE 103: note = RuvC_P5
  REGION 264..351: note = Tnp_domain
  SITE 272: note = Tnp_P1
  SITE 302: note = Tnp_P2
  SITE 310: note = Tnp_P3
  SITE 311: note = Tnp_P4
  SITE 324: note = Tnp_P5
MFYLGIDIGKNTHVASLVDDKKKVIFKAFSFSNSIDGAESLILKLEAFKNELEVGMEATGHYWLSLYSYLVEKNFTVRVINPIQTDGWRQGVEIRKRKTDVIDSLLIADLLRYGDFVETSLSNEDYLSLRNLSRFRSYLISSIGDLKRKTIALLDQVFPEYASSFSNIFGKTSKEILSNFSTPSDFEDINSDDLNTFLESVSKKNYASKKIDELSKKASSSFGINFCLDSFSLQIKILIEQISFIQNQVSDVENEIELLLEKLNSPITTIPGIGSVNAATILGEIGDIKRFSNPSKLVAYAGLDASVSQSGEYESTYNHMSKRGSPYLRRALFQSALRAEFCDPVFSDYYQKKISEGKHHLVATNAVARKLCHTIFAVLTKNEPYQVQS

SEQ ID NO: 17237 - protein, 345 aa, unidentified
  source 1..345: note = protein_de4e197
  REGION 5..152: note = RuvC_domain
  SITE 8: note = RuvC_P1
  SITE 55: note = RuvC_P2
  SITE 92: note = RuvC_P3
  SITE 94: note = RuvC_P4
  SITE 97: note = RuvC_P5
  REGION 212..299: note = Tnp_domain
  SITE 220: note = Tnp_P1
  SITE 250: note = Tnp_P2
  SITE 258: note = Tnp_P3
  SITE 259: note = Tnp_P4
  SITE 271: note = Tnp_P5
MDHYAGIDVSLECSSVCVVDTAGKIVREGKVASEPAALIAWLRLLGFDLARIGLEAGPLSQWLYAAMREAGLAVELLETRHVHAAFKVMPVKSDRNDARGIAQLMRLGWFRPVHCKSIAAQEVRAMLTARKLVQSKLRDIENSLRGILRGFGLKVGKTTERSFAGRAQELVAGHPALETIVEALLAVHAVLKREFDSFEKRVRTMARAHQQTKLLMTTPAIGPVIALTYASAIDDPGRFKSSKAAGPHFGLTPKKYQSGETDYTGRISKIGDASVREALYQAAHIMLTKPVKGCSELKSWAMRIAKRAGMRKAKVALVRKLAVILHRMLADGQVFNPAARTVTAA

SEQ ID NO: 17238 - protein, 420 aa, unidentified
  source 1..420: note = protein_9cc45dd
  REGION 21..177: note = RuvC_domain
  SITE 24: note = RuvC_P1
  SITE 74: note = RuvC_P2
  SITE 114: note = RuvC_P3
  SITE 116: note = RuvC_P4
  SITE 119: note = RuvC_P5
  REGION 291..380: note = Tnp_domain
  SITE 299: note = Tnp_P1
  SITE 329: note = Tnp_P2
  SITE 337: note = Tnp_P3
  SITE 338: note = Tnp_P4
  SITE 351: note = Tnp_P5
MIVGWNLITQFLIGGLFMNAVGIDISKGKSMISIMRPLGEIVSKPFEISHTPSELDNLANYLKSLEGETKIIMEYTGKYYQPIAQFLIEKGFFVSIIHAKLIHDFGNNSIRKVKTDKADAIKIANYGLTNWQELRAQTNEDKSRILLKSYNRQYNQYMKTKTALKNNLIAILDQTFTHCNNLFSSPRKPDGHEKWVDFTNRFWHAECVTKQSLNAFTKTYNSWCRKNGYYQNSKKAAEIYKLAQDCLPTLPYNNFTKQLVKLAVKQVNEVAITISTLQKEMNQLASTLPEYPIVLSLGGVAETLGPQLIAEIGDIRRFNKKQSLVAFSGVDAPPFQSGTFESKSRKISKRGSSNLRKTLFQVMICLLQTTLVNDPVYQFLDRKRQEGKNYYVYMVAGCNKFLRIYYARVKEYLISTEEFL

SEQ ID NO: 17239 - protein, 407 aa, unidentified
  source 1..407: note = protein_f07dac0
  REGION 5..164: note = RuvC_domain
  SITE 8: note = RuvC_P1
  SITE 61: note = RuvC_P2
  SITE 101: note = RuvC_P3
  SITE 103: note = RuvC_P4
  SITE 106: note = RuvC_P5
  REGION 272..358: note = Tnp_domain
  SITE 280: note = Tnp_P1
  SITE 311: note = Tnp_P2
  SITE 319: note = Tnp_P3
  SITE 320: note = Tnp_P4
MRLFVGDDWAEDHHDVELMGEAGRVLARRRLPEGVAGIARLHELIGQHLGQDGEDAEVVIGIETDRGPWVAALVAAGYTVYAVNPLQASRYRSRHGVSGAKSDRGDSHMLGDMVRTDSHQLRVVAGDSPEAGAVKVVARTHKTLIWERTRQTQRLRHQLRDYFPAALAAFEDLDAPDALELLAKAPDPARAARLTRAQVSAALKRARRRDIPGKATAIMAALRSAQLGQPHAITAAYAATVRALIAVIATLNEQVKALQGEVEAVFGSHPDAEIYLSQPGLGHVLGARVLGEFGDDPDRYASGKARKNYAATSPITRASGKKKTVAARFIRNDRLTDALMAQAFAAISTSPGARALYDAERARETEHNPALRKVANRLVGIQHGCLKTRTLYDEATAWPQHENQLAA

SEQ ID NO: 17240 - protein, 403 aa, unidentified
  source 1..403: note = protein_cb1a52e
  REGION 5..161: note = RuvC_domain
  SITE 8: note = RuvC_P1
  SITE 58: note = RuvC_P2
  SITE 98: note = RuvC_P3
  SITE 100: note = RuvC_P4
  SITE 103: note = RuvC_P5
  REGION 275..362: note = Tnp_domain
  SITE 283: note = Tnp_P1
  SITE 313: note = Tnp_P2
  SITE 321: note = Tnp_P3
  SITE 322: note = Tnp_P4
  SITE 335: note = Tnp_P5
MNNCVGIDVSKGKSMVAIMRPCGEVVALPFEVHHTSYELTKLSKQIRSLEGETRIVMEATGNYHLPIAQWLSDDNFYVSVVNPILIHNYENNSLRKVKTDKKDAIKIANYGLDRWDKLRQFIPTDEIRALLKCCCRQLQQTSKVQTMLKNNLISLLDNVFPGVNELFCSPVRKDGSEKWVDFVAKFWHCECVCGLSPKAFSERYRKWCNKCGYHYSEDKAEDIYVSACGHVCVMPKTDSTKRIVLGAVSQLQSVTTSVAKLKAEMTFLAEQLPEYGIVMQMFGVGSSLGPQLMAEIGDVRRFASKKSLVAFAGIDSPPCDSGKIYGNHRSITKRGSASLRRTLFILMTVYLQRSPVNEPVYQFMDKKRSEGKPYRVYMMASANKFLRIYYATVKKYLDSLEES

SEQ ID NO: 17241 - protein, 313 aa, unidentified
  source 1..313: note = protein_859e295
  REGION 10..155: note = RuvC_domain
  SITE 13: note = RuvC_P1
  SITE 58: note = RuvC_P2
  SITE 98: note = RuvC_P3
  SITE 100: note = RuvC_P4
  SITE 103: note = RuvC_P5
  REGION 183..278: note = Tnp_domain
  SITE 202: note = Tnp_P1
  SITE 231: note = Tnp_P2
  SITE 239: note = Tnp_P3
  SITE 240: note = Tnp_P4
  SITE 251: note = Tnp_P5
MKTSPLRHEIGVDVAKDHLDVFDGSTHWQVANTPAGIRSLVKRLRAKAPLEQFRLTCESTGRYGHRLANLALKAHLPVSIANARAVRDYAKATGRLAKTDRIDASAIAAFARTVDPPTLGPAWHEHQAFVELHARMQALIAQVAAQKASLHQYHAPQIRAEIRSEIALLERRVANYEKKLEAKVNASATMERRKKRMIAIKGVGKRTALTLLSVVSELGTLNRREAAALVGLAPMNRDSGKLRGKRCIQAGRARARHALYLAALSASRYHPNLSPFYQRLRAAGKSAKIALCAVARKLIIQINSALKPLSAST

SEQ ID NO: 17242 - protein, 408 aa, unidentified
  source 1..408: note = protein_b7fc59a
  REGION 5..166: note = RuvC_domain
  SITE 8: note = RuvC_P1
  SITE 63: note = RuvC_P2
  SITE 108: note = RuvC_P3
  SITE 110: note = RuvC_P4
  SITE 113: note = RuvC_P5
  REGION 281..368: note = Tnp_domain
  SITE 289: note = Tnp_P1
  SITE 319: note = Tnp_P2
  SITE 327: note = Tnp_P3
  SITE 328: note = Tnp_P4
  SITE 341: note = Tnp_P5
MKLFIGIDVSSTDLETVMISSEDNEIIFQGKFANDITGASEIKDQILKLAQPARFDQIVIGMESTSIYSFHPAFFFKNDAELAKFNVQVVVINPRQTKRYHDIFEDNKNDHIDAFYIADYLRVGRYTVGIVRQENYSALQRLTRTRYELTQSLVRAKQHFLHNLYYKANNLAIGKQKTSVFGATMMDLLIEDMTLDEIVNTPTEALADYLSHKGRGRFADPQGLAKDIQKAVRSSYRLGKVMNDSVDTVLAVYAKEIKTFQKMIKELDDAIAQIVDVIPEEQILQSIPGIGPVYAAGIIAEIGQIDRFEDETKLAKYAGLTWKQNQSGKFESTTTPLLRTGDSYLRYYLIEAANRVRREDSVFKEYYSRKYQEVQRTPTKRALVLTARKLIRVIFYLLKNHQIYKPKE

SEQ ID NO: 17243 - protein, 429 aa, unidentified
  source 1..429: note = protein_4e37fc0
  REGION 19..180: note = RuvC_domain
  SITE 22: note = RuvC_P1
  SITE 78: note = RuvC_P2
  SITE 119: note = RuvC_P3
  SITE 121: note = RuvC_P4
  SITE 124: note = RuvC_P5
  REGION 288..374: note = Tnp_domain
  SITE 296: note = Tnp_P1
  SITE 326: note = Tnp_P2
  SITE 334: note = Tnp_P3
  SITE 335: note = Tnp_P4
  SITE 347: note = Tnp_P5
MNYTQNEKIEQVTDTTLVVGIDIGSQLHYARAFDNRGRELTKKVFSFGNDLEGFNSFNQWVESLKTENNKTNVIIGCEPTGHYWFALAKYVADHQKTLVMVNPFSVKKIKELDDNSPKKTDAKDPKTIAKLVVDGRYSIPYTPEGIYAEIRDLVYSRDRIVKQHNISANRIQRWLAIHFPEYLGLYTRFDASCGLAVLEKAPLPMDVIALGVDGIRKIWHEKKLRGRGVTEDRAKTLVEAAHNSIGLDGGAGTRSELYMLLEEHKLWTSQLESVERVIGETVLKVKHVENLLAIKGVGIITIAGFIAEVGDIRRFKSPKQIQKYAGLEIVENSSGKHKGKSKISKRGRRKLRKILYQVMIPLLASNKEFRQIYDYYVCRVKNPLKRRQAMIAVSCKLIRVFYVVLTKGTDYDRFKMMSDIHHESEQTAA

SEQ ID NO: 17244 - protein, 343 aa, unidentified
  source 1..343: note = protein_f892db7
  REGION 6..148: note = RuvC_domain
  SITE 9: note = RuvC_P1
  SITE 52: note = RuvC_P2
  SITE 87: note = RuvC_P3
  SITE 89: note = RuvC_P4
  SITE 92: note = RuvC_P5
  REGION 211..300: note = Tnp_domain
  SITE 219: note = Tnp_P1
  SITE 249: note = Tnp_P2
  SITE 257: note = Tnp_P3
  SITE 258: note = Tnp_P4
  SITE 270: note = Tnp_P5
MQVVRIGLDLAKYVFDVYGVDCHGKVVLRKTLRRDAVARFFVNLPQCLVGMEASNGAHYWARVLSDLGHEVRLISPQFVTPYVKSNKNDRNDAEAICEAVSRPSMRFVPPKSIDQLAIQAVHRVRRRLVADRVRLVNQARGLLSEHGIVIARDITQLRRGLAVIVGNDNDGLSDMVRALMRELQAELVELDRRIATYDRRIREIFRSNDQCQQLGKIEGIGPLTATALIAAVGDRTCFKNGRQFAAWLGLVPKQRSSGGRARLLGISKRGDRYLRTLMIHGARAALGKAAGKQGPRSRWLGKLRARRHPNVAAVALANKNARIVWAMLKGETVYEPMPPVKAA

SEQ ID NO: 17245 - protein, 328 aa, unidentified
  source 1..328: note = protein_0b787c0
  REGION 7..150: note = RuvC_domain
  SITE 10: note = RuvC_P1
  SITE 55: note = RuvC_P2
  SITE 95: note = RuvC_P3
  SITE 97: note = RuvC_P4
  SITE 100: note = RuvC_P5
  REGION 197..284: note = Tnp_domain
  SITE 205: note = Tnp_P1
  SITE 235: note = Tnp_P2
  SITE 243: note = Tnp_P3
  SITE 244: note = Tnp_P4
  SITE 257: note = Tnp_P5
MENFNYVGIDVSKLTFDVAIESNGKYVHHKFKNNEEGFAKLFSKLSPDLHCCVMEASGPYYLKLAFYLAEHGIAVSVVNPLVIRRFSQMRLLRSKTDKKDALTIANYGKTERPELWEKTPTYILELKQMQAHSQMLNKNRSALVRHIEAFSANPVQSAMVMQSCNDQVKSIDQQLKLIEKGMRQIIEKEHKEHKEQYKQLKSIPGIGPKTAMELIVASAGFTKFTSAKQLCSYIGLSPRIFESGTSVKGKSRICKMGMSRVRAILYVCTWSAKKSNKACRELFERLVEKGKPKKVALIAVANKLLKQAFAIATGKQYYDENKLNFSCI

SEQ ID NO: 17246 - protein, 351 aa, unidentified
  source 1..351: note = protein_be757bc
  REGION 6..154: note = RuvC_domain
  SITE 9: note = RuvC_P1
  SITE 52: note = RuvC_P2
  SITE 92: note = RuvC_P3
  SITE 94: note = RuvC_P4
  SITE 97: note = RuvC_P5
  REGION 257..312: note = Tnp_domain
  SITE 265: note = Tnp_P2
  SITE 273: note = Tnp_P3
  SITE 274: note = Tnp_P4
  SITE 285: note = Tnp_P5
MTETNIGIDISKDHLDVHRLPGDERRRFDNSKAGHKALIHWIGETPARVVYEPSGRYHRTLKRALAAAGMPIAKVNPRQARRFAEATGNLAKTDALDAAMLTRMGAVLSLEARPVPSAIINELRDLRTARNALIKDQVAAQTRAKAITLPLLKRQNAARLKQIEAQREAVDAAINALMQGDPDLAQRFAILCSIPGIAEVSAAMLLIEMPELGSLDEKQVAARKHFQAKWPHLAARKMRQDEGNFQAKWPHLAARKMRLTKSSTGLAPIARQSGNWKGKSFIRGGRQQVRQGLYMPALVAIRFNADLKTKYEQLIKAGKAPKQAITAIMRKLIILTNALLKKGRKWQTRVA

SEQ ID NO: 17247 - protein, 413 aa, unidentified
  source 1..413: note = protein_47e78f8
  REGION 5..167: note = RuvC_domain
  SITE 8: note = RuvC_P1
  SITE 64: note = RuvC_P2
  SITE 109: note = RuvC_P3
  SITE 111: note = RuvC_P4
  SITE 114: note = RuvC_P5
  REGION 285..372: note = Tnp_domain
  SITE 293: note = Tnp_P1
  SITE 323: note = Tnp_P2
  SITE 331: note = Tnp_P3
  SITE 332: note = Tnp_P4
  SITE 345: note = Tnp_P5
MKLFVGIDVSSKDLQVVALDSEDQNKRLINDSFVNDLYGASELKKQILDLAQNKHYDQIIIGMEATSIYSFHPAYFFQNDEDLQKLNVETDVINPKETSRFHKVFEESKTDPLDAYYIALYLSFGHYRVSIARQDNYLALERLTRTRYELVQELTRTKQHFIEALYYRVNKLITVDKDKINTPLFGATMMSIVTDSKTLDEIADMPTEDLISYLQVKGRGRFSDPDTLAKAIKKAVRGSYRLGKVMTDSIDAVLSVHYNMIQSFNESIKDLEKAIDRIVDALPESKILESIPGIGKTYTAGIIAEIGSIDRFDKEEQLAKYAGLTWNQYQSGDHSNEHTPMARTGNRYLRYYLIEAANLARLHDPVFKKYYQKKYDEAVYSPHKRACTLTARKLVRVIFKLLKDDKLYRTPRS

SEQ ID NO: 17248 - protein, 337 aa, unidentified
  source 1..337: note = protein_8ff260c
  REGION 1..96: note = RuvC_domain
  SITE 34: note = RuvC_P3
  SITE 36: note = RuvC_P4
  SITE 39: note = RuvC_P5
  REGION 210..297: note = Tnp_domain
  SITE 218: note = Tnp_P1
  SITE 248: note = Tnp_P2
  SITE 256: note = Tnp_P3
  SITE 257: note = Tnp_P4
  SITE 270: note = Tnp_P5
MPVASFLYDSGFYVSVVNAMLVHGYGNNSLRRVKTDKKDAVKLANYGLDHWLTLPDTSEDEVRLMLKTTCRQYQQCTKVQTMLKNNLISLLDTAFLDANRLFTSPTRADGSEKWVDFISAFWHCECVCELSEKAFTAKYQKWCKRHGYNFSQDKALDIYTSACGHFSVMPKNDTTKILVEQAVSQLQATSAALAALRNEMQSLAASLPEHPIVMGMFGVGPALGPQLMAEIGDVRRFHSKKALVAFAGIDAPPYQSGQMEIRSRSISKRGSAVLRRTLFLVMSAVLRCSPADEPVYQFMDRKRIEGKPYRVYMMASANKFLRIYYATVKQYLDSLEA

SEQ ID NO: 17249 - protein, 409 aa, unidentified
  source 1..409: note = protein_c780dec
  REGION 19..179: note = RuvC_domain
  SITE 22: note = RuvC_P1
  SITE 74: note = RuvC_P2
  SITE 114: note = RuvC_P3
  SITE 116: note = RuvC_P4
  SITE 119: note = RuvC_P5
  REGION 282..369: note = Tnp_domain
  SITE 290: note = Tnp_P1
  SITE 320: note = Tnp_P2
  SITE 328: note = Tnp_P3
  SITE 329: note = Tnp_P4
  SITE 342: note = Tnp_P5
MASSTSHIYFERMFFMFLVGIDIGKNKHSFCIIEKETGELIVKPKFFDNNNVGFEELISSIQKLSNQDILIGMEDTGHYHFTLLKFLLDKKYQVALINPVTTNLTRKLQGGITKTDKLDTLTICDVLSSSQRVKSYRITKVDRFDMYEQKQLTREHHNLKEQLNVLKNRLQKSIDIVFPEFNSLFDSKYGIVYVNILKEFGSADAVARADIRTIRKCFDIKGKGRRIALTAEKLKEAAKNSVGFPSTAEVVQIKHLIIQVKLIEEQISEIDKKIEEFSISNNSPILSIPGISHFSGTSILAELGDIHNYSKPSQVIKFAGVAPITYESSQFTAQHTAITKKGSKYLRKTLYQIITSVIKNNEVFRNYYQLKLSQGKGNRCAQGHCVRKLMRVIFHLLSTNTQFNPSLLV

SEQ ID NO: 17250 - protein, 395 aa, unidentified
  source 1..395: note = protein_a89c026
  REGION 5..156: note = RuvC_domain
  SITE 8: note = RuvC_P1
  SITE 57: note = RuvC_P2
  SITE 96: note = RuvC_P3
  SITE 98: note = RuvC_P4
  SITE 101: note = RuvC_P5
  REGION 266..352: note = Tnp_domain
  SITE 274: note = Tnp_P1
  SITE 304: note = Tnp_P2
  SITE 312: note = Tnp_P3
  SITE 313: note = Tnp_P4
  SITE 325: note = Tnp_P5
MSHILSFDIAKDKSVYCFIDELRNVIIDATLIKHKKDEFDLLFNKVKNHSNLIVIMESTSIYHLPVENFFRSKGIDTIVMNPKLVKQFKDTLNKSKTDKLDCFKIARCYLGTIDNFYQKQDEYFMCNPLARQYWSLVEGQTRLKNRYRQLIDIVFPEFALIFNDLYDDLALNFIHDFPHPVLFVNRRIDYLMNYLKEKNGTTQAYRFKNKVLKMKELASNSLCFVAFDSYQVQNLVQVIEMIQYHKSEINKIKNQLINDMKDKELFKIINSIPGFGEFSTALFLAEVGDITRFDDKYQFISFIGIDSVTSQSGVSAYHGPISKTGCKFGRTILFNIVTTVLQISAHTDKTNSIYLFFRKKQSEGKHHYKCIIACETKLCKIIYKLCSSNCLYENK

SEQ ID NO: 17251 - protein, 285 aa, unidentified
  source 1..285: note = protein_4715a53
  REGION 7..148: note = RuvC_domain
  SITE 10: note = RuvC_P1
  SITE 53: note = RuvC_P2
  SITE 88: note = RuvC_P3
  SITE 90: note = RuvC_P4
  SITE 93: note = RuvC_P5
  REGION 211..255: note = Tnp_domain
  SITE 219: note = Tnp_P1
  SITE 249: note = Tnp_P2
MMKDTMIGVDLAKDVFQLHAASMTGQPQFCRKLSRQSFPGFMAKQPPAVVVMEACGSAHYWAREMVKLGHEVKMIAPRYVKPFVKRQKNDAADAEAIVIAAQRPEMRFVLPKSAEQQSRAILFRARERLVHQRTELVNALRASLYEFGYVVPQGFRQIKRIAEILEAPNSDLPDLMREECRDMVEQIAEQTNRINARTAKIQALANEADTARRLQTIPGVGPITALAVEAFAPAMENFSCGRDFAAWLGLVPRSFPLVVKNDLAVLLRLGKLISADCSSLARCHV

SEQ ID NO: 17252 - protein, 313 aa, unidentified
  source 1..313: note = protein_c074544
  REGION 9..163: note = RuvC_domain
  SITE 12: note = RuvC_P1
  SITE 64: note = RuvC_P2
  SITE 102: note = RuvC_P3
  SITE 104: note = RuvC_P4
  SITE 107: note = RuvC_P5
  REGION 258..313: note = Tnp_domain
  SITE 266: note = Tnp_P1
  SITE 297: note = Tnp_P2
  SITE 305: note = Tnp_P3
  SITE 306: note = Tnp_P4
MQDLLEVCCGLDVHKETIVACLLKGSVNDEKPQKIIRTFSTLLEGLEELKAWLESENCHNVAMESTGIYWQPIYNVLESAFDGTMSIIVANARHMKNVPGKKTDMKDAEWIATLLRAGLLNGSFIPPQEIRELRDLTRYRKSIIEEISSQKNRIEKHLQSCGFKLSNFLTDIFGVSGRAILNHIAEHGSITAKEVENYVRGKARAKLNDIKLSISGRMNKHQREFLKLLLKHLDEMYEHLREIEENINSELDKYKRQIEQLDSIPGIDVTAAAAIIAEIGTDMSKFKTQEHICSWAGLSPGNNESAGKKSPLE

SEQ ID NO: 17253 - protein, 337 aa, unidentified
  source 1..337: note = protein_9aa53c9
  REGION 7..149: note = RuvC_domain
  SITE 10: note = RuvC_P1
  SITE 53: note = RuvC_P2
  SITE 88: note = RuvC_P3
  SITE 90: note = RuvC_P4
  SITE 93: note = RuvC_P5
  REGION 212..298: note = Tnp_domain
  SITE 220: note = Tnp_P1
  SITE 250: note = Tnp_P2
  SITE 258: note = Tnp_P3
  SITE 259: note = Tnp_P4
  SITE 271: note = Tnp_P5
MSDIAIIGIDLAKSVIQLHGSDKSGRCIYRKKLRRHQVLPFLAKSPQCLIGMEACSGSHYWAREIQKLGHNVKLIPPQFVKPYVKTNKTDAADAEAICEAVTRPNMRFVPIKSPDQQGILLVHRERDGLIKERTAVINRIRAVFSEFGIAIPAGPKKLKEWMLKSYGDHETELSKVMTRLIERMTERLSLIEAEIAILDKEIDNQNKVDTRCKRLLEILGVGRLAASAIVASVGNAKEFKSGRQFSAWLGLVPRQHSSGGKQNLQGISKRGDAYIRKMLIHGARAVVRHMNKNNAPVEWIEQLSMRRHNNVVIVAVANKLARIVWALLSKEQRYAIS

SEQ ID NO: 17254 - protein, 411 aa, unidentified
  source 1..411: note = protein_2b93ef4
  REGION 5..164: note = RuvC_domain
  SITE 8: note = RuvC_P1
  SITE 61: note = RuvC_P2
  SITE 101: note = RuvC_P3
  SITE 103: note = RuvC_P4
  SITE 106: note = RuvC_P5
  REGION 272..358: note = Tnp_domain
  SITE 280: note = Tnp_P1
  SITE 311: note = Tnp_P2
  SITE 319: note = Tnp_P3
  SITE 320: note = Tnp_P4
MRLFVGDDWAEDHHDVEVMDEAGRVLAKRRLPEGVAGIAQLHELVGRCLPEDAQDAEVAVGIETDRGPWVAALVAAGYTVYPVNPLQASRYRDRHGVSGAKSDGGDSHMLADMVRTDSHQLRPAAGDSPEAAAVKVVARTHKTLIWERTRAVQRLRHQLREYFPAALEAFEDLDAPDALELLGKAPEPARAAKLTRAQIAAALKRARRRGIAEKTDAILAALRGEHLGLPAPLTAAYAATARSLVAVITTLNEQVKILEEQVREHFGRHPDAEIYQSQPGLAAILGARVLGEFGDDPGRYADAKSRKNYGGTSPITRASGKKKVVIARFIHNDRLIDALMSWAFSALNASPGARAYYDQLRTKGIEHNDALRRVANRLVGILHGCLKTRTLYDEATAWGHRENLGQSHVAA

SEQ ID NO: 17255 - protein, 393 aa, unidentified
  source 1..393: note = protein_7734c1a
  REGION 4..160: note = RuvC_domain
  SITE 7: note = RuvC_P1
  SITE 58: note = RuvC_P2
  SITE 99: note = RuvC_P3
  SITE 101: note = RuvC_P4
  SITE 104: note = RuvC_P5
  REGION 265..352: note = Tnp_domain
  SITE 273: note = Tnp_P1
  SITE 303: note = Tnp_P2
  SITE 311: note = Tnp_P3
  SITE 312: note = Tnp_P4
  SITE 325: note = Tnp_P5
MPFLGIDIGKNTHVASLVNADGKTLFKAFSFSNTMDGGDSLLAKLSDYTPDSIQIGMEATGHYWLSLYSFLLDAGYSVHVVNPIQTDGWRKGTEIRKRKTDIIDSLLIADLIRYGDFLETSLANEDTLALRNLSRFRGYLVSSIGDLKRKTIALLDQVFPEYQSVFSDVFGQTSKELLLHFQTADDFVAISADQLEGVLDKMTKKSFARRKVQEISQLAGHSFGLSFCKDSFSLQIRMLLEQIQFIEEQVHDVEQEISQIMDKMDSPILTIPGIGLVNGAVILGEIGDISRFSSPVKLVAYAGIDASVSQSGQYQSTNNKMSKRGSPYLRKAFFQAALVAAFNDPTFSAFYQKKRAEGKHHLTAIGAVARKLCYVTHAILKNNTPYVVQTPKE

SEQ ID NO: 17256 - protein, 342 aa, unidentified
  source 1..342: note = protein_e76917e
  REGION 5..152: note = RuvC_domain
  SITE 8: note = RuvC_P1
  SITE 55: note = RuvC_P2
  SITE 92: note = RuvC_P3
  SITE 94: note = RuvC_P4
  SITE 97: note = RuvC_P5
  REGION 212..299: note = Tnp_domain
  SITE 220: note = Tnp_P1
  SITE 250: note = Tnp_P2
  SITE 258: note = Tnp_P3
  SITE 259: note = Tnp_P4
  SITE 271: note = Tnp_P5
MEHYAGIDVSLEYSSVCVVDGNGKIIREGKVTSEPGAMIGWLRSQGHKLGRIGLEAGPLSQWLFAAMREAGLAVELLETRHVRKAFEAMPVKSDRNDARGIAQLMRLGWFRPVHCKSLSAQETRSLLTARKLVQSKLHDVENSLRGILRGFGLKVGKTTERKFAGRIEELVAGHPHLEMIAKALLAVRAVLRTEFAAFEKQTRRMVQSDMQARLLTSVPAVGPIVALTYASAIDDPTRFKSSKQAGAHFGLTPKKHQSGETDYTGRISKLGDASVRTALYEAAHIMLTKPVKGCSQLKSWAMRIARRAGMSKAKVALARRLAVIMHRMLANGTPFNAAAAAA

SEQ ID NO: 17257 - protein, 403 aa, unidentified
  source 1..403: note = protein_28b2180
  REGION 6..162: note = RuvC_domain
  SITE 9: note = RuvC_P1
  SITE 59: note = RuvC_P2
  SITE 99: note = RuvC_P3
  SITE 101: note = RuvC_P4
  SITE 104: note = RuvC_P5
  REGION 276..363: note = Tnp_domain
  SITE 284: note = Tnp_P1
  SITE 314: note = Tnp_P2
  SITE 322: note = Tnp_P3
  SITE 323: note = Tnp_P4
  SITE 336: note = Tnp_P5
MNMNAVGIDVSKGKSMVAILRPYGEIVSAPFEIKHTFGNIQSLIEQIKSIEGESRIVMEHTGRYYEPLARELSLANLFVAAVNPKLIKDFGDNSLRKVKSDKADAIKIARYTLDSWTELKQYSLMDEIRNQLKTMNRQFGFYMKHKTAMKNNLIGILDQTYPGVNTYFDSPARDDGTQKWVDFATTYWHVDCVRKMSSNAFVDHYKNWCKRKKYNFSKDKAEEIYGIAKELVPVLPKDDLTKLIVKQAVEQLNTASKTVEELRTLMNETAAKLPEYPVVMEMKGVGPSLGPQLMAEIGDVTRFTHKGAITAFAGVDPGVNESGTYEQKSVPTSKRGSSVLRKTLFQVMDCLVKIKPLDDPVYAFIDKKRAQGKPYYVYMTAGANKFLRIYYGRVKEYLMSLPE

SEQ ID NO: 17258 - protein, 345 aa, unidentified
  source 1..345: note = protein_fa12a2f
  REGION 6..148: note = RuvC_domain
  SITE 9: note = RuvC_P1
  SITE 52: note = RuvC_P2
  SITE 87: note = RuvC_P3
  SITE 89: note = RuvC_P4
  SITE 92: note = RuvC_P5
  REGION 211..297: note = Tnp_domain
  SITE 219: note = Tnp_P1
  SITE 249: note = Tnp_P2
  SITE 257: note = Tnp_P3
  SITE 258: note = Tnp_P4
  SITE 270: note = Tnp_P5
MKITTIGLDLAKEVFQIHAVDERGKLAQKKKLKRKEMSTYFANLEPCLIGMEACGSSHYWARGLKSMGHTVKLMAPQFVKPYVKTNKNDAADAEAICEAVTRPSMRFVGAKNVYQQTILCLHRARRLLVTAKTAQANQIRGLLAEFGIVAPQGIKTLRDRIPDILEDAENELIPEMRELIKVMDERLKDMIEDVEALDLKIKLSNERNEMIAELMKIPGIGPLTASAMVATIGDFKEFKSGRELAAYLGVVPRQHSSGGKQNLLGISKRGDGYLRTLLIHGARAVIRFAESRQEKNDWLVGLIGRRNKNIAAVALANKNIRIIWAMMTRSERFDPAHISHAPIPA

SEQ ID NO: 17259 - protein, 310 aa, unidentified
  source 1..310: note = protein_25a6fd2
  REGION 1..76: note = RuvC_domain
  SITE 13: note = RuvC_P3
  SITE 15: note = RuvC_P4
  SITE 18: note = RuvC_P5
  REGION 183..268: note = Tnp_domain
  SITE 191: note = Tnp_P1
  SITE 221: note = Tnp_P2
  SITE 229: note = Tnp_P3
  SITE 230: note = Tnp_P4
  SITE 242: note = Tnp_P5
MRRIADLYPGQAKTDARDAFIIADTARTMPHTLRRVDTGDETLAELEVLVGFDDDLAGEATRVSNRIRGLLTSIHPALERVLGPRITHPAVLEILSRCGGPAGIRPAGKRKLTAIAVKHAPRMGARLATDILAALDEQAVVVPGTAAAETVLPKLADSLKETLLQRKAVAADVERALDDHPLSPVLTSMPGIGVRTAARILIEVGDGSAFPSAAHLAAYARIAPVTRKSGSSIRGEHPARSGNKKLKRALFLSAFAALHDPTSRAYYDKKRDEKKKHNAALICLARRRCDVLYAMLKNKELYRNPTPSAA

SEQ ID NO: 17260 - protein, 391 aa, unidentified
  source 1..391: note = protein_6830109
  REGION 6..163: note = RuvC_domain
  SITE 9: note = RuvC_P1
  SITE 61: note = RuvC_P2
  SITE 102: note = RuvC_P3
  SITE 104: note = RuvC_P4
  SITE 107: note = RuvC_P5
  REGION 267..351: note = Tnp_domain
  SITE 273: note = Tnp_P1
  SITE 303: note = Tnp_P2
  SITE 311: note = Tnp_P3
  SITE 312: note = Tnp_P4
  SITE 324: note = Tnp_P5
MSLYFVGIDISKYKHDCCIISSAEQQVVSKFTFKNNKDGFSELLTTLHSLSNPKNIRIGFESTSHYALNLELFLEKAHHSFMEVNPVLISQYKKSTTLRRTKTDRIDCESIACWLMTVEYKPHPKGFYHAYSLKSLTRLRDKLIRQRSFYLVKITNVLDHTFPEFKPFFNEHFSKTALYLLENYGSAEKMAHMNTASYERLYSLSRGKFSPQQFLELKSLATNTIGVNNSIFEMELNTLLTLYKATAEQICILETQITELIEEIHPHYMSIPGIGPISAAVIYAEYGDISNFSKPSQMLAFAGLEPGVNDSGTESHGGRMVKRGSSQLRYVLMNCALPLIRFDVTFAAYYAKKRSEGKPHRVALSHVVKKLVRVIFALERQNTDFIPQSLR

SEQ ID NO: 17261 - protein, 343 aa, unidentified
  source 1..343: note = protein_e9d154f
  REGION 6..149: note = RuvC_domain
  SITE 9: note = RuvC_P1
  SITE 54: note = RuvC_P2
  SITE 89: note = RuvC_P3
  SITE 91: note = RuvC_P4
  SITE 94: note = RuvC_P5
  REGION 213..300: note = Tnp_domain
  SITE 221: note = Tnp_P1
  SITE 251: note = Tnp_P2
  SITE 259: note = Tnp_P3
  SITE 260: note = Tnp_P4
  SITE 272: note = Tnp_P5
MKIIRAGVDLAKNVFQVHGVDRQEKPVWRRRLDRAEWLKVLLRTIEPGCEIGMEACGGAHHWARQLPAQGYVVKLIAPQFVKPYVKSNKNDVNDAEAICEAMSRPHMRFVPVKTVEQQDIQAAHRIRADLVGQRTAKVNQIRGLAAEYGLVASKQIWHLRSALPLWLEDAENGLTDRFRRLLNGLWADLLALDQRVKALDQEIATIAAEDPVATRLQQLRGVGPMIATALVATVGDAKQFNNGRQMAAFLGLTPRQNSSGGKEKLLGISKRGDAYLRCLLIHGARSTIYAARTKEDRLSQWLRRIATKRHPNVAAVALANKTVRIAWAMMKNGTDYQPDRAAG

SEQ ID NO: 17262 - protein, 336 aa, unidentified
  source 1..336: note = protein_368e8d5
  REGION 6..157: note = RuvC_domain
  SITE 9: note = RuvC_P1
  SITE 57: note = RuvC_P2
  SITE 98: note = RuvC_P3
  SITE 100: note = RuvC_P4
  SITE 103: note = RuvC_P5
  REGION 200..286: note = Tnp_domain
  SITE 207: note = Tnp_P1
  SITE 237: note = Tnp_P2
  SITE 245: note = Tnp_P3
  SITE 246: note = Tnp_P4
  SITE 259: note = Tnp_P5
MNMNCIGIDVSHKELVVVVSVKGKTRKAKTFQNTPAGFKSIIQIASKLKGNVKVCLEATGVYHFDLTIALSYAEGVEVMVINPKISSNFAKVLMSRSKTDAIDAEILAIYAERMPFEAWERPADEYITLRVFSRRIASLNKLKTQTKNQLHALVSTAETPQLVVDQVEELIKVLEKQIENQRLAAIALIKQHSALLNAFVLVTSIKGIADASAIQILAELMILPKEMSAKQWVAHAGLDPRIFQSGSSVEKKPRISKAGNKYIRQAIYMPALVSTRFEPHVKGYYSHMINDNGLKKMQAICAVMRKLLHAIHGMLKANKRFDGERFYKFPAEVIHS

SEQ ID NO: 17263 - protein, 400 aa, unidentified
  source 1..400: note = protein_b1afccb
  REGION 4..160: note = RuvC_domain
  SITE 7: note = RuvC_P1
  SITE 57: note = RuvC_P2
  SITE 97: note = RuvC_P3
  SITE 99: note = RuvC_P4
  SITE 102: note = RuvC_P5
  REGION 274..361: note = Tnp_domain
  SITE 282: note = Tnp_P1
  SITE 312: note = Tnp_P2
  SITE 320: note = Tnp_P3
  SITE 321: note = Tnp_P4
  SITE 334: note = Tnp_P5
MNAVGIDVSKGKSIVAVLRPFGEIVSKPFEVLHTSSDIHQLIDFLNTLEGSTRIIMEHTGRYYEPVAQWLTDAGFFVSTVNPKLIKNYGYNSLRKVKTDKADSLKIARFALDNWQELRQYTCMDTLRNQLKTLNRQFGFYMKQKTAYKNNLIALLDQTYPGVNALFDSPARCDGSQKWVDFASSFWHVDCVRGIGLVAFTDRYQKWCKRHGYNFQRGKPAVLFKASKELISMFPKDSMTKMLIKQAIEQLNTVSATVELLRTEMNRLAAQLPEYPVVMAIKGVGPSLGPQLMAEIGDISRFTRREALTAFAGVDPGANQSGKYEAQSVRTSKRGSPQLRKALFQVMDCLIKTTPTDDAVYRFMDKKRSEGKPYYVYMTAGANKFLRIYYGRVKEYLSSIS

SEQ ID NO: 17264 - protein, 313 aa, unidentified
  source 1..313: note = protein_9ce432c
  REGION 10..160: note = RuvC_domain
  SITE 13: note = RuvC_P1
  SITE 55: note = RuvC_P2
  SITE 95: note = RuvC_P3
  SITE 97: note = RuvC_P4
  SITE 100: note = RuvC_P5
  REGION 191..274: note = Tnp_domain
  SITE 198: note = Tnp_P1
  SITE 227: note = Tnp_P2
  SITE 235: note = Tnp_P3
  SITE 236: note = Tnp_P4
  SITE 248: note = Tnp_P5
MPVSLSKPIVGVDVAKNELVIYQADGDLLEEIPNTKTSIKQWLKALSGTVAIAIEATNIYHLDFADLAYEAGCTIYMVGGYELKHYREGVKIRAKTDALDAKLLARYLKNEAEELRPWTPPSPLYRQLLSLFRRRAALVQARVGLVQSWSNEPLLKAAFAEQVKSMQQLETLIEKTINDQLKEAGLLGQLKRCLKVEGIGFLTGARLITAFQRGDFRNADAFIAFLGMDLRVAKSGQKDARRSLTKRGDPEARRLLHNAAMSASRTKAWKGYYEEQRARGFSTTQALVMLARKLARVVFALLKGQSEYQPKAS

SEQ ID NO: 17265 - protein, 322 aa, unidentified
  source 1..322: note = protein_0b31164
  REGION 4..148: note = RuvC_domain
  SITE 7: note = RuvC_P1
  SITE 53: note = RuvC_P2
  SITE 93: note = RuvC_P3
  SITE 95: note = RuvC_P4
  SITE 98: note = RuvC_P5
  REGION 192..280: note = Tnp_domain
  SITE 200: note = Tnp_P1
  SITE 230: note = Tnp_P2
  SITE 238: note = Tnp_P3
  SITE 239: note = Tnp_P4
  SITE 252: note = Tnp_P5
MKYIGIDVSKATFVVAYSSDKSGDIRTFDNTTTGIRQFIGTLPKDGSIHCVMEATGNYSALLLYILNVAGIIVSMENPLKIKNFARAMLSTVKTDKIDARLIALYGEKMNPQPFKMQGEAILRLRQKRTVIRQLTKQVTAMSNLRGSLACLPVPDKGAIHAADETIKFLEKKRDRLQSELTDLVEVEFSRQLALLTSIKGIGITLATALIITTGGFTYFQNAKQVSRYLGICPTYEQSGTSVNIRGHINRNGDAYTRGLLYVAAWTASRRNAQCLETYTRLRKNGKSGKLAMIAVANKLVRQAFAVVANDKAHIDGFVSNRP

SEQ ID NO: 17266 - protein, 291 aa, unidentified
  source 1..291: note = protein_75b910c
  REGION 11..92: note = RuvC_domain
  SITE 32: note = RuvC_P3
  SITE 34: note = RuvC_P4
  SITE 37: note = RuvC_P5
  REGION 155..240: note = Tnp_domain
  SITE 163: note = Tnp_P1
  SITE 193: note = Tnp_P2
  SITE 201: note = Tnp_P3
  SITE 202: note = Tnp_P4
  SITE 214: note = Tnp_P5
MPRKTTSLEAVTTIGIDIGPARYVRPYSRGQKNDFRDAEAIAEAVLRPTMKFVAIKTVEQLDLQALHRVRERLVCQRTGVINQIRAFLLERGIAVRQGLRALRTEMPIVLAMTDKLSPRMIRMIEDLCTDWRHLDARIATVSNEIKTLSEQDDGAKRLMTVPGIGPIISTATVAAIGSGDVFSKGRDFGAWLGLVPRQMSTGGRTVLGPISKRGNRYLRMLFVQAARAVLLRPQSWEKYGLRSWIEAAARRLNRFKLAIALANKIARVAWGVLHGGRNFEVRSMRTAPQAA

SEQ ID NO: 17267 - protein, 341 aa, unidentified
  source 1..341: note = protein_f540196
  REGION 6..152: note = RuvC_domain
  SITE 9: note = RuvC_P1
  SITE 53: note = RuvC_P2
  SITE 91: note = RuvC_P3
  SITE 93: note = RuvC_P4
  SITE 96: note = RuvC_P5
  REGION 211..298: note = Tnp_domain
  SITE 219: note = Tnp_P1
  SITE 249: note = Tnp_P2
  SITE 257: note = Tnp_P3
  SITE 258: note = Tnp_P4
  SITE 270: note = Tnp_P5
MSIVTVGIDLAKNVFAVHGVDKAGKPVLIKPRVLRDQLVTLIAQLPPCLIGMEACSGAHHWARVFQQHGHTVKLMAPKLVAPYRMSGKRGKNDAADAAAICEAVTRPNMRFVPLKDEHQQATLCLHRTRQGFVEERTAIYNRLRGLLAEFGVVLPQSPERLRREITAQLDTLPGWARRCISDLLEHAGSIEDRLAEYDRAIGEIAREDERSRRLMQLRGIGPTTASALVASIGAGHDFRNGRQVAAWLGLTPGQYSSGGKDRLGSITKAGDAYLRSLLVLGARAVIANLGDRQDRFSRWVRSLIERRGFWRAAVAIAAKNARMAWATLKYGENFKHEPATA

SEQ ID NO: 17268 - protein, 343 aa, unidentified
  source 1..343: note = protein_3a2e42e
  REGION 6..149: note = RuvC_domain
  SITE 9: note = RuvC_P1
  SITE 54: note = RuvC_P2
  SITE 89: note = RuvC_P3
  SITE 91: note = RuvC_P4
  SITE 94: note = RuvC_P5
  REGION 213..300: note = Tnp_domain
  SITE 221: note = Tnp_P1
  SITE 251: note = Tnp_P2
  SITE 259: note = Tnp_P3
  SITE 260: note = Tnp_P4
  SITE 272: note = Tnp_P5
MKLSYVGVDLAKNVFQLHGVDRSGEAGWRRRLRRHQWLSALMEAADTNCVIGMEACTGAHHWARQLQARGYTVKLIPPQFVKPYVKSNKNDANDAEAICEAMTRPHMRFVAVKTVEQQDIQATHRIRAELKDQRNAKTNQIRGLVAEYGLVAPQTLLALRKAIPDWLEDAENGLTDYFRSLLHGLWGDLLALDDRIKELDKQIEQLANGNEVTRRLQQLRGVGPMVATALVATVGTGEQYRKGRQMAAALGLTPRQNSSGDKQRLFGISKRGDAYLRTLLIHGARAVMSQARHRDDRLSRWVTDIAKRSHPNVAAMALANKTARMAWAMLHHGTDYDPALAVS

SEQ ID NO: 17269 - protein, 343 aa, unidentified
  source 1..343: note = protein_7e5c512
  REGION 4..148: note = RuvC_domain
  SITE 7: note = RuvC_P1
  SITE 51: note = RuvC_P2
  SITE 89: note = RuvC_P3
  SITE 91: note = RuvC_P4
  SITE 94: note = RuvC_P5
  REGION 208..294: note = Tnp_domain
  SITE 216: note = Tnp_P1
  SITE 246: note = Tnp_P2
  SITE 254: note = Tnp_P3
  SITE 255: note = Tnp_P4
  SITE 267: note = Tnp_P5
MEHIGIDVHKVESQICILTEGGEIIERRIRTQRERFAVMLGGRSPSKIVIEASTESEWVARCLEQLGHEVVVADPNFAAMYATRSRKVKTDRRDARTLAEACRLGAYRPAHRTSDGQRHVRAQLAAREALVQTRSRYISLVGAVLRSEGLRVGTGNAEGFVKRVERLALPGRLKSEIAPLLAVLLSVNHQLEWLDGRLEHLAQSDETVARLCTAPSVGPVTAAAFAATIDEVNRFRNAHQVEAYLGLTPCEMSSGEREQKGHITKAGNCRMRRLLVQVAVSILRLRSPRTEALRTWASSIAIRRGKKIAIVALARRMTGVLYAMMRDGTCYAAAQPREVRQAA

SEQ ID NO: 17270 - protein, 292 aa, unidentified
  source 1..292: note = protein_024ce75
  REGION 8..122: note = RuvC_domain
  SITE 24: note = RuvC_P2
  SITE 64: note = RuvC_P3
  SITE 66: note = RuvC_P4
  SITE 69: note = RuvC_P5
  REGION 166..250: note = Tnp_domain
  SITE 174: note = Tnp_P1
  SITE 203: note = Tnp_P2
  SITE 211: note = Tnp_P3
  SITE 212: note = Tnp_P4
  SITE 224: note = Tnp_P5
MIAPSNGLQKQPVMHQGKTLITMEATGVYHEGVAYYLYAQGFQIFLSNPGKAKKFAQSLGFVHKTDKSDAAMLAKYGSIQLDNIAFWIPEDDDVRVIKTLIRRLNALEKDKLRESNRLEASTISDAAERVIQSTVYLISVLDGEITEIQHEIDRLISCNPGMNKNRELLLSVIGIGKVMARELVYLFSAKKFTSAKQVAAYVGLIPRLNESGVFKGRSSLSKSGPSRIRSKIFLAAVCAGTHNPDIKAQKIRLTHAGKTKMQALGVAMRKLIQICYGVIKNQTRYQPQIVLI

SEQ ID NO: 17271 - protein, 401 aa, unidentified
  source 1..401: note = protein_9940866
  REGION 4..160: note = RuvC_domain
  SITE 7: note = RuvC_P1
  SITE 57: note = RuvC_P2
  SITE 97: note = RuvC_P3
  SITE 99: note = RuvC_P4
  SITE 102: note = RuvC_P5
  REGION 274..361: note = Tnp_domain
  SITE 282: note = Tnp_P1
  SITE 312: note = Tnp_P2
  SITE 320: note = Tnp_P3
  SITE 321: note = Tnp_P4
  SITE 334: note = Tnp_P5
MNCVGIDVSKGKSMIAVMRPMGEVVIPPFEVGHTNVELCRLLELLRGLDGETRVVMEATGNYHLPVASFLYDSGFYVSVVNAMLVHGYGNNSLRRAKTDKKDAIKLANYGLDHWLTLPRHIPEDEVRLMLKTTYRQYQQCAKVQTMLKNNLIALLDNAFPDANRLFTSTARADGSEKWVDFVAAFPHCECVCGLSEKAFTAKYQKWCKKHGYSFNQDKALDIYASACGHFSVMPKTGTARLLVEQAVSQLRAVSAALAALRSEMQSLASSLPEYPVVMGMFGVDPVLGPQLMAEIGDVRRFHSKKALVAFAGIDAPPYQSGQMEIRSRNISKQGSAALRRTLFLVMGSILCSSPADNPVYQFMDKKRTEGKPYRVYMMASANKFLRIYYALVKKHLDDPEA

SEQ ID NO: 17272 - protein, 346 aa, unidentified
  source 1..346: note = protein_20322fc
  REGION 7..148: note = RuvC_domain
  SITE 10: note = RuvC_P1
  SITE 53: note = RuvC_P2
  SITE 88: note = RuvC_P3
  SITE 90: note = RuvC_P4
  SITE 93: note = RuvC_P5
  REGION 210..295: note = Tnp_domain
  SITE 218: note = Tnp_P1
  SITE 248: note = Tnp_P2
  SITE 256: note = Tnp_P3
  SITE 257: note = Tnp_P4
  SITE 269: note = Tnp_P5
MNQIIRIGMDTSKNFFQLHGVDAAERPVLRRKLRRSEVLGFFAKLPATVVGMEACAASHHWARELRKLGHEVKLIAPQHVKAYIKRNKNDGRDAEGLCEAMSRPTMQFVPVKTEEQQAALMLMAVRQQLITRRTQLTNAIRGHAAEFGLIAAKGLDKVEPLLVRIAQDENLPELAGEMFVMLGRDYARLQVELKAVNARLMTWHRANPNSRRLAKIPGVGPIGATALVMKAPDPRLFPSGRHFAAWIGLTPKDHSTAGKTRIGKITRAGDEMLRSVLVAGATAVVQQAKHSRGRPSPWLVALLARKSPKLAAVALANKTARIAWKLLTTGESYDGARMPVASALAA

SEQ ID NO: 17273 - protein, 359 aa, unidentified
  source 1..359: note = protein_af74b25
  REGION 22..164: note = RuvC_domain
  SITE 25: note = RuvC_P1
  SITE 68: note = RuvC_P2
  SITE 103: note = RuvC_P3
  SITE 105: note = RuvC_P4
  SITE 108: note = RuvC_P5
  REGION 228..313: note = Tnp_domain
  SITE 236: note = Tnp_P1
  SITE 266: note = Tnp_P2
  SITE 274: note = Tnp_P3
  SITE 275: note = Tnp_P4
  SITE 287: note = Tnp_P5
MCQSGGVEHHLKEASVSEVTTIGLDIAKNVFHAHGADERGHALFSKRITRGKLLDFFTSQPRCVVALEACGGAHHWARELIHLGHAVRLIPPKYVKPFVKRSKNDAIDAEAICEAAQRPSMRYVAVKSEQQQAAGLVFRTRDLLVRQRTQLINAIRGHLTEYGWVAPKGPSHVAMLADVLKEDEMASSLPEAARTMFRLMLDLLGELDGKVADLDKEIARRAREDEVSRRLMTIPGIGPITATAIAALAPPAETFTKGRDFAAWLGLTPLQKSTGGKQRLGATSKMGERTLRRLLIIGSSAVVLQASKRGAPEGSWLAKMLARKPRMLVTVALANKTARIVWALLTRQENYKAPVAATA

SEQ ID NO: 17274 - protein, 315 aa, unidentified
  source 1..315: note = protein_e3454ac
  REGION 7..151: note = RuvC_domain
  SITE 10: note = RuvC_P1
  SITE 53: note = RuvC_P2
  SITE 93: note = RuvC_P3
  SITE 95: note = RuvC_P4
  SITE 98: note = RuvC_P5
  REGION 189..273: note = Tnp_domain
  SITE 197: note = Tnp_P1
  SITE 226: note = Tnp_P2
  SITE 234: note = Tnp_P3
  SITE 235: note = Tnp_P4
  SITE 247: note = Tnp_P5
MSKVHYFAADVSKRELVFAVYPEAAEVVRVANATAAITAWLDVLPAGSVIAMEATGTYHRRLAALAHERGLMVYVVNPRDVYYYARAMGARGKTDATDARLLARYVAHEQAHLHRYVPPSPRSEQLTALLERRGLLVRTRQALKQSLAELPALAAEKRRALTALDSLVNAIDRELARLNGSDPPTAQLVTRLRTISGVGPLVATLLAALFQRFAFHHPDALIAYVGLDPRPDESGQHQGRRRLSKRGHPEWRRLLVAAAMSAARSHVWRDYIAHQRTKALPATAVHVILARKMLRVAYALHKNGQAFVAPPMQTA

SEQ ID NO: 17275 - protein, 398 aa, unidentified
  source 1..398: note = protein_101c82b
  REGION 7..172: note = RuvC_domain
  SITE 10: note = RuvC_P1
  SITE 63: note = RuvC_P2
  SITE 103: note = RuvC_P3
  SITE 105: note = RuvC_P4
  SITE 108: note = RuvC_P5
  REGION 272..357: note = Tnp_domain
  SITE 280: note = Tnp_P1
  SITE 310: note = Tnp_P2
  SITE 318: note = Tnp_P3
  SITE 319: note = Tnp_P4
  SITE 330: note = Tnp_P5
MESQLRVGIDVGCHAHRVGIADPTGSILEEFDISHSEAGFQEFFRRVEERRAALGFPVAVAMEGYNGYARPLDRLVLGKGYRLFNVNNLKLARFKEVFPGAAKTDPIDARKILELFHLREQLPMAKGVLQEVLPAPEVNEKLKRLSRRRRQLVTEKLRVLNRMQGDLQAVSPELLAATHDADNLWFLRFLSFRDDLGQLARLRRATIRQIPSVGVKYAKIIEDWQAKATFSDEVEYVGPMIVEDAKRILDLHKQIHALDEALAKLAAESEIACRLSTIPGFGKTSIAELAGEIGTVSRFSGEASLALYMGMSPLTRQSGQISRAKAPRQVNTRCRAAMMTAVARHIGCVPQSRAYYDRKRAQGKTHNQAIRALGRHMVRVIWAMLRDGRDYEVRGDTP

SEQ ID NO: 17276 - protein, 401 aa, unidentified
  source 1..401: note = protein_688d203
  REGION 5..162: note = RuvC_domain
  SITE 8: note = RuvC_P1
  SITE 59: note = RuvC_P2
  SITE 99: note = RuvC_P3
  SITE 101: note = RuvC_P4
  SITE 104: note = RuvC_P5
  REGION 273..360: note = Tnp_domain
  SITE 281: note = Tnp_P1
  SITE 311: note = Tnp_P2
  SITE 319: note = Tnp_P3
  SITE 320: note = Tnp_P4
  SITE 333: note = Tnp_P5
MKYGVEIDISKGKSTVSIISQAGEVMELPFEINHDSNGLKILKDTIDKYPKEDIKIVMEETGTYHLPVLNFLLDEGYFVCADNAFKIKKYLDRDLRKVKNDNKDSLKIAEYCCDNWYRIKKYENSSQTYKDLKFLSRQYTAQMSVQTKEKVQLSNLCDLLFPGYYSLLNENNFILGITVFKKYYHPTLVIKKNKESFIKDVDKIAKKLGHRSAGITIANKIYELAKNTVSPHPSNEYSQLSVDCCVDLLILTINTTNKIISKMDELASTLPEYDTVKSMEGCGNKLTSRIIAEIGDIRRFKNAGSIIAYGGLDAPPYQSGQFEATIRHISKRGNKYLRKTGYEIVKCIKSNKKTGEEIYEYIIQKEVEGKAKKVAKIAGLNKFLRIYYGLVKKKYKELQIW

SEQ ID NO: 17277 - protein, 349 aa, unidentified
  source 1..349: note = protein_449829c
  REGION 8..168: note = RuvC_domain
  SITE 11: note = RuvC_P1
  SITE 67: note = RuvC_P2
  SITE 107: note = RuvC_P3
  SITE 109: note = RuvC_P4
  SITE 112: note = RuvC_P5
  REGION 208..295: note = Tnp_domain
  SITE 216: note = Tnp_P1
  SITE 246: note = Tnp_P2
  SITE 254: note = Tnp_P3
  SITE 255: note = Tnp_P4
  SITE 268: note = Tnp_P5
MKVIKQVVGIDVALKELVVTLGRMQEDSSIDLYAYQVFTNNHAGFKSLLSWVKKLTIAQVPIQFVMEATGVYHQKFAYHLDENQWEVSIVLPNKISNYMRTLTPKTITDKTCSQAIAQFGLERKLAQWHRPKSTYRNLQQLSRERDQVVHERTMVKNQQHAELAEAEPNERSLERLAKRIIFLSAQEKEIKQDIINILTNDAVLKQEVENICTIPGVGIITAVIVLAETNGFELIRNKKQLTSYAGLDVQEKQSGTSVHGKPRISKKGNVSLRKSMHLPALTAVRCDENFKKRYTRLVAKHGIKMKALVAVQRKILELIYTLHKNKTPYDKDFTTEILAQKNSVQAQMA

SEQ ID NO: 17278 - protein, 347 aa, unidentified
  source 1..347: note = protein_8483f6a
  REGION 6..147: note = RuvC_domain
  SITE 9: note = RuvC_P1
  SITE 52: note = RuvC_P2
  SITE 87: note = RuvC_P3
  SITE 89: note = RuvC_P4
  SITE 92: note = RuvC_P5
  REGION 211..297: note = Tnp_domain
  SITE 219: note = Tnp_P1
  SITE 249: note = Tnp_P2
  SITE 257: note = Tnp_P3
  SITE 258: note = Tnp_P4
  SITE 270: note = Tnp_P5
MNGRTIGLDLAKNVFQVHGVDEHGKVVLRKQVTRHQVAAFFANLPPCLIGMEACGSAHHWARKLQSMGHVVKLMAPQYVKPYVKTNKNDAADAEAICEAVTRPNMRFVPIKNVEQQSVLALHRVRQGFVKARTAQANQIRGLLAEFGLILPQGIGHIVNQAPGLIEDVRNELPGSFRLLIQRLLDHLKALDKQVSELETQILAWHRQSELSKKLEQIPGIGPITASALVASLGNAKNFDGGRQVAAWLGLVPRQHSSGGKQNLLGISKRGDTYLRTLLIHGARAVIFHATRKTEPDATCNWVNQVVNRRNKNVAAVALANKNARIVWALLAHDRQYQAGYIPTKLCA

SEQ ID NO: 17279 - protein, 367 aa, unidentified
  source 1..367: note = protein_c203c17
  REGION 8..153: note = RuvC_domain
  SITE 11: note = RuvC_P1
  SITE 56: note = RuvC_P2
  SITE 93: note = RuvC_P3
  SITE 95: note = RuvC_P4
  SITE 98: note = RuvC_P5
  REGION 225..310: note = Tnp_domain
  SITE 233: note = Tnp_P1
  SITE 263: note = Tnp_P2
  SITE 271: note = Tnp_P3
  SITE 272: note = Tnp_P4
  SITE 284: note = Tnp_P5
MSNYVTAIGLDVHARSISACAFDPMTGEVSRARFGYDPASVAEWALGFESPKAVYESGPTGFHLCRALRALGVDCAVGAVSKMHRPAADRGRKNDRRDAEWLARLLACRNVVEVWVPDERTEAARDLSRALEDARDDLQRARQRMSKFLLRHGLVFDETTPTGRRRSNWTEAYWRWARSIEFDEADDAAAYEHCTGAVDRCGEAKRELERRVVEAASRPEWAPTVDALCLVKGVDVAAAFLLAAEAGDFSRFPSAPSFAAWCGLAPSERSSGETESRGGITRAGNSHVRRALVEASWHVPMSTRHPKKPRPGHGVAPAASRHAAKRDRRLRDRRDAMSQAGKRPCVANCATAREMACWVWAIALMVR

SEQ ID NO: 17280 - protein, 417 aa, unidentified
  source 1..417: note = protein_7cf6a2a
  REGION 18..170: note = RuvC_domain
  SITE 21: note = RuvC_P1
  SITE 69: note = RuvC_P2
  SITE 107: note = RuvC_P3
  SITE 109: note = RuvC_P4
  SITE 112: note = RuvC_P5
  REGION 277..363: note = Tnp_domain
  SITE 285: note = Tnp_P1
  SITE 316: note = Tnp_P2
  SITE 324: note = Tnp_P3
  SITE 325: note = Tnp_P4
  SITE 336: note = Tnp_P5
MQSASTSLPAVAPDGVTAGVDWASTDHVACVVDAAGKVVTRFTAAHTADGLKALVKGLARVRAAEVAIERGDGLMAGALLAAGLTVVVISPNQVKNLRSRYGSAGNKDDRFDAFVLAGTLRTDRARLRPLTPGTPATITLRSAVRARRDLVAHRVAMCNQLRAHLALVFPAAVGLFADLDSPVSLAFLARFDCQDRADWLSPRRMAAWLKSAGYSGRTRPGVLHGRITAAPRGATGDDGTARTHVTRALVTVLVTLAGQIKALAAQIAEQPGLHTDGHVFTSLPRSGTVRAARLLAEIGDCRQRFPDPSSLMCLAGVAPSTRQSGKIKAVSFRWAVNKQLRDAVCDFAAGSRHASPWAAQLCNQAIARGKDHPHATRILARAWLYVIWHCWQDHTAYDPAQHRALQRLLAQDQLAAA

SEQ ID NO: 17281 - protein, 344 aa, unidentified
  source 1..344: note = protein_e155439
  REGION 6..147: note = RuvC_domain
  SITE 9: note = RuvC_P1
  SITE 52: note = RuvC_P2
  SITE 87: note = RuvC_P3
  SITE 89: note = RuvC_P4
  SITE 92: note = RuvC_P5
  REGION 211..295: note = Tnp_domain
  SITE 219: note = Tnp_P1
  SITE 249: note = Tnp_P2
  SITE 257: note = Tnp_P3
  SITE 258: note = Tnp_P4
  SITE 270: note = Tnp_P5
MTIVTLGIDLGKNLNSIVGLDVEGRVVLRRRVRRATLAELAGKLAPCTIAMEACCGAHHVGRLFAARGHEVRLMSPEYVRPYVRAQKNDDNDAAGIAEAATRPTMRLVELKSQERLDLQTLHRARSRLIAVRKALLNQLRAILLERGYVFRQGRKVLEPEIDPFLAEPPSDLSTRILTLIGDMRAEWRSLDERINSLNDDLTEHARADEAASRLTSIPGIGILGATALVAAIGDGEAFRRARDIPAWLGLVPKQMTTGGKPRLLSITKRGNTYLRMLLIHGARAALPSLSKQATPLGSWLRGLLSRAHRNVVIVALAAKLARIAWATLRHGVGFEPEKGTVMTA

SEQ ID NO: 17282 - protein, 269 aa, unidentified
  source 1..269: note = protein_1cd3abb
  REGION 1..126: note = RuvC_domain
  SITE 25: note = RuvC_P2
  SITE 65: note = RuvC_P3
  SITE 67: note = RuvC_P4
  SITE 70: note = RuvC_P5
  REGION 142..226: note = Tnp_domain
  SITE 150: note = Tnp_P1
  SITE 179: note = Tnp_P2
  SITE 187: note = Tnp_P3
  SITE 188: note = Tnp_P4
  SITE 199: note = Tnp_P5
MTLTDGFDAITDELRKYPVVLVLIEATGGLEAAVACSFQTEGFDVAVVNPRQARDFARTMGYLAKTDHINARVLAQMAEVTNRHPGRERFIRAMLDAERQVLAAMVVRRRQLTAMLIAERNRLYPVHPQSRKSINIIIKELAARLSSIKGVGTMTVAALLAEVSDLGSLSRRAISALVGVAPINRDSGTMRGRRTIFGGRGGVRTALYIAALVATRFNPVIKAFYTRLLAAGKAKKVALVACMHKLLTILNAMLRKNEEWDESYHHVSL

SEQ ID NO: 17283 - protein, 359 aa, unidentified
  source 1..359: note = protein_3a99366
  REGION 12..160: note = RuvC_domain
  SITE 15: note = RuvC_P1
  SITE 65: note = RuvC_P2
  SITE 101: note = RuvC_P3
  SITE 103: note = RuvC_P4
  SITE 106: note = RuvC_P5
  REGION 241..325: note = Tnp_domain
  SITE 248: note = Tnp_P1
  SITE 278: note = Tnp_P2
  SITE 286: note = Tnp_P3
  SITE 287: note = Tnp_P4
  SITE 298: note = Tnp_P5
MSMLAELVEVVIGVDTHKHTHTAAVLDARTGAVLDRVTVTTDPDGYAELVTLAERHSGLRAWAMEGSGGYGAGLARHLAGLGELVVELDRPVRPARKAGAKSDPIDAERAARDALARTQLAQPKTGPERAALQMHCTARRAAVEAAGDAQRQLHALVVTAPEPVRARFRGRTTRAMITVAERLRPQASTAARASTRTASTDPEVLAALRVLKMLAARIRFLEGEAAAHEKAILALVRCWRPDLLALRGVGPIVAAAVLTAWSHPGRCRSDAAFAMLAGAAPIPASSGKTVRHRLNRSGDRQLNRALHTITLSRLQYDPATRAYADRRRAQGKTDREIKRCLKRYIARQLYRQLEAPSPA

SEQ ID NO: 17284 - protein, 330 aa, unidentified
  source 1..330: note = protein_380c2f3
  REGION 8..157: note = RuvC_domain
  SITE 11: note = RuvC_P1
  SITE 59: note = RuvC_P2
  SITE 97: note = RuvC_P3
  SITE 99: note = RuvC_P4
  SITE 102: note = RuvC_P5
  REGION 202..289: note = Tnp_domain
  SITE 210: note = Tnp_P1
  SITE 240: note = Tnp_P2
  SITE 248: note = Tnp_P3
  SITE 249: note = Tnp_P4
  SITE 262: note = Tnp_P5
MKKWNVILGVDVSKLTLDICCAERNLYIKIDNNSKGFCVLKKWCKTNGIDLAETLIVLEFTGGYEYRFLQFCESMSISYCRVSGLEIKNSLGMIRGKSDEMDAFRIGQYGEDKIKRLKPSKPLDKNILELKQLLSFRKRLVREKAGFESTVKERKHMYGLKKADTITHIAQDKIKRNEKHILKVEQEIMEIIKSDEGMWRNYRIITSIKGIGKINGWMTIAYTENFTSFTDPRQYAVFVGVIPFGHTSGTSIKGRKRVSHMANKELKSELNQAAKTAILHDPEIRTYAERKLKNKVYPLVLNNVKFKLILRMFSLVKRGEMYVENYRRVA

SEQ ID NO: 17285 - protein, 344 aa, unidentified
  source 1..344: note = protein_6ca7abd
  REGION 6..147: note = RuvC_domain
  SITE 9: note = RuvC_P1
  SITE 52: note = RuvC_P2
  SITE 87: note = RuvC_P3
  SITE 89: note = RuvC_P4
  SITE 92: note = RuvC_P5
  REGION 211..297: note = Tnp_domain
  SITE 219: note = Tnp_P1
  SITE 249: note = Tnp_P2
  SITE 257: note = Tnp_P3
  SITE 258: note = Tnp_P4
  SITE 270: note = Tnp_P5
MKVTTVGIDLAKNLFQLHGVNEFGKPVIKKQIRRDQMAEFFVNLPACLIGMEACGSAHHWARKLQSFGHTVKLMAPQFVKPYVKTNKNDAADAEAICEAVNRPNMRFVPIKNVEQQSVLALHRVRQGFVKARTAQANQIRGLLSEFGLIIPQGIGYIENRVPELIENASNELPGSFRILVQRLLDHLKELDRQVDDLESQIVKWHRQSEASSKLAQVPGIGPITASALVASLGDAKNFEGGRQVAAWLGLVPKQHSSGGKQNLLSISKRGDTYLRTLLIHGARSVIYRAQQKPDACSWINGVVNRRNKNVAAVALANKNARIVWALLVHDREFRSDYMAAKAAL

SEQ ID NO: 17286 - protein, 341 aa, unidentified
  source 1..341: note = protein_a0c3f81
  REGION 6..152: note = RuvC_domain
  SITE 9: note = RuvC_P1
  SITE 53: note = RuvC_P2
  SITE 91: note = RuvC_P3
  SITE 93: note = RuvC_P4
  SITE 96: note = RuvC_P5
  REGION 211..298: note = Tnp_domain
  SITE 219: note = Tnp_P1
  SITE 249: note = Tnp_P2
  SITE 257: note = Tnp_P3
  SITE 258: note = Tnp_P4
  SITE 270: note = Tnp_P5
MNIATVGIDLAKNVFAVHGVDKAGKAVLIKPRVMRDQLAALIAQLPPCLIGMEACSGAHHWARVFQQSGHTVRLMAPKLVAPYRMSGKQGKNDAADAAAICEAVTRPNMRFVPIKDEHQQAALCLHRTRQGFIEERTATYNRVRGLLSEFGVVLPQSPEKLRSNIASRMEALPGWAARCIRDMLEHIDRLEARLDEYDRAISQLARQDERSRRLMQLRGIGPTSASALLATLGAAHDFKNGRQVAAWLGLTPAQYSSGGKARLGSITKAGEAYVRTLLVSGARAVMSNLRDKQDKFSRWIRGLVERRGYWRAAIAIAAKNARMAWAVLKYGDAFKQEALQA

SEQ ID NO: 17287 - protein, 341 aa, unidentified
  source 1..341: note = protein_2cd403a
  REGION 6..148: note = RuvC_domain
  SITE 9: note = RuvC_P1
  SITE 52: note = RuvC_P2
  SITE 87: note = RuvC_P3
  SITE 89: note = RuvC_P4
  SITE 92: note = RuvC_P5
  REGION 210..293: note = Tnp_domain
  SITE 218: note = Tnp_P1
  SITE 248: note = Tnp_P2
  SITE 256: note = Tnp_P3
  SITE 257: note = Tnp_P4
  SITE 269: note = Tnp_P5
MKDMMIGVDLAKSVFQIHGASMAGHLKFRKKVTRTQFRHFMEKQEPAIVVMEACGSASYWAREMIKLGHEVRLIAPQYVRPFVKRQKNDAADAEAIVVAARQPEMRFVSPKTEDQQAKAVMFRGRERLVRQRTELVNALRAVLYEHGHVFPLGLVHLKRIEALLEDCDNGLPKLIVTECQDLLEQISLKTERITEKTAKLKSLAEQTETARRLQTMPGVGPLTALAVEAFAPDLAGFKSGRDFAAWLGLVPRQHSSGGKDRLGRISKAGQVDIRRLLIIGAMTRFTGRTRGKVPAGSWIARMLARKPKMLVGIALANKMARQIWAMLTKGENYRDPALAAA

SEQ ID NO: 17288 - protein, 343 aa, unidentified
  source 1..343: note = protein_8a8f5d1
  REGION 7..148: note = RuvC_domain
  SITE 10: note = RuvC_P1
  SITE 53: note = RuvC_P2
  SITE 88: note = RuvC_P3
  SITE 90: note = RuvC_P4
  SITE 93: note = RuvC_P5
  REGION 211..294: note = Tnp_domain
  SITE 219: note = Tnp_P1
  SITE 249: note = Tnp_P2
  SITE 257: note = Tnp_P3
  SITE 258: note = Tnp_P4
  SITE 270: note = Tnp_P5
MNEIRVLGIDLGKDVCSVVGLDEAGKVVLRRRMRRDSVSKLAAGMPACVMAMEACCGTHHLGRQLCEQGHDVRLMSPEYVRPYVKAQKNDDRDAEAIAEAATRPTMRFVDLKSDEQLDMQSLHRARDRLVGERTALINQLRAILLERGIVIAKGRRKLQLRLEQLLAEETAIGRRMRVLIEDMRDEWRALDNRIGALDAEFADLARTDASMRLLSTIPGIGPLNATAFVASIGKAETFGRGRDLAAWLGLVPRQMTTGGKPRLLGITKRGNGYLRRMLIHGARAALPSLAKGKTPMGEWLRGLLSRAHMNTAVVALAAKMARIIWAVLRSGRPFEMAASPSAG

SEQ ID NO: 17289 - protein, 308 aa, unidentified
  source 1..308: note = protein_bd6ccbe
  REGION 5..151: note = RuvC_domain
  SITE 8: note = RuvC_P1
  SITE 52: note = RuvC_P2
  SITE 91: note = RuvC_P3
  SITE 93: note = RuvC_P4
  SITE 96: note = RuvC_P5
  REGION 185..269: note = Tnp_domain
  SITE 193: note = Tnp_P1
  SITE 222: note = Tnp_P2
  SITE 230: note = Tnp_P3
  SITE 231: note = Tnp_P4
  SITE 242: note = Tnp_P5
MSAFVGIDVAKASLAVAVVPGNVRFEVSNDARGHAQLVRWLGKQPVHRILLESTGGYESAVVQVLASRWPVVRVPAHRARAFATAMGKSAKTDPMDALMLARMAAVTEGPTVTPLTPAKARLQALVRRRGQVVAHRDDERRRLHQATESFVRQSLQRQIKHLQGEIARLDREIEACVPDCGDERADRLRAVPGIGAVTTATLLAFLPELGQLENRQISALVGLAPYNCDSGNHRGARRIHGGRGAVRRVLYMAAWSAVRHQPDFKARYDALRAKGKCAKVALVACMRILAIRLNAMIRDRTEWRSCPV

SEQ ID NO: 17290 - protein, 280 aa, unidentified
  source 1..280: note = protein_0172b2d
  REGION 2..111: note = RuvC_domain
  SITE 8: note = RuvC_P2
  SITE 47: note = RuvC_P3
  SITE 49: note = RuvC_P4
  SITE 52: note = RuvC_P5
  REGION 143..227: note = Tnp_domain
  SITE 151: note = Tnp_P1
  SITE 180: note = Tnp_P2
  SITE 188: note = Tnp_P3
  SITE 189: note = Tnp_P4
  SITE 200: note = Tnp_P5
MPDLVIYETTGAYHAAIERSFGGVLPLVKVNPEQARRFAQARGTRAKTDAVDARVLVMMGSALDLVPDAPADKNQPALKEIQIARMALIKERTRLLNRSKTQTLAILKRQSKARLGQIKRQLAELEGALLKLVRQCPKRARSFDILCSIPGLGRITAVAILVECPEIGTLTRKQIASLAGLAPMTRQSGQWRGTAFIQGGRKLLRDALYMPALVAARFNPDLRQKYRAMISDGKPAKVALTAFVGKTAPHAVFQPSSLRKLIELANALVRKDREWTPKTS

SEQ ID NO: 17291 - protein, 342 aa, unidentified
  source 1..342: note = protein_a188283
  REGION 7..148: note = RuvC_domain
  SITE 10: note = RuvC_P1
  SITE 53: note = RuvC_P2
  SITE 88: note = RuvC_P3
  SITE 90: note = RuvC_P4
  SITE 93: note = RuvC_P5
  REGION 211..301: note = Tnp_domain
  SITE 219: note = Tnp_P1
  SITE 249: note = Tnp_P2
  SITE 257: note = Tnp_P3
  SITE 258: note = Tnp_P4
  SITE 270: note = Tnp_P5
MSEVTIIGVDLAKRVFQLHGAHADGSVAFRKKLSRGQLIAFVAQQPKCLIAMEACATAHGWGRAFEALGHDVRLIPPSYVKPFVKRQKNDVADAEAIVEAAMRPTMRFVVVKTEDQQARAMLFRTRQMFVGQRTQMINALRGHLAEHGLVAARGPAHLKQLVDALADNDTMLHIEVRELGRMYLEQIEEMNARVAELDAKMRSAAKKADLVRRAQTMPGVGPVTALAIETFAPDLTTFKRGRDFAAWLGLVPKQHSTGGKARLGKTSKMGQRDIRTLLVSGAMAVLQAVERFNTPNNGWLKRLLTRKPRMVAAIALANKMARGLWAMITKHEDYRNPAATMA

SEQ ID NO: 17292 - protein, 311 aa, unidentified
  source 1..311: note = protein_5f2197f
  REGION 7..149: note = RuvC_domain
  SITE 10: note = RuvC_P1
  SITE 54: note = RuvC_P2
  SITE 94: note = RuvC_P3
  SITE 96: note = RuvC_P4
  SITE 99: note = RuvC_P5
  REGION 189..273: note = Tnp_domain
  SITE 197: note = Tnp_P1
  SITE 226: note = Tnp_P2
  SITE 234: note = Tnp_P3
  SITE 235: note = Tnp_P4
  SITE 246: note = Tnp_P5
MNSEAYIGVDVSKDLLDVKVLPSEQTQQFSNDDPGVKNLITFVKKIHPQLIVFESTGGLEMLAVSSLVEKHLPTVVINPRQIRDFAKATGRLAKTDSIDADTIARFARDIRPEIRPIKDEHTQLLSALNARRRQIVDMLVAEKNRLYSAPKPNIKSIQKHIQYLERTLEDINNDINKTIKKSPTWRENDRILQSFKGVGPVLSATLLCDLPELGTLNRKKIAALVGVAPLNCDSGRFRGRRRIKGGRADVRRKLYMAAVASIRHNPRMKNFYHKLIDAGKPPKLALTACMRKILTILNAMIKNRTYWIATC

SEQ ID NO: 17293 - protein, 341 aa, unidentified
  source 1..341: note = protein_1fbd82d
  REGION 7..148: note = RuvC_domain
  SITE 10: note = RuvC_P1
  SITE 53: note = RuvC_P2
  SITE 88: note = RuvC_P3
  SITE 90: note = RuvC_P4
  SITE 93: note = RuvC_P5
  REGION 209..295: note = Tnp_domain
  SITE 217: note = Tnp_P1
  SITE 247: note = Tnp_P2
  SITE 255: note = Tnp_P3
  SITE 256: note = Tnp_P4
  SITE 268: note = Tnp_P5
MDTISLIGIDLGKHCFHLHAQSASGHMVLRKKLTRNQMFTLLARVPSCTVVMEACAGAHWVARRLQELGHYPKLISPQFVQPFVQGNKNDFADAQAICEAASRPSMRFVSPRNEVQQTISALHRVREALVRDRTGTINQIHAFLLEFGVSLPKGMGVIRRLPAVLASHDLPPRLVALLERLQAHFKYLDEQVAQLESELIRQLREDERSQRLLEIPGIGPITASVLATELGDAHQFACARQFAASIGLVPRQYSTGGKPTLLGISKRGDKNLRRLLVQCARALMLHIERHADRLGAWVRDLLARRHSNVVACALANKLARIAWAILARGTHYQSAQAVAAA

SEQ ID NO: 17294 - protein, 317 aa, unidentified
  source 1..317: note = protein_ad484e9
  REGION 10..160: note = RuvC_domain
  SITE 13: note = RuvC_P1
  SITE 55: note = RuvC_P2
  SITE 95: note = RuvC_P3
  SITE 97: note = RuvC_P4
  SITE 100: note = RuvC_P5
  REGION 190..275: note = Tnp_domain
  SITE 198: note = Tnp_P1
  SITE 227: note = Tnp_P2
  SITE 235: note = Tnp_P3
  SITE 236: note = Tnp_P4
  SITE 248: note = Tnp_P5
MAMQVGKLIVGADVAKAELVIHHDDRDEIIRLKNSKPEIKRWLKQQPLNTAIAVEATNVYHLDLVEQAHSLGFEVYVIDGFQLSNYRKSVGGRVKTDPSDARLLSRFLKNEGEDLRPWSPPPAVYGKLQSLLRRRAALVTARTAMTQSWANESLLQAAFETFVKSIDRLDKLIQQKIKEVLREAGLQEQVARCQAVEGIGFLTAAALVMAFMRGEFKSSDSYIAFLGMDLRVSDSGQKNGRRRLTKRGCSEIRRLLHNAAMAASRSAAWKGLYEQHRKSGKATTQALVILARKLARVAFALMKNQDEYVTKGGKLAC

SEQ ID NO: 17295 - protein, 336 aa, unidentified
  source 1..336: note = protein_3bafea8
  REGION 3..131: note = RuvC_domain
  SITE 35: note = RuvC_P2
  SITE 70: note = RuvC_P3
  SITE 72: note = RuvC_P4
  SITE 75: note = RuvC_P5
  REGION 194..279: note = Tnp_domain
  SITE 202: note = Tnp_P1
  SITE 232: note = Tnp_P2
  SITE 240: note = Tnp_P3
  SITE 241: note = Tnp_P4
  SITE 253: note = Tnp_P5
MGLDPAGTPIQKATFRRDTLLQFFERAAPTLVGMEACPGSQWLARKIAAMGHTVRIIPAQFVKPFVKSNKNDIIDAAAIAEAVTRPTMRFVDMRSPEQVDLQAVHRVRDRMISQRTCLINQMRAFCLEYGIAIHQGAGKFKADLPRILADESNDLTSAMRRILASTFDELKQLELRIAEINREIEAIAAQCDTARRLMTIPGIGPLAATALLAAAGSARQFRKARDMAAWLGLVPREYSTGGKTKLLGISKRGNRYLRRMIIHGARSCVTHLDRSRYRLGAWLDGLEARMHTNKVTVALAAKIARIVWVVMTTPGATYDEGIQPLADSLRSRLRGS

SEQ ID NO: 17296 - protein, 273 aa, unidentified
  source 1..273: note = protein_3ed031c
  REGION 7..149: note = RuvC_domain
  SITE 10: note = RuvC_P1
  SITE 53: note = RuvC_P2
  SITE 88: note = RuvC_P3
  SITE 90: note = RuvC_P4
  SITE 93: note = RuvC_P5
  REGION 212..272: note = Tnp_domain
  SITE 219: note = Tnp_P1
  SITE 249: note = Tnp_P2
  SITE 257: note = Tnp_P3
  SITE 258: note = Tnp_P4
MNEVTMIGVDLAKSVFQAHGATAAGEPVFRKKLSRGQFLKFLGEQPSCVVAMEACASSHYWGREIMKLGQEVRLIPPIYVKPFVKRQKNDANDAEAIAEAAVRPTMRFVPVKSAEQQSRSMIFKTRDLFVRQRNAIINALRDHLMEYGIIAPPGLTFVKKLAEQIDDPESDLPPIVIELSRVHLDQLSIITDKVVAIERRLKEESKSDSETVRLQTAPGIGPISAMAIKAFPPPLEGFKRGRDYAAWLGLVPVQKSTGGRQINIGQDIKDGAT

SEQ ID NO: 17297 - protein, 341 aa, unidentified
  source 1..341: note = protein_5474ae4
  REGION 6..147: note = RuvC_domain
  SITE 9: note = RuvC_P1
  SITE 52: note = RuvC_P2
  SITE 87: note = RuvC_P3
  SITE 89: note = RuvC_P4
  SITE 92: note = RuvC_P5
  REGION 211..305: note = Tnp_domain
  SITE 219: note = Tnp_P1
  SITE 249: note = Tnp_P2
  SITE 257: note = Tnp_P3
  SITE 258: note = Tnp_P4
  SITE 270: note = Tnp_P5
MKIVVLGIDLGKTYCSVVGLDESGAVVLRRRLGRVTLERFVGGLPPCVVAMEACCGAHHLGRVFGEQGYEVRLMSPEYVRAYVKAQKNDDRDAEAIAEAARRPTMRFVPVKSVAQSDVQALHRARERLVSARTALINHLRALLLERGIVAPQGRARLEAELCTFADEEAGSLSPRIRLLVEDLRREWRSLDQRIAAFDKEFVALARQDEAARRLSTIPGIGTINATALVAALGDARSFRRGRDLAAWLGLTPRQRTTGGKPRLLGISKRGNRYLRKNLIHGARAALRHLVAQDTPLGRWLRSLLQRAHKNVVVVALANKLARIVWAVLTQGRAYASGYQGV

SEQ ID NO: 17298 - protein, 339 aa, unidentified
  source 1..339: note = protein_6cdf503
  REGION 6..148: note = RuvC_domain
  SITE 9: note = RuvC_P1
  SITE 52: note = RuvC_P2
  SITE 87: note = RuvC_P3
  SITE 89: note = RuvC_P4
  SITE 92: note = RuvC_P5
  REGION 211..300: note = Tnp_domain
  SITE 219: note = Tnp_P1
  SITE 249: note = Tnp_P2
  SITE 257: note = Tnp_P3
  SITE 258: note = Tnp_P4
  SITE 270: note = Tnp_P5
MQVATIGVDLAKNIFQVHGITECDEVAFNRPLRRAQALPFFARLDPWLVGMEACSTSHYWARELTRLGHEVRLIPPRYVKPYVKLGKSDAIDAEAICEAVTRPTMRFVEIKSVDQQALLSLHRARNLMVRQRTQLVNALRSMLAEFGVYIARGLTRLLSFAQGVLARAEPGLPEIAQDVVHNLCGQLQVLHGQVRRYEARLRVEGKRDARVSLLQTIPGVGVVTASAIAASIGSGHQFKNGREFAAWLGLTPANRSSGGKERLGRITKMGDQYLRQLLVVGMTSLVRQTKSHPERANKWLAALLERKPARLATVAMANKTARIVWAVLTKNKPYMPRTL

SEQ ID NO: 17299 - protein, 347 aa, unidentified
  source 1..347: note = protein_da5923d
  REGION 6..158: note = RuvC_domain
  SITE 9: note = RuvC_P1
  SITE 64: note = RuvC_P2
  SITE 102: note = RuvC_P3
  SITE 104: note = RuvC_P4
  SITE 107: note = RuvC_P5
  REGION 202..289: note = Tnp_domain
  SITE 210: note = Tnp_P1
  SITE 240: note = Tnp_P2
  SITE 248: note = Tnp_P3
  SITE 249: note = Tnp_P4
  SITE 262: note = Tnp_P5
MAKLIIGIDFSKEKMNYCCMESESMSILQEGEVENSRKGCAQMTGRLRSLYKGLKAADFLFCGENTGMYSMEVVECFTQRKYLFWLENPLQIKLSSGIQRSKTDRLDARMIAEYACRHRDKAKGCTLPDKGLKKLRELHLTRRMLKECEVKLRNFSGSTSKASSEASKALRKVMKAIMESVKSLEKEIRETLMEEDEFKENTELALSVPGISWVTASAIILDTRNFTRFDSARQYANHTGCVPHEHSSGTSINKKPRVSKASNRYVNSLLTQGALSLLTHNPRTKEYAQRKKAEGKPFGFIVNNIRNKTIHRLFAVIRNKTPFCWDYVKGSPTSCVNLLQKDVVTFA

SEQ ID NO: 17300 - protein, 412 aa, unidentified
  source 1..412: note = protein_53e7026
  REGION 4..170: note = RuvC_domain
  SITE 7: note = RuvC_P1
  SITE 67: note = RuvC_P2
  SITE 107: note = RuvC_P3
  SITE 109: note = RuvC_P4
  SITE 112: note = RuvC_P5
  REGION 278..364: note = Tnp_domain
  SITE 286: note = Tnp_P1
  SITE 317: note = Tnp_P2
  SITE 325: note = Tnp_P3
  SITE 326: note = Tnp_P4
MLFVGDDWAEDHHDVEIVDDGGRLLARRRLPEGLEGVTRLHALIGEHTPAEWADLEPDRAAAMVKVGIETDRGPWVAALAAAGYEVFAINPMSVARYRERHSTSGAKSDAADAHLLAEIVRVDRAHHLPLAGDTAEGEAIKLTARAHQSLVWDRTRHVLRLRSALRDFFPAALKAFSDLDAPDTLELLAKAPGPDQAARLTKSRIIAALRRAHRRHVETKATELAAILGEKQLRQPPAIQSAYEAVVSSEVAIITALNTQIDQLGTVVAAHFGQHPDAEIYTSQPGLGTILAARVLGEFGDDPHRYRDAKARKNYPGTSPITRASGTRRIVLARYARNRRLADALQQWAFSAMRGSPGARSYYHQLRARNIGHQAALRQLANRLVGILHGCLKTHTRYDEHTAWAHLTTAAA

SEQ ID NO: 17301 - protein, 388 aa, unidentified
  source 1..388: note = protein_9774a84
  REGION 4..162: note = RuvC_domain
  SITE 7: note = RuvC_P1
  SITE 60: note = RuvC_P2
  SITE 101: note = RuvC_P3
  SITE 103: note = RuvC_P4
  SITE 106: note = RuvC_P5
  REGION 266..352: note = Tnp_domain
  SITE 273: note = Tnp_P1
  SITE 303: note = Tnp_P2
  SITE 311: note = Tnp_P3
  SITE 312: note = Tnp_P4
  SITE 325: note = Tnp_P5
MIYVGIDVAKDKHDCLITNSDGEILFPIFNISNDLIGFSLLLQRIQSCSNNPETIKIGLEATGHYSNNIADFLINKNYHIFIINPLHTSLYKKSQSFRKTKTDKADAQSIVSMLMTQKLTPYAPASYHEKELKSLTRYRFNLVKDCSKLKVSFSRLMNIIFPELEKIVHELQVKSVYQLMREYTDTNAISKAHLNRLTNLLSKYSKGHYGREKAIEIREAAKQSIGSCNGIQAIELQQTLARIHLLLEQIEIIEERIKRIVQEIDSPFITIPGISYITAAMIHAEIGDFSEFSDAGKILAFAGMEPSIYQSGQYTSNKAKMVKRGSKYLRFALYTAAKNVGKWDGNFQTFLQKKLAEGKPYNVAVSHVAKKLVRVLYSMEIKHEIYIK

SEQ ID NO: 17302 - protein, 390 aa, unidentified
  source 1..390: note = protein_6a8bcd6
  REGION 4..162: note = RuvC_domain
  SITE 7: note = RuvC_P1
  SITE 60: note = RuvC_P2
  SITE 101: note = RuvC_P3
  SITE 103: note = RuvC_P4
  SITE 106: note = RuvC_P5
  REGION 265..352: note = Tnp_domain
  SITE 273: note = Tnp_P1
  SITE 303: note = Tnp_P2
  SITE 311: note = Tnp_P3
  SITE 312: note = Tnp_P4
  SITE 325: note = Tnp_P5
MFYLGIDVAKDKHDCIIIGSDGEVLVKPFTIPNNRNGFDGLLARIKMCGKDFSKMRIGLEATGHYCNNLLEFLIANQLPTTVINPLHTNLYRKGQSLRKTKTDTVDAQSIATMLRTECLEPYSQSSYHVRELKSLTRYRFSMVQDCGKLKSSYSRLCCILFPELEKLVPSLHMASVYALLSEFPGSKAISSCHLSRLSNLLCSASKGHYGKEKAIEIRDAARESIGSGSEMKSFELQQTIQRIRILNEQIEEIEVKINLMVDEFDSPILTVPGISYRMAAVIIAETENFRNFDSAEKVLAFAGLEPSVYQSGQLNSTHAKMVKRGSKYLRFALFNAAKYVCHWDTGFHKYLDKKRSEGKAYNVAVSHAAKKLTRVLFHLVKADKEFVCQA

SEQ ID NO: 17303 - protein, 346 aa, unidentified
  source 1..346: note = protein_3080115
  REGION 8..149: note = RuvC_domain
  SITE 11: note = RuvC_P1
  SITE 54: note = RuvC_P2
  SITE 89: note = RuvC_P3
  SITE 91: note = RuvC_P4
  SITE 94: note = RuvC_P5
  REGION 214..298: note = Tnp_domain
  SITE 222: note = Tnp_P1
  SITE 252: note = Tnp_P2
  SITE 260: note = Tnp_P3
  SITE 261: note = Tnp_P4
  SITE 273: note = Tnp_P5
MKTKVSVLGIDIGKNICSLVGIDAAGTVIMRRRATRETLIGLAAKLPACVVAMEACCGAHHLGRVFAAHGHEVRLMSPEYVRPYVKAQKNDDRDAEGIAEAATRPTMRFVELKTQDQLDIQTLHRSRDRLVGERTALINQLRAILLERGIVVPKGKRHLADYLAVLLDEGNRHTLSDRMYRLVDDARTQWRELDQRIAAFDAEFTAFAKENEDARRLATIPGVGALIASALLAAIGKAETFEHGRDLAAWLGLVPRQATTGGKPKLLGISKRGNRYLRRQLIHGARAALPHVAKRDTPLGRWLTALLARVHQNVAVVAFANKLARISWAVLRRGETFADKEAILAA

SEQ ID NO: 17304 - protein, 403 aa, unidentified
  source 1..403: note = protein_dcba8b7
  REGION 4..160: note = RuvC_domain
  SITE 7: note = RuvC_P1
  SITE 57: note = RuvC_P2
  SITE 97: note = RuvC_P3
  SITE 99: note = RuvC_P4
  SITE 102: note = RuvC_P5
  REGION 274..361: note = Tnp_domain
  SITE 282: note = Tnp_P1
  SITE 312: note = Tnp_P2
  SITE 320: note = Tnp_P3
  SITE 321: note = Tnp_P4
  SITE 334: note = Tnp_P5
MNAVGIDVSKGKSMVAILRPYGELVEAPFEVKHTSSEIQSLIQTVQSIDGESRIVMEHTGRYYEPLFCQLAGAGLFVTAVNPKLIKDFGTNSLRKVKSDKADAIKIAKYALDSWSDLKQYSVMDEIRKQLKTMNRQLDFYMKHKTSMKNNFIGLLDQTFPGVNNYFSSPAREDGSQKWVDFATTYWHVDCVRNMSRSAFISHYQNWCKRKEYNFSQSKAEEIYEAAKELVPVLPKDDVTKFIVKQAAGQLADASERVAQLKVKMDETASKLPEYPIVMAMYGVGSSLGPQLMAEIGDVSRFTHKGALTAFAGVDPGVNESGTYEQKSVPVSKRGSAPLRKALFQVMDCLIKHMPQDDPVYLFMDKKRTEGKPYYVYMTAGANKFLRIYYGRVKEYLLSLKQPE

SEQ ID NO: 17305 - protein, 341 aa, unidentified
  source 1..341: note = protein_b8dc7ac
  REGION 7..149: note = RuvC_domain
  SITE 10: note = RuvC_P1
  SITE 53: note = RuvC_P2
  SITE 88: note = RuvC_P3
  SITE 90: note = RuvC_P4
  SITE 93: note = RuvC_P5
  REGION 211..296: note = Tnp_domain
  SITE 219: note = Tnp_P1
  SITE 249: note = Tnp_P2
  SITE 257: note = Tnp_P3
  SITE 258: note = Tnp_P4
  SITE 270: note = Tnp_P5
MGEVSTIGLDLAKNVFQAHGADASGAVLFRKTLRRHQVLTFFAGQPPCTVAMEACGSAHHWAREIGKLGHRVRLIPPAYVKPFVKRQKNDAADAEAICEAAQRPTMRFVVVKSEQTQAAALVFRARDLLVRQRTQIINALRGHLAEFGIVAAKGPARVPQLMQAVEDPTEPIPELARPILQMLIETLRGLDEQITRLDQEIIERAKEDETARRLMTIPGIGPVTAVALAALAPPAEVFKRGRDFAAWVGLTPSEHSTGGKQKLGATSKMGERTLRRLLIIGASAVVSWVARNGAPAGSWIARMVARKPPMLVRVALANKMARIVWALMARGGVYQAPAAAA

SEQ ID NO: 17306 - protein, 400 aa, unidentified
  source 1..400: note = protein_874034a
  REGION 4..163: note = RuvC_domain
  SITE 7: note = RuvC_P1
  SITE 60: note = RuvC_P2
  SITE 101: note = RuvC_P3
  SITE 103: note = RuvC_P4
  SITE 106: note = RuvC_P5
  REGION 266..353: note = Tnp_domain
  SITE 274: note = Tnp_P1
  SITE 304: note = Tnp_P2
  SITE 312: note = Tnp_P3
  SITE 313: note = Tnp_P4
  SITE 326: note = Tnp_P5
MVCVGIDVSKDKHDCFILSSEGEVLADVFTIPNSMEGFQLLLEKIRGCVSPQDSIKVGLEATGHYSYNLLGFLLDCGLATYVLNPLHTNLYRKSLSLRKTKTDRVDARTIAAMLLSDVGLKPYTNTVYHNEELKSLTRYRFDKVRERAKLKQSVSRLVCILFPELEKLVPSLHMKSVYALLEEFPGAKQIAVANLTRLKFLLAGASKGRYGREVAVVIREAARASIGSFMPAKSLELRHTIRLIRELDAEIEDIEGSIQSIMDELQSPITTIPGLGFRMAAMILAEVGDFARFDSPDKLLAYAGLSPSTYQSGQLNNCYAHMEKRGSRYLRYAIYNATKYVCYWDPTFAAYLAKKRSEGKHYNVALSHAAKKLVRLIYAMEKSGLPYQPANAAYIFSLIL

SEQ ID NO: 17307 - protein, 419 aa, unidentified
  source 1..419: note = protein_224aa21
  REGION 10..158: note = RuvC_domain
  SITE 13: note = RuvC_P1
  SITE 64: note = RuvC_P2
  SITE 98: note = RuvC_P3
  SITE 100: note = RuvC_P4
  SITE 103: note = RuvC_P5
  REGION 253..343: note = Tnp_domain
  SITE 261: note = Tnp_P1
  SITE 294: note = Tnp_P2
  SITE 302: note = Tnp_P3
  SITE 303: note = Tnp_P4
  SITE 314: note = Tnp_P5
MFKIFRKNCCGLDVHKTWIYACIGITDENGRTDYQQTRFSSFSKGLRELADWLAKHECKEVCMESAGRYWIPVFNILENTCWVTLAHPKYTKPQKGNKTDRKDAKWICDLFMCDMIKPSFIPPPDIRHLRDLVRYRFKLTNILTGEKNRAQNCLTVSNLKLDDVFSDIFGKSAMSITKYILEHPGEQFDVTPFVNSRCKSPIEEIQAAVDGSISREQATKLREILSHINELETHKANIETEIMRLAAPYEAALELIRTVPGFSSDPMTAIAVISEIGIDMSVFPTAKNLSSWAGCCPRNDQSGGKRKSNRISRAGVYIKPLLVQVANAVVKSDKYPEFKERYRRIKARRGHKKAIIAIYRMFLTAIWNIIDRLEPYSAKGYITDRPANQSMVISKTQALNLLRLRGYIIKDDVAPLAPV

SEQ ID NO: 17308 - protein, 317 aa, unidentified
  source 1..317: note = protein_b9d9ae6
  REGION 6..155: note = RuvC_domain
  SITE 9: note = RuvC_P1
  SITE 53: note = RuvC_P2
  SITE 93: note = RuvC_P3
  SITE 95: note = RuvC_P4
  SITE 98: note = RuvC_P5
  REGION 192..276: note = Tnp_domain
  SITE 200: note = Tnp_P1
  SITE 229: note = Tnp_P2
  SITE 237: note = Tnp_P3
  SITE 238: note = Tnp_P4
  SITE 249: note = Tnp_P5
MSELFAGIDVSGHRLDVAVTEATAPWQVSNDTLGIDELVGRLRALSPALVVLEATGGYEFEAACALQAAGLSVAVVNPRMARDFARALGGLAKTDALDARMLAEFARVVHQHPERERFVKPLATAELQRLQALVQRRRQLVQMLTSERLRLRVAHVAARPSLQRHIAYLKAELDESDGEVASHVQRHHAELAQALSSVPGIGAASVAVLLAELPELGQLDRRRIACLVGVAPLNHDSGRMRGQRHIWGGRATVRGVLYMATLTAVRHNPVLKAFYQRLVAAGKSKKVALVAAMRKLLTILNAIVKHRTSWCPSMQNT

SEQ ID NO: 17309 - protein, 338 aa, unidentified
  source 1..338: note = protein_58bf367
  REGION 6..152: note = RuvC_domain
  SITE 9: note = RuvC_P1
  SITE 53: note = RuvC_P2
  SITE 91: note = RuvC_P3
  SITE 93: note = RuvC_P4
  SITE 96: note = RuvC_P5
  REGION 211..298: note = Tnp_domain
  SITE 219: note = Tnp_P1
  SITE 249: note = Tnp_P2
  SITE 257: note = Tnp_P3
  SITE 258: note = Tnp_P4
  SITE 270: note = Tnp_P5
MAIIAIGIDLAKNVFAVHGVDAAGKAVLVRPAVRRDALLELMAKLPPCLIGMEACSGAHHWARQFQQFGHQVRIMAAKFVAPYRLSGRRGKNDAADAQAICEAVQRPQIRFVPIKSEDAQGRLSIHRVRQGFIEQRTATINRIRGLLSEYGHVLPQRAEVVRREAGQCLEDLPGWANTAIGDLLSELHRLDERIAEYDRHIETMAKADDRCRRLMSIPGVGDKTATALMASIGSAHDFKCGKQLAAWLGLVPSQYSSGGKQRLGRITKAGDGYLRMLLILGARAVVANANKKDDRLSRWVADLAERRGYWKAVVAVAAKNARMAWAMLSKGEAFKPLT

SEQ ID NO: 17310 - protein, 339 aa, unidentified
  source 1..339: note = protein_80b6211
  REGION 7..148: note = RuvC_domain
  SITE 10: note = RuvC_P1
  SITE 53: note = RuvC_P2
  SITE 88: note = RuvC_P3
  SITE 90: note = RuvC_P4
  SITE 93: note = RuvC_P5
  REGION 212..298: note = Tnp_domain
  SITE 220: note = Tnp_P1
  SITE 250: note = Tnp_P2
  SITE 258: note = Tnp_P3
  SITE 259: note = Tnp_P4
  SITE 271: note = Tnp_P5
MNQITIIGLDLAKKVFQIHGVDASGGVVLRRPLRRGKVLEFFTRLPACLIGMEACATAHYWGRALGKLGHEVRLIPPAYAKAYVRRNKNDAADAAAICEAVSRPNMRFVVVKTETQQATAGVHKVRELLVKQRTMLINHLRGMAAEFGIVVAEGPQRAAELVAIVLDPEQTRIPAPLRQTLMSLVDLLSSIERKLQDIEKQLLDWGRNNQTCRNLITIPGYGPILSSAMAAIVVNPGVFRSGRDFAASLGLVPRHEGTGGVVKLGPISKRGNGYLRRLLVNGATSVLNSKRARKDPWLVKLLEKKPRKLAAVALANKMARIGWAIMTRQQSFRAAPAAA

SEQ ID NO: 17311 - protein, 347 aa, unidentified
  source 1..347: note = protein_2444310
  REGION 6..150: note = RuvC_domain
  SITE 9: note = RuvC_P1
  SITE 54: note = RuvC_P2
  SITE 89: note = RuvC_P3
  SITE 91: note = RuvC_P4
  SITE 94: note = RuvC_P5
  REGION 213..300: note = Tnp_domain
  SITE 221: note = Tnp_P1
  SITE 251: note = Tnp_P2
  SITE 259: note = Tnp_P3
  SITE 260: note = Tnp_P4
  SITE 272: note = Tnp_P5
MNITRVGVDIAKSVFHVHAVDRRENTQWQAKLKRSQWLESLCEHVDPGAEIGMEACASAHHWGRELQKRGYRVKLIAAQFVKPYVKSNKNDRVDAEAICEAMSRPGMRFVAVKSVEQQDTQAAHRIREELVGHRTAKANQIRGLVGEYGIVAPVGIQKLRFALPQWLEDAENGLTDEFRVLLAELAEDLRHLDGRISGLDERIAQCVKNDPVARRLLELRGVGPLTASALAGALGDGKGFRKGRDFAASLGLTPRQHSTGGKDRLLGISKRGDSYLRKLLVHGARAVLRHAKARDDGLSQWLNELAARKHVNVATVALANKTARIAWAIVHNETAYDPMLSATKQAG

SEQ ID NO: 17312 - protein, 320 aa, unidentified
  source 1..320: note = protein_9f6c062
  REGION 8..163: note = RuvC_domain
  SITE 11: note = RuvC_P1
  SITE 56: note = RuvC_P2
  SITE 96: note = RuvC_P3
  SITE 98: note = RuvC_P4
  SITE 101: note = RuvC_P5
  REGION 195..279: note = Tnp_domain
  SITE 203: note = Tnp_P1
  SITE 232: note = Tnp_P2
  SITE 240: note = Tnp_P3
  SITE 241: note = Tnp_P4
  SITE 252: note = Tnp_P5
MSVTSVVVGIDVAKAHVDVAVLGGKLQAQRFDNEAEAHSALAAALKPLGVALVVMEATGGYEAALACALQAAGLPVAVVNPRQARDFAKSMGRLAKTDRIDARMLAEFAGVLARRDDLASLIRPLADAQQQALAAMVTRRRQLVTMMLSERQRLQLAIAVVRPSIEAMIEAIRKQLDDVEAQMVGHVQAHYAELDKLLRSAAGIGPVASATLIAELPELGRLNRREIAALVGVAPMANDSGNVKGRRRVQGGRFEIRRVLYMATLTAARHNPAIKTFYDRLLGAGKLPKVALVACMRKLLTTLNAMVKTNKPWDKSLHGA

SEQ ID NO: 17313 - protein, 345 aa, unidentified
  source 1..345: note = protein_18a0108
  REGION 7..149: note = RuvC_domain
  SITE 10: note = RuvC_P1
  SITE 53: note = RuvC_P2
  SITE 88: note = RuvC_P3
  SITE 90: note = RuvC_P4
  SITE 93: note = RuvC_P5
  REGION 212..301: note = Tnp_domain
  SITE 220: note = Tnp_P1
  SITE 250: note = Tnp_P2
  SITE 258: note = Tnp_P3
  SITE 259: note = Tnp_P4
  SITE 272: note = Tnp_P5
MFKNPTIAIDLAKNSFQVCKMNRQGKIEYNRSINRKALIELLGKHEPVLVAMEACAGSHYWGRLARKHGHQVKVIQTRFVKGLQIKQKTDKNDANAIAIAAQLDQIQSCIVLTEEEQGLQSLDRVRSLQVEQRTALINQIRGLLLEFGIVIPQGWSSLAKALPDILEDAENNLPSIFRQTLHMQSNMLRCYNEQIECYDKLISESVRHNDTCKKLQKLEGVGPLVALGLTIRLGNANEFTNTRDASACLGLTPKQHSTGGKERIGHISKYSADKRLRSLLFQGAMSVVLYATKREPKTQKEKWLKSIIERRGKKIAAIALANKTVRTAVALIKNDSDYNPIPLTI

SEQ ID NO: 17314 - protein, 339 aa, unidentified
  source 1..339: note = protein_7206de5
  REGION 5..151: note = RuvC_domain
  SITE 8: note = RuvC_P1
  SITE 53: note = RuvC_P2
  SITE 91: note = RuvC_P3
  SITE 93: note = RuvC_P4
  SITE 96: note = RuvC_P5
  REGION 211..297: note = Tnp_domain
  SITE 219: note = Tnp_P1
  SITE 249: note = Tnp_P2
  SITE 257: note = Tnp_P3
  SITE 258: note = Tnp_P4
  SITE 270: note = Tnp_P5
MCDYIGLDVSLKETAISVRRDGERVWRGKCPSDPSAIASVLRKRAPAMERIVFETGPLSVWFFHALRAAGLPAICIDARHAKAALDMAPNKTDANDADGLAHLAEIGFYREVRVKGFDSMLLRTLIAARRRLVRTSVELSNQIRGLMKTFGLIIPSAKGGRFAAQVQRLLDGQETLARIILPLLEAWSAVRAQAADLGRQVMCHARHDDACQKLMSIPGIGAITATAFATAIEAPENFRKSRSVGAWLGLTTRRYQSGEVDYAGHISRRGDAHLRGLLYEAATVVLTRTTAQSALKTWGLALRERLGFKRAAVAVARKLAVIMHALLKSGQTFQTAAMV

SEQ ID NO: 17315 - protein, 412 aa, unidentified
  source 1..412: note = protein_365981c
  REGION 4..170: note = RuvC_domain
  SITE 7: note = RuvC_P1
  SITE 67: note = RuvC_P2
  SITE 107: note = RuvC_P3
  SITE 109: note = RuvC_P4
  SITE 112: note = RuvC_P5
  REGION 278..364: note = Tnp_domain
  SITE 286: note = Tnp_P1
  SITE 317: note = Tnp_P2
  SITE 325: note = Tnp_P3
  SITE 326: note = Tnp_P4
MLFVGDDWAEEHHDIEVQDETGKVLAKKRLPEGLAGMVALHELLGRHVPAGWADLDPAEAAGKVVVGIETDRGPWVAALVAAGYRVYAINPTSAARYRQRHSMSGAKADTTDAHLLAEIVRVDRAHHRPVAGDSPDAQAVKVVARMHQTLIWDRTRHLLRLRSALREYFPAAIRAFDELAAPDSLELLAVAPDPDAAAKLTKTRIVAALKRAHRRNVDERATVMMEVLRAPELRLPPVVQQAYAAGIVSLVAVLGVLNQQIDQLSVVVGDHFGRHRDAEIYTSLPGLGVVLGARVLGEFGDDPTRYADAKARKAYGGTAPITRASGKKKVVLARYARNDRLADALQQWAFGSMRGSPGAKAYYKALKDRKIGHQAALRQLGNRWVGILHGCLKTGQLYDENKAWSHQSSAAA

SEQ ID NO: 17316 - protein, 339 aa, unidentified
  source 1..339: note = protein_196a83c
  REGION 6..147: note = RuvC_domain
  SITE 9: note = RuvC_P1
  SITE 52: note = RuvC_P2
  SITE 87: note = RuvC_P3
  SITE 89: note = RuvC_P4
  SITE 92: note = RuvC_P5
  REGION 209..295: note = Tnp_domain
  SITE 217: note = Tnp_P1
  SITE 247: note = Tnp_P2
  SITE 255: note = Tnp_P3
  SITE 256: note = Tnp_P4
  SITE 268: note = Tnp_P5
MHIKTIGLDLAKSFFQAHGIDKAGDAVLVKKLHRKQMIPFFSKLPPCLIGVEACATAHHWARTLSAMGHDVRIMPPSYVKGYVKRGKSDAIDAEAICESVGRPTMRFVPMKTVEQQSILMGHRTRALIVRQRTMAANALRAHLAEFGLVANPGIANLVKVADKAFADATLPPYAHRALEILIRRMAELTDEICVLAQELKAWHASNEASRRLAAIPGIGVITATAIAATVTDPDQFSSGRQFAAWLGLTPKQHSTGGKTRLGGISKQGDRYLRRLLVVGATAVMRHAKRNPTPMTDWVNNLLEKKPFRLVSVALANKLARIAWAVLTRGETYRPFGLAA

SEQ ID NO: 17317 - protein, 350 aa, unidentified
  source 1..350: note = protein_8b1dbec
  REGION 12..153: note = RuvC_domain
  SITE 15: note = RuvC_P1
  SITE 58: note = RuvC_P2
  SITE 93: note = RuvC_P3
  SITE 95: note = RuvC_P4
  SITE 98: note = RuvC_P5
  REGION 217..302: note = Tnp_domain
  SITE 225: note = Tnp_P1
  SITE 255: note = Tnp_P2
  SITE 263: note = Tnp_P3
  SITE 264: note = Tnp_P4
  SITE 276: note = Tnp_P5
MPKAPLPPIATLGIDIGKNSFHLIGLDARGAIVLRQKLSRGQVEQRLANMPTCLIGMEACVGAHHLSRQLLALGHDVKLIPAQFVIPFRKSHKNDFRDAEAIAEAVLRPTMRFVPTKSVEQLDLQALHRVRSRLVSQRTAVINQIRAFLLERGIAVRQRLRSLRQALPDILAQRTDVLTPRMTHMIEALMQDWQHLDERIDAVTGEIEALVAADDACQRVMSVPGVGPIIASAMVATIGNGAAFQRGRDFGAWLGLVPRQISTGDRTVLGRLSKRGNSYLRSLLIQAARVLLLWPAKWRQHSFGEWLTAASMRLHHNVLAAALANKLARIAWSVLSQNRTYEPRTAAVMG

SEQ ID NO: 17318 - protein, 342 aa, unidentified
  source 1..342: note = protein_f7bb27c
  REGION 6..148: note = RuvC_domain
  SITE 9: note = RuvC_P1
  SITE 52: note = RuvC_P2
  SITE 87: note = RuvC_P3
  SITE 89: note = RuvC_P4
  SITE 92: note = RuvC_P5
  REGION 211..297: note = Tnp_domain
  SITE 219: note = Tnp_P1
  SITE 249: note = Tnp_P2
  SITE 257: note = Tnp_P3
  SITE 258: note = Tnp_P4
  SITE 270: note = Tnp_P5
MKITTLGIDLAKQVFQLHGVDEQGKTVLRKQLKRDQMATFFATLPTCLIGLEACGSAHYWARKLESFGHTVRLIAPQFVKPYVKTNKNDAADAEAICEAVARPNMRFVPIKNVEQQSVLALHRARQGFVRARTAQANQIRGLLAEFGIIIPQGIAHLYTRVPVLLDQQSEQLTGPFRLLIQRLLEHLKELDKQVNELEQQIKAWHKANEASCRLEQIAGIGPITASALVATIGNAKNFTNARQLAAWLGLVPKQHSSGGKQVLLGISKRGDQYLRTLLIHGARAVIYRARLAAEQTGWLQRLLQRCHPNVAAVALANKNARIVWALLANQRSFQRDYAADGT

SEQ ID NO: 17319 - protein, 345 aa, unidentified
  source 1..345: note = protein_48aa5dd
  REGION 6..147: note = RuvC_domain
  SITE 9: note = RuvC_P1
  SITE 52: note = RuvC_P2
  SITE 87: note = RuvC_P3
  SITE 89: note = RuvC_P4
  SITE 92: note = RuvC_P5
  REGION 211..299: note = Tnp_domain
  SITE 219: note = Tnp_P1
  SITE 249: note = Tnp_P2
  SITE 257: note = Tnp_P3
  SITE 258: note = Tnp_P4
  SITE 270: note = Tnp_P5
MNITTVGIDLAKNVFQVHGVDARGKVVVRRQLRREQVAPYFMNLPPCLIGIEACASSHHWGRTLERFGHTVRLMAPQFVKPYVKTNKNDAADADAICEAVSRPSMRFVPIKSIEQQAILSVHRVRQGFVKARTAQANQIRGLLGEFGLVIPKGIYHIAQRVPALLEDASNALPLALRQLIDRLTRHLKELDQQVRELERQIIAWHRSSELSRKLEKIPGIGPLAATALVASIADARSFDNGRQVSAWLGLVPRQNSSGGKSTLLGISKRGDVYLRTLLIHGARSAILAARRQSEIKNVWLANLLNRRHANIAAVALANKNVRTVWALLAHGRDFKPDYVPVGATA

SEQ ID NO: 17320 - protein, 323 aa, unidentified
  source 1..323: note = protein_211274e
  REGION 4..152: note = RuvC_domain
  SITE 7: note = RuvC_P1
  SITE 57: note = RuvC_P2
  SITE 97: note = RuvC_P3
  SITE 99: note = RuvC_P4
  SITE 102: note = RuvC_P5
  REGION 197..283: note = Tnp_domain
  SITE 205: note = Tnp_P1
  SITE 234: note = Tnp_P2
  SITE 242: note = Tnp_P3
  SITE 243: note = Tnp_P4
  SITE 256: note = Tnp_P5
MFYLGVDVAKAKLDCMLLDTSSGKRKSKVIPNTPAGFAQLLDWLDKHKAQQTHVVMEPTGVYHEAAALALTDAGMTLSLVNPAQLRQFAQGLGVKTKTDKADSTVLARYGETQKPDAWQPPSQSARRLKALLTRRDAIADDLLREQNRQEASEFGQAPEAVKESIAQSIAFLKAELKRLEKMIQEHIDNDPDLRNKKDLLESIPGVGERVSTHMTALFAARTFDRAEQLAAYLGLVPVQWESGSSVRGRPRMSKAGPAHLRKLLYMPAVSARRWNPHIKAMSERLLAKGKAKMAVIGACMRKLAHLCFGVVHSGRPYEPNYAM

SEQ ID NO: 17321 - protein, 315 aa, unidentified
  source 1..315: note = protein_7542186
  REGION 12..162: note = RuvC_domain
  SITE 15: note = RuvC_P1
  SITE 57: note = RuvC_P2
  SITE 97: note = RuvC_P3
  SITE 99: note = RuvC_P4
  SITE 102: note = RuvC_P5
  REGION 192..276: note = Tnp_domain
  SITE 200: note = Tnp_P1
  SITE 229: note = Tnp_P2
  SITE 237: note = Tnp_P3
  SITE 238: note = Tnp_P4
  SITE 250: note = Tnp_P5
MAMPVAIHQPIVGVDVAKDELVMYHAESDQLETIPNTKAAIKKWLKALSTRVDIAIEATNIYHLEFADLAHKAGCLIYMVGGYELSHYRKGVNVRAKTDALDARLLARYLKNEGQELKPWRPPSPLYRRLVSLFRRRAAVVQARVSLSQAWANEPLLKAAFKRQVSAMQRLETLVEQKIQEELKEAGLLGQLKRCMKVEGIGLLTGARLIASFQRGDFRNADAFIAFLGLDLRIAQSGRKKGRSCLTKRGDPEVRRLLHNAAMSARRTERWKGVYEALLARGLSTTQAMVALSRKLARVVFALLKSQSEYQPKSV

SEQ ID NO: 17322 - protein, 313 aa, unidentified
  source 1..313: note = protein_a2a7393
  REGION 9..163: note = RuvC_domain
  SITE 12: note = RuvC_P1
  SITE 64: note = RuvC_P2
  SITE 102: note = RuvC_P3
  SITE 104: note = RuvC_P4
  SITE 107: note = RuvC_P5
  REGION 258..313: note = Tnp_domain
  SITE 266: note = Tnp_P1
  SITE 297: note = Tnp_P2
  SITE 305: note = Tnp_P3
  SITE 306: note = Tnp_P4
MQDLLEVCCGLDVHKETIVACLLKGSVNDEKPEKTIRTFSTLLKDLEELKTWLETENCHHVAMESTGIYWQPVYNVLESAFDGNISIIVANAKHMKNVPGKKTDMKDAEWIATLLRAGLLSGSFIPPQEIRELRNLTRYRKSIIEEISSQKNRIEKHLQSCGFKLSNFLTDIFGVSGRAIIDHIAEHGSITAKEVENYVRGRARSKIEDIKLSINGRMNKHQREFLKLLLNHLDETYKHLYEIEESINAEIEKYKRQIEQLDGIPGIDVTAAAAIIAEIGTDMDKFKTAEHICSWAGLSPGNNESAGKKSPLE

SEQ ID NO: 17323 - protein, 258 aa, unidentified
  source 1..258: note = protein_b383c3a
  REGION 7..149: note = RuvC_domain
  SITE 10: note = RuvC_P1
  SITE 53: note = RuvC_P2
  SITE 88: note = RuvC_P3
  SITE 90: note = RuvC_P4
  SITE 93: note = RuvC_P5
  REGION 212..258: note = Tnp_domain
  SITE 220: note = Tnp_P1
  SITE 250: note = Tnp_P2
  SITE 258: note = Tnp_P3
MQAVTTIGFDIAKSVFQVHGVDTVGQVIIRRQLKRRQVIGFFQKLPACLVGIEACASSHYWSRELQALGHNVRLMPPAYVRPYVKRQKNDMADAEAICEAVTRANMRFVPTKTAEQQSGLMLHRTRHLFMRQQTSVINAIRAHLAEFGIVAPVGRRGVEELLRVVADPSDKRLLEIVRACLAALGSQLLSLKKQILDFDRMIMAWHRSNQTSKRLNCIPGVGPLLSTALVASVADPKTFRSGRNFSAWIGLVPKQNSS

SEQ ID NO: 17324 - protein, 404 aa, unidentified
  source 1..404: note = protein_0417412
  REGION 4..159: note = RuvC_domain
  SITE 7: note = RuvC_P1
  SITE 59: note = RuvC_P2
  SITE 96: note = RuvC_P3
  SITE 98: note = RuvC_P4
  SITE 101: note = RuvC_P5
  REGION 267..353: note = Tnp_domain
  SITE 275: note = Tnp_P1
  SITE 306: note = Tnp_P2
  SITE 314: note = Tnp_P3
  SITE 315: note = Tnp_P4
MWYAGIDWADDHHDAVVLDDNARQITTLRVAHTPAGLAQLITALEQICGKAAKEQLACIVETNRGLLISALLEAGFAVYPVNPKTVDRRRNAAGVKTDQIDAYLLAKTGRSDLADLRRLRPDSPLVQELKALTRDQDGLIQSQTRLLNQLTACLKAYYPVALQLFGKLHQPSTIAFLHAYPTPHQVMAASVDAIAAVLKQAGHTRAEAAARTIFQTLQQEQLTADAITTRTKARLMLALLAQLEPVMQQLAAYDAEIEHLFLLSADSAIFASLPRAGKRLAPRLLAEIGDDRSRYADASGLQALAGTAPVCFESGKYAKAHRRYACLKPLRNAMQHFAWQSSLQEGWALVYYQRKRSEGKSHTVAIRALANVWLRIIYAMWRDRTPYVSATFEAAQQQKLRKAA

SEQ ID NO: 17325 - protein, 392 aa, unidentified
  source 1..392: note = protein_775cc71
  REGION 4..163: note = RuvC_domain
  SITE 7: note = RuvC_P1
  SITE 60: note = RuvC_P2
  SITE 101: note = RuvC_P3
  SITE 103: note = RuvC_P4
  SITE 106: note = RuvC_P5
  REGION 266..355: note = Tnp_domain
  SITE 274: note = Tnp_P1
  SITE 304: note = Tnp_P2
  SITE 312: note = Tnp_P3
  SITE 313: note = Tnp_P4
  SITE 328: note = Tnp_P5
MVCVGIDVAKDKHDCFILSSEGEVLADVFTVENNREGFGVLLQRIRSCTLPTDKIKVGLEATGHYSYNILGFLLDKGLATYVINPLHTNLYRKSLSLRQTKTDRIDARTIASMLMSDVDLKSYTDLSYHNEELKSLTRYRFDKVSERATLKQSVTRLVNILFPELEKLVPTLHMVSVYAMLSEFPGAKQIAEAHLTHFKTVLSEASKGRYDREKAVAIRDAARRSVGSVMPAKSLELRHTIRLIRELDKEIEEVEAEIFTIFDSMQSPITTIPGMGPRMGAMILAEVGDFSRFDSPDKLLAYAGLSPSTYQSGKLNATGAYAHMEKRGSRYLRYAIFNATKFVCMWDSTFKAYLARKRAEGKHYNVAISHAAKKLVRLIYAMQRSGRPYQPA

SEQ ID NO: 17326 - protein, 400 aa, unidentified
  source 1..400: note = protein_17e017a
  REGION 11..168: note = RuvC_domain
  SITE 14: note = RuvC_P1
  SITE 66: note = RuvC_P2
  SITE 106: note = RuvC_P3
  SITE 108: note = RuvC_P4
  SITE 111: note = RuvC_P5
  REGION 274..361: note = Tnp_domain
  SITE 282: note = Tnp_P1
  SITE 313: note = Tnp_P2
  SITE 321: note = Tnp_P3
  SITE 322: note = Tnp_P4
  SITE 334: note = Tnp_P5
MDERQRFRWFLGIDVSKETFDACCLPNQGERLFNLSASMDRKGFGELVKQLSALSMTQASILVGMESTACYHINLYSFLVSLGYPVVVINPLLISNFVKLQLRKTKTDKKDAFVIAQFLLLNRDSLSQTLLSSEISDLRDLSRQRESLVDQMSSIKSEIKRLLTMTFPELEHISGIFTKSMLRLLCHYPSAILIRQVKRSQIAKLLIPGSYGKQTDASVDRILKAAQGSIGTSSATKEIILKQKASLLIQLEQHLQELTDILIELCRGKIQDEMEILTSMKGIGEKSAVNFLIEVGGDMKQFETHKKVIAMAGLDPALYQSGKIDRKGKISKRGNRHLKRVIWLMTTKVIQFNERFKQYYLKRIKDGLPYKKAVLPTAHKLIRVIFAMLTNKTLFNPKMN

SEQ ID NO: 17327 - protein, 412 aa, unidentified
  source 1..412: note = protein_1fc74e7
  REGION 10..166: note = RuvC_domain
  SITE 13: note = RuvC_P1
  SITE 63: note = RuvC_P2
  SITE 103: note = RuvC_P3
  SITE 105: note = RuvC_P4
  SITE 108: note = RuvC_P5
  REGION 274..360: note = Tnp_domain
  SITE 282: note = Tnp_P1
  SITE 313: note = Tnp_P2
  SITE 321: note = Tnp_P3
  SITE 322: note = Tnp_P4
MSLPECDFYVGIDWAAQTHAVCVQDAAGKITAQFTIEHTADGFATLLARLGRLASDPMQVSVALERPDGRLVDALLEAGYPVVPVSPNAIKTWRDGEVLSGAKSDAGDAAVIAEYLRLRSHRLRPATPFTAQTKAVRTVVRTRDDIVAMRTATANQLTALLDAHWPGATKVFADIESPIALEFLTRYPTAKHAAGLGEKRMAAFCVKHGYSGRRSAAELLTRLRAAPAGTTDPDLVEAVRDAVLALVAVLRTLGAVRKDLDRSVTAHLGEHPDAAIFTSLPRSGQINAAQVLAEWGDSRQAYDSPDAVAALAGLTPVTKASGKYHAVHFRWACNKGFRKAMTTFADNSRHQSPWAADVYRRAIQRGHDHPHAVRVLARAWVHVIYRCWLDRQPYDPARHGNAIKINNGQIAA

SEQ ID NO: 17328 - protein, 403 aa, unidentified
  source 1..403: note = protein_a9dff88
  REGION 10..164: note = RuvC_domain
  SITE 13: note = RuvC_P1
  SITE 61: note = RuvC_P2
  SITE 101: note = RuvC_P3
  SITE 103: note = RuvC_P4
  SITE 106: note = RuvC_P5
  REGION 271..357: note = Tnp_domain
  SITE 279: note = Tnp_P1
  SITE 309: note = Tnp_P2
  SITE 317: note = Tnp_P3
  SITE 318: note = Tnp_P4
  SITE 330: note = Tnp_P5
MELSEIGVFVGVDMAKNDHFAQATTTDGTEVFARSVLNDQTAIEQLLDDAGSHGNVALVIDMTASAAQLLLTIAAERAVPVAYVTGLQMRRAADLYAGSAKTDPRDAWVLADFARRNADRLAWLDVSDELLLRLRVLNGRDVDLATDANRVINRCRDALTAVSPGLERAVGQRLVQAGVRDLIAKWSTPTALRSAGRTKIRNAIKKRSPRIAGKVADEIWAALDAQTVVLPAEDTWGEVIADLLGDLERISARRVELATQIEETFLSHPLGQVLVTLCGFGPRTGARTLAEIGDPTRFANGSRLAAYAGLSPTDWRSGRSINGAFQHRGGNHRLKNAMFLAAFVATQHDPDARAYYQRKRAEGKKHNAAVICVARRRCNLIHAMLTTATPYDPSRPRNLAEAA

SEQ ID NO: 17329 - protein, 341 aa, unidentified
  source 1..341: note = protein_d766546
  REGION 8..149: note = RuvC_domain
  SITE 11: note = RuvC_P1
  SITE 54: note = RuvC_P2
  SITE 89: note = RuvC_P3
  SITE 91: note = RuvC_P4
  SITE 94: note = RuvC_P5
  REGION 213..301: note = Tnp_domain
  SITE 221: note = Tnp_P1
  SITE 251: note = Tnp_P2
  SITE 259: note = Tnp_P3
  SITE 260: note = Tnp_P4
  SITE 272: note = Tnp_P5
MSDYSYFGGIDLAKNHFSIHVVDSKGKVALHKSVTRSNLLTTIANMPPMRIGLEACGGAHYWARTLNTLGHDARIMAVKYVVTHRTKGKNDLNDAVAICQAVQHPSTRFVPVKSPEQQAILSVHRMREHWVRERTALMNRIRALLSEFGLVIPVGRSSLMKQVPLMLEDAENELPHLARTVIADAYYHLEQLNQRIADTEQVFDAFSKISKNAQRIMKVRGIGPQTATAILASIGNGSQFDKSRDFSAWLGLVPKQYSTGGKPRLGRITKHGDKYLRTLLVHGARTVIANLGDKQDRLSQWCRGVLGRRGMNRAIVALAAKNARIIWSLLHNQTEYENYAA

SEQ ID NO: 17330 - protein, 342 aa, unidentified
  source 1..342: note = protein_9ebfa6b
  REGION 9..169: note = RuvC_domain
  SITE 12: note = RuvC_P1
  SITE 68: note = RuvC_P2
  SITE 108: note = RuvC_P3
  SITE 110: note = RuvC_P4
  SITE 113: note = RuvC_P5
  REGION 209..295: note = Tnp_domain
  SITE 217: note = Tnp_P1
  SITE 247: note = Tnp_P2
  SITE 255: note = Tnp_P3
  SITE 256: note = Tnp_P4
  SITE 269: note = Tnp_P5
MTKILKQVAGIDVAQDELVVSLGRVDESLRKDIYAYKTFANKPSGFGALLVWIKKHTDNGVSVRYVMEATGVYHQKAAYYLSDQGLEVSIVLPNKISSYMKTLEIKTITDKTASQAICQFGLERGLGLWQKPKKLFRDLKQLTRERDQIVADRVIAKNQLHAEQTEAFPNDRSICRANGRIKLLDEQEKEIKREIAELVKMDKEVHKKIDLITSIPGVGSLTAAIVIAETNGFDLIRNKKQLVSYGGLDIIRKDSGTSVRGKPRISKKGNRQLRKAMHMPALAAIRNDDRFKAIFGRLVSKHGIKMKATVAVQRKILEMIYTIWTTEKPYDKDYLQKTSTTA

SEQ ID NO: 17331 - protein, 318 aa, unidentified
  source 1..318: note = protein_53d69a0
  REGION 8..151: note = RuvC_domain
  SITE 11: note = RuvC_P1
  SITE 54: note = RuvC_P2
  SITE 94: note = RuvC_P3
  SITE 96: note = RuvC_P4
  SITE 99: note = RuvC_P5
  REGION 190..274: note = Tnp_domain
  SITE 198: note = Tnp_P1
  SITE 227: note = Tnp_P2
  SITE 235: note = Tnp_P3
  SITE 236: note = Tnp_P4
  SITE 248: note = Tnp_P5
MQTSGCFIGVDVGKFELQVAGHEGGIVAGVLPNNRSSIVGWLKRLPAGSVIAMEATGGYQELLARTAHDQGFEVYVLNPTHVHHYAISLGNRGKTDRLDAKVIAQYIAQRRTKLHRYEPISPELQQAKSLQALRSTVVRVGTSLRLSAQRHGCASSHQKKALASLNLWAEQLERELIATIKADSEWAKTYGLLTSICGIGPINGAALTTLFNRVHFASSDAAVAFCGLDPRPNESGRKTGRRRLSKQGDKAARTLLYNAASSAARSIYFKDYYAMLRARGLASTAALVVIARKLLRIAYGVWRTGQPFDPGKLRPVMG

SEQ ID NO: 17332 - protein, 340 aa, unidentified
  source 1..340: note = protein_3eace41
  REGION 9..170: note = RuvC_domain
  SITE 12: note = RuvC_P1
  SITE 69: note = RuvC_P2
  SITE 111: note = RuvC_P3
  SITE 113: note = RuvC_P4
  SITE 116: note = RuvC_P5
  REGION 207..292: note = Tnp_domain
  SITE 215: note = Tnp_P1
  SITE 244: note = Tnp_P2
  SITE 252: note = Tnp_P3
  SITE 253: note = Tnp_P4
  SITE 265: note = Tnp_P5
MESRESFWVGFDVGKNSFSAALDCHGKNIRAKITSLPCRDFKRTPEGVEQFFLWAKKTIPGHDIRIVMETTGCYSQHLTDWINQLHPEISVTIENARNIHAFIQSLNLPHKTDKLDAQAIARFGTERHPKPTNRPSKTILSIRELSRERTALIKARVNLENRRDTLTSPVVRKINAQTLATLTTQIEKIDREIKACVVQDEELLSEVHIMTTMPGVSFISAYSILAEIGSLKQYSAKELSALSGLAPRIIESGSSVHSSYLSRRSSGRLRQILYLDSVPGVPKIPVLQEFHQRLIGKGKKKMTARCACMRKMFLILRSMVVHNTPFNGKFPNNQRKGLDF

SEQ ID NO: 17333 - protein, 343 aa, unidentified
  source 1..343: note = protein_642d9b2
  REGION 6..149: note = RuvC_domain
  SITE 9: note = RuvC_P1
  SITE 54: note = RuvC_P2
  SITE 89: note = RuvC_P3
  SITE 91: note = RuvC_P4
  SITE 94: note = RuvC_P5
  REGION 213..300: note = Tnp_domain
  SITE 221: note = Tnp_P1
  SITE 251: note = Tnp_P2
  SITE 259: note = Tnp_P3
  SITE 260: note = Tnp_P4
  SITE 272: note = Tnp_P5
MKLSRVGVDLAKNVYQLHGVDRSGKTLWKRRLKRHQWFKVLLDNIEPGCVIGMEACASAHHWGRQLQSRGYSVKLIPPQFVKPYVKSNKNDARDAEAICEAMSRPNMRFVTVKTVAQQDIQATHRIRAELMTQRTAKANQIRGLVAEYGLVAPKHLSSLRGAIPCWLEDAENGLSGDFRTLLQGVWTDLLLLDERVGEMDQVIKRLAENNEDCVRLQQLRGVGPMISTAMVATVGDARQYHKSRQMAAAIGITPRQHSSGDRDRLLGISKRGDVYLRTLMIHGARAVVARAKHKDDRLSRWVTGIATKRHPNVAAVALANKTARMAWAMLRHETDYDPDFALR

SEQ ID NO: 17334 - protein, 346 aa, unidentified
  source 1..346: note = protein_06a7c76
  REGION 7..148: note = RuvC_domain
  SITE 10: note = RuvC_P1
  SITE 55: note = RuvC_P2
  SITE 88: note = RuvC_P3
  SITE 90: note = RuvC_P4
  SITE 93: note = RuvC_P5
  REGION 212..301: note = Tnp_domain
  SITE 220: note = Tnp_P1
  SITE 250: note = Tnp_P2
  SITE 258: note = Tnp_P3
  SITE 259: note = Tnp_P4
  SITE 272: note = Tnp_P5
MTHSTTVGVDLAKNVIQVSVVSARGKELSNRSLTRRKFAEFLGKQKPSLVAFEACATSHYWARVAQRHEHEVRIIPAKFVAPFRQGHKTDSNDALAVAEAARRPSIKEAPMKTVEQQGLQAIHRSRQLLIQESTALSNHLRGLLMEFGVVIPQGFASLLRTVPEVLEDGENELPDLYRPTLHRMYMRLLELREHIEAMTREVEILVKEHPVCSRLTALEGIGPIGALLLYATLGSGNAFSGSREFAAYLGLAPRQYSSGGKTNIVGLSKKIGNCRLRSILILGARAYTYRLKEPKSTKDRWLKNAIDRNGHSRAAIALANKNVRTAWAMVTQGTEYQRRGQLKVAA

SEQ ID NO: 17335 - protein, 343 aa, unidentified
  source 1..343: note = protein_aca86e1
  REGION 7..149: note = RuvC_domain
  SITE 10: note = RuvC_P1
  SITE 53: note = RuvC_P2
  SITE 88: note = RuvC_P3
  SITE 90: note = RuvC_P4
  SITE 93: note = RuvC_P5
  REGION 212..298: note = Tnp_domain
  SITE 220: note = Tnp_P1
  SITE 250: note = Tnp_P2
  SITE 258: note = Tnp_P3
  SITE 259: note = Tnp_P4
  SITE 271: note = Tnp_P5
MNTIATIGLDLAKSVFQVHAVDAAGKVVVRRAIRRSQLLDFFERIPPCLVGMEACASAHYWTREIGKFGHQVRIMPASYVKAYVKRNKTDAADAEAICGAVTRPTMRFVPVKSDAEQSVNMMLKARDLLTRQRTQTVNALRSHLAELGIVAGAGFRASAKLVEIIRDDTDQRLPPIARIALTEIADQIERLTEKIMRLEKVIVSSVRKDDVARRLTSIPGVGPITAAAVRALVTDPAGFRTGRDFAASVGLTPRSNSSGGKQKLGSISKRGNPQLRSLFMVGAMAILKMSKHGAAMQPWVASLLKRRPFKVVAVAMANKTARIIWALLIKGGCYESRSAGLHA

SEQ ID NO: 17336 - protein, 333 aa, unidentified
  source 1..333: note = protein_4cb6bdd
  REGION 7..167: note = RuvC_domain
  SITE 10: note = RuvC_P1
  SITE 67: note = RuvC_P2
  SITE 107: note = RuvC_P3
  SITE 109: note = RuvC_P4
  SITE 112: note = RuvC_P5
  REGION 208..295: note = Tnp_domain
  SITE 216: note = Tnp_P1
  SITE 246: note = Tnp_P2
  SITE 254: note = Tnp_P3
  SITE 255: note = Tnp_P4
  SITE 267: note = Tnp_P5
MNLKYSVGLDIASKKIDICMSVIDSNQRVIVVSSKSFLNTLNGFKDMDEWVVKNHKEKEVPLVLCMEATGVYHENCALYFSERKYNTSIILPNKAKHYLISLGLKSKNDSIDAKGLSKMGAEQCLELWQPMGKFFYELRQYTRQYQNLQEQKTVFNNQLHALEHAMFKSKKMIKQQQDTIKLFDKQLKELEKLIKNLIYSDEIIKQKVSNICRIKGIGMLTAATILAETNGFELFKNYKQLVSYAGFDVVERESGTSTGKTKISKKGNSHIRRALFMPAFVAVKHNEKPAIDLYNRTIEKHGIKMKSYVAVQKKLLVLIYHIWKKMRNMIQII

SEQ ID NO: 17337 - protein, 391 aa, unidentified
  source 1..391: note = protein_1b2c54c
  REGION 4..161: note = RuvC_domain
  SITE 7: note = RuvC_P1
  SITE 60: note = RuvC_P2
  SITE 100: note = RuvC_P3
  SITE 102: note = RuvC_P4
  SITE 105: note = RuvC_P5
  REGION 266..353: note = Tnp_domain
  SITE 274: note = Tnp_P1
  SITE 304: note = Tnp_P2
  SITE 312: note = Tnp_P3
  SITE 313: note = Tnp_P4
  SITE 326: note = Tnp_P5
MYFVGIDIAKRHHEACIIDSAGQSQGKTLRFPNTQAGGQKLIQWMQHVDPDLSSTEVALEATGHYWLALHSFLRKHGVKVQVINPIQSDAFRNMYIRQTKNDTKDAFIIAEVLRFGRYTTTELGSDEIVALRQLSRFRFSLVDSISDLKRQVISVLDMLFPEYERLFSDLFGKTSSELLMEYTTPEEILAVDTEELAAFMAKHSRNRLGLDKAEELKSAAASSFGIDTALDAYRLQLRLLLQQIRFTEEQLESLDAEIEKRLKSMDTNLVTIPGIGPVLAAAILGEIGDISRFPTGVKLVAFAGIDPTVRSSGEFTGTHNRMSKRGSPYLRRAIWLAANVAKMHNPILRDFYEQKRAQGKHHLAATGAVARKMTYIIHAVLRDKKPYEPMA

SEQ ID NO: 17338 - protein, 374 aa, unidentified
  source 1..374: note = protein_4338d05
  REGION 36..178: note = RuvC_domain
  SITE 39: note = RuvC_P1
  SITE 82: note = RuvC_P2
  SITE 117: note = RuvC_P3
  SITE 119: note = RuvC_P4
  SITE 122: note = RuvC_P5
  REGION 241..332: note = Tnp_domain
  SITE 249: note = Tnp_P1
  SITE 279: note = Tnp_P2
  SITE 287: note = Tnp_P3
  SITE 288: note = Tnp_P4
  SITE 301: note = Tnp_P5
MYGLLPLTGDLRYKVKSIHSNQLLPGVHTMEQCNVIAIDLAKDIFQVCIMTENGKIIFNKAMSRTKLKEWLAKQKLSLVAMESCGGAHYWARFAQSLGHNVVVIPPKQVKPFRTGQKTDANDAIAIAVASRAANIKPARVLSIEQQGLQSIEKMRSMLDKQKLQLSNQVRGLLLEFGIVINKSIKSFKERVPEILEDGDNDLSFAMRRVLLQMWTLYYRLEEDFEAINNELMQLTKQDSDCQRLMKLEGVGPITAIRLKIQLGNGGHFSSGRQVASCIGLTPKQHSSGGKVKLGSVGKSSCDKPLRSCIFLGARAVVSKLKSRPAKTEKERWLKALIERRGVNCASMALANKTARTAYALLKKNTDYKPVLIAA

SEQ ID NO: 17339 - protein, 406 aa, unidentified
  source 1..406: note = protein_726c463
  REGION 6..169: note = RuvC_domain
  SITE 9: note = RuvC_P1
  SITE 63: note = RuvC_P2
  SITE 109: note = RuvC_P3
  SITE 111: note = RuvC_P4
  SITE 114: note = RuvC_P5
  REGION 281..367: note = Tnp_domain
  SITE 288: note = Tnp_P1
  SITE 318: note = Tnp_P2
  SITE 326: note = Tnp_P3
  SITE 327: note = Tnp_P4
  SITE 340: note = Tnp_P5
MNKLFVGIDVSSQNNVSYLMDSDGVKYSSFSVQNNLGGAKLLTEKIVSAMETLKLSDVVIGMESTSIYGNHLVHSLREDGTLGRYQRKIHVLNPKQVSKFKEAYPDLPKNDWVDAFVIADCLRFGRIRSEVYMDDYRHEALKTLTRARFYAVQNLAREKQRFANLLFLKCSGLAQSADIKNTSSTVLSLMEEYETVDDLANADLEDLTVFVTAAGRGRFADPENTAKTLQAAARGSYRLPKTINDSVNQAMSVSIATMRSMKEQIKVLEKAIEQQFEIIPNTLTSIPGIGKVYSAGIIAEIGDINRFQSQASVAKYAGLVWTQHQSGNFEAENTRMIKSGNRFLRYYLLEAANSVRGCDPEFQRYYDLKYHEVNKGQHKRALALTARKLVRLVFRLLKDNRLYNRW

SEQ ID NO: 17340 - protein, 400 aa, unidentified
  source 1..400: note = protein_26a6595
  REGION 4..160: note = RuvC_domain
  SITE 7: note = RuvC_P1
  SITE 57: note = RuvC_P2
  SITE 97: note = RuvC_P3
  SITE 99: note = RuvC_P4
  SITE 102: note = RuvC_P5
  REGION 275..363: note = Tnp_domain
  SITE 283: note = Tnp_P1
  SITE 313: note = Tnp_P2
  SITE 321: note = Tnp_P3
  SITE 322: note = Tnp_P4
  SITE 335: note = Tnp_P5
MISVGIDVSKEKSMVCILRPYGEVIASPYEITHTADSIIALIERIRYLGNETRVVMEATGAYHFPLLSSLKQSNIFVSVINPLVMKKYASVAIRKGKTDKLDSVRIANYGIDNWFHLKDFQVLDAAYEELKILGRQYSHYVKMKVESKIALGNIIDRTMPGIKKLLPGNSDNLTKDKLSDFIREYWHYDNITKKTEAKFVSNYCQWAKKKGYHANEAKAKAIYAMAKAGIPTLSSSAASTKMLVLESVRVLGEVNQTLQTILAQMQMIATNMDEYEVVRSMPGVGDVLAPRLIAEIGNVKRFHSGSALIAYAGLDSPPYESGNFSGSKRKISKRGSSLLRKTGYEVMKCLKTVKPSNDAAVYQYIIKKESEGKPKKVAKIAGLNKFLRIYYARVMEVYQN

SEQ ID NO: 17341 - protein, 268 aa, unidentified
  source 1..268: note = protein_c706c8c
  REGION 3..74: note = RuvC_domain
  SITE 14: note = RuvC_P3
  SITE 16: note = RuvC_P4
  SITE 19: note = RuvC_P5
  REGION 138..224: note = Tnp_domain
  SITE 146: note = Tnp_P1
  SITE 176: note = Tnp_P2
  SITE 184: note = Tnp_P3
  SITE 185: note = Tnp_P4
  SITE 197: note = Tnp_P5
MASKFVIPYRQNEKNDANDAEAICEAVSRPKTRFVSIKSEEQQAVLCLHRIRQGLIKTRTATINQLRGLLSEFGLVMPQGRYSAQQTIGSILEDAENGLPLLARELLQDLSNKIQSLNLEILHYDRRVSALVREMASAKALIDIPGVGEHSASTIVATVNDAKQFGSSRQFAAWIGLVPRQYSTGGHVHLGRISKRGEKHIRTLLIHGARAVIARCKEKTDRNSLWLQQLVERRGYKRAAVALAAKNARIIWALLTTGNEYKANYING

SEQ ID NO: 17342 - protein, 349 aa, unidentified
  source 1..349: note = protein_3f89c93
  REGION 7..150: note = RuvC_domain
  SITE 10: note = RuvC_P1
  SITE 54: note = RuvC_P2
  SITE 89: note = RuvC_P3
  SITE 91: note = RuvC_P4
  SITE 94: note = RuvC_P5
  REGION 213..306: note = Tnp_domain
  SITE 221: note = Tnp_P1
  SITE 251: note = Tnp_P2
  SITE 259: note = Tnp_P3
  SITE 260: note = Tnp_P4
  SITE 272: note = Tnp_P5
MNKHKTIGLDLAKRVFQVCVVDTRRPRVQVNKELKRHQVLDFMRRQPACRVFMEACGGSHYWARQLQALGHTVALISPQFVTPFRKGHKTDANDALAIVEAGLRPDMRFVPLKSVEQQDIQSLHRIRERYIHQRTQLINQVHGLLQEYGVISGRGQKALKQRVWLALEDADNELSMLMRDLLAEQMTELDRLNERIQSLDKRVEQMSHAVGPCRELLAIEGVGPVVATQLYSALGNGEAFKKGRQASAYLGLTPKQHSSGGTASIKGIGRTGQVSLKAALVRGAHSVINTMGDKQDAKSRWLRSLVARAGKNKAAVALANKTVRTAWAVLHSGQSYCREFNDGSALMVS

SEQ ID NO: 17343 - protein, 268 aa, unidentified
  source 1..268: note = protein_ffb7db4
  REGION 6..148: note = RuvC_domain
  SITE 9: note = RuvC_P1
  SITE 52: note = RuvC_P2
  SITE 87: note = RuvC_P3
  SITE 89: note = RuvC_P4
  SITE 92: note = RuvC_P5
  REGION 210..268: note = Tnp_domain
  SITE 218: note = Tnp_P1
  SITE 248: note = Tnp_P2
  SITE 256: note = Tnp_P3
  SITE 257: note = Tnp_P4
MEISTIGLDLAKNVFQAHGADASAAVAFRKQLRRDKVLSFFAAQPRCVVAMEACGGAHYWARAIGDLGHTVRLIPPAYVKPFVKRQKNDMADAEAICEAAQRPTMRFVAVKSEQQQASSAVFRVRDILVRQRTQLINSLRGHLAEYGLIVAQGPAHVAKLVEKVGDPESDLPEAARTVLLMLVEALRSLEEKIKQLDREIVRRTREDKDARRLTTIPGVGPITATALIALAPNAATFKKGRDFAAWLGLTPLQRSTGGKQKLRDVKNG

SEQ ID NO: 17344 - protein, 350 aa, unidentified
  source 1..350: note = protein_73cadef
  REGION 6..148: note = RuvC_domain
  SITE 9: note = RuvC_P1
  SITE 52: note = RuvC_P2
  SITE 87: note = RuvC_P3
  SITE 89: note = RuvC_P4
  SITE 92: note = RuvC_P5
  REGION 211..297: note = Tnp_domain
  SITE 219: note = Tnp_P1
  SITE 249: note = Tnp_P2
  SITE 257: note = Tnp_P3
  SITE 258: note = Tnp_P4
  SITE 270: note = Tnp_P5
MQVITIGIDLAKHVFQVHGVDANDKVVFNKPLRRSQVLPFFAKLAPCLIGMEACASAHYWARELKKLGHDVRLMPAKDVKAYVKRNKNDSVDAAACSEAVRRPTVRTVPVKTPEQQAELMQHRVRDLLVRQRTQAINALRSHLAELGIVAAQGYDGLKVLLVVIADCSDVRLPENARASLSALIAQIASCQAEIGAIEKRLLAQHRKNADSKRLETIPGIGVLGASAIVATVPDASIFKTGRDFAAWIGIVSREDSTGGKQRLGPISKQGDRYLRRILIVGAFAVIKQARAHPEKYPWLTQLLARKPAKVAAVALANKTARIAWAVLTKKEIYRVTSHHRDTCVVGRLKK

SEQ ID NO: 17345 - protein, 343 aa, unidentified
  source 1..343: note = protein_5ffc09a
  REGION 7..149: note = RuvC_domain
  SITE 10: note = RuvC_P1
  SITE 53: note = RuvC_P2
  SITE 88: note = RuvC_P3
  SITE 90: note = RuvC_P4
  SITE 93: note = RuvC_P5
  REGION 212..300: note = Tnp_domain
  SITE 220: note = Tnp_P1
  SITE 250: note = Tnp_P2
  SITE 258: note = Tnp_P3
  SITE 259: note = Tnp_P4
  SITE 271: note = Tnp_P5
MNEISIIGLDIAKNVFQVHGIDCSGEPVVRRQLKRGRVLAFFGKLPPILVGMEACATSHHWAREIEKLGHQVRMMPPRYVKPYLKRNKNDAADAEAICEAVQRPTMRFVPIKTPVQQSVLMLHRTRQLFVHQRTTLINAIRAHMAEFGIVAGVGRNGVEALLKIVAEDCDERIPPAARECLLALATQLELVKRQILEADRRVLAWHRASKVSKRLEAIPGVGPLVATALVASIPDPHAFRSGRDLSAWIGLVPKQNSTGGKERLGNISKAGNRYLRKLLVIGALSVIRRAKILGYTRHPWLVRLMERRSTMIAAIALANKIARMAWAMMARNETYRTPLAQPA

SEQ ID NO: 17346 - protein, 341 aa, unidentified
  source 1..341: note = protein_ee69c5b
  REGION 7..149: note = RuvC_domain
  SITE 10: note = RuvC_P1
  SITE 53: note = RuvC_P2
  SITE 88: note = RuvC_P3
  SITE 90: note = RuvC_P4
  SITE 93: note = RuvC_P5
  REGION 211..296: note = Tnp_domain
  SITE 219: note = Tnp_P1
  SITE 249: note = Tnp_P2
  SITE 257: note = Tnp_P3
  SITE 258: note = Tnp_P4
  SITE 270: note = Tnp_P5
MEKAIIIGVDLAKHVFQVHGAGADGSVAFRKKISRVKLLPFLSSQSRCVVAMEACAGAHGWARDIQAQGHEVRLIAPVYVKPFVKRQKNDMADAEAITEAAARPTMRFVAVKSAEKQASGMVFKTRDLLVRQRTQTINALRGHLTEHGIIAPQGIFHIGRLAAEVENVNSHLPVIVTELCTLLLRHIATLDEQIALLDRRIRDRAREDETARRLMSIPGIGPVCATALEALAPPPETFARGRDFAAWLGLTPRQNSSGGKVRLGRISRMGQRDLRRLLIIGATAVVRWAARRGAPTGSWLARMMARKPRMLVAVALANKIARIAWALMAKGGIYRSLVAAA

SEQ ID NO: 17347 - protein, 326 aa, unidentified
  source 1..326: note = protein_1477aec
  REGION 8..155: note = RuvC_domain
  SITE 11: note = RuvC_P1
  SITE 60: note = RuvC_P2
  SITE 100: note = RuvC_P3
  SITE 102: note = RuvC_P4
  SITE 105: note = RuvC_P5
  REGION 195..282: note = Tnp_domain
  SITE 203: note = Tnp_P1
  SITE 233: note = Tnp_P2
  SITE 241: note = Tnp_P3
  SITE 242: note = Tnp_P4
  SITE 255: note = Tnp_P5
MEQELHFIGIDVSKAKLDVDVLRPDGRHRSKKFANTLKGHNELLHWLNSHNVAPAHICMEATSTYMEDVAAHLSDAGFTVSIINPALGKAFAQSEGLRRKTDAVDARMLAEFCRQKRPAVWEAPHPVERALRALVLRHQSLTDMRTQELNRLETAREVQRPSIDAHLLWLHAEIKRIEKQIKDLTDDDPDMKHRRKLLESIPGIGEKTSAVLLAYVGLKDRFSQARQFAAFAGLTPRQHESGSSVRGMSRMSKSGHVSLRRALYMPAMVAISKTEWGRAFRDRLAGNGKKGKVIIGAMMRKLAHVSYGVLKSGEPFDASRHGVITA

SEQ ID NO: 17348 - protein, 300 aa, unidentified
  source 1..300: note = protein_bc7cad5
  REGION 1..72: note = RuvC_domain
  SITE 10: note = RuvC_P3
  SITE 12: note = RuvC_P4
  SITE 15: note = RuvC_P5
  REGION 176..263: note = Tnp_domain
  SITE 184: note = Tnp_P1
  SITE 214: note = Tnp_P2
  SITE 222: note = Tnp_P3
  SITE 223: note = Tnp_P4
  SITE 236: note = Tnp_P5
MRKNNVRKTKTDKVDTFVIARTLMMQDSLRFSTLEDLDYIELKELGRFRQKTIKQRTRLKIQLTSYVDQVFPELQYFFKSGLHQKAVYVLLKEAPMPKDIASMHMTHLSNLLVKNSRGHFTKQMARELRVLAQKSVGLNDSSLSIQITQTIAQIELLDSQLFETELEMANIVTCLHSVIMTIPGIGFINGGMILGKVGDIHRFSTPNKLLAFAGLDPVVYQSGNFQAKRTRMSKRGPKVLRYALMNAAHNVVKNNATFKAYYDAKRAEGRSHYNALGHCAGKLVRVIWKMLTDNVEFNLE

SEQ ID NO: 17349 - protein, 412 aa, unidentified
  source 1..412: note = protein_4348633
  REGION 5..167: note = RuvC_domain
  SITE 8: note = RuvC_P1
  SITE 64: note = RuvC_P2
  SITE 109: note = RuvC_P3
  SITE 111: note = RuvC_P4
  SITE 114: note = RuvC_P5
  REGION 285..372: note = Tnp_domain
  SITE 293: note = Tnp_P1
  SITE 323: note = Tnp_P2
  SITE 331: note = Tnp_P3
  SITE 332: note = Tnp_P4
  SITE 345: note = Tnp_P5
MKLFIGIDVSSKDLQVAFTDSEHYDKPLVNKSFSNDLIGANEVKHLIIQWATRNHYDQIILGMEATSIYSFHPAYFFANDEDLKKLNFETDVVNPRSTKRFHEAFEENKNDPIDAYYIAEYLRYGKYRVTIARQEEYLALQRLTRTRYEITQSLARAKQHFIEALYYRLNKLITVDKNKIKTPIFGATMMSIITDSKTIDEIANMSTENLIDYLQTKGRGRFSDPDSLAKAIQRAVRGSYRLGKVMKYSIDSVLSVYYTEIQNYHHLIKDLDKSITKIVAGLPEAKILQSIPGVGPVYSAGIIAEIGNISRFNDEAKLAKYAGLAWRQKESGDFNSEHTPRLRTGNAYLRYYLVEAANLIRLRDPVFAKYYRKKYDEATFSPHKRACILCARKLSRTIFTLLKNGQIYQTPR

SEQ ID NO: 17350 - protein, 396 aa, unidentified
  source 1..396: note = protein_f097097
  REGION 9..159: note = RuvC_domain
  SITE 12: note = RuvC_P1
  SITE 60: note = RuvC_P2
  SITE 100: note = RuvC_P3
  SITE 102: note = RuvC_P4
  SITE 105: note = RuvC_P5
  REGION 266..351: note = Tnp_domain
  SITE 274: note = Tnp_P1
  SITE 304: note = Tnp_P2
  SITE 312: note = Tnp_P3
  SITE 313: note = Tnp_P4
  SITE 325: note = Tnp_P5
MSSSFSVFLGLDVGKDAHHAVGLDPDGKRLHDAPLPNTEPKLRALFDKLARHGTLLVVVDQPATIGALPVAVARAAGHQVAYLPGLAMRRIADLYPGRAKTDARDAFVIADAARSLPHTLRPVDVGDEALAELEVLVGFDDDLAGGATRIRGLLTGIHPTLEHAIGPKISHPAVLEILSRCGGPTGIAKAGRRKLTAIAKVHAPRMGDKLVEAIMTALGEQTVTVPGTAAADTVLPRLADSLKTVLQQRKQVAAQVEGIFDAHPLAGVLTSMPGIGVRTAARILLEIGDASNFASSGHLAAYAGIAPVTRSSGTSIKGEHPARTGNRKLKRAFFLAAFAALSDPTSRTYYDRKRAEGKKHNAALICLARRRCDVLYAMLRNGTHYRPEAAPAPAAA

SEQ ID NO: 17351 - protein, 344 aa, unidentified
  source 1..344: note = protein_19a3446
  REGION 19..167: note = RuvC_domain
  SITE 22: note = RuvC_P1
  SITE 69: note = RuvC_P2
  SITE 109: note = RuvC_P3
  SITE 111: note = RuvC_P4
  SITE 114: note = RuvC_P5
  REGION 214..297: note = Tnp_domain
  SITE 218: note = Tnp_P1
  SITE 248: note = Tnp_P2
  SITE 256: note = Tnp_P3
  SITE 257: note = Tnp_P4
  SITE 270: note = Tnp_P5
MTNSQLIEMTSEPTTKLFAGIDVGADELVLVIRKNGKPLDPQKYGNTRAEHARMAKKLGKMAGIKMCMEATGVYHFDLAVALHDAGIKVMVINPKVSHNFAKVLMKNSKTDEVDAAILAMYAERMGFVPGTRPSNDKIALRCFSRRINALTGQKAAAKNHLHALVATGETPKAVLRDAKLAISQLEKRIDALAAHALALISKHPELARVLVLPVGIKGIANTSAIALMGELLLLPPGLSHRQWVKFAGLDSKAFESGKSVHKKARLSKAGNRYLRSALYMPALSAKQHDTHINAYFQHLLEGGKTPLQAVCAVMRKLLHAIHGMLKHDKPFDNTRFYAITAIAE

SEQ ID NO: 17352 - protein, 352 aa, unidentified
  source 1..352: note = protein_c748767
  REGION 11..158: note = RuvC_domain
  SITE 14: note = RuvC_P1
  SITE 63: note = RuvC_P2
  SITE 99: note = RuvC_P3
  SITE 101: note = RuvC_P4
  SITE 104: note = RuvC_P5
  REGION 228..314: note = Tnp_domain
  SITE 236: note = Tnp_P1
  SITE 267: note = Tnp_P2
  SITE 275: note = Tnp_P3
  SITE 276: note = Tnp_P4
  SITE 287: note = Tnp_P5
MSNTKSRAVIVGVDTHKSTHVAVAIDIHGARLATLSIPANPKGYLELEAWSQSQGDVAAFGIKGTGSYGAGLCRSLLNQGHNVFEVTRPNRQLRYAKGKSDSVDAEGAARSVLSGQATARPKTGTGSSEMIRHLKIARDTAVKSRSQAMVTLKTLIINAPAGLRDLLDRIKGKVTLIRHIAAFRPGEITSTTASAKAAMRALARRWLALHEEIQIHDTELERLAAKRAPNLLASHGIATMTVAEMLILVGDDPTRIRSEAALAKLCGVCPIPASSGKTNRFRLNRGGNSQANAALFRVAIVRMSGHEPTLAYVKKRTREGKSKREIIRCLKRYIVQEIFNHLCCPKVDKIAG

SEQ ID NO: 17353 - protein, 366 aa, unidentified
  source 1..366: note = protein_4c6a85c
  REGION 6..152: note = RuvC_domain
  SITE 9: note = RuvC_P1
  SITE 53: note = RuvC_P2
  SITE 91: note = RuvC_P3
  SITE 93: note = RuvC_P4
  SITE 96: note = RuvC_P5
  REGION 211..293: note = Tnp_domain
  SITE 219: note = Tnp_P1
  SITE 249: note = Tnp_P2
  SITE 257: note = Tnp_P3
  SITE 258: note = Tnp_P4
  SITE 270: note = Tnp_P5
MPVVTVGIDLAKSVFAVHGVDEGGKAVLIKPRVSRDQLLALIAQLPPCLIGMEACSGAHHWARMFQQYGHTAKLMAPKLVAPYRMSGKRGKNDAADAAAICEAVTRPSMRFVPLKDEHQQATLCLHRTRQGFVEERTATYNRARGLLSEFGVVLPQSPERLRREIPAHLDALPGWARRCISDLLEHAGEIEARLAEYDRAISEIARDDERSRRLMHLRGIGPTTASALLASLGAGHDFRNGRQVAAWIGLTPSQYSSGGKDRLGAITKTGDAYLRCVPTQSADTRSSLGDGESGRQAGPFQPLGEKSRRASRLLANSRRNCRKERAHGLGDAQIRRSLQTRTGGCMTRPLCPNDEEANRIAATMSG

SEQ ID NO: 17354 - protein, 343 aa, unidentified
  source 1..343: note = protein_cfc2006
  REGION 7..149: note = RuvC_domain
  SITE 10: note = RuvC_P1
  SITE 53: note = RuvC_P2
  SITE 88: note = RuvC_P3
  SITE 90: note = RuvC_P4
  SITE 93: note = RuvC_P5
  REGION 211..295: note = Tnp_domain
  SITE 219: note = Tnp_P1
  SITE 249: note = Tnp_P2
  SITE 257: note = Tnp_P3
  SITE 258: note = Tnp_P4
  SITE 270: note = Tnp_P5
MTKDMMIGVDLAKNVFQLHAATMTGEVLFRKKLSRHGFYKFMANYPPAVVVMEACGSAHYWAREMIRLGHEVKLIAPQYVKPFVKRQKNDAADAEAIVIAAQRPEMRFVEPKSAEQQGRAILFRARERLVHQRTELVNALRACLYEYGYVVPQGVRQIIRIEAILDEPHSNLPDLMREECRDLLDQIAALTTRIAARTAKIKMLSAERGVARRLQTMPGVGPLTALAIEAFAPPMENFRCGRDFAAWLGLVPRQFSSGGKERLGRISKAGQADIRRLLIIGAMSRLNWLGRKSIPEGSWLARMVARKPRMLVAIALANKMARTIWAMLTKNEDYREPTQAVTA

SEQ ID NO: 17355 - protein, 377 aa, unidentified
  source 1..377: note = protein_a2ba378
  REGION 5..163: note = RuvC_domain
  SITE 8: note = RuvC_P1
  SITE 62: note = RuvC_P2
  SITE 102: note = RuvC_P3
  SITE 104: note = RuvC_P4
  SITE 107: note = RuvC_P5
  REGION 273..362: note = Tnp_domain
  SITE 281: note = Tnp_P1
  SITE 311: note = Tnp_P2
  SITE 319: note = Tnp_P3
  SITE 320: note = Tnp_P4
  SITE 333: note = Tnp_P5
MDPVIGLDVAKGESQVQAFLARKQPFGKTFKFKHDTNGMSDFFIFYKEVEFQAESKPVVVFESTGHYHEPILQYLEERKITYYLVNPVVSYETKKISLRKVKSDPADAKHLCEMYYKEDLVAYHRKCVQTMNLRNLCRQHDSLTRNYVQLKLQFQTILDQVFPEYKGVYSNLYAPLSLKTLLLYPTSHEVLKVPTDELAKEMHGLGGKRSYDWFYEKALKLKEAAERNPFKKTLYQSHLVTLKMYIQMILQQREFLNVLEQEIETLAKQFEVYEILTSIPGVGTKIAATLISEIGDVTQFSHPKKLVAYAGLDPRVYQSGKFTATINWITKRGSTKLRQTIYSAVQCGLTNNRNVKIREYYDKKRSEGKPHKVAIIA

SEQ ID NO: 17356 - protein, 318 aa, unidentified
  source 1..318: note = protein_d64493f
  REGION 13..155: note = RuvC_domain
  SITE 16: note = RuvC_P1
  SITE 60: note = RuvC_P2
  SITE 100: note = RuvC_P3
  SITE 102: note = RuvC_P4
  SITE 105: note = RuvC_P5
  REGION 195..279: note = Tnp_domain
  SITE 203: note = Tnp_P1
  SITE 232: note = Tnp_P2
  SITE 240: note = Tnp_P3
  SITE 241: note = Tnp_P4
  SITE 252: note = Tnp_P5
MGTVMNHSHSVYIGIDVSGTALDVAIHDTTEHFRVDNEPRAIEQLVQRLIALNPTLIVLEATGKLELALLRALCEAGLPAVAVNPRQVRDFARATGTRAKTDRIDAFAIAHFAAVLKPDVRPLNDLQTEQLQALLLRRAQLIEMLVAEKARLERAHAAARDSLNEHIKWLKLQIKIADNDIDSFLRSSPAWRQKEDLLRSVPGIGPGAAATLIAFMPQLGSLNRREIAALTGVAPFNSDSGKHIGKRRIRGGRAVVRRALYMACVPALRFNPTIRAFYDRLRKAGKPFKVAITACIRKLVVTLNAMVRNATHWSPPLN

SEQ ID NO: 17357 - protein, 355 aa, unidentified
  source 1..355: note = protein_29e75b3
  REGION 23..165: note = RuvC_domain
  SITE 26: note = RuvC_P1
  SITE 69: note = RuvC_P2
  SITE 104: note = RuvC_P3
  SITE 106: note = RuvC_P4
  SITE 109: note = RuvC_P5
  REGION 228..317: note = Tnp_domain
  SITE 236: note = Tnp_P1
  SITE 266: note = Tnp_P2
  SITE 274: note = Tnp_P3
  SITE 275: note = Tnp_P4
  SITE 287: note = Tnp_P5
MGHDVVAKTHQKEDGSTMKITTIGLDIAKSVFHFVGVNKAGKLVKKKMLKRREVLQFVAKIEPCLIVMEACGGANYWAREFECLGHQVKLIAPQYAVPYRQGNKNDYNDALAIAEAAQRPNMRFVQPKPVEQQDVQMLHRMRERLNKQSIALINQVRGMLAEYGIVIAKSKAAFRMAFPDILSDESSELTVKGRFIFTQLHDEFSDIEKRLKSCDTQIIEEIKTNQVCQRLETIPGIGPVTSTAFYAAAGEGKDFTNGRHFSAWCGLVPKQHSSGGKDNLLGISKRGNAYLRTLFIHGARAVLQHSGGKEDRLSRWAYALAERKGFNKACVAVANKLARMTWAIAAREDEYRTFA

SEQ ID NO: 17358 - protein, 317 aa, unidentified
  source 1..317: note = protein_e8e6de8
  REGION 8..151: note = RuvC_domain
  SITE 11: note = RuvC_P1
  SITE 56: note = RuvC_P2
  SITE 96: note = RuvC_P3
  SITE 98: note = RuvC_P4
  SITE 101: note = RuvC_P5
  REGION 195..279: note = Tnp_domain
  SITE 203: note = Tnp_P1
  SITE 232: note = Tnp_P2
  SITE 240: note = Tnp_P3
  SITE 241: note = Tnp_P4
  SITE 252: note = Tnp_P5
MTYTNRFVGIDISKSSFDICVLPDKHSASFSNDAGGITRFIAFVARLDGVERLVLEPTGGYERDVVNALLAAHLPVAKVNAKQIRQFARACGQLSKTDGIDAFVLADYARRMETKVLAPSSPAQARLIDLVSRYRQLSHMIVQEKNRREKLGAQTDARAKAWIEETLAFLMQQRQSVVDAMEACLKSDKDLAGKARVLMSFKGIGLRTACFLIAGLPELGLMNKGQIAKLVGVAPINRDSGLMRGKRMIAGGRKPVRDALYIAALPAIRFDPRMKAVFEALKAKGKPGKVALIAVMRRIIIILNARMRHHNATMLDA

SEQ ID NO: 17359 - protein, 286 aa, unidentified
  source 1..286: note = protein_8480030
  REGION 8..153: note = RuvC_domain
  SITE 11: note = RuvC_P1
  SITE 52: note = RuvC_P2
  SITE 92: note = RuvC_P3
  SITE 94: note = RuvC_P4
  SITE 97: note = RuvC_P5
  REGION 191..277: note = Tnp_domain
  SITE 199: note = Tnp_P1
  SITE 229: note = Tnp_P2
  SITE 237: note = Tnp_P3
  SITE 238: note = Tnp_P4
  SITE 251: note = Tnp_P5
MNKDIEYYGIDISHLVFDVTDHIGDHYQFKNSTSGFRKFVKLLGENSHCVMEATGYYHYQLAYYLLESGIRVSVENPLSVKRFIQMRLSKIKTDKSDSRLIVEYAKQVDLKLWRGNSKHQLECLQMTRLLTIYTKQSTMLKNKIHGELVLGNPSKAVVSSLKRSLKQIQKEMFSLEEKLLKLVTEVHQEVLTRLKSIPGIGKKTALMLVVLTDGFDRFTSASELCSYAGLTPVIRQSGSSVNGRSRISKIGNQKLRNLLFMCSFNACKPACHQAGTTRLVERFTSE

SEQ ID NO: 17360 - protein, 436 aa, unidentified
  source 1..436: note = protein_4abd5d0
  REGION 34..198: note = RuvC_domain
  SITE 37: note = RuvC_P1
  SITE 91: note = RuvC_P2
  SITE 137: note = RuvC_P3
  SITE 139: note = RuvC_P4
  SITE 142: note = RuvC_P5
  REGION 310..396: note = Tnp_domain
  SITE 317: note = Tnp_P1
  SITE 347: note = Tnp_P2
  SITE 355: note = Tnp_P3
  SITE 356: note = Tnp_P4
  SITE 369: note = Tnp_P5
MRGCRCSMIMGFTKPIEHFNPQRKKVITMNTLYVGIDVSSKSNVVYLMLPNGDKHSNFSVANSHEGSTQLVKRILSALTSHSLDTVLIGLEATSVYGDNLVYFLREDASLASFNRKIHVLNPKQVKKFHDTYNDLPKNDYVDSFVIADCLRFGRINKEVYLGDYRYKALQNLTRARFFAVQNLVKEKQRFMNVLFKKYSTMTQEKVFSDTFSTTALAVYDEFESAEALANMDLHELTDFIIEKGKNRFPDPDAVAKAIQKAACSSYRLPKTVNDSVNQVLSISITSMKALESQIKEFDKAIKSQMELLPNVLISISGIGPVYSAGIMAEIGDINRFNSQAALAKYAGLAWKQHQSGGFESEVTRLIPSGNRFLKYYLCEAAFSLVRCDKEYSDFYHLKYKEVNRCQHKRALALTARKFVRLVFRLLKDNRLYCPAK

SEQ ID NO: 17361 - protein, 346 aa, unidentified
  source 1..346: note = protein_79ad03d
  REGION 6..159: note = RuvC_domain
  SITE 9: note = RuvC_P1
  SITE 57: note = RuvC_P2
  SITE 98: note = RuvC_P3
  SITE 100: note = RuvC_P4
  SITE 103: note = RuvC_P5
  REGION 221..306: note = Tnp_domain
  SITE 229: note = Tnp_P1
  SITE 259: note = Tnp_P2
  SITE 267: note = Tnp_P3
  SITE 268: note = Tnp_P4
  SITE 279: note = Tnp_P5
MRLITIGIDPHKSSHTAVAIDAAGHEIGQRRLRVNGGTFEALLRWCEQWPTRRFAVEEAGGLGRTLAQQLAAAGEDVVDVPSTLSARARFLATGGDRKTDPADALHVAQVALFRTDLHTVTAEDQTTILRLLTERHDDLVNERTRVINRLHALLRDLLPGGAPTWLSADKAATLMKRLRPITATECCRRDLARDLLADLRRLDQRIKSNEAQMRDALAATHTTLTSLPGLGTVLAAKILGHVGDVTRFPTEHHSASYTGSAPLDASSGKNTRHRLNTDGNRALNSTLHIIAVCQIRDSGRGQDYYQRKLAEGKTSAEARRALKRRLSNVVYRTLQRDRRRQHSAAA

SEQ ID NO: 17362 - protein, 407 aa, unidentified
  source 1..407: note = protein_aa333bc
  REGION 4..160: note = RuvC_domain
  SITE 7: note = RuvC_P1
  SITE 57: note = RuvC_P2
  SITE 97: note = RuvC_P3
  SITE 99: note = RuvC_P4
  SITE 102: note = RuvC_P5
  REGION 269..355: note = Tnp_domain
  SITE 277: note = Tnp_P1
  SITE 308: note = Tnp_P2
  SITE 316: note = Tnp_P3
  SITE 317: note = Tnp_P4
MIFVGVDWAEAHHDVHVQDEDGKRLGGGRLPEGVEGIARFHELVGAHVEDPGEVIIGIETDRGLFVAALVAAGYEVFAVNPMSTSRYRDRHSTSGAKSDPGDAKVLADMVRTDRHNHRPVAGDTEGVEAVKVLARAHQSMVWSKGRQTNMLRSTLREFYPAALVVFDDLASGDALEVLKVAPTPTLGAGLSRSKIAAALRRGGRQRRVDERAGEIQAALRSPQLQASAVVATAMGSSVSASVAVIATMVAQIAELAGELESDFDQHPDAEVVRSLPGLGTILGARVLGEFGDDPNRYATAKCRKNYAGTSPITRASGTKRVVLARFARNQRLADAIYLWAFAALNASPGARVFYDSHRAAGDTHHAALRSLGNRLVGILHGCLTHHSAYDETIAWGHRSENNLTEAA

SEQ ID NO: 17363 - protein, 412 aa, unidentified
  source 1..412: note = protein_8e591c0
  REGION 4..170: note = RuvC_domain
  SITE 7: note = RuvC_P1
  SITE 67: note = RuvC_P2
  SITE 107: note = RuvC_P3
  SITE 109: note = RuvC_P4
  SITE 112: note = RuvC_P5
  REGION 278..364: note = Tnp_domain
  SITE 286: note = Tnp_P1
  SITE 317: note = Tnp_P2
  SITE 325: note = Tnp_P3
  SITE 326: note = Tnp_P4
MLFVGDDWAEDHHDVEVVDDQGKVLVRRRLPEGLTGVTRFHEIVAEHAPAEWAGLDPGEAAAQVVVGIETDRGPWVGALVAAGYTVYGLNPLSVARYRERHSTSGAKSDAADAHLLAEIVRLDRAHHRPVAGDSPTGEAIKVTARAHQSLIWDRTRQMLRLRSALRDFFPAALAAFEQLDAPETLELLAQAPDPDTALRLSKAKIVRALTTAHRRDVSARAEAIRQVLTSPVLRQPGPVQHAYAAIVTCEVALITVLNTQIERLGQVVAEHFGRHRDADIYTSLPGLGVVLGARILGEFGDDPYRYADAKSRKAYAGTAPITRASGTRRVVLARYARNRRLGDALQQWAFCSMRGSPGARTYYQSMRSRGTGHQATLRQLAKRWVGILHGCLRHGTLYDENTAWEHHLKTAA

SEQ ID NO: 17364 - protein, 343 aa, unidentified
  source 1..343: note = protein_db501d9
  REGION 6..149: note = RuvC_domain
  SITE 9: note = RuvC_P1
  SITE 54: note = RuvC_P2
  SITE 89: note = RuvC_P3
  SITE 91: note = RuvC_P4
  SITE 94: note = RuvC_P5
  REGION 213..300: note = Tnp_domain
  SITE 221: note = Tnp_P1
  SITE 251: note = Tnp_P2
  SITE 259: note = Tnp_P3
  SITE 260: note = Tnp_P4
  SITE 272: note = Tnp_P5
MELSRVGVDLAKNVYQLHGEDRHGQAVWKRRLRRGQWLQALLDNTEPGCKIGMEACTGAHHWARELQSRVYTVRLIAPQFVKPYVKSNKNDANDAEAICEAMSRPHMRFVTVKSVEQQDIQATHRVRTELKDHRNAKANQIRGLVAEYGLVAPQTLLALRRAIPEWLEDAENGLTDSFRCLLHGLWDDLLNLDDRLKELDKEIETLARSNEVTQRLQQLRGFGPLVATTVDATVGTGEQFSKGRQMAAALGLTPRQNSSGDKHRLFDISKRGDAYLRTLLIHGARAVVSQAKHRDDPLSRWATDIAKRRHPNVAAVALANKTARMAWAMLQNDTDYDPGLAVG

SEQ ID NO: 17365 - protein, 411 aa, unidentified
  source 1..411: note = protein_65b1d60
  REGION 4..163: note = RuvC_domain
  SITE 7: note = RuvC_P1
  SITE 60: note = RuvC_P2
  SITE 100: note = RuvC_P3
  SITE 102: note = RuvC_P4
  SITE 105: note = RuvC_P5
  REGION 273..359: note = Tnp_domain
  SITE 281: note = Tnp_P1
  SITE 312: note = Tnp_P2
  SITE 320: note = Tnp_P3
  SITE 321: note = Tnp_P4
MLFIGDDWAEDHHDIALVDEEGRLLVQRRLPEGIQGIEDLHELVADPLDEQDGPDQVMVGIETDQGPWVAALLAAGYTVFAVNPLQAARYRDRLGTSGAKSDKGDALVLAELVRTDRRHHRPITADSDTAEEVKVLARSHQSLIWARQRQVNVLRSNLREYYPAALAAFGNSLADRDAVAVLAAAPGPEAARKLTPARVQTLLRKAGRRRYLESRTEEIITALRSGQLGARAGIEAAYTATTKALIAVIAELNIQIQALQGQVEECFGRHPDAEIYLSQPGLGAVLGARVLAEFGDDPHRYADARARKNYSGMSPITRASGKKRVVLARYARNRRLSDALYGQAFAALNASPGARAYYAARRSRGATHHQALRALGNRLVGILHGCLRHHTLYDENTAWPAAQKEDIPAAA

SEQ ID NO: 17366 - protein, 315 aa, unidentified
  source 1..315: note = protein_ab5a351
  REGION 1..70: note = RuvC_domain
  SITE 7: note = RuvC_P3
  SITE 9: note = RuvC_P4
  SITE 12: note = RuvC_P5
  REGION 181..267: note = Tnp_domain
  SITE 189: note = Tnp_P1
  SITE 220: note = Tnp_P2
  SITE 228: note = Tnp_P3
  SITE 229: note = Tnp_P4
MSGGGTKSDKADAKTLADLVRTDRHNHRLVAADTVAADAITVMARTHQNLVWARSAQQNVLRAQLGAYYPAAVDAFGGDLAHKDCLAVLRRAPTPRQGAALSVAAIRSALKKGGRQRNIDTRARDIQHALRGGGHLGAPEALTAAYAATVTATVEMLAALNTQIIQLETTMAQSFRAHPDAEIYLSMPGVGDITGARMLGEFGDDPERYATAKSRRNYAGTSPRTIASGKGHVVLARHIRNTRLNDAALRMAQSALTGSPGARAYYDTLRDQRKSHSQALRAVANRLVGILHGCLAHRTHYNEHTAWNHRTNLAA

SEQ ID NO: 17367 - protein, 280 aa, unidentified
  source 1..280: note = protein_adb92c7
  REGION 10..100: note = RuvC_domain
  SITE 13: note = RuvC_P1
  SITE 57: note = RuvC_P2
  REGION 157..241: note = Tnp_domain
  SITE 165: note = Tnp_P1
  SITE 194: note = Tnp_P2
  SITE 202: note = Tnp_P3
  SITE 203: note = Tnp_P4
  SITE 214: note = Tnp_P5
MDEPRLACCVGIDVSKDRLDVHLRPSDEAFAVARDGKGLGNLVERLKALNVSLIVLEATGGFETTVAAAIAGAGLPLAVVNPRQIRDFARALGKLVARRRQIVEMIGMEQNRRRRTTDKRLAKRIDRHLAFLEKELAEVDGDIDAGVRASPAWRETEQLLTSVPGVGPVTARTLIAELPELGCLDRRKLAALVGVAPFNRDSGTWRGHRVIAGGRTSVRSALYMAALVAIRHNPPIKAVYQRLVARGRPKKVAIIACLRQVLTILNAIVRDATPRIAQNA

SEQ ID NO: 17368 - protein, 335 aa, unidentified
  source 1..335: note = protein_3fd5a92
  REGION 11..140: note = RuvC_domain
  SITE 43: note = RuvC_P2
  SITE 80: note = RuvC_P3
  SITE 82: note = RuvC_P4
  SITE 85: note = RuvC_P5
  REGION 200..283: note = Tnp_domain
  SITE 208: note = Tnp_P1
  SITE 238: note = Tnp_P2
  SITE 246: note = Tnp_P3
  SITE 247: note = Tnp_P4
  SITE 259: note = Tnp_P5
MLEHLCCGRDRQDRSRGQVASEPEALIAWFGSLGFELVRIGLEAGPLSQWLYAGMEQAGLAVELLETRHVRDAFKAMPVKSDRNDARGIAQLMRLGWFRPVHCKSIGAQETRAVLTARKLLQSKLLDIENSLRGILRGFGLKIGKTTGRSFAGRVQELVADHPNLEAIGQSLLSVRAVLLREFNTFEKRVRSMARADSKAKLLMSTPAVGPIVGLTYASAMDDPGRFKSSKQAGAHFGLTPKKYQSGQTDRSGRISKIGDAAVREALYQAAHVVLTKPVKGCAGLKSWAMRIARRAGMRKAKVALARKLAVILHRMLADGAPFNPSKATALAATA

SEQ ID NO: 17369 - protein, 314 aa, unidentified
  source 1..314: note = protein_784c8b0
  REGION 11..155: note = RuvC_domain
  SITE 14: note = RuvC_P1
  SITE 58: note = RuvC_P2
  SITE 98: note = RuvC_P3
  SITE 100: note = RuvC_P4
  SITE 103: note = RuvC_P5
  REGION 194..278: note = Tnp_domain
  SITE 202: note = Tnp_P1
  SITE 231: note = Tnp_P2
  SITE 239: note = Tnp_P3
  SITE 240: note = Tnp_P4
  SITE 251: note = Tnp_P5
MEQPPAPPSFVAIDVSKDRLDVHVLPSGDAFAVARNGKGLDKLLTALRCRSVGLIVIEATGGYELTVSAAIAAADLPLAVVNPRQIRDFARATGRLAKTDALDAEVIALFAERIRPEARHLPGPDAQALADLVARRRQLVEMIGMEGNRLRQAHTPLIQKSLRATLKMLEAQLAALDHDIDNTVRASPIWRAADDLLLSVPSVGSVTARTLIADLPELGRLDRRSIASLVGVAPVNRDSGTWRGHRAIAGGRPTVRRTLFMAALVGVRWNPVLKDQYQRLARGRPKKVALVACMRRLLTILNAIIRSATPWQNA

SEQ ID NO: 17370 - protein, 344 aa, unidentified
  source 1..344: note = protein_3dd808c
  REGION 5..152: note = RuvC_domain
  SITE 8: note = RuvC_P1
  SITE 55: note = RuvC_P2
  SITE 92: note = RuvC_P3
  SITE 94: note = RuvC_P4
  SITE 97: note = RuvC_P5
  REGION 212..298: note = Tnp_domain
  SITE 220: note = Tnp_P1
  SITE 250: note = Tnp_P2
  SITE 258: note = Tnp_P3
  SITE 259: note = Tnp_P4
  SITE 271: note = Tnp_P5
MEHYAGIDVSLESSSVCVVDAAGRVVREAKVASEPEALIGWFQRLAIEMARIGLEAGPLSQWLYAGMRDAGFAVELLETRHVRDAFKAMPVKTDRKDARGIAQLMRLGWFRPVHCKSLPAQETRAVLTPRKLVQSKHHDTEMSLRGILRGFGLKVGKTSQRTFASRVRELVAGHPTLLLVAEALLAARAALGEQLSKLEKRVRSLARGDQRVRRLMSAPGVGAIVGLTFVAAIDDPARFRTSKAVGAHFGLTPKKYQSGETDITGRISKVGDAGVRTMLYEAANVILTKPVKGSSLKSWAMRLAMRAGMRRAKVALARKLAVVLHRMLVDGTDFLAAKAATAAE

SEQ ID NO: 17371 - protein, 362 aa, unidentified
  source 1..362: note = protein_ef7c37c
  REGION 31..173: note = RuvC_domain
  SITE 34: note = RuvC_P1
  SITE 77: note = RuvC_P2
  SITE 112: note = RuvC_P3
  SITE 114: note = RuvC_P4
  SITE 117: note = RuvC_P5
  REGION 236..322: note = Tnp_domain
  SITE 244: note = Tnp_P1
  SITE 274: note = Tnp_P2
  SITE 282: note = Tnp_P3
  SITE 283: note = Tnp_P4
  SITE 295: note = Tnp_P5
MVSSQIRHPSAMIEFELTIKPEKTKMKITTIGLDIAKRVFHVVCCNKEGRLLKKKMLKRAEVLAFFHSHPECLVAIESCATSSYWAREIQRCGHEVKLIPPQHVKAFLVGNKNDYNDALAIAIAARQPHIRAVGIKSVEQQDNQAQHKARALAVGQRTALCNQIRGLVAEYGICVPQGVHTLRKHISIWLEDGNQQLSIQFKALLLQLNKQLHTLDSSIEVYDKAIMQYAKNNAICQRLLSVPGIGPMISSAYFNEVGNGRAYRKGRDVSASLGLVPKQHSSGGKDVLLGISKKGNRYLRCLLVQGAKAVVSRAKSKDDKLSLWINHLVFTGGHNRACVAYANKMARMAWAITVSGEEYSPV

SEQ ID NO: 17372 - protein, 391 aa, unidentified
  source 1..391: note = protein_d7143e7
  REGION 4..163: note = RuvC_domain
  SITE 7: note = RuvC_P1
  SITE 60: note = RuvC_P2
  SITE 101: note = RuvC_P3
  SITE 103: note = RuvC_P4
  SITE 106: note = RuvC_P5
  REGION 266..353: note = Tnp_domain
  SITE 274: note = Tnp_P1
  SITE 304: note = Tnp_P2
  SITE 312: note = Tnp_P3
  SITE 313: note = Tnp_P4
  SITE 326: note = Tnp_P5
MICVGIDVAKDKHDCFIISSEGEVLGDVFTIENNTEGFQYLLQKIRSNTSAQDKMKVGLEATGHYSYNILGFLLDKGLPTYVLNPLHTNLYRKSLTLRKTKTDRVDARTIAAMLMSDVSLKPYTDTAYHNEELKSLTRYRFDKVNERAKLKQSVSRLVCILFPELEKLVPSLHMVSIYALLDEFPGARQVAGAHLTRLKSVLSDASKGRYGRDKALEIREAAKQSIGSVMPAKSLELRHTIRLIRELDAEIKEIEVTIEGIMDEIQSPITTIPGIGTRMGAMILAEVGDFARFDSPDKVLAYAGLSPSTYQSGQLTSSYARMEKRGSRYLRYAFYNATKYVCHWDPGFAAYLAKKRAEGKHYNVAISHAAKKLVRLIFAMEKTGEAYRLAA

SEQ ID NO: 17373 - protein, 403 aa, unidentified
  source 1..403: note = protein_dc9eee4
  REGION 12..166: note = RuvC_domain
  SITE 15: note = RuvC_P1
  SITE 64: note = RuvC_P2
  SITE 104: note = RuvC_P3
  SITE 106: note = RuvC_P4
  SITE 109: note = RuvC_P5
  REGION 272..358: note = Tnp_domain
  SITE 280: note = Tnp_P1
  SITE 310: note = Tnp_P2
  SITE 318: note = Tnp_P3
  SITE 319: note = Tnp_P4
  SITE 331: note = Tnp_P5
MGVVPVWNGAWVGVDIGKRHHWACALDADGTTLLSVKIANDEAEILALIATVRELAAQAVWAVDIIGAPSALMLALLAQTGQSVRYVSGRVVAAMSSAYTGEGKTDAKDAFVIAETARIRRDLAVIDGDTDLVRELAVLTGHRNDLIADRVRMLNRLRDLMTSVFPSLEREFDYASCKGALVLLTGYSSPTRIRRLGQTRLTGWLRQRKVRNAADVAARAVTAARAQVTVLPGQDIAASIIAELATNVLALDERLKSLDAQIAGTFERHPQAAIIQSMPGFGPLLGASLLVGAGALHAFPSAGHLAAAAGLVPVPNDSGRRAGNLHRPKRYSRPLRHVLYLSAQTSMMRAGPNRDYYLKKREHGRTHSQAVIALARRRVDVLWALLRDSRTWTPAPPALAQAA

SEQ ID NO: 17374 - protein, 325 aa, unidentified
  source 1..325: note = protein_a65131c
  REGION 6..147: note = RuvC_domain
  SITE 9: note = RuvC_P1
  SITE 52: note = RuvC_P2
  SITE 87: note = RuvC_P3
  SITE 89: note = RuvC_P4
  SITE 92: note = RuvC_P5
  REGION 210..298: note = Tnp_domain
  SITE 218: note = Tnp_P1
  SITE 248: note = Tnp_P2
  SITE 256: note = Tnp_P3
  SITE 257: note = Tnp_P4
  SITE 269: note = Tnp_P5
MKYTPVGVDIAKHVIQIHFINEHTGEVVDKQLRRQDFLTFFGNREPCLIGMEACGGSQHWARELTKLGHKVRLLQARFVKAFVMGNKNDVMDARAIWMAVQQPGKEIAVKTEEQQSVLVLHRTRMQLVKFRTAQINALHGTLLEFGETIHKGRAAMEREFPEALERMKERLPPYLIMVLENQYNRLNELDSLIEDIEKQLTSVARQNETCKRLLDIPGVGPLIATAAVATMGEASAFKSGREFAAYVGLVPKQTGSGGKVRLLGISKRGDTYLRTLFIHGARAVALVAKEPGPWITELKKTSSSQCGNRRHGKQAGTNSMGDNRP

SEQ ID NO: 17375 - protein, 341 aa, unidentified
  source 1..341: note = protein_7f8719c
  REGION 6..147: note = RuvC_domain
  SITE 9: note = RuvC_P1
  SITE 52: note = RuvC_P2
  SITE 87: note = RuvC_P3
  SITE 89: note = RuvC_P4
  SITE 92: note = RuvC_P5
  REGION 211..299: note = Tnp_domain
  SITE 219: note = Tnp_P1
  SITE 249: note = Tnp_P2
  SITE 257: note = Tnp_P3
  SITE 258: note = Tnp_P4
  SITE 270: note = Tnp_P5
MNVTTIGIDLAKNVFSIHGVNHHGKVVVRKRLTRAKLLPFIAQLPPCLIGMEACSGAHHWAREMTTLGHQVRIIAPRFVAPYRKSSKNDDNDAEAICEAVGRPNMRFVPIKTAEQQAVLCLHRIRRGLIKERTAQINQIRGLLAEFGLIMPQGRYAARHHIPEILEDGENGLPMLTRRLLHDINARIRQLDNEILTYDREIEAMARRDDQAKRLMAVPGIGPQTATAILASAPDPTQFKSGRHFAAWLGLVPRQYSTGGKVRLGRITKRGDKYLRTLLIHGTRAVIAGLADKNDALSNWARDLVERRGYKRAAVALAAKNARIIWALLMHQTDFRNQPVEV

SEQ ID NO: 17376 - protein, 347 aa, unidentified
  source 1..347: note = protein_62d4ab0
  REGION 5..152: note = RuvC_domain
  SITE 8: note = RuvC_P1
  SITE 55: note = RuvC_P2
  SITE 92: note = RuvC_P3
  SITE 94: note = RuvC_P4
  SITE 97: note = RuvC_P5
  REGION 212..311: note = Tnp_domain
  SITE 220: note = Tnp_P1
  SITE 250: note = Tnp_P2
  SITE 258: note = Tnp_P3
  SITE 259: note = Tnp_P4
  SITE 271: note = Tnp_P5
MNHYAGIDVSLEFSSVCVVDGSGKIVREGKVASEPEALIAWFGSLGLSLDRIGLEAGPLSQWLYAKLKQAGFAVELLETRHVRDAFKAMPVKSDRNDARGIAQLLRLGWFRPVHCKSMEAQEVRAVLTARKLVQRKLRDVENNLRGILRGFGLKVGKTTAITFAQRIKELVVGQTSLERITDALLAVRAVLRRELSAFDRQVRSMARADTKARLLMSTPAVGPIVALTYGSAIDDPARFTSSKQAGPHFGLTPKKYQSGETDWSGRISKIGDATVREALYESAHLILTRPIKGCPELKSWAMRIAKRAGMAKAKVALARKLAVILHRMLADNMPFNPNAKAAKLATI

SEQ ID NO: 17377 - protein, 344 aa, unidentified
  source 1..344: note = protein_ebaf98b
  REGION 6..146: note = RuvC_domain
  SITE 9: note = RuvC_P1
  SITE 52: note = RuvC_P2
  SITE 87: note = RuvC_P3
  SITE 89: note = RuvC_P4
  SITE 92: note = RuvC_P5
  REGION 211..298: note = Tnp_domain
  SITE 219: note = Tnp_P1
  SITE 249: note = Tnp_P2
  SITE 257: note = Tnp_P3
  SITE 258: note = Tnp_P4
  SITE 270: note = Tnp_P5
MELFTLGIDLGKTTFHLVGMNQLGEVVLRKRFSRVQLLHFTANLKVKLIGMEACGGSHFLGRALREQGHEVRLIPAQYVKPYVKTNKSDYIDAEAIAEAVGRPTMRFVPVKSDDQLDLQSLHRVRERWVMRRTAVVNQIRGLLLERGTTLRKGRRYVDEALPGILAGGPFNLSGAVLVLLAELKQELEQLAEKIDRADKSLEKIARENEACRRLVVMPGVGPVTATAIIATIGNGAAFRKGRDFAAWLGVVPEEHSTGGKQTLWKIPRRGNQYLRRLFVQGARAVMQHRTKQSSGLSAWLAQLTARTHQNIAIVALANKLARMAWAVLAKNEIYRPPLLAGNII

SEQ ID NO: 17378 - protein, 340 aa, unidentified
  source 1..340: note = protein_35ffb6b
  REGION 6..148: note = RuvC_domain
  SITE 9: note = RuvC_P1
  SITE 52: note = RuvC_P2
  SITE 87: note = RuvC_P3
  SITE 89: note = RuvC_P4
  SITE 92: note = RuvC_P5
  REGION 211..296: note = Tnp_domain
  SITE 219: note = Tnp_P1
  SITE 249: note = Tnp_P2
  SITE 257: note = Tnp_P3
  SITE 258: note = Tnp_P4
  SITE 270: note = Tnp_P5
MEITTIGLDLAKNVFQVHGVNERGKAVLRKQLKRDQVAPFFANLPPCLVGIEACASSHHWARKLQALGHTVRLMAPQFVKPYVKSNKNDAADAEAICEAVSRPSMRFVPIKNVEQQSVLSLHRVRQGFVRARTAQANQIRGLLGEYGLVVPQGIAYIAQRVPPLIEDAESELPGTFRLLIQRLLDHLKVLQEQVDQIEVQIKAWHRASEASQRLEKVPGIGPLTASALVASIGDAKNFDNGRQFAAWLGVVPRQHSSGGKPTLLGMSKRGDAYLRTMLIHGARSVIYRATQKADPDSWLVKLTTRRNKNVAAVAMANKTARTVWALLAHGREFKAGYAAA

SEQ ID NO: 17379 - protein, 342 aa, unidentified
  source 1..342: note = protein_9b05ab8
  REGION 6..148: note = RuvC_domain
  SITE 9: note = RuvC_P1
  SITE 52: note = RuvC_P2
  SITE 87: note = RuvC_P3
  SITE 89: note = RuvC_P4
  SITE 92: note = RuvC_P5
  REGION 211..300: note = Tnp_domain
  SITE 219: note = Tnp_P1
  SITE 249: note = Tnp_P2
  SITE 257: note = Tnp_P3
  SITE 258: note = Tnp_P4
  SITE 270: note = Tnp_P5
MQITTIGLDIAKNVFQVHGIDGNETVVVRKQLRRGKLIAFFESLAPCLVGIEACATAHHWARELTRLGHQVRLMPAKDVKAYVKRNKNDAADAAAICEAVRRPTMRFVRIKSTDQQCQLMQHRTRDLMMRQRTQLINALRAHLAELGIVAAMGDKGVTELLMIVADEDDGRLPVEARASLALLAAQLNALQMLIGSLEKQIKMQHRANPASQRLETIPGIGIIGATAIAATVADPTVFRSGRDFAAWIGLVPRQESSGGKHKLGSISKRGDRYLRRILVVGAHSVLRRAMEKPGKYPWLTQLMARRPFKVVAVALANKMARMAWALLTYGGTYRAPRLSIVP

SEQ ID NO: 17380 - protein, 341 aa, unidentified
  source 1..341: note = protein_92f3d81
  REGION 7..146: note = RuvC_domain
  SITE 10: note = RuvC_P1
  SITE 55: note = RuvC_P2
  SITE 88: note = RuvC_P3
  SITE 90: note = RuvC_P4
  SITE 93: note = RuvC_P5
  REGION 212..297: note = Tnp_domain
  SITE 220: note = Tnp_P1
  SITE 250: note = Tnp_P2
  SITE 258: note = Tnp_P3
  SITE 259: note = Tnp_P4
  SITE 271: note = Tnp_P5
MNQSSTISIDLAKSVFQVAVFNRHGKRMSNQAMSQKKMLMLINQHPNSTICIEACSASHYWGRTFQDRGHTVKIIPPQKVRPYRNGNKNDANDAIAIYEASLRSDIHVVPVKTPEQQDVAMLLSLRQSYIKQRTAVSLRILGYAAEHGITFPQGINKLREMIPLAIEDAENELTSVARFVLRELYAQLLSIDEPIERVESELIEFARQIPACQLLITLRGVRWIIASAIFARMGDASAYRNGRGASASLGLVPTHRGSGGKNKNHGISKSGDKTLRSLIVHGARAVVANIRDKKDRLSCWLRNLLERKPFNQVVVALANKTIRMACAMLKSNQSYNEALIA

SEQ ID NO: 17381 - protein, 408 aa, unidentified
  source 1..408: note = protein_a275a22
  REGION 20..179: note = RuvC_domain
  SITE 23: note = RuvC_P1
  SITE 76: note = RuvC_P2
  SITE 117: note = RuvC_P3
  SITE 119: note = RuvC_P4
  SITE 122: note = RuvC_P5
  REGION 282..369: note = Tnp_domain
  SITE 290: note = Tnp_P1
  SITE 320: note = Tnp_P2
  SITE 328: note = Tnp_P3
  SITE 329: note = Tnp_P4
  SITE 342: note = Tnp_P5
MSCGTSIEINTLEVFIMICVGIDVAKDKHDCFILNSEGEVLADVFTITNNAEGFDILLQTIRSCSRPENKIKVGLEATGHYSYNILGFLLNKGLATYVINPLHTNLYRKSLSLRKTKTDRIDARTIATMLMSDVDLKSYTDTSYHNEELKSLTRYRFDKVHERAKLKSSIARLVCILFPELEKLVSTLHMASVYALLSEFPGAKQVASAHLTRLTNLLHEASKGRYGREKALQIRDAARKSIGSAMLAKSLELKHTIHLIGELDAEIEEIETEIDSIMETLHSPITTIPGIGNRMGAMILAEIGDFSNFDSADKILAYAGLSPSTYQSGQLTSSYAHMEKRGSRYLRYAIFNATKFVCNWDPSFAAYLAKKRGEGKHYNVAISHATKKLVRLIYAMEQTKQPYRQAAV

SEQ ID NO: 17382 - protein, 344 aa, unidentified
  source 1..344: note = protein_3a6987d
  REGION 7..150: note = RuvC_domain
  SITE 10: note = RuvC_P1
  SITE 54: note = RuvC_P2
  SITE 89: note = RuvC_P3
  SITE 91: note = RuvC_P4
  SITE 94: note = RuvC_P5
  REGION 213..297: note = Tnp_domain
  SITE 221: note = Tnp_P1
  SITE 250: note = Tnp_P2
  SITE 258: note = Tnp_P3
  SITE 259: note = Tnp_P4
  SITE 271: note = Tnp_P5
MSMIKVVGIDIAKSVFQVCVWMVDGSVAWNKKISRSKLLDTIRQFEPGTLVAMEACATSHFWGRTISSMGYCVRLIPAQHVKAFVRSQKNDANDALAICETALRPGIHFVAVKTTEQQDIKALRNTRQLMVEQRTALANQLRSLLAEYGVSLSAGILHLQQQLPEVIEDASNELTFTLRRLLYSLREDMQALNERVTGLDKEITALSSQQTAYHHLLTIPGVGPLIAAAFISEVDAGQFSSGRELSAWCGLVPRQHSSGGKQRLSSVTKNGNRSLRTLIIHGARSVMRCVKKRDDCMGLWLQRLEARREFLKTTVALANKLTRIIWRVLTDQVDFNMSKAFSMI

SEQ ID NO: 17383 - protein, 400 aa, unidentified
  source 1..400: note = protein_1bafd5b
  REGION 11..166: note = RuvC_domain
  SITE 14: note = RuvC_P1
  SITE 63: note = RuvC_P2
  SITE 103: note = RuvC_P3
  SITE 105: note = RuvC_P4
  SITE 108: note = RuvC_P5
  REGION 273..358: note = Tnp_domain
  SITE 281: note = Tnp_P1
  SITE 311: note = Tnp_P2
  SITE 319: note = Tnp_P3
  SITE 320: note = Tnp_P4
  SITE 332: note = Tnp_P5
MIDIDETGVFLGLDVGKSNHHGHGLTPAGKKVLGKPLPNSEPQLRAVFDKLKAAFGTVLVVVDQPASIGALPLAVARDVGCQVAYLPGLAMRRIADLYPGEAKTDARDAAVIADAARTMPHTLRTLDLTDEVTAELTMLVGFDQDLAGEANRASNRIRGLLTQFHPSPEHVLGPRLDHPAVTWLLERYGSPAALRKAGRRKLVEVIRPKAPRMAQRLVDDIFDALDEQTVVVPGTGTLDVIVPSLAKSLAAVHDQRRALEARIEALLEAHPLSKVLTSMPGIGVRTAAVLLTTVGDGTSFPSAAHLASYAGLAPATKQSRTSIHGEHAPRGGNRQLKRAMFLSAFAALHDPASRGYYDRCRARGKTHTQALLRLARHRISVLFAMLRDGTFYEPRTPQPA

SEQ ID NO: 17384 - protein, 320 aa, unidentified
  source 1..320: note = protein_5e58be3
  REGION 6..157: note = RuvC_domain
  SITE 9: note = RuvC_P1
  SITE 58: note = RuvC_P2
  SITE 98: note = RuvC_P3
  SITE 100: note = RuvC_P4
  SITE 103: note = RuvC_P5
  REGION 193..279: note = Tnp_domain
  SITE 201: note = Tnp_P1
  SITE 231: note = Tnp_P2
  SITE 239: note = Tnp_P3
  SITE 240: note = Tnp_P4
  SITE 252: note = Tnp_P5
MTTHYVGVDISKVKFDAARLSAEGKYKHKKFDNNADGFAAFTAWLVGFGDEKPTIGMEATGAYSIPLADFLVGEGYAVSVVNPTKIHAFARTELGRAKTDKADAKLIARFMQEKKPPPWNPPPANIRDLQALLRRVEHLSEMRQMEQNRLDTAAPAVAESIRAILGSLDKELKATRERILRHIDSDPNLRARGDLLDSIPGVGEATRAHLLVALSEHYGFGNAKQAVAHIGLDPKIRQSGQWVGETHISKAGAPLLRKALYMPAVVAKRHNPAIRAFCERLKANGKKGKAIICAAMRKLVHIAFGVLKSGKPFDPKLGLA

SEQ ID NO: 17385 - protein, 346 aa, unidentified
  source 1..346: note = protein_8fed381
  REGION 7..148: note = RuvC_domain
  SITE 10: note = RuvC_P1
  SITE 53: note = RuvC_P2
  SITE 88: note = RuvC_P3
  SITE 90: note = RuvC_P4
  SITE 93: note = RuvC_P5
  REGION 212..301: note = Tnp_domain
  SITE 220: note = Tnp_P1
  SITE 250: note = Tnp_P2
  SITE 258: note = Tnp_P3
  SITE 259: note = Tnp_P4
  SITE 272: note = Tnp_P5
MSYSTTVGVDLAKNVIQISVVSGRGKELSNRSLTRKKFAEFLGKQSPSLVAFEACASAHYWARAAKRHGHSTRIIPAKAVAPFRQGHKTDSNDALAVAEAARRPNIKDAPMKTVEQQGLQSIQRSRFLLIQECIALSNHMRGILLEFGVTIPQGFASLLRTLPEVLEDGDNDLPDLYRPTLHRLYGRMLELRIDIEAMTKEIDSLVKRHPVCSKLTALEGVGPIGALSLYAALGSGAAFTKSREFAAYLGLTPRQHSSGGKTNIVGLSKKIGNRRLRSILIQGALAYVYRMKEPRTSKDRWLKDLIERAGPRRAAVALANKNVRTAWALVTQGTEYQRREQLEMAA

SEQ ID NO: 17386 - protein, 361 aa, unidentified
  source 1..361: note = protein_7b9c8bb
  REGION 15..161: note = RuvC_domain
  SITE 18: note = RuvC_P1
  SITE 67: note = RuvC_P2
  SITE 103: note = RuvC_P3
  SITE 105: note = RuvC_P4
  SITE 108: note = RuvC_P5
  REGION 236..319: note = Tnp_domain
  SITE 272: note = Tnp_P2
  SITE 280: note = Tnp_P3
  SITE 281: note = Tnp_P4
  SITE 292: note = Tnp_P5
MNEGQATTERCGVVGGVDTHKDLHVAAVVDSHDRVLGSECFPSTRHGYKQMLIWMRSFGELTRVGIECTGTYGAGLLRYMQQAGVTVLEVTTPDKSDRRKRGKDDTLDAQNAAHAAYAGIRTVTPKTRDGMIESLRVLKVCRKTAMTARRVTLQLIHNTIVCAPDELRESLRVMTRMQLIRTLAAWRPDLSDYRSLTSAYRIALKSLGRRYLELHDEIADLDVMIAALVDELAPDLISRNCIGYESASQLLLTAGDNSNRLRSEASFAALCGVSPVPASSGKVTRHRLNRGGDRAANSALHIIAIGRLRTDPRTKAYIDRRVSEGHSKLESIRCLKRYIAREVYHVIRQRNRQIGQVQIAT

SEQ ID NO: 17387 - protein, 424 aa, unidentified
  source 1..424: note = protein_91f107b
  REGION 9..167: note = RuvC_domain
  SITE 12: note = RuvC_P1
  SITE 64: note = RuvC_P2
  SITE 104: note = RuvC_P3
  SITE 106: note = RuvC_P4
  SITE 109: note = RuvC_P5
  REGION 278..363: note = Tnp_domain
  SITE 285: note = Tnp_P1
  SITE 315: note = Tnp_P2
  SITE 323: note = Tnp_P3
  SITE 324: note = Tnp_P4
  SITE 336: note = Tnp_P5
MSEQEVRIVGFDCGEDEHQAVLLDGEGQEAFRVAMTNRRDRIEEGFALILLRVPTGAKLVVAVESTRSHGRLVTEVAKGLGCEVWQVNTVALNHFRAVEGQPRKDDVRDAYLCARMVYLRMQGARMKVEISDEERVLSRLTRAYSRIMEARTRALQALHAILLELAPEVLHRHWDGPKVNSKAMLYLLERWPGFRGLERAQLRSIEKILHSCRYGDRAADVAKWLRDVARRIGMSNEERRIVTLEMQNAVEQIRSCDAALGQLKQEISERVQRHPVGVRLLEMPGIGVIVAGVLIGELLPVARTSREAQSATYSGVTPLGRKSGKSLNTSSLTRGVNKWVLHALYTSAVAAKKCSAIDRAYYEKKLLGYAGHKKPHVAAFIALGRQRHKVIFKILTTGARYDKETLISSHLERIKDQQQHEAAA

SEQ ID NO: 17388 - protein, 333 aa, unidentified
  source 1..333: note = protein_1678df7
  REGION 9..157: note = RuvC_domain
  SITE 12: note = RuvC_P1
  SITE 62: note = RuvC_P2
  SITE 102: note = RuvC_P3
  SITE 104: note = RuvC_P4
  SITE 107: note = RuvC_P5
  REGION 201..288: note = Tnp_domain
  SITE 209: note = Tnp_P1
  SITE 239: note = Tnp_P2
  SITE 247: note = Tnp_P3
  SITE 248: note = Tnp_P4
  SITE 261: note = Tnp_P5
MIQVVSPVVGIDVSKKKLDAALLAGGKLKYKVVENSAKGYADLVVWLRKQDVVIEDIHACMESTGVYSEPVALGLLALGLKVSMVNPTQIKGFGQSENIRNKNDRADAGVIARYCATMRPPLWQAPSPELRHLRSLTDREAVLKDMRQQEANRLEAYTFANDVAMQADARRLIAIFDEEIKRLGIEVDDHIDRHPDLKRDVDLMTSIPGLGRVTAAKVISRVGDIRRFTDAKKLAAYLGVTPKQRQSGSSVRGRSTISRMGSGEVRTAMYMPAITAIRYNPLIAAFAERLSANGMAKMAVVVAAMRKLVHQIYGVVSSGQPFDPNYLQKQLAT

SEQ ID NO: 17389 - protein, 295 aa, unidentified
  source 1..295: note = protein_70c0ddd
  REGION 13..118: note = RuvC_domain
  SITE 57: note = RuvC_P3
  SITE 59: note = RuvC_P4
  SITE 62: note = RuvC_P5
  REGION 158..245: note = Tnp_domain
  SITE 166: note = Tnp_P1
  SITE 196: note = Tnp_P2
  SITE 204: note = Tnp_P3
  SITE 205: note = Tnp_P4
  SITE 218: note = Tnp_P5
MGEKANNRRSQNSLCDGIDRVYHQKFAYYLDESFLDLSVVLPNKIANYIRTLEVKTITDKTCSEAIAQFGLERKLNLWHAPNKVYMELQQLTRERDQIVAERSAIKNQLHAETIQAKPNTNSVRRLKERIAFLNRQEKEIKGEIDVIIDNNEDVKKEIKNIISIPGIGKLTAVIVLAETNGFELIRNKKQLTSYAGLDVKEKQSGTSVRGKPRISKKGNRSLRKAMYLPSLSAVKYDENFKGQYVRIVSKHGIKKKGLIAVQRKMLELIYTLFKNKTVYDKNYESKKSSAKILVA

SEQ ID NO: 17390 - protein, 338 aa, unidentified
  source 1..338: note = protein_1ecf22a
  REGION 7..148: note = RuvC_domain
  SITE 10: note = RuvC_P1
  SITE 53: note = RuvC_P2
  SITE 88: note = RuvC_P3
  SITE 90: note = RuvC_P4
  SITE 93: note = RuvC_P5
  REGION 210..296: note = Tnp_domain
  SITE 218: note = Tnp_P1
  SITE 248: note = Tnp_P2
  SITE 256: note = Tnp_P3
  SITE 257: note = Tnp_P4
  SITE 269: note = Tnp_P5
MGEVIRIGLDTSKHVFQVHGVNAAEQTVLRKRLRRGDIERFFAALPGTLIGLEACGAAHHWARVLGKLGHEVRLLPPQYVKPYVKRGKNDAADAEAICEAMSRPSMRFVPVRTAANQAELMLHGARDLLLKQRTMLMNAIRGHAAEFGITGAKGVGRIATLLERIGAHGSVPDLAREILARLVEQLVSLERQVSELEKKLLAWHRTNERSRRLVAIPGVGPIGATALTMRVPDPSIFKSGRHFAAWLGLTPKDHSTAGRQRLGVITRAGDETLRRLLVSGAMAVIKCAKSGRSSPWLLKLLARKPKKLAAVALANKTARIAWAVMTRGEVYRRVMPDA

SEQ ID NO: 17391 - protein, 428 aa, unidentified
  source 1..428: note = protein_21a4d98
  REGION 20..181: note = RuvC_domain
  SITE 23: note = RuvC_P1
  SITE 79: note = RuvC_P2
  SITE 120: note = RuvC_P3
  SITE 122: note = RuvC_P4
  SITE 125: note = RuvC_P5
  REGION 288..377: note = Tnp_domain
  SITE 296: note = Tnp_P1
  SITE 326: note = Tnp_P2
  SITE 334: note = Tnp_P3
  SITE 335: note = Tnp_P4
  SITE 347: note = Tnp_P5
MNCNTQNAKIASITEKTLIVGIDVGSETHFARAFDWRNYEYTKKPLEFSNTEAGFMMFKAWVEDIAEKQGKTAVIPGMEPTGHYWFALGKFLQDSGMKPVHVNPHHVKKSKELDDNNPNKNDRKDPKTIAALVNEGRFSYPYIPTGIYAEIRSLSNLRFQTQEELTRIKNRIARWFAIYFPEYKDVYGDLMAVSGRMILKEAPLPEDIRILGVNGVNQIWRNVKLRGAGMKRAKILVSAAEHSVGSKEAPEAARIELKNLLNDMDVYVSRMEELLQTIEEKLKTIPYVDKLMEIKGIGLITVSGFIAEVGDIGRFDNPKQLQKLAGYAIVANDSGKHNGESRISYRGRKRLRYVLYEAAISLVGKNAEFKEIHEYYRTRKENPLKKMQSVVAVACKIIRVFYTILTKGVDYDPMKLMSDIRRPQLQAA

SEQ ID NO: 17392 - protein, 342 aa, unidentified
  source 1..342: note = protein_64dcbef
  REGION 7..148: note = RuvC_domain
  SITE 10: note = RuvC_P1
  SITE 53: note = RuvC_P2
  SITE 88: note = RuvC_P3
  SITE 90: note = RuvC_P4
  SITE 93: note = RuvC_P5
  REGION 211..296: note = Tnp_domain
  SITE 219: note = Tnp_P1
  SITE 249: note = Tnp_P2
  SITE 257: note = Tnp_P3
  SITE 258: note = Tnp_P4
  SITE 270: note = Tnp_P5
MNNVTIIGIDLAERVFHAHGAHIDGSVAFRKRLTRAQMLPFLSAQPRCVVAMEACASAHEWGRAIQQLGHDVRLIPPSYVKPYVKRQKNDTADAEAIAEAGSRPTMRFVAVKTEEQQARSMVFRTRDLLVRQRTQLINALRGHLAEHGLVVPQGPAHLKTLAKALDATDVAMPQLVRDIGRIYLEQIEQLNAKVADLEKTLRREAQFGEETRRLQTMPGIGPITAMAVETFAPPLQTFKRGRDFAAWLGLVPVQHSTGGKQRLGRTSKMGQRDIRRLLRIGAMAVIRWASGRGARPGSWLSRMMDRKPLMLVAVALANKMARAIWAMQTKKEDYRDPGLAAA

SEQ ID NO: 17393 - protein, 332 aa, unidentified
  source 1..332: note = protein_01e30b2
  REGION 7..162: note = RuvC_domain
  SITE 10: note = RuvC_P1
  SITE 62: note = RuvC_P2
  SITE 100: note = RuvC_P3
  SITE 102: note = RuvC_P4
  SITE 105: note = RuvC_P5
  REGION 205..293: note = Tnp_domain
  SITE 213: note = Tnp_P1
  SITE 243: note = Tnp_P2
  SITE 251: note = Tnp_P3
  SITE 252: note = Tnp_P4
  SITE 265: note = Tnp_P5
MEFFYFIGVDVSKKKLDFCVMFEGKVVHEEKTANHQGAIMSLLRNLEEDYGITSGQMLVCAEHTGQYTFPLACACKSVECKLWLENPAEIKYSSGVQRGKNDKVDAKRIAIYANRFQDKVQYYERPTEDIERLKQLESERTLYVTDLAKYKGQMKDQKDYMPKALYERKMKRLQALMDDLEEAIQAITDEMDEVIASCPVLSRQRELLMSIDGVGRVVATNMIIATEAFTRFVDPRKFNCYAGIAPFYYSSGSSQHSKAKVSHRADKVMKRLLHLAAVAVTHRVGGELKMYYERKVAEGKNRMSVINALRAKIVARMFAVIKKNEKYKPILS

SEQ ID NO: 17394 - protein, 399 aa, unidentified
  source 1..399: note = protein_4a6e722
  REGION 13..167: note = RuvC_domain
  SITE 16: note = RuvC_P1
  SITE 64: note = RuvC_P2
  SITE 104: note = RuvC_P3
  SITE 106: note = RuvC_P4
  SITE 109: note = RuvC_P5
  REGION 274..358: note = Tnp_domain
  SITE 282: note = Tnp_P1
  SITE 311: note = Tnp_P2
  SITE 319: note = Tnp_P3
  SITE 320: note = Tnp_P4
  SITE 332: note = Tnp_P5
MTDIEQHGCDVFVGVDVGKGAHHAVALDRQGKRLLDSPLPNDEAKLRALITGLKRHGQILLVVDQPATIGALPVAVARAEGIGVAYLPGLAMRRIADLHAGEAKTDARDAYVIAEAARSLPHTLRSLKLADNELAELTMLCGFDDDLAGQVTQTSNRIRGLLTQIHPALERVVGPHLDHPAMLDLLEHYPSPAELAAVSEKTLANRLTKLAPRMGKRWAAEIAQALSEQTVVVLGTQAASIVLPRLAQQLATLRRQRDEVAKEVERLVLAHPLHPVLTSMPGVGVRTAARLLIDVASRVFASAGHLAAYAGLAPVTRRSGSSIRGEHPSRRGNKQLKRAMFLSAFAALRDPISRAYYARKISQGKRHNQALIALARRRCDVLFAMLRDGTLYSPPQSET

SEQ ID NO: 17395 - protein, 391 aa, unidentified
  source 1..391: note = protein_fb9dfef
  REGION 4..163: note = RuvC_domain
  SITE 7: note = RuvC_P1
  SITE 60: note = RuvC_P2
  SITE 101: note = RuvC_P3
  SITE 103: note = RuvC_P4
  SITE 106: note = RuvC_P5
  REGION 266..353: note = Tnp_domain
  SITE 274: note = Tnp_P1
  SITE 304: note = Tnp_P2
  SITE 312: note = Tnp_P3
  SITE 313: note = Tnp_P4
  SITE 326: note = Tnp_P5
MVCVGIDVAKDKHDCFIINSEGEVLGDVFTIPINMEGFHCLLERIRACTTAQGKIKVGLEATGHYSYNILGFHLDNGLPAYVLNPLHTNLYRKSLSLRKTKTDRVDARTIAAMLLSNVGLKPYTDTAYHNEELKSLTRYRFDKVKERAKLESPIARLVCTLFPEMEKLVPSLHMPSVYALLSEFPGAKYIADAHLTRLKARLLEASSRRYKRDMAVEIREAAKASIGSVLPAKWLELRHTIHLIRELDSEIEEIEAAIQAIMDEMHSPITTIPGIGTRMGAMILAEVGDFSHFNSPDKVLAYAGLSPFTYQSGQLTNCYAHMEKRGSRYLRFALYNAAKYGCHWDPLFASYLAKKRAEGKHYNVAISHAAKKLMRLIFALEKFREPYRLAA

SEQ ID NO: 17396 - protein, 391 aa, unidentified
  source 1..391: note = protein_5a00f0d
  REGION 6..163: note = RuvC_domain
  SITE 9: note = RuvC_P1
  SITE 61: note = RuvC_P2
  SITE 102: note = RuvC_P3
  SITE 104: note = RuvC_P4
  SITE 107: note = RuvC_P5
  REGION 267..351: note = Tnp_domain
  SITE 273: note = Tnp_P1
  SITE 303: note = Tnp_P2
  SITE 311: note = Tnp_P3
  SITE 312: note = Tnp_P4
  SITE 324: note = Tnp_P5
MSMYFIGIDISKYKHDCCIISAADQKVVSKVTIKNNKAGFNELLTIIHSLANPADIRIGFESTAHYALNLELFLENSLLTFMEVNPVLISEYKKSKTLRRTKTDSVDCESIARWLMTVEYKPHSKGFYHAYSLKSLTRLRDKLIRQRSFYLIKITNVLDHTFPEFKPFFNERLSKTALYLLENYGSAEKMARMNSASYEKLRSLSRGKFSPQQFLRLKELAANTVGVNNSIFDVELNSLLSLYKSLVKEINTIEKEINKLIEEVHPHYMSVPGIGPLSAAVIYSEYGDISNFTNPGQMLAFAGIEPGINESGTESHGGKMVKRGSSQLRYTLINCCLPLIRFDMTFATYYAKKRGEGKPHRVAITHVAKKLIRVIYALERQNIDFNAQKLR

SEQ ID NO: 17397 - protein, 345 aa, unidentified
  source 1..345: note = protein_affbffd
  REGION 7..148: note = RuvC_domain
  SITE 10: note = RuvC_P1
  SITE 53: note = RuvC_P2
  SITE 88: note = RuvC_P3
  SITE 90: note = RuvC_P4
  SITE 93: note = RuvC_P5
  REGION 213..303: note = Tnp_domain
  SITE 221: note = Tnp_P1
  SITE 251: note = Tnp_P2
  SITE 259: note = Tnp_P3
  SITE 260: note = Tnp_P4
  SITE 272: note = Tnp_P5
MKNVQVLGIDIGKNLCSLVGLDEKGAVVLRRRAKRETLIALAAKLSHCVVGMEACCGAHWLGRIFAAHGHEIRMMPPEYVRPYIKAQKNDDRDAEGIAEAATRPTMRFVELKTQEQLDLQTLHRARERLVGERTALINQLRGILLERGIVASQGRRKFEQRLIEILDGEEGNSLNGRIRSLIEDMRAQWGELDQKIGAFDAEFVAFAKQNDEARRLTTIPGVGPIIASALVAAVGNADAFEHGRDLAAWLGLVPRQSTTGGRPRLLGISKRGNVYLRKQLIHGARSALQHFVKQDTALGRWAKALLARSHFNVAVTALANKLARIAWAVLRHGHTFATQEVKVAA

SEQ ID NO: 17398 - protein, 313 aa, unidentified
  source 1..313: note = protein_21c6f0b
  REGION 9..156: note = RuvC_domain
  SITE 12: note = RuvC_P1
  SITE 56: note = RuvC_P2
  SITE 94: note = RuvC_P3
  SITE 96: note = RuvC_P4
  SITE 99: note = RuvC_P5
  REGION 190..274: note = Tnp_domain
  SITE 198: note = Tnp_P1
  SITE 227: note = Tnp_P2
  SITE 235: note = Tnp_P3
  SITE 236: note = Tnp_P4
  SITE 247: note = Tnp_P5
MDNLLPQTVGIDISKATLDVYAHPVGCERQFPNTDKGQRELIDWLAQWQIDRIAYEATGAYHRRLEQALTDLPCVNLNPARARRFAQAAGTLAKTDKIDAVILARMATTLQPPVRPASTPQQAKLAELISARDGLVRDKIALQNQAKNLTLPLLKRQHKTRLDQIERHIEQIDAEVATIIAADPELARRHEIISSIAGVGTRTADQLVVTMPELGALDPKQAASLAGLAPVARQSGQWKGRSFIQGGRANVRRALYMPALVAARYNPDLKAKYESLIASGKPAKVAVVTLMRKLIVMANALIKADRLWVEKCA

SEQ ID NO: 17399 - protein, 330 aa, unidentified
  source 1..330: note = protein_877dc15
  REGION 7..165: note = RuvC_domain
  SITE 10: note = RuvC_P1
  SITE 61: note = RuvC_P2
  SITE 99: note = RuvC_P3
  SITE 101: note = RuvC_P4
  SITE 104: note = RuvC_P5
  REGION 204..291: note = Tnp_domain
  SITE 212: note = Tnp_P1
  SITE 242: note = Tnp_P2
  SITE 250: note = Tnp_P3
  SITE 251: note = Tnp_P4
  SITE 264: note = Tnp_P5
MNYSHFVGLDVGKKSFDASLVSLDQELSHHTFPNTPEGIEELLHWIKQHGVEVETALFCAENTGSYVIDLCLSSYQYHFPLALECPLTIKKSIGLQRGKNDRIDARRIAQYASLHYRKLRLYELPDKDLVRLRNWLVIRDNLVKQKVSSLKLLELTRETSRLADLMVPMTFLENQICQIKEKISYVEEEMEKIITENITLSTNYQLLTSIKGIGPVNAIVLLCVTDNFQRFSDPRKFACYSGVAPFEYSSGTSIRGKTKTSHLANREVKVYLTRAAITAIAWDPQIKAYYKRKIAEGKHKASVINAVRAKIIARCFAVIKRKTPFVTLSA

SEQ ID NO: 17400 - protein, 343 aa, unidentified
  source 1..343: note = protein_60b3442
  REGION 7..149: note = RuvC_domain
  SITE 10: note = RuvC_P1
  SITE 53: note = RuvC_P2
  SITE 88: note = RuvC_P3
  SITE 90: note = RuvC_P4
  SITE 93: note = RuvC_P5
  REGION 212..303: note = Tnp_domain
  SITE 220: note = Tnp_P1
  SITE 250: note = Tnp_P2
  SITE 258: note = Tnp_P3
  SITE 259: note = Tnp_P4
  SITE 271: note = Tnp_P5
MQTITTIGLDIAKSVFQVHGVGADGHVVVRRQLKRRYVLAFFQKLPPCLIGIEACASAHHWSRELQSLGHKVRLMPPAYVKPYVKRQKNDATDAEAICEAVSRPNMRFVATKSAEQQSCLMLHRTRHLFIRQQTAVINAIRAHLAEFGIIAPVGRNGVEQLLSVVADAGDKRLPEVARACIAALGAQLQTLKAQVLQFDRLITAWHRSNEASKRLDAIPGVGPALATALVASVANPHAFRSGRDFSAWIGLVPKQNSSGGKDRLGNISKRGDRYLRSLFTAGALAVIRYAKIRGTKHRPWLTALLARRPTKVAAIALANKIARMAWAMMAKGEHYKEPAALAA

SEQ ID NO: 17401 - protein, 393 aa, unidentified
  source 1..393: note = protein_57013ea
  REGION 4..163: note = RuvC_domain
  SITE 7: note = RuvC_P1
  SITE 60: note = RuvC_P2
  SITE 101: note = RuvC_P3
  SITE 103: note = RuvC_P4
  SITE 106: note = RuvC_P5
  REGION 266..355: note = Tnp_domain
  SITE 274: note = Tnp_P1
  SITE 304: note = Tnp_P2
  SITE 312: note = Tnp_P3
  SITE 313: note = Tnp_P4
  SITE 328: note = Tnp_P5
MICVGIDVAKDKHDCFILSSEGEVLADVFTIPNNAEGFDTLLQAIRRCVHPADKIKVGLEATGHYSYNILGYLLDKGLPTYVINPLHTNLYRKSLSLRKTKTDRVDARTIATMLMSDVDLKSYTDTAYHNEELKSLTRYRFDKVRERAKLKQSISRLVTILFPELEKMVPSLHMASVYALLSEFPGARQIAEAHLTHLKTLLNDASKGRYGRDMATELRDTARNSVGSVMPAKSLELQHTIRLIRELDAEIDDIEAAIQDMMDEIQSPITTIPGIGVRMGAMILAEIGDFSRFDSPDKILAYAGMSPSTYQSGQLSLSGAYSHMEKRGSRYLRYALYNATKYVCLWDPTFAAYLAKKRAEGKHYNVALSHAAKKLVRLIYSMEKSRQPYNSAA

SEQ ID NO: 17402 - protein, 325 aa, unidentified
  source 1..325: note = protein_390dd2b
  REGION 6..157: note = RuvC_domain
  SITE 9: note = RuvC_P1
  SITE 55: note = RuvC_P2
  SITE 93: note = RuvC_P3
  SITE 95: note = RuvC_P4
  SITE 98: note = RuvC_P5
  REGION 197..284: note = Tnp_domain
  SITE 205: note = Tnp_P1
  SITE 235: note = Tnp_P2
  SITE 243: note = Tnp_P3
  SITE 244: note = Tnp_P4
  SITE 257: note = Tnp_P5
MEKVFIGIDISKLTLDVFVNSCSKTQHYQIENCSKAIKKFFKSFSNDANTVVGMENTGRYNFELYEVLSNLNLLVFVINPLHLKKSIGLLRGKNDKLDSQRIGIFLEKNYMDLQPWIAKSSEIQKISLLNSERRHRVKIKSGLLRQMKDLSFLKNHTDKEIIKLNKQLILLLDKQIKTIEKKMVEIIESDIELKDKYARIQTVPGVGKVLATMLIVKTNGFTEILSARKMACYSGVVPFDHRSGSSIYYKPRVSTMADKELKKILHLAALSSIRLKNDLALYFQRKVLEGKNKMSVLNAIRNKIIHRVYALIKNNSVYENNLQMS

SEQ ID NO: 17403 - protein, 306 aa, unidentified
  source 1..306: note = protein_4df2856
  REGION 7..92: note = RuvC_domain
  SITE 10: note = RuvC_P1
  SITE 53: note = RuvC_P2
  SITE 88: note = RuvC_P3
  REGION 181..268: note = Tnp_domain
  SITE 189: note = Tnp_P1
  SITE 219: note = Tnp_P2
  SITE 227: note = Tnp_P3
  SITE 228: note = Tnp_P4
  SITE 240: note = Tnp_P5
MENIALIGIDLGKNSFHIHCQDRRGKAVYRKKFTRPKLIEFLATCPATTIAMEACGGSHFMARKLEELGHFPKLISPQFVRPFVKSNKNDFGALHRVRESLVQDKVKTTNQMHAFLLEFGISVPRGAAVISRLSTLLEDNSLPLYLSQLLLKLQQHYHYLVEQIKDLESQLKRKLDEDEIGQRLLSIPCVGTLTASTISTEIGDGKQYASSRDFAAATGLVPRQYSTGGRTTLLGISKRGNKKIRTLLVQCARVFIQKLEHQSGKLADWVRDLLCRKSNFVVTCALANKLARIAWALTARQQTYVA

SEQ ID NO: 17404 - protein, 358 aa, unidentified
  source 1..358: note = protein_0f0b090
  REGION 11..166: note = RuvC_domain
  SITE 18: note = RuvC_P1
  SITE 69: note = RuvC_P2
  SITE 105: note = RuvC_P3
  SITE 107: note = RuvC_P4
  SITE 110: note = RuvC_P5
  REGION 236..319: note = Tnp_domain
  SITE 242: note = Tnp_P1
  SITE 272: note = Tnp_P2
  SITE 280: note = Tnp_P3
  SITE 281: note = Tnp_P4
  SITE 292: note = Tnp_P5
MRSTAATGLVVGVDTHRDTHRDTHTAALCDLAGQALAVRQFIAGPGGYAAALAWARQEAGEAGLAWAIEGTRHYGLGLARYLTAAGEHAGEIDASKHAGKRRNGKSDALDAVRAAREMLARPVAAQMRAAGDREALRLLMCDRDNAVASAKTARTLLTSVIVTAPATVREQLRHLSRDRRATVCASLTSPPGADRQTRVLYQTLARLGQRITTLARTAADLQKQISALVEDMTPGLVAAEAGLGALTAAQLLLSYSHHGRIRSEAAFGMLPGTAPVPVSSGRTDRHRLNRLGDRQLNRALQVIAVARMRSHPPTQAYVQRRLTEGKTLREIRRCIKRYLARHFYRALRNQPGLELDRT

SEQ ID NO: 17405 - protein, 343 aa, unidentified
  source 1..343: note = protein_216d2ad
  REGION 5..158: note = RuvC_domain
  SITE 8: note = RuvC_P1
  SITE 56: note = RuvC_P2
  SITE 97: note = RuvC_P3
  SITE 99: note = RuvC_P4
  SITE 102: note = RuvC_P5
  REGION 220..305: note = Tnp_domain
  SITE 228: note = Tnp_P1
  SITE 258: note = Tnp_P2
  SITE 266: note = Tnp_P3
  SITE 267: note = Tnp_P4
  SITE 278: note = Tnp_P5
MKVMIGIDPHKASHTAVAIDNNEMMLDELRVRACSKQTDQLRAWAAPFPDRVWAIESARGLGYLLAQQLVAAGEVVVDVPPVLSTRTRLLGSGKAQKNDPNDARSVAIAALRHDALGRVVLDDHARVLKLLVKRHRDLGRSKSKAACRLHALLMELEPGGMAKEMTVTRANEILNRIEPATQMIEHRLAVARETLADIDHYETQMKASLKRLRAAVAASGTSLVDIRGVGVVVAAMIIGQTGDVSRFASAAHFASYNATAPIEASSGENKRHRLNQRGNRQLNWAIHTVAVTQLRYPCEGRDYYDRKRAEGKNTKEAIRALKRQLSNVIYRTLVADARRPTIR

SEQ ID NO: 17406 - protein, 315 aa, unidentified
  source 1..315: note = protein_752a18d
  REGION 9..158: note = RuvC_domain
  SITE 12: note = RuvC_P1
  SITE 63: note = RuvC_P2
  SITE 97: note = RuvC_P3
  SITE 99: note = RuvC_P4
  SITE 102: note = RuvC_P5
  REGION 253..314: note = Tnp_domain
  SITE 261: note = Tnp_P1
  SITE 292: note = Tnp_P2
  SITE 300: note = Tnp_P3
  SITE 301: note = Tnp_P4
MDAIRERCAGLDIHQETVVVCLLSGPLEKRPRSVTETFGTTTRELLRLQEWLEQQGCTEIAMESTGVFWKPVWNILESTCTITLANPHRIRNMPGKKTDVKDAEWIAKLHRCGLIEGSFVPDEPIRDLRDLTRYLRKLKQNATQEKNRIHKILQDANIKLTTYVSDLFGVSGRALLDSMVNGEVLDVHEIRKLVHTRLKMKVPSLVEALNGRLRLHHRKMIRRHLEHLQYLESEIQTLEAEIEELVQPYMKEIELLDTVPGVSTDAAASIVAELGTDMSPFPSEAHLASWVGVCPANHESAGKKKVKRTNAGTEV

SEQ ID NO: 17407 - protein, 330 aa, unidentified
  source 1..330: note = protein_fa2508b
  REGION 16..155: note = RuvC_domain
  SITE 19: note = RuvC_P1
  SITE 60: note = RuvC_P2
  SITE 100: note = RuvC_P3
  SITE 102: note = RuvC_P4
  SITE 105: note = RuvC_P5
  REGION 199..286: note = Tnp_domain
  SITE 207: note = Tnp_P1
  SITE 237: note = Tnp_P2
  SITE 245: note = Tnp_P3
  SITE 246: note = Tnp_P4
  SITE 259: note = Tnp_P5
MLFHKSILMNKYKETYGVDISKDVFDVYGSLSGHHQFNNDEYGFKKFLKVLSKNSLVAMEATGYYHYRLAQFLYKNTVVVSVINPLSIKRFIQMKLAKVKTDKSDAKAICEYAKTNKIPIYNALTEVQSECLQLFRLLDTYLKQRTAVKDKIHGEEALGVPSKFVYRSLKRQRKQLDKEVKAIEEKILSLVKKDQEQQLTLLTSVPGIGQKTALFLIVITDGFSKFETASQLCSYVGITPTTRESGSSVRGKARISKVGNRKLRNLLFLCAFNACKHNKGCREIYERIVNKGKSKKLALIAVANKLLKQCFAIAKSGLPYDETYVSILQK

SEQ ID NO: 17408 - protein, 405 aa, unidentified
  source 1..405: note = protein_6f688e6
  REGION 5..161: note = RuvC_domain
  SITE 8: note = RuvC_P1
  SITE 58: note = RuvC_P2
  SITE 98: note = RuvC_P3
  SITE 100: note = RuvC_P4
  SITE 103: note = RuvC_P5
  REGION 275..362: note = Tnp_domain
  SITE 283: note = Tnp_P1
  SITE 313: note = Tnp_P2
  SITE 321: note = Tnp_P3
  SITE 322: note = Tnp_P4
  SITE 335: note = Tnp_P5
MMNAVGIDVSKNKSTVTIRRPGDEVVLTPRDIIHTRSAIDDLIKTINDLDGETKVCMECTGRYYEPMASWLSDAGIFVSTVNPLLIKSFGGDSIRPVKTDKADSQKIARFTLDHWANLKQYGLMDETRNQLKTMNRQFAFYMVQKTAMKNNLISLLDQTFPGANNLFSSAVRPDGSQKWVDFAYTYWHVDCVAGKSLDTFTEHYRNWCHRKDYDFSAAKAKAIYDISKDLIAVLPKDDMTKMLIHQAVDQLNVASKTVESLRIKMNEVASTLPEYPVVMAMNGVGPTLGPQLMAEIGDVTRFEKRGSLTAFAGVDPGKNDSGDHCQKSVPTSKKGSPHLRRALFQIMDGLIKRSQVGDEVYDFMDKKRSQGKPYYVYMTAGANKFLRIYYGRVKEYLASLEEQEQ

SEQ ID NO: 17409 - protein, 334 aa, unidentified
  source 1..334: note = protein_b89a1b5
  REGION 21..160: note = RuvC_domain
  SITE 24: note = RuvC_P1
  SITE 65: note = RuvC_P2
  SITE 105: note = RuvC_P3
  SITE 107: note = RuvC_P4
  SITE 110: note = RuvC_P5
  REGION 204..291: note = Tnp_domain
  SITE 212: note = Tnp_P1
  SITE 242: note = Tnp_P2
  SITE 250: note = Tnp_P3
  SITE 251: note = Tnp_P4
  SITE 264: note = Tnp_P5
MKTKVAVLSNHSYMDKIKHFYGVDISKSFFDVVDQNGKHDQFSNDVKGFKGLLKFIKNDSLVVMEATGYYHYRLAQYLYEKGITVSVVNPLSVKRFIQMKLSKIKTDKSDAKAICEYAQATKVPLYTARNAVQAECLQLLSLQDLYLKQRTAVKNKIHGEKALGTPSKTVSRSLVRTLKQLEKELDQIETKLESLVRQTQEDQLEQLTSIPGMGKKTAMLLIVLTDGFTSFENARQLCCFTGITPTIRQSGTSVRGRSRISKVGNRKLRNLLFMCSFTDCKTNKACREIYERIVEKGKSKKLALIAVCNKLLKQAFAIAKSGTSYQENYISKLA

SEQ ID NO: 17410 - protein, 412 aa, unidentified
  source 1..412: note = protein_21ab5a9
  REGION 9..165: note = RuvC_domain
  SITE 12: note = RuvC_P1
  SITE 62: note = RuvC_P2
  SITE 102: note = RuvC_P3
  SITE 104: note = RuvC_P4
  SITE 107: note = RuvC_P5
  REGION 279..366: note = Tnp_domain
  SITE 287: note = Tnp_P1
  SITE 317: note = Tnp_P2
  SITE 325: note = Tnp_P3
  SITE 326: note = Tnp_P4
  SITE 339: note = Tnp_P5
MSKNEITAVGIDVSKGKSTVAVRRPGGEIVMMPFVVLHTAEDLAELTNTLRSIGGEIRVVMEHTGMYWRPIALALKEAGFFVSVVNAMLIHDFSDNSIRKIKTDRADSLKIANYALTFWQELRDYSVEDETRQMLKIQSRLYERTLNSSVALRNGLISLLDQTFPGANKLFDEQRTKAGHIKWVDFVRRFWHKDCVAASSFSSFADTFQKWCKRTGYHYSLSDAKRIHGIARNSVATLAKNDSTKLLITQAVDSLNAVYDTLQILRSEMQRLASLLPEYEIVMGMQGAGPITGPQLMAEIGDVRRFTSKGALVAFAGVDAPPFQSGSFNSKSRHVSKRGSPHLRRVLFTICSVILQHSDPENAVFQFMDKKRAEGKHFYVYTVAGGAKFLRIYYAKVKEYLNTLDSQTGCVA

SEQ ID NO: 17411 - protein, 396 aa, unidentified
  source 1..396: note = protein_b1aa2ce
  REGION 4..160: note = RuvC_domain
  SITE 7: note = RuvC_P1
  SITE 57: note = RuvC_P2
  SITE 97: note = RuvC_P3
  SITE 99: note = RuvC_P4
  SITE 102: note = RuvC_P5
  REGION 271..358: note = Tnp_domain
  SITE 279: note = Tnp_P1
  SITE 309: note = Tnp_P2
  SITE 317: note = Tnp_P3
  SITE 318: note = Tnp_P4
  SITE 331: note = Tnp_P5
MISVGIDVSKGKSTVCIMKPCGEILESPFDIGHTADELDSLISLIKSFDEETRVVMEDTGHYHLPVATYLSSHNIFVCCVNALRMKKFCSQSIRRAKTDKIDSIKIASFGITYWNELVKAYPSNVIYDELKFLARQYYQVTAMLVKSKVNFSNLLDQVMPKINDVLSNQGENHKLTEFVSRYIHFQNILDMGEMKFTSDYCKWAKKKGYRLNERKAAEILALAQNGIPTLPNSQSVKIAVSEAVKLIHSIEESRNTILAQMQDLCNTLPEYSVVKEMDCIGDTLAPRIIAEIGDVRRFKNKHSLIAYAGIDAPPYQSGAFHASERHISKRGNSYLRKTGYEIMQSLIKHKPADNAVYDFIQKKRSEGKCGKEAMIAGLNKFLRVYYGKVMEFYSEH

SEQ ID NO: 17412 - protein, 422 aa, unidentified
  source 1..422: note = protein_947a56c
  REGION 18..166: note = RuvC_domain
  SITE 21: note = RuvC_P1
  SITE 72: note = RuvC_P2
  SITE 106: note = RuvC_P3
  SITE 108: note = RuvC_P4
  SITE 111: note = RuvC_P5
  REGION 263..351: note = Tnp_domain
  SITE 302: note = Tnp_P2
  SITE 310: note = Tnp_P3
  SITE 311: note = Tnp_P4
  SITE 323: note = Tnp_P5
MVQKGVPMALKIVYQTCCGIDVHKTFVVACIASTKKQGVTTYKHHRFSTFTQGLKELLQWLLDNHCRDVCMESTGKYWIPVYNVLENDCTIVLAHPKYVKAIRGKKTDKKDAKWIADLFKHDLVAGSFMPPADIRQLRDLMRYRFKLTCFMSSEKNRLQNCLTVSNIQLASVVSDTFGKSSQRILDKILEDPENTSFDIEPLIHGSLKKKLPELELAIDGFITPEQAGKLKVIKRHFENLESRKAELEELILALASPYQQELDLILTAPSFKNIFSAIGIISEIGVSMEAFPSAKHLCSWAGLTPTNNESAGKKKSVRVSKAGCYIKPLLVQCANSVVKSEKHPEIRNRYLRLGKRRGHKKAIIAIARMLLTALYNMLKNKEPYNAELYRKSDILPVNREITVEQAILMAQFQGYKIKSATE

SEQ ID NO: 17413 - protein, 403 aa, unidentified
  source 1..403: note = protein_9ea2cdd
  REGION 6..158: note = RuvC_domain
  SITE 9: note = RuvC_P1
  SITE 57: note = RuvC_P2
  SITE 95: note = RuvC_P3
  SITE 97: note = RuvC_P4
  SITE 100: note = RuvC_P5
  REGION 266..352: note = Tnp_domain
  SITE 274: note = Tnp_P1
  SITE 305: note = Tnp_P2
  SITE 313: note = Tnp_P3
  SITE 314: note = Tnp_P4
  SITE 325: note = Tnp_P5
MTTFFAGLDWASQTHAVCIIDTQGSVHEQFDIDHTAVGLAELRRHLMAAGSPPVAIERPSGLIVDTLVEAGFTVIPIHPNAVKATRPRYRSHGAKSDASDAYLLADLLRTDGHRFKPLAPQGDEIRALRALVRGRDDLVATRVQLANQLRSLLESFWPGATAVFAEIDSPIALAFVERYPTPESAARLGPKRMAAFCAQHAYCGRRSAEELLARLHRAPAAVCGELEADAKGELARSLARTLTRLVEQIRLLTSRIEHQVASLDDGRIVMSFPRAGRICAAQILAELGSVRERFNSDTQLAAEAGVAPVTYQSGKSKAVTFRWACNHRLRAALTCLADNSRHVSAWAARVYAQARARGCDHPHAIRILARAWLRVLWRAWIDRKPYDPAQHGGAISALKTVEG

SEQ ID NO: 17414 - protein, 317 aa, unidentified
  source 1..317: note = protein_cf40710
  REGION 5..153: note = RuvC_domain
  SITE 8: note = RuvC_P1
  SITE 52: note = RuvC_P2
  SITE 92: note = RuvC_P3
  SITE 94: note = RuvC_P4
  SITE 97: note = RuvC_P5
  REGION 191..278: note = Tnp_domain
  SITE 199: note = Tnp_P1
  SITE 229: note = Tnp_P2
  SITE 237: note = Tnp_P3
  SITE 238: note = Tnp_P4
  SITE 251: note = Tnp_P5
MCKFIGIDISKQTFDVSFSESKIWKHHIFENKLSGFRKLLKLIKSEDWVVMEASGSYYLPLAEFLDKTGINVCVVNPLVIKRFSQTNLYRAKTDKKDAQTIAEYSEKYELRKWNRASENANKLRQLYSRKEMLLKQVHQSKRQLEAFTSSGFLDKFLKMEINNSIKYLENKILKLEKEMDRLSLEEYSETMENLQSIPGVGKQTAMMMCLITDNFEKFDHYKQLIAFVGFSPRIYQSGTSVRGRGHICKMGKAQVRKLLYLCSWSAKRWNVKCKEMYERLKAKGKPERVIKIAIANKLIKQIFAIGKSKEKYKADFC

SEQ ID NO: 17415 - protein, 387 aa, unidentified
  source 1..387: note = protein_ab08bb6
  REGION 4..159: note = RuvC_domain
  SITE 7: note = RuvC_P1
  SITE 58: note = RuvC_P2
  SITE 98: note = RuvC_P3
  SITE 100: note = RuvC_P4
  SITE 103: note = RuvC_P5
  REGION 263..350: note = Tnp_domain
  SITE 271: note = Tnp_P1
  SITE 301: note = Tnp_P2
  SITE 309: note = Tnp_P3
  SITE 310: note = Tnp_P4
  SITE 323: note = Tnp_P5
MIYVGIDIAKQKHFASIMNSDGEILAEPFAFTNDHSGFQKLLKHLDSYPKIEVFIGMESTAHYAENLTSFLFKRGFQVCIINPIQTSSLRKSNIRKTKTDSVDTYLIIKALTLNHYRLFSERDYDSLQLKNLCRFRQKLMKARTKVKIQLVSYVDLLFPELQYFFKSGIHGKACYDLLKTQPNPDKIAKMHLKRLTGLLSKSSHGHFNQSTAVHLKELASQSVGIKNDTLSLQILQSIKQIEMYTDQLAEVEQSIHDIMERMDSVIKTIPGIGSLNGAMIIGEIGDISRFEKPCQLLAYAGLDPSVYQSGNYSAARTRMSKRGSKLLRYALINAAWQTTLVNKTFKDYYDLKISQGRRHYNALGHVAHKLVRVIHKMMTDNVTFNLA

SEQ ID NO: 17416 - protein, 392 aa, unidentified
  source 1..392: note = protein_eedbb47
  REGION 4..161: note = RuvC_domain
  SITE 7: note = RuvC_P1
  SITE 60: note = RuvC_P2
  SITE 100: note = RuvC_P3
  SITE 102: note = RuvC_P4
  SITE 105: note = RuvC_P5
  REGION 266..353: note = Tnp_domain
  SITE 274: note = Tnp_P1
  SITE 304: note = Tnp_P2
  SITE 312: note = Tnp_P3
  SITE 313: note = Tnp_P4
  SITE 326: note = Tnp_P5
MFYVGIDIAKQNYEASIIDSNGKLLDKSISFSNSQVGCNKLIALLERFEANTSNTVIGMEATGHYWVSLYSYLLDLGFSVNVINPIQSDAFRKMYIRQTKNDSKDSFIIAQIMRFGEFSTTSLADEDIMALRQLSRYRLALVDECSDWKRKCIALLDQVFPEYSKLFSDTFGVTSRQLLSKYPTPEDMLSIDTETLSKLLSEASRGRFGISKASEIQESATNTFSVNFAKDAFAFQIKQIIAQINFIEEQLKELETEISTLLHQTNSVITTITGIGDVLGAIIIGEIGDISRFESAPQLVAYAGLDVAVKQSGDFVGTQTKISKRGSPYLRRAIWLAATVAAFKDPALSVYYQSLRARGKHHLTAIEAVARKMCNIIFAVLRDNKPYVPNIK

SEQ ID NO: 17417 - protein, 340 aa, unidentified
  source 1..340: note = protein_4f28bc2
  REGION 6..147: note = RuvC_domain
  SITE 9: note = RuvC_P1
  SITE 52: note = RuvC_P2
  SITE 87: note = RuvC_P3
  SITE 89: note = RuvC_P4
  SITE 92: note = RuvC_P5
  REGION 211..297: note = Tnp_domain
  SITE 219: note = Tnp_P1
  SITE 249: note = Tnp_P2
  SITE 257: note = Tnp_P3
  SITE 258: note = Tnp_P4
  SITE 270: note = Tnp_P5
MHIKTLGIDLAKSVFQLHGVDDIGEIVLQKKLRRGTVLSFLSKLEPCLVGMEACASSHFWAREITALGHEVRLISPAYVKPYVKRHKNDAADAEAICEAVTRPNMHFVSIKSVEQQSVLVLHRSRDLLVRQRTMIMNAIRAHIAEFGVITAQGPRKVADLINCLRDGDHLGLPELACAAIEGLAIQLDSLAGQIQGIERQLLLWHRQNPASQRLETIPGVGIITATALAASVPDASVFKSGRQFAAYLGLVPRQNSSGGKDRLGRITKMGNGYLRRLLVVGATSVVRRAETTNSKTGAWVRSLLERKPTRLVTVAIANKTARTAWALLAKEETYHAAPAA

SEQ ID NO: 17418 - protein, 387 aa, unidentified
  source 1..387: note = protein_f89678b
  REGION 4..159: note = RuvC_domain
  SITE 7: note = RuvC_P1
  SITE 58: note = RuvC_P2
  SITE 98: note = RuvC_P3
  SITE 100: note = RuvC_P4
  SITE 103: note = RuvC_P5
  REGION 263..350: note = Tnp_domain
  SITE 271: note = Tnp_P1
  SITE 301: note = Tnp_P2
  SITE 309: note = Tnp_P3
  SITE 310: note = Tnp_P4
  SITE 323: note = Tnp_P5
MIYVGIDIAKQTHYAAIMNSDGEILVKPFAFSNDHNGFQKLLKHLDSYTKEELYIGMESTAHYAENLTSFLFTRGFQVCIINPIQTSSLRKSNIRKTKTDSVDTYLIIKALSLNHYHLYSERDYNSLQLKNLCRFRQKLMKARTKVKIQLVTYVDLLFPELQYFFKSGIHGKACYALLKEQPNPDRIAKMHLTRLTNLLSKSSHGHFKQSKAVLLKELASQSVGIKNDTLSLQILQSIKQIEMYTEQLAEVDQSIHEIMDKMDSVIKTIPGIGAINGAMIIGEIGDISRFDKPCQLLAYAGLDPSVYQSGNFHAARTRMSKRGSKLLRYALINAAWQTTLVNKTFKDYYDLKISQGRRHYNALGHVAHKLVRVIHKMMSSNVEFNLA

SEQ ID NO: 17419 - protein, 372 aa, unidentified
  source 1..372: note = protein_b6c88bc
  REGION 9..159: note = RuvC_domain
  SITE 12: note = RuvC_P1
  SITE 63: note = RuvC_P2
  SITE 99: note = RuvC_P3
  SITE 101: note = RuvC_P4
  SITE 104: note = RuvC_P5
  REGION 224..309: note = Tnp_domain
  SITE 232: note = Tnp_P1
  SITE 262: note = Tnp_P2
  SITE 270: note = Tnp_P3
  SITE 271: note = Tnp_P4
  SITE 283: note = Tnp_P5
MEKDSELFVGLDTSKLKISVAVADGERNGEVRFFGDISAESASVASMVAKLGKRGAKLHFCYEAGPSGYELYRQIIGLGHCCSVVAPSLIPRRPGDRVKTNRRDAVSLARLHRAGELTSVWVPDETHEAVRDLVRAREVANDGLRKARQHLQSFLLRHGRIYAGRAPWTRVHSRWLAIQSFEHPAQNIVLAEYIQAIEDAAVRLDRLTKQVSEAMSSWSMGPVVEAYQAMRGVALITAVTFVVEIGDVRRFDSAPQLMAYLGLVPSESSTGDRVRRGGITKAGNVRARRVLIEGAWTYRFPARVSREIEARLDGLPRSVREIAWKAQIRLCARYRKLVMAGKTKTVAVTAIAREMAAFLWAIGQEVAPAKAA

SEQ ID NO: 17420 - protein, 399 aa, unidentified
  source 1..399: note = protein_aa8bb99
  REGION 19..167: note = RuvC_domain
  SITE 22: note = RuvC_P1
  SITE 73: note = RuvC_P2
  SITE 106: note = RuvC_P3
  SITE 108: note = RuvC_P4
  SITE 111: note = RuvC_P5
  REGION 234..320: note = Tnp_domain
  SITE 242: note = Tnp_P1
  SITE 272: note = Tnp_P2
  SITE 280: note = Tnp_P3
  SITE 281: note = Tnp_P4
  SITE 293: note = Tnp_P5
MPGTNLQNSIDFKGQNFYVGLDVHKRSWAVTIRSMGIEVGRFTQPPSAAALATYLQNNFPGGRYFSAYEAGFCGTGTHEQLCKLGISNILVHAADIPATDKQKKNKTDLHDSRSIAERLEKGDLKGIYVMTREQQELRSLFRLRESKVKDVTMANNRLKSHLMFFSIELPEDVGKKEYLSVKALKWLSNLEMATTAGTIALQQYIEGLKYQRKQLYQITKLLREQVQAVHGTTYQCLLSVPGIGGVTAMGLICEIADFSRFKDPDQYSSFLGLCPWEDSSGDNIKTKGMQPRCNRHLRPLLVEASWTAIKRSPALFAYYSKHAVRNPKRAIIKVARRLAMIARGVAITQQLYQLEYLQTMRQKQQDEKKIRKTERFSSGIANQHKNKKSGNNIPISLPG

SEQ ID NO: 17421 - protein, 452 aa, unidentified
  source 1..452: note = protein_d4b3cf9
  REGION 26..185: note = RuvC_domain
  SITE 29: note = RuvC_P1
  SITE 84: note = RuvC_P2
  SITE 124: note = RuvC_P3
  SITE 126: note = RuvC_P4
  SITE 129: note = RuvC_P5
  REGION 299..393: note = Tnp_domain
  SITE 307: note = Tnp_P1
  SITE 337: note = Tnp_P2
  SITE 345: note = Tnp_P3
  SITE 346: note = Tnp_P4
  SITE 359: note = Tnp_P5
MPAGKDKYMKYQKVLTMLESIPYLSVGLDVGADFTWMSIMLPNGSLTGKPFKILHSDPASRDLAVTKIKEAQEMYSLESRCFLESTGIYHIPLLYFLRDKGFDCSVINPIITKNSTNMNIRKLHNDKFDSKKAAKVGLDASLKTSIVPDDSVIDLRNLVRDYYYFKDLQSAVVLKLNAELKVSFPAYLKVFSKITTQCSLKLLEAYPLAADMLAAKDEIVETIKSTARFGEKYALSKYDAIYAAAEDAAVFGRALKSNAVRIRLYISIYKEYQKHLDDLLVALHESVDKLQGTSVYGRIDLLQSLRGVGFLSAVVLIAEMGNFDLFSSPKKLYAYFGLDPAVKQSGKFNGDKVHMSKRGSSLARRILHMVSLNNLKVDKGTKAPVNPVIYDYYTDKCKSKKKNVAVGAVMHKICNIIFAILRDNKPFEIITQQEHCKRYAAKHPDKAGMNAA

SEQ ID NO: 17422 - protein, 322 aa, unidentified
  source 1..322: note = protein_79b6940
  REGION 5..150: note = RuvC_domain
  SITE 8: note = RuvC_P1
  SITE 52: note = RuvC_P2
  SITE 92: note = RuvC_P3
  SITE 94: note = RuvC_P4
  SITE 97: note = RuvC_P5
  REGION 191..278: note = Tnp_domain
  SITE 199: note = Tnp_P1
  SITE 229: note = Tnp_P2
  SITE 237: note = Tnp_P3
  SITE 238: note = Tnp_P4
  SITE 251: note = Tnp_P5
MCKIIGIDISKETFDVGFINDSKWCHFVFENTEKGFRKLLKEVDLTDWIVMEASGPYYLQLALFFYKKQINVSVLNPLIIRRYSQTRLYRAKTDKKDAQTIAEYGAQYDLKKWKPETKSIIEIKQLYTALELIQKEINQSKRQLEAFTSAGVLSKDLATTLKSIIKFLKAKSTKLEQQIEVKAEQFYKSTLERLKSIPGIGTKTAIMLTVITNDFEKFENHKQLIAYVGFSPRLYQSGTSVRGKGHICKMGKSQIRKLMYLCSWSAKRCNPDCVKMYNRLNEKGKPERVIKIALANKLLKQAFSIVKNQTYYSEKFIDKACF

SEQ ID NO: 17423 - protein, 397 aa, unidentified
  source 1..397: note = protein_6fc4b8f
  REGION 4..160: note = RuvC_domain
  SITE 7: note = RuvC_P1
  SITE 57: note = RuvC_P2
  SITE 97: note = RuvC_P3
  SITE 99: note = RuvC_P4
  SITE 102: note = RuvC_P5
  REGION 274..361: note = Tnp_domain
  SITE 282: note = Tnp_P1
  SITE 312: note = Tnp_P2
  SITE 320: note = Tnp_P3
  SITE 321: note = Tnp_P4
  SITE 334: note = Tnp_P5
MIAVGIDVSKSKSTVAILNADGSKRIAPFDVKHNLPELNALVKYLNDLNDNIVILMEHTGHYHYPILKKLNDEGFQVCLVNPYQMKKYGDTELRRTKTDKKDAIRIATYALEKSYLLVPYSSMEQKYEDLRLLSRQYSQRMATLTFNKVHLGNLLDETMPGITSILSLNTRDPDTSLSMLFIKKYKSYDYIRKMGKTRFLESYSKLTKKARNRRVDHLGLSIYELATQSITTHGENTYTIMAQTQCLNLVAESQKAADAIITQMQAIAVTIPEYPILRSMNGVGDRLGPLILAEIGDVRRFHSGKALNAYAGNDAPPYQSGNFESHNRHISKRGNAALRKYCFEVMQALKLLKPQDDPVYLFLVKKEQEGKPYNVAKMAGVNKFLRIYYARVMELEQ

SEQ ID NO: 17424 - protein, 318 aa, unidentified
  source 1..318: note = protein_8b0e4f0
  REGION 9..162: note = RuvC_domain
  SITE 12: note = RuvC_P1
  SITE 62: note = RuvC_P2
  SITE 102: note = RuvC_P3
  SITE 104: note = RuvC_P4
  SITE 107: note = RuvC_P5
  REGION 268..318: note = Tnp_domain
  SITE 276: note = Tnp_P1
  SITE 306: note = Tnp_P2
  SITE 314: note = Tnp_P3
  SITE 315: note = Tnp_P4
MSQNFSIFVGIDISKHKFNACAIQNPNSIIFESAFDMSKQGFSSFVQKLSVFPKSSVLIAMESTGCYHLNLLSFLSLNDFSCVVLNPLLVNKSLPVGLRKTKTDKIDARSIALTIFYTHHILPTSSFLNSDFRDIARKKESITHQISRVKNDIEKLLSLLFPELEKVTNIYNDAILDLLSSFPSAKAIQKASIDSLRVFFSKTIGRKLKLTPETLKELANNSIAQYWPVKEKILIQTIKELRFLQEQLNEFDEMLKEYCKCASLNQDVEILTSIDGIGENSALYFLAEVGDISRFSTYKKLIAYCGLDPSVDESGRHK

SEQ ID NO: 17425 - protein, 411 aa, unidentified
  source 1..411: note = protein_b46f866
  REGION 5..163: note = RuvC_domain
  SITE 8: note = RuvC_P1
  SITE 62: note = RuvC_P2
  SITE 102: note = RuvC_P3
  SITE 104: note = RuvC_P4
  SITE 107: note = RuvC_P5
  REGION 273..373: note = Tnp_domain
  SITE 281: note = Tnp_P1
  SITE 311: note = Tnp_P2
  SITE 319: note = Tnp_P3
  SITE 320: note = Tnp_P4
  SITE 333: note = Tnp_P5
MNPVIGLDVAKGESQVQAFLDKKKPYKKSFKVAHTLEGLASLLDFIREVEDVSGGRPPIVLESTGHYHTPIVQYFEDRGYLLIIVNPLISYRAKSSSLRKVKTDVIDAHHLCELYYKEDLEPYKQRGIQLLNLRNLTRQHENITGMFVQTKLQFQAVLDQVFPEYCGVFGALYSDVSLLTLQAFPTSEVVLETSKETIATKIKELCKSRSQQWANSQTEKLVAAAAQNPFQKTLYHSLSLSLDMYIHMLLEYKKHLSKLEDEIDALAKSIEEYKIIQSIPGIGEKIAATIISEIGEIDRFNHPKKLVAFAGIDPSVFESGTFKGTLNRITKRGSSRLRHALYMAVKCAIRDCRKKKTTDEIIPRNKRLREFYDKKREEGKPFKVAVIACANKLLHWIYALLKSNTAFQDLA

SEQ ID NO: 17426 - protein, 342 aa, unidentified
  source 1..342: note = protein_f795005
  REGION 6..151: note = RuvC_domain
  SITE 9: note = RuvC_P1
  SITE 53: note = RuvC_P2
  SITE 91: note = RuvC_P3
  SITE 93: note = RuvC_P4
  SITE 96: note = RuvC_P5
  REGION 211..301: note = Tnp_domain
  SITE 219: note = Tnp_P1
  SITE 249: note = Tnp_P2
  SITE 257: note = Tnp_P3
  SITE 258: note = Tnp_P4
  SITE 270: note = Tnp_P5
MTIVTVGIDLAKNVFAVHGVDAAGKPILVRPNVARGNLLELITALPPCLIGMEACSGAHHWAREFEKLGHTVRLMAPKFVAPYRLSGKRGKNDAADAAAICEAVTRPQMRFVPLKTIEQQGQLMVHRARQGFVEQRTATLNRIRGLLSELGLVLPLKAATVRREALARLEELPGWANTVIGDLLSEVTRLDERIAEYDRHIAFMARHSTQAQQLMQLGGIGQTTAMAILSTVGNGCDFACGRSFSAWLGLVPGQYSSGGKQRLGRITKAGDAYLRSLLVLGARAVLAAAMKNDKPRQDAISRWALSLAERRGYWRAVVAIAAKNARMCWAVLQRGDAFKMPA

SEQ ID NO: 17427 - protein, 343 aa, unidentified
  source 1..343: note = protein_e11d59e
  REGION 6..147: note = RuvC_domain
  SITE 9: note = RuvC_P1
  SITE 52: note = RuvC_P2
  SITE 87: note = RuvC_P3
  SITE 89: note = RuvC_P4
  SITE 92: note = RuvC_P5
  REGION 211..298: note = Tnp_domain
  SITE 219: note = Tnp_P1
  SITE 249: note = Tnp_P2
  SITE 257: note = Tnp_P3
  SITE 258: note = Tnp_P4
  SITE 270: note = Tnp_P5
MTISILGIDIAKNTFQLHGADHSGKTVYKKRLARRELAAHVTNLPPCTIVMEACGGSNYWARVFQSSGHSVKLIGAQFVKPFVKTNKNDANDAQAIVEAASRPSMHFVPIKKVEQQDIQTIHRIRTRVVKNRTALINEIRGLCLEYGVVLTPGAARVKSSLCVAIADGDNELTPLSRESMQDLYDELVDVECRLKKLDNKIRQLCRQNENCQRILKIPGVGELTATAIVAAVPDPKEFRNGRHLSAWLGLVPRQSSSGDKRTLLGISKRGDRYLRTLLIHGARAVLSHYKHKDNDYTHWVGRKKATLSHNKAAVALANKNARIIWSMLNSGEEFSYGASATAA

SEQ ID NO: 17428 - protein, 281 aa, unidentified
  source 1..281: note = protein_e96aa36
  REGION 2..86: note = RuvC_domain
  SITE 25: note = RuvC_P3
  SITE 27: note = RuvC_P4
  SITE 30: note = RuvC_P5
  REGION 149..235: note = Tnp_domain
  SITE 157: note = Tnp_P1
  SITE 187: note = Tnp_P2
  SITE 195: note = Tnp_P3
  SITE 196: note = Tnp_P4
  SITE 208: note = Tnp_P5
MCHWHGFVVKLVAPQFVKPYVKSNKNDARDAEAICEAISRPGMRFVTVKSVAQQDSQALHRVRSTLVQQRTAKGNQIRGLVSEYGLVAPQQLAVLRRTIPMWLEDGENGLTERFRCLLQGLYNDLIGLHQRVQTLDKDIEQLAKQNEVTQRLQQLRGVGPMVATALVATVGDATQYKNGRQMAAALGLTPRQHSSGNKERLLGISKRGDAYMRTLLIHGARAVIAQAKHRDDHLSQWVTDLAQKKHPNVAAVALANKTARMAWAMLRNNTDYDPEFAITSH

SEQ ID NO: 17429 - protein, 349 aa, unidentified
  source 1..349: note = protein_2e6d70c
  REGION 9..163: note = RuvC_domain
  SITE 12: note = RuvC_P1
  SITE 68: note = RuvC_P2
  SITE 108: note = RuvC_P3
  SITE 110: note = RuvC_P4
  SITE 113: note = RuvC_P5
  REGION 209..296: note = Tnp_domain
  SITE 217: note = Tnp_P1
  SITE 247: note = Tnp_P2
  SITE 255: note = Tnp_P3
  SITE 256: note = Tnp_P4
  SITE 269: note = Tnp_P5
MKQILKQVLGVDVAQKELVVTLGKMHNDFTLDLYAYKVFKNNKTGFANLFKWLNPLINRDVNPQFVMEATGVYHQKFAYYLDEKGCNLSIVLPNKISNYMRTLDVRTITDKTASQAICQFGLERKLECWTKPKKVYTELQQLTRERSQIVDERVIVKNQLHAEKTEAEPNKSSLKRLNARIKFLNQQEKEIKLEIQDIVNKDPELKKELENICTIPGVGILTAVIVIAETNGFELIRSKKQITSYAGLDIKEKQSGTSIRSKTRISKKGNRNLRKAMHLPSLSAVKYNKNHKELYLRLVSKSGIKMKGLIAVQRKLLELIYVVYKNKQGFNQNYEQQKRATLLEIETAL

SEQ ID NO: 17430 - protein, 388 aa, unidentified
  source 1..388: note = protein_7dce3aa
  REGION 4..160: note = RuvC_domain
  SITE 7: note = RuvC_P1
  SITE 58: note = RuvC_P2
  SITE 99: note = RuvC_P3
  SITE 101: note = RuvC_P4
  SITE 104: note = RuvC_P5
  REGION 263..350: note = Tnp_domain
  SITE 271: note = Tnp_P1
  SITE 301: note = Tnp_P2
  SITE 309: note = Tnp_P3
  SITE 310: note = Tnp_P4
  SITE 323: note = Tnp_P5
MIYIGIDVAKDKHDCFIVNSDGEVIKDVFTIKNNIKGFKTLLNAIPISSKEDIKIGLEATGHYSINLIRFLSDNQLPLIIFNPLQTNLFRKAHTLRKTKTDKTDAKLIALMLSSSDLKPHLNISYHLNELKSLTRHRSRIKEQSSKLKISLSRIIDIMFPELPSVVYSINQKSTYALLKKFTSTDAIANAHLTKLTTVLRNSSKGKYGKEKATEIRDAARNSIGTNSPALSFELSQTLRLITLLASEIKTIEDEIKALMNKIQSPILSVPGISHTLGSIIIAEIGDINRFDTPSQLLAYAGLDPSTYESGKFKATNTRMVKRGSPYLRWALLEAARLISMRDKTFKDYYHKKKSEGKHYFVARSHVAKKLVRVLFHLLTNNKEFVAQS

SEQ ID NO: 17431 - protein, 367 aa, unidentified
  source 1..367: note = protein_0d79312
  REGION 35..177: note = RuvC_domain
  SITE 38: note = RuvC_P1
  SITE 81: note = RuvC_P2
  SITE 116: note = RuvC_P3
  SITE 118: note = RuvC_P4
  SITE 121: note = RuvC_P5
  REGION 240..328: note = Tnp_domain
  SITE 248: note = Tnp_P1
  SITE 278: note = Tnp_P2
  SITE 286: note = Tnp_P3
  SITE 287: note = Tnp_P4
  SITE 299: note = Tnp_P5
MEWTHPLLIGLTMGHDEVATTHQKEDGSTMKITTIGLDIAKSVFHFVGVNKAGKLVKKKMIKRKDLIHFFAQVEPSLVVMEACGGANYWAREFQKVGHEVKLIAPQYVIPYRPGNKNDYNDALAIAEAAQRANMRFVQPKPVEQQDVQMLHRMRERLNKQSTALVNQVRGMLAEYGIVIAKSKAAFRKAFPDILSDENNELTVKGRYIFNQLHEEFTDIEKRLKSCDTQIVEERNTNPVCLRIETSPGIGPVTSTAFYAAVGEGKDFSNGRHFSAWCGLVPRQHSSGGKDNLLGISKRGNAYLRTLFIHGARAVLQHCGGKQDRLSRWAYALAERKGFNKACVAVANKLARITWAIAAREDEYRTFA

SEQ ID NO: 17432 - protein, 343 aa, unidentified
  source 1..343: note = protein_20cbf21
  REGION 7..149: note = RuvC_domain
  SITE 10: note = RuvC_P1
  SITE 53: note = RuvC_P2
  SITE 88: note = RuvC_P3
  SITE 90: note = RuvC_P4
  SITE 93: note = RuvC_P5
  REGION 212..302: note = Tnp_domain
  SITE 220: note = Tnp_P1
  SITE 250: note = Tnp_P2
  SITE 258: note = Tnp_P3
  SITE 259: note = Tnp_P4
  SITE 271: note = Tnp_P5
MMEISTIGLDLAKSVFQLHGVDTAGNGVFRKALRRRQILPFFAELSPCLVGIEACGTSHYWARELIRLGHEVRLMPPAYVKPYVKRGKTDAADAEAICEAVSRPTMRFVPVKSAEQQAALALHRTRDLLVKQRTQLVNMIRGLLAEFGIEMARGLHHALALAKRLAAGEAPEVPLLAERIVAGLARQIGDLQVRLTALEKELLAWHRSSELSQRLATIPGVGVISATALAASVIEPERFRSGRQFAASLGLTPLANCSGGKERLGKISRMGDRYLRRLLVIGMTSLVRRAKAKPDSVDPRLAAMLQRRPPRVVTVAAANRTARVAWAIMTKGGTYRTPIMVAA

SEQ ID NO: 17433 - protein, 344 aa, unidentified
  source 1..344: note = protein_70d066f
  REGION 7..149: note = RuvC_domain
  SITE 10: note = RuvC_P1
  SITE 54: note = RuvC_P2
  SITE 89: note = RuvC_P3
  SITE 91: note = RuvC_P4
  SITE 94: note = RuvC_P5
  REGION 213..296: note = Tnp_domain
  SITE 221: note = Tnp_P1
  SITE 250: note = Tnp_P2
  SITE 258: note = Tnp_P3
  SITE 259: note = Tnp_P4
  SITE 271: note = Tnp_P5
MSTIKVVGIDLAKNIFQVCVWMEDGTVASNRKIPRQKLLDTLRVFPPKTLIAMEACATSHYWGRTLQSMGYHVRLIPTQHVKAFSHHQKNDANDALAICETACRPGIHFVPIKTVEQQDIKALRNARQLMVEQRTALANQIRAFLAEQGIIVPVGIQTLQQHLPDILEEGDNDLSCVLRRLLHRLWEDLRNLNVSIHEMDNEIMALSRQQAGYGHLLTIPGVGPLIAAAFVSDVSASQFANGRQLSAWCGLVPRQHSSGGKSRLSSLSKHGNRHLRTLIIHGARAMMQGVQKRDDPLGEWLRTRITRCGPIKAIVALANKLTRIIWRILTDEVDYDMKKAFAIH

SEQ ID NO: 17434 - protein, 409 aa, unidentified
  source 1..409: note = protein_a790f8c
  REGION 5..164: note = RuvC_domain
  SITE 8: note = RuvC_P1
  SITE 61: note = RuvC_P2
  SITE 101: note = RuvC_P3
  SITE 103: note = RuvC_P4
  SITE 106: note = RuvC_P5
  REGION 272..358: note = Tnp_domain
  SITE 280: note = Tnp_P1
  SITE 311: note = Tnp_P2
  SITE 319: note = Tnp_P3
  SITE 320: note = Tnp_P4
MRLFVGDDWAEDHHDVEVMDEAGKVLARKRLPEGAAGIAQLHALVGAHLGEDGDGADVLVGIETDRGPWVAALAAAGYRVFAVNPLQAARFRDRHGVSGAKSDAGDAHALADMVRTDSHQLRAAAGDTPEAQAIKVLARAHKTMIWERTRAVQRLRHQLREYFPAALEAFDDLDAPDALELLARAPEPAIAAKLTRAQVSAALKRAGRRNVTDRATAILAALRSEQLGQPPALTAAYAAAVRSLVAVIVTLNEQVKLLQGQVEEDFGRHPDAEIILSQPGLGPILGARVLAEFGDDPGRYADGKARRNYAATSPITRASGKKKVVAARFVHNDRLVDALNAQAFAALTASPGARAFHDQQRAAGHGHNDALRRLANRLVGILHGCLKTRTLYDEDTAWAHRQAQTQQAA

SEQ ID NO: 17435 - protein, 407 aa, unidentified
  source 1..407: note = protein_d95d191
  REGION 4..162: note = RuvC_domain
  SITE 7: note = RuvC_P1
  SITE 60: note = RuvC_P2
  SITE 101: note = RuvC_P3
  SITE 103: note = RuvC_P4
  SITE 106: note = RuvC_P5
  REGION 275..361: note = Tnp_domain
  SITE 283: note = Tnp_P1
  SITE 313: note = Tnp_P2
  SITE 321: note = Tnp_P3
  SITE 322: note = Tnp_P4
  SITE 334: note = Tnp_P5
MYYVGIDVAKEKHYVCVLDEDKELACKPFWIYSDITGLNELVKRLTELSDDYEQFLLAIESTGAYSENIYEYLTDMELKTILLNSYQTAKYRDFSTMKKVKNDSIDAYVIAELIASDKYKESHISSETYHTLKVLNRSKKSLDDKIKTIQREISTVMAIVNPEITLVFKNIFTKTAIAIIKDYPTAKDLQVTTPKKLCKIFRHIKGNNFNEDKAKILIENAINSIYSGRAKYARSLMITTNITILELLMQEKSFLENEIQTLIDNNQDDNFNNGIKNIKTIPGIADKTISAILGECGDLTRFDTAKSFIGYLGLYPTQYQSGNSHTVGRLAQRGIPIAKHALYMAAVSSVRHNTEMLKIFRDKVSSGKSKKEALIIISKKLASMIYSIFKYNTTYNPNRVLVSYYRK

SEQ ID NO: 17436 - protein, 340 aa, unidentified
  source 1..340: note = protein_14454ab
  REGION 5..156: note = RuvC_domain
  SITE 8: note = RuvC_P1
  SITE 56: note = RuvC_P2
  SITE 97: note = RuvC_P3
  SITE 99: note = RuvC_P4
  SITE 102: note = RuvC_P5
  REGION 220..306: note = Tnp_domain
  SITE 228: note = Tnp_P1
  SITE 258: note = Tnp_P2
  SITE 266: note = Tnp_P3
  SITE 267: note = Tnp_P4
  SITE 278: note = Tnp_P5
MTIIIGIDPHKATHTAVAIGSDESELATVTIRATRQQTDKLLSWAEPFEERTWAIESAGGLGYLLAQQLVEASEQVLDVPATLASRVRVLGSGRSNKNDPNDARSVAIAALRSPGLRAVSIADHAEVLRLLAKRNGDIGDHRTQVVCRLHALIAALEAGGIAKELNASDANGLLGTFEPSSPAERTRHQLALELLADVRHLDGQLAESKQRIKVAVSASGTSLTEVFGIGPVIACSLIGYTGDVSRFASRDQFAAYNGTAPIEVSSGGRVAHRLSRRGNRNLNHAIHMVAICQIRHTHSEGRAYFDRKVAEGKTKREAIRSLKRQISNTVYRHLVLDAAK

SEQ ID NO: 17437 - protein, 366 aa, unidentified
  source 1..366: note = protein_4148f73
  REGION 13..166: note = RuvC_domain
  SITE 16: note = RuvC_P1
  SITE 64: note = RuvC_P2
  SITE 105: note = RuvC_P3
  SITE 107: note = RuvC_P4
  SITE 110: note = RuvC_P5
  REGION 228..313: note = Tnp_domain
  SITE 236: note = Tnp_P1
  SITE 266: note = Tnp_P2
  SITE 274: note = Tnp_P3
  SITE 275: note = Tnp_P4
  SITE 286: note = Tnp_P5
MSAVLTIDRRVVIAIDPHKASWTAVAVGESLQPLATLRVSVSRDGYRSLRRFARAWHASMWAIEGAHGMGAPLTAQLVHDGVDVMDVPAKLAARVRLLSTGHGRKNDDADAVSVGIAALNAAHLTTVTVDDAATALRAIVEHREDLVKTRTQTINRLHVLLTKLSPGGASGTLTAERAATLLGAIRPRDAAAKALRALAVDMVAEVRHLDRRIAKAAGDIQSAVTTSGTTLTELHGIGTVSAAKIISRVGHVHRFRSAAAFATYTGTAPIEVSSGDVVRHRLSRAGDRQLNACLHVMALTQIRSDTPGRTYYQRKRSEGKSKREAMRCLKRRLSDAVYRQLTRDAHPDEADPGGHSGATLLSRAIG

SEQ ID NO: 17438 - protein, 359 aa, unidentified
  source 1..359: note = protein_453edbd
  REGION 15..156: note = RuvC_domain
  SITE 18: note = RuvC_P1
  SITE 61: note = RuvC_P2
  SITE 96: note = RuvC_P3
  SITE 98: note = RuvC_P4
  SITE 101: note = RuvC_P5
  REGION 219..281: note = Tnp_domain
  SITE 227: note = Tnp_P1
  SITE 257: note = Tnp_P2
  SITE 265: note = Tnp_P3
  SITE 266: note = Tnp_P4
MPHNSSRRLEAVATIGIDIGKNTFHLVGLDSNGAIVLRQKLSRRQVEARLANMPPCLIGMEACVGAHHLGRQLKALGHDARLMPARYVRPYSKGQKNDFRDAEAIAEAVLRPTMKFVAIKTVEQLDLQALHRVRERLVCQRTSVINQIRAFLLERGIAVRQGLRALRTEMPIILAMTDKLSPRMIHMIEALCTDWRHLDRRIETVSDEIKTLSEQDDGAKRLMTVPGIGPIISTATVAAIGSGDAFSKGRDFGAWLGLVPRQMSTGGRTILGPNVVRPGSPSRSTAPAELGEAWPQILDRGCSPPAQPVQAGDCARQQNRPHRLGCSPWRSQLRGQADEAGAPSRVNQDEALAIRRNAM

SEQ ID NO: 17439 - protein, 264 aa, unidentified
  source 1..264: note = protein_7d1e16c
  REGION 7..149: note = RuvC_domain
  SITE 10: note = RuvC_P1
  SITE 53: note = RuvC_P2
  SITE 88: note = RuvC_P3
  SITE 90: note = RuvC_P4
  SITE 93: note = RuvC_P5
  REGION 209..263: note = Tnp_domain
  SITE 217: note = Tnp_P1
  SITE 247: note = Tnp_P2
  SITE 255: note = Tnp_P3
  SITE 256: note = Tnp_P4
MENIALIGIDLGKNSFHIHCQDHRGKAVYRKKFTRPKLIEFLATCPATTIAMEACGGSHFMARKLEELGHFPKLISPQFVRPFVKSNKNDFVDAEAICEAASRPSMRFVQPRTESQQAMRALHRVRESLVQDKVKTTNQMHAFLLEFGISVPRGAAVISRLSTLLEDSSLPLYLSQLLLKLQQHYHYLVEQIKDLESQLKRKLDEDEVGQRLLSIPCVGTLTASTISTEIGDGKQYASSRDFAAATGLVPPTVQHGRSDDIVRD

SEQ ID NO: 17440 - protein, 261 aa, unidentified
  source 1..261: note = protein_ce74977
  REGION 7..149: note = RuvC_domain
  SITE 10: note = RuvC_P1
  SITE 53: note = RuvC_P2
  SITE 88: note = RuvC_P3
  SITE 90: note = RuvC_P4
  SITE 93: note = RuvC_P5
  REGION 209..257: note = Tnp_domain
  SITE 217: note = Tnp_P1
  SITE 247: note = Tnp_P2
MENIALIGIDLGKNSFHIHCQDHRGKAVYRKKFTRPKLIEFLATCPATTIAMEACGGSHFMARKLEELGHFPKLISPQFVRPFVKSNKNDFVDAEAICEAASRPSMRFVQPRTESQQAMRALHRVRESLVQDKVKTTNQMHAFLLEFGISVPRGAAVISRLSTLLEDSSLPLYLSQLLLKLQQHYHYLVEQIKDLESQLKRKLDEDEVGQRLLSIPCVGTLTASTISTEIGDGKQYASSRDFAAATGLVPRQYSTEVGRHC

SEQ ID NO: 17441 - protein, 334 aa, unidentified
  source 1..334: note = protein_be09847
  REGION 7..149: note = RuvC_domain
  SITE 10: note = RuvC_P1
  SITE 53: note = RuvC_P2
  SITE 88: note = RuvC_P3
  SITE 90: note = RuvC_P4
  SITE 93: note = RuvC_P5
  REGION 209..299: note = Tnp_domain
  SITE 217: note = Tnp_P1
  SITE 247: note = Tnp_P2
  SITE 255: note = Tnp_P3
  SITE 256: note = Tnp_P4
  SITE 268: note = Tnp_P5
MENIALIGIDLGKNSFHIHCQDHRGKAVYRKKFTRPKLIEFLATCPATTIAMEACGGSHFMARKLAELGHFPKLISPQFVRPFVKSNKNDFADAEAICEAASRPSMRFVQPRTESQQAMRALHRVRESLVQDKVKTTNQMHAFLLEFGISVPRGAAVISRLSTLLEDSSLPLYLSQLLLKLQQHYHYLVEQIKDLESQLKRKLDEDEVGQRLLSIPCVGTLTASTISTEIGDGKQYASSRDFAAATGLVPRQYSTGGRTTLLGISKRGNKKIRTLLVQCARVFIQKLEHQSGKLADWVRELLCRKSNFVVTCALANKLARIAWALTARQQTYEA

SEQ ID NO: 17442 - protein, 321 aa, unidentified
  source 1..321: note = protein_f2aa895
  REGION 5..127: note = RuvC_domain
  SITE 31: note = RuvC_P2
  SITE 66: note = RuvC_P3
  SITE 68: note = RuvC_P4
  SITE 71: note = RuvC_P5
  REGION 190..278: note = Tnp_domain
  SITE 198: note = Tnp_P1
  SITE 228: note = Tnp_P2
  SITE 236: note = Tnp_P3
  SITE 237: note = Tnp_P4
  SITE 249: note = Tnp_P5
MAEKVVIRKQLRRSQVLAFFKALPPCLVGMEACATAHYWARELTKLGHQVRLMPAKDVKAYVKRNKNDAADAEAICEAVRRPTMRFVQVKSAEQQGQLMQHRTRDLLMRQRTQVINALRAHLAELGIASAQGREGLKELLKIVASDADERLPADAQASLIVLAAELRAMQTLIGSIEKRIVTQHRGNEASKRLRTIPGIGIIGATAIAATVTDPKAFRSGRDMAAWIGLVPRQDSTGGKQRLGPISKQGDRYLRRILVVGAHSVLRRAKLNPQKHPWLTQLLARRPFKVVAVALANKMARMAWALLAKGGAYRAPALAATA

SEQ ID NO: 17443 - protein, 324 aa, unidentified
  source 1..324: note = protein_9743f29
  REGION 7..149: note = RuvC_domain
  SITE 10: note = RuvC_P1
  SITE 53: note = RuvC_P2
  SITE 88: note = RuvC_P3
  SITE 90: note = RuvC_P4
  SITE 93: note = RuvC_P5
  REGION 209..296: note = Tnp_domain
  SITE 217: note = Tnp_P1
  SITE 247: note = Tnp_P2
  SITE 255: note = Tnp_P3
  SITE 256: note = Tnp_P4
  SITE 268: note = Tnp_P5
MENIALIGIDLGKNSFHIHCQDRRGKAVYRKKFTRPKLIEFLATCPATTIAMEACGGSHFMARKLEELGHSPKLISPQFVRPFVKSNKNDFVDAEAICEAASRPSMRFVQPRTESQQAMRALHRVRESLVQDKVKTTNQMHAFLLEFGISVPRGAAVISRLSTILEDNSLPLYLSQLLLKLQQHYHYLVEQIKDLESQLKRKLDEDEVGQRLLSIPCVGTLTASTISTEIGDGKQYASSRDFAAATGLVPRQYSTGGRTTLLGISKRGNKKIRTLLVQCARVFIQKLEHQSGKLADWVRDLLCRKSNFVVTCALANKLARIARP

SEQ ID NO: 17444 - protein, 257 aa, unidentified
  source 1..257: note = protein_6f2e2da
  REGION 1..77: note = RuvC_domain
  SITE 16: note = RuvC_P3
  SITE 18: note = RuvC_P4
  SITE 21: note = RuvC_P5
  REGION 167..253: note = Tnp_domain
  SITE 175: note = Tnp_P1
  SITE 205: note = Tnp_P2
  SITE 213: note = Tnp_P3
  SITE 214: note = Tnp_P4
  SITE 226: note = Tnp_P5
MLIKEFAKSLSLRKTKTDKKDAHGIALKLLSDPNREQFQHDNRQVELKILTRHIHRLKKKQSDWKVQYTRCLDIIFPELDKIVGKHSEYTYQLLTRYPNPQKRIEAGFDKLIEIKRLTASKIQDILSVAPRSIGTTSPAREFEIIKHYKRLIDKAETCVNDLMAEFNSVITTVTGIENRLGAVILAEIRNIHAFDNPAQLQAFAGLDSSIYQSGQIDLAERMVKRGSPHLRWALIQAAKACPRFSPAFKAYLKTKLE

SEQ ID NO: 17445 - protein, 312 aa, unidentified
  source 1..312: note = protein_44bef2f
  REGION 1..76: note = RuvC_domain
  SITE 14: note = RuvC_P3
  SITE 16: note = RuvC_P4
  SITE 19: note = RuvC_P5
  REGION 181..268: note = Tnp_domain
  SITE 189: note = Tnp_P1
  SITE 220: note = Tnp_P2
  SITE 228: note = Tnp_P3
  SITE 229: note = Tnp_P4
  SITE 241: note = Tnp_P5
MVNRASEGYRGDGKTDAKDAAVIADQARIRHDLTPLRAGDELVSELKVLTRHRRDLSDDRTRTINRLRGHLTEIFPGLERELDLGNIGPLVLLSGYQTPAAIRRTGRRRLATWLRNRKVRSPDELAGKAVQAAEGQHTAVPGEDITAHVVHSLAGEVMALNEKIAETDKLIEGRFRRHRNAEVIASMPGIGVLLGAEFLAATGGDMGAFAGPDRLASFAGVSPVPRDSGKVSGNLHRPTRYSRRLQRVFYTSALISIRCCDESRRFYDRKRAEGKRHSQAVMALARRRVNVLWALLRDGRCYDPTPPVTLAA

SEQ ID NO: 17446 - protein, 340 aa, unidentified
  source 1..340: note = protein_54780fe
  REGION 7..149: note = RuvC_domain
  SITE 10: note = RuvC_P1
  SITE 53: note = RuvC_P2
  SITE 88: note = RuvC_P3
  SITE 90: note = RuvC_P4
  SITE 93: note = RuvC_P5
  REGION 211..297: note = Tnp_domain
  SITE 219: note = Tnp_P1
  SITE 249: note = Tnp_P2
  SITE 257: note = Tnp_P3
  SITE 258: note = Tnp_P4
  SITE 270: note = Tnp_P5
MSSIQILGIDLGKHSFHVVGHNHLGKEVLRKKYSRNQLISFIAKLEPTIIAFEACGGSHWLARKCIDLGHQAKLIPPQYVKPYVKGNKNDFIDAAAIAEAASRPSMRFVAVKTEDAQVIATIHRIRDGYIKERTACMSRIGAILLEFGLSLPKGHAKMKALFQWLAEQNQELPPSLLNELCSIHEHYSYLSQQIKKQDIKLHDISENNELARLLKTIPGIGDLTSTLCIADVSSSNNFVNGRNMAAWLGLVPRQFSTGGKPKLLGVSKRGNKQLRTLFVHGARAVLSRPDTTGKVFGQWLVNLRATKPFNVVVVALANKLARIAWAVLQHRQAFKAAKQP

SEQ ID NO: 17447 - protein, 399 aa, unidentified
  source 1..399: note = protein_a798514
  REGION 4..160: note = RuvC_domain
  SITE 7: note = RuvC_P1
  SITE 57: note = RuvC_P2
  SITE 97: note = RuvC_P3
  SITE 99: note = RuvC_P4
  SITE 102: note = RuvC_P5
  REGION 273..361: note = Tnp_domain
  SITE 281: note = Tnp_P1
  SITE 311: note = Tnp_P2
  SITE 319: note = Tnp_P3
  SITE 320: note = Tnp_P4
  SITE 333: note = Tnp_P5
MIGIGIDISKNKSTVSAINDTGEIIMKPQEFKHSENELNKLIQWIKDQEDTVFVVMESTGHYHYPVLKKLYEEGIYVSVVNAYLMKKYGDIEIRKAKTDKKDAIRIAKYAIEKRFSLKKYEGEDEKYNDLKFLSRQYNQIVSIRVKAKIQFNNLLDEIMPGINKILTRTTGNSSKILYDFVEKYEHFDNIKRKGEQKFIKEYSAWSKKKGYRNGAIKALKIYELAQNSITTRSANNSTYIALKNCIKILRETEESSNSILTQMQTIAYTLPEYKIVRELKGVGDKLAPRLIAEIGDVRKFTSAKALNAYAGNDAPPHQSGQFEGTKRHISKRGSSSLRKVGYEIMMALKVTKPTEDNAVYEFMIKKESEGKAKNVAKMAALNKFLRIYYTRVMNLYKTL

SEQ ID NO: 17448 - protein, 318 aa, unidentified
  source 1..318: note = protein_7c752ae
  REGION 13..155: note = RuvC_domain
  SITE 16: note = RuvC_P1
  SITE 59: note = RuvC_P2
  SITE 94: note = RuvC_P3
  SITE 96: note = RuvC_P4
  SITE 99: note = RuvC_P5
  REGION 218..302: note = Tnp_domain
  SITE 226: note = Tnp_P1
  SITE 256: note = Tnp_P2
  SITE 264: note = Tnp_P3
  SITE 265: note = Tnp_P4
  SITE 277: note = Tnp_P5
MAIRNKPHDAAVFGIDLGKNLFHDCGLDAAGTPVQRATFRRETLVQFFQRAAPTVVGMEACPGSQWLARKLQAIGHTVRIVPAKFVKPYIKSNKNDQIDAEAIAEAVSRPTMRFVEVKSPEQVDLQALHRVRDRLVAQRTRVICQMRAFCLEYGIAMHQGAGRFKSDFPAVLADESNDLTPAMRRLLASLFEDVRGLEARIAEVTREIEDVAATDDTARRLMTIPGIGPLAATGLLAAAGKGTQFRKGRHMAAWLGLVPREYSTGGKTTMLGISKRGSSYLRRLFVHGARSCLLHLDRTRVVITKPGTIYERRAPASA

SEQ ID NO: 17449 - protein, 340 aa, unidentified
  source 1..340: note = protein_88143ee
  REGION 6..148: note = RuvC_domain
  SITE 9: note = RuvC_P1
  SITE 52: note = RuvC_P2
  SITE 87: note = RuvC_P3
  SITE 89: note = RuvC_P4
  SITE 92: note = RuvC_P5
  REGION 210..296: note = Tnp_domain
  SITE 218: note = Tnp_P1
  SITE 248: note = Tnp_P2
  SITE 256: note = Tnp_P3
  SITE 257: note = Tnp_P4
  SITE 269: note = Tnp_P5
MQITTIGLDIAKNVFQVHGVDGEGRVVLRRKVRRDQLLVLLGGLEPCLVGMEACATAHHWARELAALGHEVKLMPPAYVKAYVKRNKNDAADAEAICEAVRRPTMRFVAVKSVDAQSILMLHRARHLLVRQRTAQVSALRAHLAEYGIIAPKGRAHVRELIEALDRGEGMLPVIARQVLILIARMIESLSEQIRKIEIELMAWHRTNQTCRRLETIPGIGFITATALAATVVDAKVFRSGRQFAAWLGLVPRQHSSGGKERMGGISKMGDRYLRHLLVVGATAIVRYTRRKATAVSVWANHLLERKPARLVTVAVANKMARIAWAVMAREENYRKAEATV

SEQ ID NO: 17450 - protein, 337 aa, unidentified
  source 1..337: note = protein_d8d8df3
  REGION 8..150: note = RuvC_domain
  SITE 11: note = RuvC_P1
  SITE 54: note = RuvC_P2
  SITE 89: note = RuvC_P3
  SITE 91: note = RuvC_P4
  SITE 94: note = RuvC_P5
  REGION 212..300: note = Tnp_domain
  SITE 220: note = Tnp_P1
  SITE 250: note = Tnp_P2
  SITE 258: note = Tnp_P3
  SITE 259: note = Tnp_P4
  SITE 271: note = Tnp_P5
MEQEVVTVGLDLAKTVFQVHVIAADGAVLIRRKLRRTEVIRFFAKLSPCLVGMEACASAHHWARELIAIGHEVRLMPPAYVKPYVKRGKTDAADAEAICEAVTRPTMRFVAVKSVEQQAVLMLHKSRDLIVRQRTMLINALRGHLAEYGIVTGLGAGGVVDALKALYEEQDRFPAHARSALHGIAAQLRALASEIDRLEAQILDWHRNDETSRRLATIPGIGPITASAIAAAVPDPSLFRSGRQFAAWLGLTPRANSSGGKERLGGITKQGDGYLRRLLVVGSTAVMRMTRKNPARQPWMAGLLERKPTKIATVALANKTARIAWAVMTRKEVYAAA

SEQ ID NO: 17451 - protein, 410 aa, unidentified
  source 1..410: note = protein_fea2a68
  REGION 6..170: note = RuvC_domain
  SITE 9: note = RuvC_P1
  SITE 63: note = RuvC_P2
  SITE 109: note = RuvC_P3
  SITE 111: note = RuvC_P4
  SITE 114: note = RuvC_P5
  REGION 282..368: note = Tnp_domain
  SITE 289: note = Tnp_P1
  SITE 319: note = Tnp_P2
  SITE 327: note = Tnp_P3
  SITE 328: note = Tnp_P4
  SITE 341: note = Tnp_P5
MNPLYVGIDVSSKSNVVFLMKPDGSKHSCFPVKNSLDGSRQLVKRILHTLSSESLTDVIIGLEATSVYGDNLVCFLRDDGSLTPFNRKIHVLNPKQVAKFKLSYNDLPKNDYVDSFVIADCLRFGRINKEVYLDDYRYKALQNLTRARFFAVQNLVKEKQRFLNYLFKKYSTMAQEKIFSDTFSTTALAVYEKFESAEALAEMDLQQLTDFIIKNGKNRFPDPDAVAKAIQKAARSSYRLPKTVNDSVNQVLSISISSIRAMEQQIKAFDKAIAEQMALIPNTLTSIKGIGPVFSAGIIAEIGDINRFPNQAALAKYAGLAWKQHQSGDFEAQNTRMIPSGNRYLKYYLGEAAMSLVRCDAEYSRFYRLKYKEVNKYQHKRALALTARKFVRLVFRLLKDNCLYRAPESN

SEQ ID NO: 17452 - protein, 260 aa, unidentified
  source 1..260: note = protein_022fe00
  REGION 1..77: note = RuvC_domain
  SITE 16: note = RuvC_P3
  SITE 18: note = RuvC_P4
  SITE 21: note = RuvC_P5
  REGION 170..256: note = Tnp_domain
  SITE 178: note = Tnp_P1
  SITE 208: note = Tnp_P2
  SITE 216: note = Tnp_P3
  SITE 217: note = Tnp_P4
  SITE 229: note = Tnp_P5
MLIKEFAKSLSLRKTKTDKKDAHGIALKLLSDPNREQFQHNNRQVELKILTRHIHRLKKKQSDWKVQYTRCLDIIFPELDKIVGKHSEYTYQLLTRYSNPQKRLEAGFDKLIEIKRLTASKIQDILSVAPRSIGTTSPAREFEIIEIIKHYKRLIDKAETCVNDLMAEFNSVITTVTGIGGRLGAVILAEIRNIHAFNNPAQLQAFAGLDSSIYQSGQIDLAGRMVKRGSPHLQWALIQAAKACARFSPAFKAYLKTTLE

SEQ ID NO: 17453 - protein, 339 aa, unidentified
  source 1..339: note = protein_cdb8df5
  REGION 7..163: note = RuvC_domain
  SITE 10: note = RuvC_P1
  SITE 63: note = RuvC_P2
  SITE 101: note = RuvC_P3
  SITE 103: note = RuvC_P4
  SITE 106: note = RuvC_P5
  REGION 206..292: note = Tnp_domain
  SITE 214: note = Tnp_P1
  SITE 244: note = Tnp_P2
  SITE 252: note = Tnp_P3
  SITE 253: note = Tnp_P4
  SITE 265: note = Tnp_P5
MKTVCTVGIDISSQWLDVALVVDPSAKPLSLFRVKNSQEGIESMFKRLKKEVPAGSPPWFCMEHTGNYGLLLCCLLQEKGMTYSVIPAREIQQSLGVTRGKSDRTDAERIGVYALIHHHKLRPFVIPQKSILQLKELISYRASLVQQHTQNVNSLKSRSKLNIVIDNHLVTEDLEQHIQRLEKSIKAVNEAIEKVIASDPELKQNFDLIQSVKGIGLIAATMMLVITQNFTQFDDGRKFACYAGTAPFEHSSGLTKGRTRVHPMANKQMKAILLNGANSAMIYDPEIRVYCQRKKAEGKHHKVIANAVACKLINRVFAVIKRKTPFVLTYEKKINQNVA

SEQ ID NO: 17454 - protein, 374 aa, unidentified
  source 1..374: note = protein_5b9824e
  REGION 10..72: note = RuvC_domain
  SITE 13: note = RuvC_P1
  SITE 64: note = RuvC_P2
  REGION 218..306: note = Tnp_domain
  SITE 226: note = Tnp_P1
  SITE 257: note = Tnp_P2
  SITE 265: note = Tnp_P3
  SITE 266: note = Tnp_P4
  SITE 277: note = Tnp_P5
MLKIVYSVCCGIDVHKTFIYCCIATTDNKGITTYKSNRFSTFTNQLKRCATWLKEKECKDICMESTGKYWIADLFKHDLINSSFIPPADIHQLRDLTRYRNKLTIFIVGEKNRAQNCLTVSNIKLDYVFTYVFGKASSSIINALLLNPSEKITDVSKFRTRGMKSTDEEILAAIDGNICNEQAEKLKIIRSHMDSIEECKANLESVILNLAEKYLPKLNLILSVLGIKSFSAVSIILEIGVDMSVFPTSKHLCSWAGLTSQNNESAGKKKTTRISRGGAYIKPLLVQCALAAVKSNKHPKIRNRYLALKKRRGHKKAIIAIARTLLTAIYNILKKNEPYNPDLYKKSDLPPQHKTVSFDEAVFILQRQGYIITS

SEQ ID NO: 17455 - protein, 410 aa, unidentified
  source 1..410: note = protein_e490a32
  REGION 10..158: note = RuvC_domain
  SITE 13: note = RuvC_P1
  SITE 64: note = RuvC_P2
  SITE 98: note = RuvC_P3
  SITE 100: note = RuvC_P4
  SITE 103: note = RuvC_P5
  REGION 254..342: note = Tnp_domain
  SITE 262: note = Tnp_P1
  SITE 293: note = Tnp_P2
  SITE 301: note = Tnp_P3
  SITE 302: note = Tnp_P4
  SITE 313: note = Tnp_P5
MLKIVYSVCCGIDVHKTFIYCCIATTDNKGITTYKSNRFSTFTNQLKRCATWLKEKDCKDVCMESTGKYWIPVYNILELSCNIVLTHPKYVKAIKGKKTDKRDAKWIADLFKHDLINGSFIPPADIHQLRDLTRYRNKLTIFIVGEKNRAQNCLTVSNIKLDYVFTYVFGKASSSIINALLLNPSEKITDVSKFRTRGMKSTDEEILAAIDGNICNEQAEKLKIIRSHMDSIEECKANLESVILNLAEKYLPKLNLILSVLGIKSFSAVSIILEIGVDMSVFPTSKHLCSWAGLTSQNNESAGKKKTTRISRGGAYIKPLLVQCALAAVKSNKHPKIRNRYLALKKRRGHKKAIIAIARTLLTAIYNILKKNEPYNPDLYKKSDLPPQHKTVSFDEAVFILQRQGYIITS

SEQ ID NO: 17456 - protein, 294 aa, unidentified
  source 1..294: note = protein_5680752
  REGION 1..77: note = RuvC_domain
  SITE 16: note = RuvC_P3
  SITE 18: note = RuvC_P4
  SITE 21: note = RuvC_P5
  REGION 170..256: note = Tnp_domain
  SITE 178: note = Tnp_P1
  SITE 208: note = Tnp_P2
  SITE 216: note = Tnp_P3
  SITE 217: note = Tnp_P4
  SITE 229: note = Tnp_P5
MLIKEFAKSLSLRKTKTDKKDAHGIALKLLSDPNREQFQHDNRQVELKILARHIHRLKKKQSDWKVQYTRCLDIIFPELDKIVGKHSEYTYQLLTRYPNPQKRLEAGFDKLIEIKRLTASKIQDILSVAPRSIGTTSPAREFEIIEIIKHYKRLIDKAETCVNDLMAEFNSVITTVTGIGGRLGAVILAEIRNIHAFDNPAQLQAFAGLDSSIYQSGQIDLAGRMIKRGSPHLRWALIQAAKACARFSPAFKVYLKTKLEQGKHYNVAIIHLAKKLIRTLFYILKKSCHLTNKK

SEQ ID NO: 17457 - protein, 337 aa, unidentified
  source 1..337: note = protein_484bdaa
  REGION 6..151: note = RuvC_domain
  SITE 9: note = RuvC_P1
  SITE 52: note = RuvC_P2
  SITE 90: note = RuvC_P3
  SITE 92: note = RuvC_P4
  SITE 95: note = RuvC_P5
  REGION 210..296: note = Tnp_domain
  SITE 218: note = Tnp_P1
  SITE 248: note = Tnp_P2
  SITE 256: note = Tnp_P3
  SITE 257: note = Tnp_P4
  SITE 269: note = Tnp_P5
MTIMTVGIDLAKNVFSLHGVDENGKAALRRTVRRDQLLELIATLPPCVIAMEACSGAHHWARQFAAFGHTSKLIAPKFVTPYRMSGKHGKNDAADAAAICEAATRPNMRFVPLKTIDQQGTLCVHRVRQGFIEERTSTINRVRGLLSEFGIVLPQSANTVRRQATAALEDLPGWANRAIGDLLSHLHALDLRIVDYDAHLKAAAQADERSRKLMTTPGIGPTTASALVAAIGNAHDFKNGRQLAAWLGLVPKQYSTGGKFRLGGITKAGDAYLRTLLILGARSVLANAPGKTDRISRWALAVQQRAGYGKALVAIAAKNARIAWAMLSKGEAFRSIA

SEQ ID NO: 17458 - protein, 372 aa, unidentified
  source 1..372: note = protein_42accc4
  REGION 35..178: note = RuvC_domain
  SITE 38: note = RuvC_P1
  SITE 83: note = RuvC_P2
  SITE 118: note = RuvC_P3
  SITE 120: note = RuvC_P4
  SITE 123: note = RuvC_P5
  REGION 242..329: note = Tnp_domain
  SITE 250: note = Tnp_P1
  SITE 280: note = Tnp_P2
  SITE 288: note = Tnp_P3
  SITE 289: note = Tnp_P4
  SITE 301: note = Tnp_P5
MGWTPPHLIGIYVPDWKRYPPVNSEKESKMKIIRVGVDLAKNVFQVHGVDGSEKPVWRRKLNRAEWLKVLLEKIEPGCELGMEACGGTHHWARRLQAQGYEVRLIAPQFVKPYVKSNKNDANDAEAICEAMSRPNMRFVSVKTVEQQDIQAVHRVRFELSNQRKAKANQIRGLVAEYGLVAPKELRQLRGALPGWLEDGENGLSDRFRRLLNGLWHDLLGLDQRVTELDGEIAQIAATDPVAKRLQQLRGVGPMIATAMVATVGDVKHFAKARQMAASLGLTPRQNSTGGKERLLGISKRGDTYLRTLLIHGARATLRTAKDKDDRLSRWVTRIAQTRHPNVAAVALANKTARIAWAMMKNGTQYQPNRVAP

SEQ ID NO: 17459 - protein, 315 aa, unidentified
  source 1..315: note = protein_7c3a391
  REGION 8..149: note = RuvC_domain
  SITE 11: note = RuvC_P1
  SITE 54: note = RuvC_P2
  SITE 94: note = RuvC_P3
  SITE 96: note = RuvC_P4
  SITE 99: note = RuvC_P5
  REGION 189..273: note = Tnp_domain
  SITE 197: note = Tnp_P1
  SITE 226: note = Tnp_P2
  SITE 234: note = Tnp_P3
  SITE 235: note = Tnp_P4
  SITE 246: note = Tnp_P5
MAPAPWFVGIDVSKAQLDIALRPEGRFVVPNDETGLAHVVERLRALPVALIVLEATGGLELPLSGALVAAGLPVVVANPRQVRDFAKATGKLAKTDPLDAQMLAHFADVIRPVPRPLPDEQMQALAALLARRRQLIEMLTAEKNRLGSAPPLVHQRLHAHITWLEREVAQAERALAHAIHESPIWREKDDLLRTVPGVGPGLARTLIVDLPELGTLSRKQIAALVGVAPLNRDSGTLRGKRTVWGGRAHVRAALYMAARVGARCNPVIRSFYQRLCDAGKAKKVALTACMRKLLTILNAMMKHRTRWSMNEIVCS

SEQ ID NO: 17460 - protein, 334 aa, unidentified
  source 1..334: note = protein_1f9405c
  REGION 1..137: note = RuvC_domain
  SITE 37: note = RuvC_P2
  SITE 76: note = RuvC_P3
  SITE 78: note = RuvC_P4
  SITE 81: note = RuvC_P5
  REGION 248..317: note = Tnp_domain
  SITE 256: note = Tnp_P1
  SITE 286: note = Tnp_P2
  SITE 294: note = Tnp_P3
  SITE 295: note = Tnp_P4
  SITE 307: note = Tnp_P5
MVNGEKVHGYTMPNDSIGFHRLLGDLKTFHKLEIVFEATGVYSRRLQAFLEDNGYAYTRLNPLEAKKQLDSLRVRKTDKIDAEKLAQSQFILNRKTTYVQEEVYQNLRDLSRFYQHLTEDIVCAKNRLHKVLQVTFPELENFLSASTGEQYWNLVIAFPSKEFVLHLTQSQLNNSIRQSTTKRISDKRATYLADKLKELAKQSYCAVKKTSPILEEVRYYAKELLRLSDRRKAVLDDRVKLAQSLPEYEILLSIPGIAETTATAIIGELGDIRRFRSANQINAFIGIDLGHYESGNFLAKERITKRGNPYARKDSLQVYSQHRFCQPHQALPYR

SEQ ID NO: 17461 - protein, 302 aa, unidentified
  source 1..302: note = protein_9954466
  REGION 1..72: note = RuvC_domain
  SITE 7: note = RuvC_P3
  SITE 9: note = RuvC_P4
  SITE 12: note = RuvC_P5
  REGION 175..262: note = Tnp_domain
  SITE 183: note = Tnp_P1
  SITE 213: note = Tnp_P2
  SITE 221: note = Tnp_P3
  SITE 222: note = Tnp_P4
  SITE 235: note = Tnp_P5
MEGGITKNDKLDTITICDVLDTPERKKQYRITKVDRFDLYEQRQLTRHHHNLKEELNVYCNRLQKSIDLVFPEFNTLFSSKYSIVYMNLLKTFGSAEAIASTDIRTIRKCFEIKGRGNRISLTPEKLKECAKNSIGISSEVETIQIKHLVSQITLIKEQIAEIDKKIEEFSITNNSPILSIPGISHFSGTSILAELGDIGNYSKPSQIIKFAGVAPYHYESSQYNVQHTGITKKGSKYLRKTLYQIILTVINNNPVFKKYYLLKISQGKGHRCAQGHCIRKLLRIIYHLLETGQSFDPALLR

SEQ ID NO: 17462 - protein, 343 aa, unidentified
  source 1..343: note = protein_2d1f882
  REGION 6..147: note = RuvC_domain
  SITE 9: note = RuvC_P1
  SITE 52: note = RuvC_P2
  SITE 87: note = RuvC_P3
  SITE 89: note = RuvC_P4
  SITE 92: note = RuvC_P5
  REGION 211..298: note = Tnp_domain
  SITE 219: note = Tnp_P1
  SITE 249: note = Tnp_P2
  SITE 257: note = Tnp_P3
  SITE 258: note = Tnp_P4
  SITE 270: note = Tnp_P5
MTISMLGIDIAKNTFQLHGADKSGKAVYKKRLARRELAAHVANLPACTIVMEACGGANYWARVFQGSGHSVKLVSPQFVKPFVKTNKNDANDALAIVEAASRPSMHFVPIKQVEQQDIQSIHRMRTRIVKNRTALINEIRGLCMEYGVILAPGAARVKSSLCVAIADGDNELTASSRESMQYLYEELVDVETRVRKLDIRIRQLCRQNENCQRILKIPGVGELTATAIVAAVPVPGEFRNGRHMSAWLGLVPRQSSSGDKQTLLGISKRGDRYLRTLLIHGARAVLSHYKDRDNDYTRWVGRKKATLSHNKAAVALANKNARIIWSMLSTGKEFDIGVQATAA

SEQ ID NO: 17463 - protein, 341 aa, unidentified
  source 1..341: note = protein_10d9fc3
  REGION 7..149: note = RuvC_domain
  SITE 10: note = RuvC_P1
  SITE 53: note = RuvC_P2
  SITE 88: note = RuvC_P3
  SITE 90: note = RuvC_P4
  SITE 93: note = RuvC_P5
  REGION 211..295: note = Tnp_domain
  SITE 219: note = Tnp_P1
  SITE 249: note = Tnp_P2
  SITE 257: note = Tnp_P3
  SITE 258: note = Tnp_P4
  SITE 270: note = Tnp_P5
MEKISIIGLDLAKNVFQAHGADACGAVVFRKKLRRDQVLTFFASQPACVVAMEACASAHYWAREIAKLGHTTRLIAAHYVKPFVKRQKNDAADAEAICEAAQRPTMRFVTIKNEEKQASAVVFRTRDLLVRQRIQTINALRGHLAEYGVVVRQGPVHVAMLIAHVQDPECDLPETARAILSILVETLQSLETKIKILDAEIARRAKSDDGAKRLMTIPGVGPVVATAIEALAPPMEIFRTGRDFAAWLGLTPLQHSTGGKQRLGKTSKMGERTMRRLLTIGASSVVRQAAIRGAPAGSWLARMLAKKPRMLVIVALANKMARIVWALMVKGGIYRTPAVAA

SEQ ID NO: 17464 - protein, 334 aa, unidentified
  source 1..334: note = protein_4209389
  REGION 6..147: note = RuvC_domain
  SITE 9: note = RuvC_P1
  SITE 51: note = RuvC_P2
  SITE 86: note = RuvC_P3
  SITE 88: note = RuvC_P4
  SITE 91: note = RuvC_P5
  REGION 208..300: note = Tnp_domain
  SITE 216: note = Tnp_P1
  SITE 246: note = Tnp_P2
  SITE 254: note = Tnp_P3
  SITE 255: note = Tnp_P4
  SITE 267: note = Tnp_P5
MTFDMVAIDLGKLSFHLHGVSSDGVVLSRKVSRAKLFAVVTELAPAIIAMEACPSAHYWGRRFQEAGRHVRLIHPRFVKPFVRGAKNDAIDAEAIFEAASRPTMRFVPVKTIVQQDLQAVHRIRDRLICQRTALINQVRGLLAEYGIILAKGPSRLTTEGPAAVADAGLSDLAREVFVDLFDQLRDLERRIGALDTRLVAICRENAASRRLATVPGVGPVIATALVASIDDGRHFRSGRQLAAWIGLVPRQYTTGGKPKLGGIGKQANHYLRRQMIHGARSVAFRASGRGDVRSRWLQALVARRGFNRAIVALANKTARIAWALLTRQEVYQTA

SEQ ID NO: 17465 - protein, 346 aa, unidentified
  source 1..346: note = protein_e6ffb15
  REGION 6..148: note = RuvC_domain
  SITE 9: note = RuvC_P1
  SITE 52: note = RuvC_P2
  SITE 87: note = RuvC_P3
  SITE 89: note = RuvC_P4
  SITE 92: note = RuvC_P5
  REGION 211..296: note = Tnp_domain
  SITE 219: note = Tnp_P1
  SITE 249: note = Tnp_P2
  SITE 257: note = Tnp_P3
  SITE 258: note = Tnp_P4
  SITE 270: note = Tnp_P5
MNITTIGIDLAKNVFQVHGVDERCKAQLRKQLKRTQMMNFFVNLPPCLIGMEACGSAHFWARKLAELGHTVKLMAPQFVKPYVKSNKNDAADAEAICEAVARPNMRFVPIKNAEQQSLLGLHRARQGFVAARTAQANQIRGLLTEFGIVMPQRVRYLTRKMPDILEDAENGLPGASRELFSRLFGHFRELDRQVSELETQIKSWHREDTKSRRLEAIPGIGPLTASALVASVGDASTFKNGRQFAAWLGLVPRQDSSGGKERLLGISKRGDTYLRTLLIHGARSVLRHIKPQAGEPDGWLARLAIRRNPNIAAVALANKNARIVWALLAHARDYQASYWKTSAIAI

SEQ ID NO: 17466 - protein, 406 aa, unidentified
  source 1..406: note = protein_2371467
  REGION 4..163: note = RuvC_domain
  SITE 7: note = RuvC_P1
  SITE 60: note = RuvC_P2
  SITE 100: note = RuvC_P3
  SITE 102: note = RuvC_P4
  SITE 105: note = RuvC_P5
  REGION 271..357: note = Tnp_domain
  SITE 279: note = Tnp_P1
  SITE 310: note = Tnp_P2
  SITE 318: note = Tnp_P3
  SITE 319: note = Tnp_P4
MLFVGDDWAEDHHDVELQDVQGRGLAKARLEEGIAGIARLHELIGRQLDENAEADQVVIGIETDRGPWVQALIAAGYRVYAINPLQVARFRESTSVSGAKSDPADAHTIADMVRLQHHQLRPVAGDTAEAEAIKVVARAHKTLIWERNRHMLRLRHALREFFPSALAAFGDLAGADALELLAKAPDPDSAARLTTAQITAALKRARRHHVADKAQKIRAALRAEQLGQPAIVTSAYSATVRAQAAILTTLNEQIKSMQEQVEAHFGRHPDAEIIVSQPGLGMILGARVLAEFGDDPDRYASAKARKNYAGTSPITRASGRKHVVTARYVHNDRLIDALGRQAYAAMICSPGSRAYYDQQRARGLGHHAAVRQLANRLVGILHGCLRTGTTYDEATAWSHRTEQVAA

SEQ ID NO: 17467 - protein, 344 aa, unidentified
  source 1..344: note = protein_610e3cf
  REGION 5..152: note = RuvC_domain
  SITE 8: note = RuvC_P1
  SITE 55: note = RuvC_P2
  SITE 92: note = RuvC_P3
  SITE 94: note = RuvC_P4
  SITE 97: note = RuvC_P5
  REGION 212..296: note = Tnp_domain
  SITE 220: note = Tnp_P1
  SITE 250: note = Tnp_P2
  SITE 258: note = Tnp_P3
  SITE 259: note = Tnp_P4
  SITE 271: note = Tnp_P5
MKHYAGIDVSLECSSVCVVDAEGRIVREAKVLSEPEALIAWFAGLDLTLERIGLEAGPLSQWLYAAMTAAGLVVELLETRHVRAAFKTMPVKTDRKDARGIAQLMRMGWFRPVWCKSLAAQEVRAVLTARKLVQGKLHDVEMSLRGVLRGFGLKVGKTTPNTFEARVLSLVEDHPTLQEIATALLKVRSILDQAFKGFERRVGQLARQDQNARRLMSTPGVGVIVALTYVSAIDDLERFKSSRALGPHFGLTPKKYQSGETDYTGRISKHGDASVRTALYEAAHVILTKPVKGSDLKTWALGVAKRSGMPKAKIALARKLAVVLHRMLRDGSDFVAHKAVVMAA

SEQ ID NO: 17468 - protein, 342 aa, unidentified
  source 1..342: note = protein_c2690bd
  REGION 6..152: note = RuvC_domain
  SITE 9: note = RuvC_P1
  SITE 53: note = RuvC_P2
  SITE 91: note = RuvC_P3
  SITE 93: note = RuvC_P4
  SITE 96: note = RuvC_P5
  REGION 211..299: note = Tnp_domain
  SITE 219: note = Tnp_P1
  SITE 249: note = Tnp_P2
  SITE 257: note = Tnp_P3
  SITE 258: note = Tnp_P4
  SITE 270: note = Tnp_P5
MTIVTLGIDLAKNVFAVHGVDAAGKPALVRPNVARSKLLELIASLPPCLIGMEACSGAHHWAREFAQFGHTVRLMAPKFVAPYRLSGKRGKNDAADAIAICEAVTRPTMRFVPIKSVEQQGQLMLHRARQGFVEQRTATFNRIRGLLSELGIVLPVKAAVVRREALAHLEALPGWANIVVGDLLSEINRLDERIAQYDQHIQAMAGQSAPAQRLMRLAGIGEITATAIVSTVGNGHEFACGRQFCAWLGLVPGQYSSGGKARLGRITKAGDPYLRSLLVMGARAVLALAMRKDHPRQDSLSRWARGVAERRGYWRAIVAIAAKNARLCWAVLHHGERFKVPA

SEQ ID NO: 17469 - protein, 403 aa, unidentified
  source 1..403: note = protein_d398bc5
  REGION 6..159: note = RuvC_domain
  SITE 9: note = RuvC_P1
  SITE 57: note = RuvC_P2
  SITE 98: note = RuvC_P3
  SITE 100: note = RuvC_P4
  SITE 103: note = RuvC_P5
  REGION 221..306: note = Tnp_domain
  SITE 229: note = Tnp_P1
  SITE 259: note = Tnp_P2
  SITE 267: note = Tnp_P3
  SITE 268: note = Tnp_P4
  SITE 279: note = Tnp_P5
MTKVFIGVDPHKLSATIEVVDDRETVLATGRFSTDKAGYAAMRKHVAAYRERVWAVEGSNGAGRPLAQRLLADGEYVVDVPAKLSARARALDTGHNRKTDAHDAHAVAVVAVRTTGLRVLAYDVELEALRMLVARREELTRARVQTLNRLQRLLSELIPGKTKKDLTPLQAKRILASVRPRDLAGKTRKGLALEQLAELVGIDAKIKERTKELKAMVKASGSRLMELTGVGPVVAARVLADVGDVARFPDRSRFASWTGTAPIAASSGEIVRHRLSRAGNRRMNHMIHIAATTQIRLNTPGRAYYLRKLAAGKTKAEAMRCLKRRISDALYRQLLADARAAAPAAAETGPGGHRGASHESSAAGLHPHTGTSDQPLPGPAQPTLPPTPPRRKATAKKTLQPAG

SEQ ID NO: 17470 - protein, 440 aa, unidentified
  source 1..440: note = protein_41d70ae
  REGION 37..200: note = RuvC_domain
  SITE 40: note = RuvC_P1
  SITE 94: note = RuvC_P2
  SITE 140: note = RuvC_P3
  SITE 142: note = RuvC_P4
  SITE 145: note = RuvC_P5
  REGION 313..399: note = Tnp_domain
  SITE 320: note = Tnp_P1
  SITE 350: note = Tnp_P2
  SITE 358: note = Tnp_P3
  SITE 359: note = Tnp_P4
  SITE 372: note = Tnp_P5
MILIREVADAPDIMGISGPADLKSSRGEVKILNQLFVGIDVSSKNNVAYLMKPDGSKHSSFSVQNNLGGTKLLSERIVSALNAMQLSDVAIGLEATSIYGDSLVYALREDGSLGRFVRKIHVLNPKQVKKFKDAYSDLPKNDFVDAFVIADHLRFGRINREVYMDDYRYKALQTLTRARFDAVQNLTREKQRFGNYLFLKCSGLAQEKTLSQNTSATTIALMEQFETVDELAYADLETLTAFIAKSGHGKFSDPAATAKAVQAAARGSYRLPKTVRDSVNQALSVTVVAIRALESQIKTLDKAIEQQFEIIPNTLTSIPGIGKVYSAGIIAEIGDINRFDAQASVAKFAGLVWTQHQSGDFEAQHTKLIKSGNRYLRYYLLEAANSVRRCDSEFRRYYGLKFKEVNQFQHKRALALTARKLVRLVFRLLKDNRLYIPSER

SEQ ID NO: 17471 - protein, 347 aa, unidentified
  source 1..347: note = protein_3471c12
  REGION 13..165: note = RuvC_domain
  SITE 16: note = RuvC_P1
  SITE 65: note = RuvC_P2
  SITE 106: note = RuvC_P3
  SITE 108: note = RuvC_P4
  SITE 111: note = RuvC_P5
  REGION 208..294: note = Tnp_domain
  SITE 215: note = Tnp_P1
  SITE 245: note = Tnp_P2
  SITE 253: note = Tnp_P3
  SITE 254: note = Tnp_P4
  SITE 267: note = Tnp_P5
MTNRSQLNGEVFAGLDVSAREISVARLRSKEGTPTVASFANNASGHKALLAYLLQGTEHVRVCLEASGNYSLDLALALHAHRHVEVSVVNPRRARRFAESLGQRSKTDPVDARVLCQYAVRMPWVAWRPPTARALRLRAITPAIESLGVMHTQEKNREHALKASLALPCLVIREMRRHQRYLEHRMEQLRREARRLIAKDPELDRRFRLMVTVPGVAETSALQILGELVVLPDGLDARQWVAFSGLDPSQFTSGTSVEKKPRISRGGSRHLRHALYMPALVALRREPHLRAFYQRLVSRGKARLQAVVAVMRKLLHALFAMFRSDQTYDGSKLCSHELPATVTTSCA

SEQ ID NO: 17472 - protein, 340 aa, unidentified
  source 1..340: note = protein_0f3f9e9
  REGION 7..149: note = RuvC_domain
  SITE 10: note = RuvC_P1
  SITE 53: note = RuvC_P2
  SITE 88: note = RuvC_P3
  SITE 90: note = RuvC_P4
  SITE 93: note = RuvC_P5
  REGION 211..297: note = Tnp_domain
  SITE 219: note = Tnp_P1
  SITE 249: note = Tnp_P2
  SITE 257: note = Tnp_P3
  SITE 258: note = Tnp_P4
  SITE 270: note = Tnp_P5
MATVALLGIDLGKHCFHLHGQDVRGRQVLRKKLTRTHLLPFLAQLPACVIAMESCGGAHWLARQISVHGHRVKLIAPQHVRPFVTGNKNDYLDAEAICEAACRPKTRYVSVKTTEQQLLSTEHRIRESLVRRRTATINQIHGFLLEFGIALPNTLSALAQVPMLLENSDNDLPLRFQQLMLKLWDDIQQLTSEIKSLDHSLQSRLRQDEMAARLLSVPGIGPVTATAVVANVGDASHFRSSRDFAASLGLVPRQYSTGGGTVLYGISKRGDSYLRRLFVQCARSIMRKVECRSDPLGAWIRDLMIRKHPNKVACALANKLARMSWAVLRRGTSYNPQYLA

SEQ ID NO: 17473 - protein, 340 aa, unidentified
  source 1..340: note = protein_74f6154
  REGION 7..148: note = RuvC_domain
  SITE 10: note = RuvC_P1
  SITE 53: note = RuvC_P2
  SITE 88: note = RuvC_P3
  SITE 90: note = RuvC_P4
  SITE 93: note = RuvC_P5
  REGION 210..295: note = Tnp_domain
  SITE 218: note = Tnp_P1
  SITE 247: note = Tnp_P2
  SITE 255: note = Tnp_P3
  SITE 256: note = Tnp_P4
  SITE 268: note = Tnp_P5
MGEIKRIAIDTSKSVFTLHGVDGQERPILRRNLRRQELVAFFERLPPTEVVLEACGGSHHWARTLQALGHTVRLIPPQYVKPFVKRAKNDRNDAEAISEAAARPEMRCVPLKSAERQAQAMLLSVRELLVRQRTQLVNALRGHAAEFGLVAPLGDKGAARLLAEAAGDASLPHAAAAALALLGREIARLAARLAEIDAKLIAQHKAMPTSRLLAGIPGVGPIGALSLTLRVDPGQFKSGRHFASWLGLVPRERSSGGKQRMGGISRAGDERLRQLLVLGATAVIRHAKPGRASVSAWLLSLLQRRPRKLAAVALANKMARIAWAMMTSGEAYRRPSPAAA

SEQ ID NO: 17474 - protein, 267 aa, unidentified
  source 1..267: note = protein_63ee810
  REGION 7..149: note = RuvC_domain
  SITE 10: note = RuvC_P1
  SITE 53: note = RuvC_P2
  SITE 88: note = RuvC_P3
  SITE 90: note = RuvC_P4
  SITE 93: note = RuvC_P5
  REGION 211..267: note = Tnp_domain
  SITE 219: note = Tnp_P1
  SITE 249: note = Tnp_P2
  SITE 257: note = Tnp_P3
  SITE 258: note = Tnp_P4
MGEVSIIGLDLAKTVFQAHGADASGEVIFRKKLRRDQVLAFLASQPRCVVAMEACASAHYWAREIATLGHETRLIPPAYVKPFVKRQKNDMADAEAICEAAQRPTMRFVAPKSAEAQGAAVVFRTRDLLVRQRTQLINALRGHLAEFGFIVRQGPGHVGKLVDLVFDPSSELPAEARPVLAVLAESLQAIQARIAVLDRDIAARAKTDPVVKRLMTIPGIGPIIATALVTLAPAPSTFRRGRDFAAWLGLTPKQHSSGGKDRGQARG

SEQ ID NO: 17475 - protein, 342 aa, unidentified
  source 1..342: note = protein_cc39aba
  REGION 5..152: note = RuvC_domain
  SITE 8: note = RuvC_P1
  SITE 55: note = RuvC_P2
  SITE 92: note = RuvC_P3
  SITE 94: note = RuvC_P4
  SITE 97: note = RuvC_P5
  REGION 212..298: note = Tnp_domain
  SITE 220: note = Tnp_P1
  SITE 250: note = Tnp_P2
  SITE 258: note = Tnp_P3
  SITE 259: note = Tnp_P4
  SITE 271: note = Tnp_P5
MDHYAGIDVSLECSSVCVVDANGKILREARVASEPEALIAWFASLGFGLERIGLEAGPLSQWLFAAMREAGLAVELLETRHVRKAFEAMPVKSDRNDARGIAQLMRLGWFRPVHCKSISAQETRTLLTARKLVQSKLHDVENSLRGILRGFGLKVGKTTEREFAGRIEELVVGHPHLQVIANALLAVRAVLRKEFAAFEKQVRKMARSDTRARLLMSTPAVGPIVALTYASAIDDPTRFKSSKQAGAHFGLTPKKHQSGETDYTGRISKIGDSSVRTALYEAAHIMLTKPLKGCSQLKSWAMRIARRAGMSKAKVALARRLAVIMHRMLADGTPFNAAATAA

SEQ ID NO: 17476 - protein, 339 aa, unidentified
  source 1..339: note = protein_78fcedf
  REGION 6..147: note = RuvC_domain
  SITE 9: note = RuvC_P1
  SITE 52: note = RuvC_P2
  SITE 87: note = RuvC_P3
  SITE 89: note = RuvC_P4
  SITE 92: note = RuvC_P5
  REGION 210..297: note = Tnp_domain
  SITE 218: note = Tnp_P1
  SITE 248: note = Tnp_P2
  SITE 256: note = Tnp_P3
  SITE 257: note = Tnp_P4
  SITE 269: note = Tnp_P5
MKYIPVGVDIAKHLIQVHFINEHTGEVVDKQLRSKDFLTFFSNREPSLIGMEACGGSQHWARELKKLGHKVRLLQARFVKAFVMGNKNDVMDARAIWMAVQQPCKEIAVKTEEQQSVLVLHRSRNQLVKFRSAQINAIHGTLLEFGETVHKGRTAMSKEFPAALERMKAKLPPYLITALEDQYNRLSELDMQIDGLEKQLNSVARQNETCKRLMEIPGIGPLIATAAVATMGEASAFKSGREFAAYIGLVPKQTGSGGKVRLLGISKRGDKYLRTLFIHGARAASLLAKEPGPWITELKKRRPTGVAIVAMANKLARTLWAIAAHNRKYDKNYVSIKPI

SEQ ID NO: 17477 - protein, 401 aa, unidentified
  source 1..401: note = protein_da6e654
  REGION 4..160: note = RuvC_domain
  SITE 7: note = RuvC_P1
  SITE 57: note = RuvC_P2
  SITE 97: note = RuvC_P3
  SITE 99: note = RuvC_P4
  SITE 102: note = RuvC_P5
  REGION 275..362: note = Tnp_domain
  SITE 283: note = Tnp_P1
  SITE 313: note = Tnp_P2
  SITE 321: note = Tnp_P3
  SITE 322: note = Tnp_P4
  SITE 335: note = Tnp_P5
MISVGIDVAKGKSTVCILKPYGEIVSKPFDISHVEKDLGELAAMLLRFDDEVKVVMEATGIYHLPVLTYLQEKGLFVAVINPYLMKVYRSGDLRKAKTDKIDSRIIANYGIEHWFTMAEFKASDDVYGELKMLGQQYRHYMKLHIMSLHELTHLLDYTMPGIKGMLASWNEGNRKDKLSDFVERFWHYDTITCLSETEFIKQYTFWAKEKKYHQSQDKAQAIYALAREGIPTLSSETPSVKMLVTEAVRVLKEVDATLSIILSRMQELAKSLPEYSVVRGMGGVGEVLAPKLIAEIGDVRRFHSGKALIAYAGIDTPPYESGQFAGSNRKITKRGSAALRKVGYETMRCIKSHPRPDDPVYQYIVKKEAEGKAKKAAKIAGLNKFLRIYYARVKEVYTDIK

SEQ ID NO: 17478 - protein, 344 aa, unidentified
  source 1..344: note = protein_6dbd815
  REGION 7..150: note = RuvC_domain
  SITE 10: note = RuvC_P1
  SITE 54: note = RuvC_P2
  SITE 89: note = RuvC_P3
  SITE 91: note = RuvC_P4
  SITE 94: note = RuvC_P5
  REGION 213..297: note = Tnp_domain
  SITE 221: note = Tnp_P1
  SITE 250: note = Tnp_P2
  SITE 258: note = Tnp_P3
  SITE 259: note = Tnp_P4
  SITE 271: note = Tnp_P5
MNTIRVVGIDIAKSVFQVCVWMVDGSIAYNKKISRSKLLDCVRHFESGTLIAMEACSTSHFWGRTFRTMGYNVRLIPAQHVKAFVRSQKNDANDALAICETALRPGIHFVPVKTAEQQDIKALRNTRQLMVEQRTALANQLRSLLAEYGLIIPVGIQCLQQNLPELMEDASNELTFTVRRLLSTLREDMQALNERVTGLDKEIAALSSQQAAYRQLLTIPGVGPLIAAAFISEVDAGQFSNGRELSAWCGLVPRQHSSGGKQRLSSVTKNGNRSLRTLIIHGARSVMRCMKKRDDSLGLWLQRLEARRGFLKTTVALANKLTRIIWRVLTDGVDFNMQKAVAMN

SEQ ID NO: 17479 - protein, 314 aa, unidentified
  source 1..314: note = protein_5121609
  REGION 2..148: note = RuvC_domain
  SITE 5: note = RuvC_P1
  SITE 52: note = RuvC_P2
  SITE 92: note = RuvC_P3
  SITE 94: note = RuvC_P4
  SITE 97: note = RuvC_P5
  REGION 182..268: note = Tnp_domain
  SITE 190: note = Tnp_P1
  SITE 219: note = Tnp_P2
  SITE 227: note = Tnp_P3
  SITE 228: note = Tnp_P4
  SITE 240: note = Tnp_P5
MIGIDVSKATLAVACWDVSREEVVWACELPNTAEGLAELVARTVPGDCWALEPTGAYSKLAVETAWRHGRRPLLTPPKAARKFLLSVNPRAKNDKLDAKGIARYAAVVALRPFVLKQPSMEELSQLLTVRKSLSASLAAFRQQAHALPRREAELSPVICTLQQQLRAIDRQLAERARREPAVKRLQAIPGVGLVSASALVLRLQMTPFVSYDAFVAFLGLDLRVSDSGQHRGRRRLSRHGDAELRRLLYCCAQASVRAKDSPFRSQYERERAKGLPTTGALCAVARKMAKVAWALVRSGQEYDPARVYHSRLVD

SEQ ID NO: 17480 - protein, 401 aa, unidentified
  source 1..401: note = protein_746dd8a
  REGION 10..164: note = RuvC_domain
  SITE 13: note = RuvC_P1
  SITE 62: note = RuvC_P2
  SITE 102: note = RuvC_P3
  SITE 104: note = RuvC_P4
  SITE 107: note = RuvC_P5
  REGION 270..356: note = Tnp_domain
  SITE 278: note = Tnp_P1
  SITE 308: note = Tnp_P2
  SITE 316: note = Tnp_P3
  SITE 317: note = Tnp_P4
  SITE 329: note = Tnp_P5
MTAHRDIAWVGIDVGKTHHWACTVDAEGKTVSSIKVANNEADIVALITDAGSQATQLVWAIDIIGAPSALLLALLARADQSVRYAPGRVVAAMSAAYAGEGKTDAKDAYVIAETARLRRDLSVVDTDTDLVRNLAVLTGHRADLIADRVRMINRLRDLMTSVFPSLERAFDYSSHKGALVLLTAYVTPDQIRRIGQVRLTGWLRNRRVRGSADVAARAIAAAKAQTVVLPGQELTASIIAELATAILGLDDRLKALDAQIEATFAQHPQAAIIQSMPGFGPFLGASLLVGANDLRAFPSAGHLAAAAGLVPVPNDSGRRTGNLHRPSRYSRSLRHVFYLSAQTSMMRTGPNRDYYLKKRARGATHSQAVIALARRRIDVLWALLRENRTWSAESPPLAQAA

SEQ ID NO: 17481 - protein, 394 aa, unidentified
  source 1..394: note = protein_bed95e1
  REGION 4..164: note = RuvC_domain
  SITE 7: note = RuvC_P1
  SITE 59: note = RuvC_P2
  SITE 99: note = RuvC_P3
  SITE 101: note = RuvC_P4
  SITE 104: note = RuvC_P5
  REGION 267..354: note = Tnp_domain
  SITE 275: note = Tnp_P1
  SITE 305: note = Tnp_P2
  SITE 313: note = Tnp_P3
  SITE 314: note = Tnp_P4
  SITE 327: note = Tnp_P5
MILVGIDIGKNQHTFSIIDKGTGEILSNPSVFNNNQEGFLSLIKKLSDYAKSELLIGMEDTGHYHFALLKYLLDSHYTVALINPATTDLTRKLQGGITKNDSLDSLTICDVISSNHRKKPYRITKVNRFDLYEQKQLTRHHHNLKEELNIYKNRLQKCIDIVFPEFNSLFRSKYGIVYMNVLKTFASAKKIADSDIQTIRECFEYNRRGKRISLSAEQLKAAAKTSVGIHSVAEEIQIRHLVRQIEMIEEQLSEIDKKIEEFSLQNDSPILSIPGISHFSGTSILAELGDICNYTKASQIIKFAGVAPYHHESSQFTAQHTAITKKGSRYLRKTLYQIILTVINNNKVFTAYYNKKLAEGKGHRCAQGHCIRKLLRIIYHLLSTGQTFDPDLLR

SEQ ID NO: 17482 - protein, 342 aa, unidentified
  source 1..342: note = protein_6ad47e9
  REGION 6..146: note = RuvC_domain
  SITE 9: note = RuvC_P1
  SITE 52: note = RuvC_P2
  SITE 87: note = RuvC_P3
  SITE 89: note = RuvC_P4
  SITE 92: note = RuvC_P5
  REGION 211..298: note = Tnp_domain
  SITE 219: note = Tnp_P1
  SITE 249: note = Tnp_P2
  SITE 257: note = Tnp_P3
  SITE 258: note = Tnp_P4
  SITE 270: note = Tnp_P5
MHITSIGIDLGKTTFHLVTLGEQSKVLARKKFSRKQLLTYTANLPASLIGMEACSGAHFIAAAIRGQGHDVRLIPGQFVKPFLKSNKNDFLDAEAIAEAVARQNMRFVPIKTDEQLDLQALHRVRDRLVQRRTAVINQIRGFLIERGITFAKRPANLRNNMAALLEDSEANLSPRMRRLLEAVWQEWKQLEAHIAEADDEIERIASADAACQRLRQIPGVGPLTSTATVAAIGNGAAFRKGRDFAAWLGLVPKQRSTDGKARLFGISKRGNEYLRRMFIHGARAVLYRVKYDTGGFGRWVHQLETRAPRNKVIVAIANKLARIAWAVLSSGEVYQHQPVVTA

SEQ ID NO: 17483 - protein, 412 aa, unidentified
  source 1..412: note = protein_40b8523
  REGION 9..162: note = RuvC_domain
  SITE 12: note = RuvC_P1
  SITE 63: note = RuvC_P2
  SITE 101: note = RuvC_P3
  SITE 103: note = RuvC_P4
  SITE 106: note = RuvC_P5
  REGION 257..344: note = Tnp_domain
  SITE 265: note = Tnp_P1
  SITE 296: note = Tnp_P2
  SITE 304: note = Tnp_P3
  SITE 305: note = Tnp_P4
  SITE 316: note = Tnp_P5
MKDLLEISCGLDVHKEKIVACILTGPLGKPTRSEIREFSTLIPDMIALRNWIVSKNCHHVAMESTGIYWMPIYEILEDAFYGDITLLVVNARHMKNVPGKKTDMRDSEWISTLLRAGLLNGSFIPEKRIREFRDLNRYRKSVIRDITSQKNRIEKFLQSSGFRLSSFISDIFGASGRNIILHLIEHGQIDKTALDSCLKTKTRNRIDEILMSVNGTLSEHQKAFLRILMTHYDSLKKHLAEIETSLEEDMAPFALQVEQLNSIYGISTTASCAIIAEIGIDMKPFKTAEHICSWAGLCPGNNESAGKRKSTSVTKGNPYIKSMLCEIAWVIAGKRNTYLSAWYWRIKQKKGAKKAIVALARKLLVIIYTMLKQGTLFDESCFETRRKHCEQKQLSRYIRELEKHGYHVEAQS

SEQ ID NO: 17484 - protein, 400 aa, unidentified
  source 1..400: note = protein_2305488
  REGION 6..161: note = RuvC_domain
  SITE 8: note = RuvC_P1
  SITE 60: note = RuvC_P2
  SITE 99: note = RuvC_P3
  SITE 101: note = RuvC_P4
  SITE 104: note = RuvC_P5
  REGION 273..361: note = Tnp_domain
  SITE 280: note = Tnp_P1
  SITE 310: note = Tnp_P2
  SITE 318: note = Tnp_P3
  SITE 319: note = Tnp_P4
  SITE 332: note = Tnp_P5
MKYVLVLDIAKGKSMFMLSSDVGEVLLEPTEYIHNKTNFESIDSYINKLDIKDNLTVVMEATSIYHKAPERFFKENNYHVIVFNPLIGKEITNTIRKTKTDKQDCIKLADLFWKGSIPDRNYTEEEIYTRLNELSRQYYHLDEGLTRHKNRYKELLHLCFPEFELCFKDGKIYDLTALNFIKEFPHTYIIKEKRVDALAYNMANTNNRHLNYYKRKANTIKEYALNSYPGVNKNSKDVDNLKQLVKIIIDITKKKDEVKNQMIEIAKQTKYFNNIASIFGIADLSAALIIAELKDITRFNNIKQINASCGLDPTIVQSGKSINYHGPISKRGNRYARKILFNCSRNIVTISAKCDKENPIYIYYQKKKQEGKHYYACLTACSTKLIRIIYALCMNNSTQN

SEQ ID NO: 17485 - protein, 343 aa, unidentified
  source 1..343: note = protein_23580da
  REGION 6..148: note = RuvC_domain
  SITE 9: note = RuvC_P1
  SITE 52: note = RuvC_P2
  SITE 87: note = RuvC_P3
  SITE 89: note = RuvC_P4
  SITE 92: note = RuvC_P5
  REGION 211..298: note = Tnp_domain
  SITE 219: note = Tnp_P1
  SITE 249: note = Tnp_P2
  SITE 257: note = Tnp_P3
  SITE 258: note = Tnp_P4
  SITE 270: note = Tnp_P5
MQVVRIGLDLAKYVFEVHGVDKHGNVVVRKRLRRDAVARFFANLPACLVGMEASNGAHYWARVLTALGHQVRLISPQFVTPYVKSNKNDRNDAEAICEAVGRPSMRFVPPKSVEQLAVQAVHRVRRRLVSDRVKLVNQVRGLLAEHGIVIPRDITQLRRGLAEIMAGCDDGLSELVRSLMRDLREELAELDRRIASYDRRIREIFRNSEPCQRLGKIEGIGPITATALIAAVGDRTCFKNGRQFAAWLGLVPKQRSSGGRIRLFGISKRGDRYLRTLMIYGARAALGRAGGKQDPRSLWLGKLRQRRHPNVAAVALANKNARIVWSMLSGNAAYQPDLSVKAA

SEQ ID NO: 17486 - protein, 411 aa, unidentified
  source 1..411: note = protein_6ad6ba0
  REGION 16..172: note = RuvC_domain
  SITE 19: note = RuvC_P1
  SITE 69: note = RuvC_P2
  SITE 109: note = RuvC_P3
  SITE 111: note = RuvC_P4
  SITE 114: note = RuvC_P5
  REGION 287..375: note = Tnp_domain
  SITE 295: note = Tnp_P1
  SITE 325: note = Tnp_P2
  SITE 333: note = Tnp_P3
  SITE 334: note = Tnp_P4
  SITE 347: note = Tnp_P5
MDINYKKILEVRMISVGIDISKGKSTVCILKPYGEIVSSPFEVRHVERELDALAQMILRLDEESRVVLEATGIYHLPVLTYLQEKGIYVAVNNPYEMKEYASRGLRRVKTDKQDSITIANYGIDNWYRLENHSAADDVYSELKLLGRQYCHYMELHVKGLLELTHMLDYTMPGIKKEFNSWNEASGKDKLSDFVECYWHYDTITAMSEEEFVADYVKWAKENKYHQNQSKAATVYELASDGIPTLSSNTPSTKMLVLEAVRVLREIDSTLKLIITRMRELAQSLPEYKVVRSMGGVGDVLAPKLIAEIGDIRRFHNGKALIAYAGIDAPPYQSGQFTGTNRKISKRGSKTLRKIGYETMRVLKTHKEPDDYAVYRFILKKEAEGKSKRQAKIAGLNKFLRIYYARVSEVYK

SEQ ID NO: 17487 - protein, 343 aa, unidentified
  source 1..343: note = protein_f0c8f36
  REGION 6..147: note = RuvC_domain
  SITE 9: note = RuvC_P1
  SITE 52: note = RuvC_P2
  SITE 87: note = RuvC_P3
  SITE 89: note = RuvC_P4
  SITE 92: note = RuvC_P5
  REGION 211..296: note = Tnp_domain
  SITE 219: note = Tnp_P1
  SITE 249: note = Tnp_P2
  SITE 257: note = Tnp_P3
  SITE 258: note = Tnp_P4
  SITE 270: note = Tnp_P5
MQIRSVGIDLGKTTFHLVALGDNGKVLLKKKFTQKQLIAFTANMQTCLIGMEACSGSHFLGRALREQGHDVKLIPAQFVKPFVKSNKNDFIDAEAIAEAVDRENMRFVPIKTDDQLDLQALHRVRDRLMARRTSLINQIRAFLLERGIVFAKSPIRLREALPEVLENVNENLTPRMRNLVAMLWSEWKDLELQIVQMNDEVERIASSDAACRRLLQIPGIGPLVATAIVASIGNGAAFRKGREFAAWLGLLPNQHSTGGKVRLYGISKRGNSYLRKILIHGARAVVLRSKRDRIAMGAWMTSLETRAPRNVLIVATAHKLARIAWAVLSTGQDYRAVPEALTV

SEQ ID NO: 17488 - protein, 353 aa, unidentified
  source 1..353: note = protein_0a5779e
  REGION 6..163: note = RuvC_domain
  SITE 9: note = RuvC_P1
  SITE 68: note = RuvC_P2
  SITE 106: note = RuvC_P3
  SITE 108: note = RuvC_P4
  SITE 111: note = RuvC_P5
  REGION 212..298: note = Tnp_domain
  SITE 220: note = Tnp_P1
  SITE 250: note = Tnp_P2
  SITE 258: note = Tnp_P3
  SITE 259: note = Tnp_P4
  SITE 272: note = Tnp_P5
MKKIVIGIDISKEKIDATAIDVRSGQLGVVKLDYQVFENKPMGYRRMLVWARNLIDGARLEDVLFCCETTGGYDRRLCDYIYAKGQSIWRESALQIKRSMGVRKGKDDKADSLMIAEYAMRHMDKAVIYESPNETVQELKALLLYRHKLIQERTEKKVRMAQLGATAAKSKSLSFILRDARKSIKSIDKSIQECEQQIIELLKTNETLKKNYDHIVSVNGIGIVNATAFIAYSNNFKSITTANKLASYWGVASFREKSGTSVDKKACVSCYSCSHLKSYLTQAAECTVRNHGIYYNYFLRMKAQGKPYRVIINNVRNKIIHLVFSLVTNDTDYEKDHEFLRTQRKISRTFEMN

SEQ ID NO: 17489 - protein, 331 aa, unidentified
  source 1..331: note = protein_c02a9f6
  REGION 7..159: note = RuvC_domain
  SITE 10: note = RuvC_P1
  SITE 59: note = RuvC_P2
  SITE 97: note = RuvC_P3
  SITE 99: note = RuvC_P4
  SITE 102: note = RuvC_P5
  REGION 202..289: note = Tnp_domain
  SITE 210: note = Tnp_P1
  SITE 240: note = Tnp_P2
  SITE 248: note = Tnp_P3
  SITE 249: note = Tnp_P4
  SITE 262: note = Tnp_P5
MEIKEVIGIDASKLTLDCCIHNSGSQEVFGNTLEDIPAMAEWSLDISGVGKQELLFVFEHTGLYTYELIQYLGGEGYLFHVVPGLEIKRSLGIARGKDDRADAKRIAQYGYRIRDEVKPYRMPSEALASLKRLMSMRGKLVAQRAGHMTTLGEQQRVLDGKINKVLFHVQKEVINTLDLQIRVVEKEMDKIMYGDPELKKLFRLLTSIKGIGAVTARFLIVYTVGFTAFRNWRKFASYCGIAPFPNRSGTSVRGRTKISHLANKEGKVLFHLCAMTAIQCVPEMRVFYQRRLKEGKNEMSTLNIVRNKLLARAFAVVKRGTPYVDTMGYAA

SEQ ID NO: 17490 - protein, 321 aa, unidentified
  source 1..321: note = protein_ad97b25
  REGION 4..149: note = RuvC_domain
  SITE 7: note = RuvC_P1
  SITE 52: note = RuvC_P2
  SITE 92: note = RuvC_P3
  SITE 94: note = RuvC_P4
  SITE 97: note = RuvC_P5
  REGION 191..278: note = Tnp_domain
  SITE 199: note = Tnp_P1
  SITE 229: note = Tnp_P2
  SITE 237: note = Tnp_P3
  SITE 238: note = Tnp_P4
  SITE 251: note = Tnp_P5
MTYVGIDVSKATFVVAYSSAKGSKTKSFKNTTKGIHEFIQTISATEHHCVLEATGNYSALLVYLLSEAGITVSLENPLKVKNFARVMLSVTKTDEIDARLIALYGEKMQPAPYKLRSDSILILKQKRTVIRQLKKQLVATRNLKGSMEALPFFDPKCKKTIEKTIAFLEKQIKELVEALAVLAQSEYKKQMDLLTTIKGIGVTLAATLIMATGGFTYFDNAKQLTRYLGLSPTYQQSGTSVNVKGHINRNGDSSLRSQLYVAAFASLRCNAECKACFDRLRSNGKPGKVAVIAVANKLVRQAFAIVTQGKPYVDGFKSAKP

SEQ ID NO: 17491 - protein, 342 aa, unidentified
  source 1..342: note = protein_d821327
  REGION 6..147: note = RuvC_domain
  SITE 9: note = RuvC_P1
  SITE 52: note = RuvC_P2
  SITE 87: note = RuvC_P3
  SITE 89: note = RuvC_P4
  SITE 92: note = RuvC_P5
  REGION 210..297: note = Tnp_domain
  SITE 218: note = Tnp_P1
  SITE 248: note = Tnp_P2
  SITE 256: note = Tnp_P3
  SITE 257: note = Tnp_P4
  SITE 269: note = Tnp_P5
MKDTVIGVDLAKTAFQIHAPSLTGELLFRKKVRRPQFLQFMASQPLALVVMEACGSAHYWARELMNAGHEVKLIAPQYVRPFVKRQKNDAADAEAIVIAARQPEMRFVVPKSEDQQTRAVLFRCRERLVRQRTELVNALRGMLYEFGLVVPKGIAHLKRIEELVRDDSIELPTLMRKECQDLLAQIDEQSIRIAEKTRAMVGLSGDSGVAQRLETMPGVGPLTALAVEAFAPSMEHFRSGRDFAAWLGLVPRQFSSGGKERLGRVSKAGQADIRRLLIMGAMAPVSWASRKPPVQGTWMARMLVRKPRMLVAIALANKMARTIWAMLTKQENYRDPVLSVVA

SEQ ID NO: 17492 - protein, 342 aa, unidentified
  source 1..342: note = protein_495a39b
  REGION 6..147: note = RuvC_domain
  SITE 9: note = RuvC_P1
  SITE 52: note = RuvC_P2
  SITE 87: note = RuvC_P3
  SITE 89: note = RuvC_P4
  SITE 92: note = RuvC_P5
  REGION 212..296: note = Tnp_domain
  SITE 220: note = Tnp_P1
  SITE 250: note = Tnp_P2
  SITE 258: note = Tnp_P3
  SITE 259: note = Tnp_P4
  SITE 271: note = Tnp_P5
MAIAILGIDLGKNSCSLVGQDATGRVVLRRRMRRETVMTFGATLPACSIAMEACCGAHHMGRALAAQGHTIRLMSPEYVRPYVKAQKNDDRDAEAIAEAATRPTMRLVALKSEAQLDMQTLHRVRDQIVSERTALMNQIRAVVLERGHIVPQGRAKLAASLESLLDTEAVSDLTPRMRSLVADVRERWQSLDGRIAALDAEFTEQARTDESARRLTTIPGIGALNATALVAAIGDVATFARGRDLAAWLGLVPRQVTTGGRPKLVGITKRGSKYLRKMLIQGARAAMPTLRKSDTRIGQLLRGLLARAHANGAVVALAAKMARTVLALLRHERVYEPAAVAA

SEQ ID NO: 17493 - protein, 341 aa, unidentified
  source 1..341: note = protein_d2fef68
  REGION 7..148: note = RuvC_domain
  SITE 10: note = RuvC_P1
  SITE 53: note = RuvC_P2
  SITE 88: note = RuvC_P3
  SITE 90: note = RuvC_P4
  SITE 93: note = RuvC_P5
  REGION 211..294: note = Tnp_domain
  SITE 219: note = Tnp_P1
  SITE 249: note = Tnp_P2
  SITE 257: note = Tnp_P3
  SITE 258: note = Tnp_P4
  SITE 270: note = Tnp_P5
MTEVTTIGLDLAKIVFQAHGADAAGTIVFRRKLRREQVLAFFAAQPPCLVAMEACPGAHHWGREIGKLGHMVKLIAPAYVKPFVKRQKNDAADAEAICEAAQRPTMRFVPVKSEEKQASAVIFRTRDVLVGQRIQIINAIRGHLSEFGLIAPQGPSHVERLITQIEDPASGVPEAARCCLVILVEALRRLQGQAKALDAEIAARAKADDTAHRLMSVPGIGPLIATALEAMASPAETFRSGRDFAAWIGLTPIQRSTGGKERLGRTSRMGERTLRRLLIIASSAVVRWAKRKGVPSGSWLHRMLARKPPMLVIVALANKTARIAWALMTKGGIYRAPSVAA

SEQ ID NO: 17494 - protein, 344 aa, unidentified
  source 1..344: note = protein_e99e151
  REGION 39..185: note = RuvC_domain
  SITE 42: note = RuvC_P1
  SITE 89: note = RuvC_P2
  SITE 129: note = RuvC_P3
  SITE 131: note = RuvC_P4
  SITE 134: note = RuvC_P5
  REGION 230..317: note = Tnp_domain
  SITE 238: note = Tnp_P1
  SITE 268: note = Tnp_P2
  SITE 276: note = Tnp_P3
  SITE 277: note = Tnp_P4
  SITE 290: note = Tnp_P5
MQGREPVSSLLSLIRFRQIPMTSIELNATAHDACLSLFAGIDVGAEDLVLVIRKNGKPFDPQKYANTPADRRRLVKKLSKLTGIIVCLEATGIYHFDLSIALHDAGVLLMVVNPKSSHNFAKVLMKNSKTDAVDAHTLAEYAARMDFVAWTRPTTEKLALRSFARRINALTGQKAAAKNHLHALNATQETPKAVLRDANLAIAQLEKRIDRLTAEALLLIAAHPELKRTLSLLVGIKGIAETSAIALMGELLLLPPGLSHREWVKFAGLDPKAFDSGKSVHKKTRLSKAGNRQLRSALYMPALSAKQHDPHVRAYFQHLVDNGMLKHDQPFDNSRFYTIPSAVG

SEQ ID NO: 17495 - protein, 344 aa, unidentified
  source 1..344: note = protein_14c8d28
  REGION 5..152: note = RuvC_domain
  SITE 8: note = RuvC_P1
  SITE 55: note = RuvC_P2
  SITE 92: note = RuvC_P3
  SITE 94: note = RuvC_P4
  SITE 97: note = RuvC_P5
  REGION 212..298: note = Tnp_domain
  SITE 220: note = Tnp_P1
  SITE 250: note = Tnp_P2
  SITE 258: note = Tnp_P3
  SITE 259: note = Tnp_P4
  SITE 271: note = Tnp_P5
MNHYAGIDVSLESSTICVVDGAGKILREAKVASEPEALIAWFRLLGIPLDRIGLEAGPLSQWLYAALREAKFAVELLETRHVRDAFKSMPVKSDRNDARGIAQLMRLGWFRPVHCKSIEAQETRAVLTARKLLQSKLRDIENSLRGVLRGFGLKVGETTERTFAGRIKELVAGHPGLEIVAQALLEAHAVLQREFGGLDKRTQKLARLHPQAKLLMTTPAVGPIVALTYASAIDDPARFRSSKATGAHFGLTPKKYQSGQTDYTGRISKIGDASVREALYQAAHVMLTKPVKNCSALKGWAMRIARRAGMRKAKVALARKLAVILHRMLADATPFNPTAKAAAT

SEQ ID NO: 17496 - protein, 341 aa, unidentified
  source 1..341: note = protein_2c058f9
  REGION 4..148: note = RuvC_domain
  SITE 7: note = RuvC_P1
  SITE 56: note = RuvC_P2
  SITE 97: note = RuvC_P3
  SITE 99: note = RuvC_P4
  SITE 102: note = RuvC_P5
  REGION 210..296: note = Tnp_domain
  SITE 218: note = Tnp_P1
  SITE 248: note = Tnp_P2
  SITE 256: note = Tnp_P3
  SITE 257: note = Tnp_P4
  SITE 268: note = Tnp_P5
MVVIGVDPHKSTHTATAVDPASNADLGSVRVEATMAEYRRLIAWARPWPQRTWAVENADGLGRHLARWLIARGETALDVPTTATARVRELSRGGRRKNDRIDAAAAACVVALQGEERPVVPDERRTNLSTNRTRSVDQLHALLRELLAGGAPTSLTANTAAAVLHRFRARTLSDRVRVGLYKDLIADVRRLDRQLSINQKDLDELLDEHGTRLRTIDGIGPVLAARLIGRTGPATRFPSAAAFANYNGTAPVEIASADRRIHRLSRYGDRQLNAAIHTIAMVQVRMNGTAGRAYYDRKVTAGSSHRAAMRCLTRHLSNIIWRTMTADATRCRRDTESCSTT

SEQ ID NO: 17497 - protein, 346 aa, unidentified
  source 1..346: note = protein_b8a5fb2
  REGION 9..149: note = RuvC_domain
  SITE 12: note = RuvC_P1
  SITE 55: note = RuvC_P2
  SITE 90: note = RuvC_P3
  SITE 92: note = RuvC_P4
  SITE 95: note = RuvC_P5
  REGION 214..296: note = Tnp_domain
  SITE 222: note = Tnp_P1
  SITE 252: note = Tnp_P2
  SITE 260: note = Tnp_P3
  SITE 261: note = Tnp_P4
  SITE 273: note = Tnp_P5
MSIASIAILGVDLGKTSCSMVGVDERGTVVLRRSLRRQTLIEYVAKLPACVIGMEACCGAHHLGRLFAASGHEVRLMSPEYVRPYVKAQKNDDRDAEGIAEAASRPTMRFVELKTQDQLDIQTLHRARSRLVAERTNLINQLRAVLFERGVSFPVGRRKLEQGIDDLLTDGDNTLSSRMSRLIAERRAEWKQLDTKIEMLNGEFVEMAGSDAAMRRLTTIPGIGVLNATALVAAVGDGSSFSKARDLGAWLGLVPRQHTTGGKPRLLGISKRGNTYLRTLLIHGARAALPSLSKGDTPLGRWLQGMIERGVHRNAIVVALANKLARIAWAALRRDMPFERNYPVAI

SEQ ID NO: 17498 - protein, 318 aa, unidentified
  source 1..318: note = protein_0470ab1
  REGION 7..155: note = RuvC_domain
  SITE 10: note = RuvC_P1
  SITE 54: note = RuvC_P2
  SITE 94: note = RuvC_P3
  SITE 96: note = RuvC_P4
  SITE 99: note = RuvC_P5
  REGION 193..277: note = Tnp_domain
  SITE 201: note = Tnp_P1
  SITE 230: note = Tnp_P2
  SITE 238: note = Tnp_P3
  SITE 239: note = Tnp_P4
  SITE 250: note = Tnp_P5
MSDSVFVGIDVSSQTLEIASSAAAKTWQAANDTAGIEQLVVQLTGMKPALVVLEATGGYEFEAACAIQAAGLPVAVVNPRTARDFARAMGALAKTDTLDARMLATFARVLHQHPERERFIKPLADAQLQRLQALVLRRRQIVQMLTAERQRMRISHAAARPSIERVIEFLKAELGDSDAEVADHVQRHHAELAAALSSVPGIGAASVAVLLAQLPELGKLDRRRVAALVGVAPLNRDSGQMRGQRSIWGGRADVRRTLYMATLTAVRHNPVLAAHYERLLAAGKRKKVALVACMRKLLTILNAIAKHGSTWNPSLHHA

SEQ ID NO: 17499 - protein, 406 aa, unidentified
  source 1..406: note = protein_a38669d
  REGION 18..177: note = RuvC_domain
  SITE 21: note = RuvC_P1
  SITE 74: note = RuvC_P2
  SITE 115: note = RuvC_P3
  SITE 117: note = RuvC_P4
  SITE 120: note = RuvC_P5
  REGION 281..367: note = Tnp_domain
  SITE 288: note = Tnp_P1
  SITE 318: note = Tnp_P2
  SITE 326: note = Tnp_P3
  SITE 327: note = Tnp_P4
  SITE 340: note = Tnp_P5
MGPAASNNFMEVIPMIIVAVDVAKDKHDCFITNTDGEVLFDSFVIQNNQDGFEDLFQKICSVTDSPQNVKVGLEATGHYHLNLLGYLLDKGFPTCLINPLQTSLFRKSLSFRKTKTDPVDARAIARLLMSDRTLQPYSLTSYQNQELKSLTRYRADKVRERAKLKSSLARLVVILFPELEKLVPILYMATIYDLLHEFPGASYVASAHLTRLSHLISESSKGRYDKEKALEIREAARHSIGSVSPAKSLELRHAIDHIRFLDDEIDEVEAQIFALLDKDPPRMLDIPGMGPRMAAVIVAEVGDFNRFSSPDKLLAYAGLSPSTYQSGQLTSTYAKMEKRGSRYLRCALFNATKYVCMWDPVFKAYLAKKRAEGKHYNVAISHAAKKLVRLIYHLETTGKSYRSKAA

SEQ ID NO: 17500 - protein, 309 aa, unidentified
  source 1..309: note = protein_651ed9b
  REGION 7..148: note = RuvC_domain
  SITE 10: note = RuvC_P1
  SITE 53: note = RuvC_P2
  SITE 93: note = RuvC_P3
  SITE 95: note = RuvC_P4
  SITE 98: note = RuvC_P5
  REGION 188..272: note = Tnp_domain
  SITE 196: note = Tnp_P1
  SITE 225: note = Tnp_P2
  SITE 233: note = Tnp_P3
  SITE 234: note = Tnp_P4
  SITE 245: note = Tnp_P5
MVHPVYIGCDVSKAHLDLFDAATQKAVRIANTDTAIDEWLATLEGREAHVVLEATGRYDRLLCSALERRQRPYCRVNPARARDFAKATGQLAKTDTIDARLLARMGETLSPAVTAPSDPARQRLESLHTRRDQLVAMRQQERLRLYTADPSERDSLERHLDWLDAEIAAIEKQCRSHVRKSPALNEQSERLRSIPGIGQVTAFTLMAHMPELGESSSGSMAALAGLAPFNADSGIHRGQRHIRGGRKRVRDALYMAALVAYRMRAPFARLVQAMQAKNKPFKVMIIAIARKLLVIANAILRDKTTFKTC

SEQ ID NO: 17501 - protein, 344 aa, unidentified
  source 1..344: note = protein_85a2065
  REGION 6..148: note = RuvC_domain
  SITE 9: note = RuvC_P1
  SITE 52: note = RuvC_P2
  SITE 87: note = RuvC_P3
  SITE 89: note = RuvC_P4
  SITE 92: note = RuvC_P5
  REGION 211..295: note = Tnp_domain
  SITE 219: note = Tnp_P1
  SITE 249: note = Tnp_P2
  SITE 257: note = Tnp_P3
  SITE 258: note = Tnp_P4
  SITE 270: note = Tnp_P5
MSITILGVDLGKNSCSVVGVDTTGAVVVRRTMRRQTLVEYVTKLPACVVAMEACCGAHHLGRLFVAQGHKIRLMSPEYVRPYIKAQKNDDRDAEGIAEAASRPTMRFVELKSQEQLDIQTLHRVRSRLVAERTNLINQLRAILLERGEIFPAGRRKFELGVDGMLVDGDQTLSPRIRQLAGDLRTEWRELDAKIAALNGEFVKLSRNDPAACRLTSIPGVGVLNATALVAAVGDASNFAKARDLGAWLGLVPKQSSTGGKARLLGISKRGNTYLRTLLIHGARAALPSLSQSDTPLGRWLKAMIERGVHRNAVVVALANKLARIAWAILRKEARFERSYPVAVV

SEQ ID NO: 17502 - protein, 312 aa, unidentified
  source 1..312: note = protein_bea8ffd
  REGION 6..152: note = RuvC_domain
  SITE 9: note = RuvC_P1
  SITE 53: note = RuvC_P2
  SITE 93: note = RuvC_P3
  SITE 95: note = RuvC_P4
  SITE 98: note = RuvC_P5
  REGION 189..273: note = Tnp_domain
  SITE 197: note = Tnp_P1
  SITE 226: note = Tnp_P2
  SITE 234: note = Tnp_P3
  SITE 235: note = Tnp_P4
  SITE 246: note = Tnp_P5
MAKDTIGIDVSKDRLDAFWYSREELRTLPNSPEGFIQLCDWVGQNDGVLFVFEATGAYHRGLERHLSLAGVCFIKVNPRQARRFAQAVGRLAKTDSVDARMLARMGVVLELAPQAAEGEDVHDLRELLTARRALVKDQITAKTRLATAVNPLIREQLCRRITDICADIKALDDVIAQIAKQRGTLEDRIRRLMTIPGIGRLTATTMLIDMPELGHLESKKIAALAGLASMTQQSGQWQGKERINGGRSSIRRAIYMPALVAIRFNRDLRVTYQHLLKAGKAKKVAITAVMRRMIVLANTLLREGRDWQFERP

SEQ ID NO: 17503 - protein, 403 aa, unidentified
  source 1..403: note = protein_71302bd
  REGION 4..160: note = RuvC_domain
  SITE 7: note = RuvC_P1
  SITE 57: note = RuvC_P2
  SITE 97: note = RuvC_P3
  SITE 99: note = RuvC_P4
  SITE 102: note = RuvC_P5
  REGION 270..356: note = Tnp_domain
  SITE 278: note = Tnp_P1
  SITE 309: note = Tnp_P2
  SITE 317: note = Tnp_P3
  SITE 318: note = Tnp_P4
MIFVGVDWAEAHHDICILDEAGEVLARKRIPDTLPGVRTLHELLGEHAEEPHEVIVGIEKDQGLIVEAMLGANYRVYAINPMSAARYRERHVTSGSKSDPGDAKVLADLVRTDRHNHREAAGDSANVAAIKILARAHQSAIWARQREVNALRNALKDYYPGALRAFGTDLDDRGAVAILEIAPTPPLGRQLSKSKIIAALKRAGRMRNLERRASEIQGALREEQLAQGPIVEVAYGRTTKAHVAMIRADNAEIAELEEALTSGFKEHPDAGIVLSLPGMGTVLGARVLGEFGDDPNRYCNAKSRRNYAGTSPITRASGKSHVVLARHMRNRRLADALDQWAFCSITRSPGARTYDELRGRGKTHRQAIRQLANRWVGILHACLEQRVTYDENIAWKHRVDLAA

SEQ ID NO: 17504 - protein, 387 aa, unidentified
  source 1..387: note = protein_5f45959
  REGION 6..159: note = RuvC_domain
  SITE 9: note = RuvC_P1
  SITE 57: note = RuvC_P2
  SITE 98: note = RuvC_P3
  SITE 100: note = RuvC_P4
  SITE 103: note = RuvC_P5
  REGION 221..306: note = Tnp_domain
  SITE 229: note = Tnp_P1
  SITE 259: note = Tnp_P2
  SITE 267: note = Tnp_P3
  SITE 268: note = Tnp_P4
  SITE 279: note = Tnp_P5
MTRVVIGMDPHKRSVTIEVMALDESVLGGGRYGTDEPGYSALLRDAEQWPDRVWAVEGCSGIGRHVAIRLVADGEQVVDVPPKLSARARVFSTGQGRKTDATDAHSIALVGTRMAGLRPVVDNQQLAVLRVLADRRKALGEDHTRMVSQLHHLLLELIPGGAKKDLSAAQAKALLAQVRPRDLPGKTRRRVAAELIADLERIYARKKAADKELRELITNTGTSLLTLNGIGPSGAARLLIDVGDITRFPTKGHFASWNGTAPLDASSGDRVRHRLSRAGNRQINRTMHIMATVQLRNPSEGRDYYDRKKAAGKTSMEAMRCLKRRLSDVVYRHMVNDAVRSMTGPGGHPGATTKSRATGSHPHTGSSNKSLPGPATTKPRTGLPAAS

SEQ ID NO: 17505 - protein, 406 aa, unidentified
  source 1..406: note = protein_208d841
  REGION 4..162: note = RuvC_domain
  SITE 7: note = RuvC_P1
  SITE 60: note = RuvC_P2
  SITE 101: note = RuvC_P3
  SITE 103: note = RuvC_P4
  SITE 106: note = RuvC_P5
  REGION 275..361: note = Tnp_domain
  SITE 283: note = Tnp_P1
  SITE 313: note = Tnp_P2
  SITE 321: note = Tnp_P3
  SITE 322: note = Tnp_P4
  SITE 334: note = Tnp_P5
MYYVGIDVAKEKHYVSVINEEGDFVTKPFWIYSDGVGLNELVKKLNDISWTYDDFILALESTGAYSENIYEYFTELGFKIILLNSYQTAKFRDLTTMKKVKNDAIDSLVIAGLIKSNQYKESYVSNEEYQSLKVLVRLKSSLSDKIKSIKREISTVMAIINPEINKVFPNIFTKSALAIIKEYPTAIDLQSVTVKKLTKIFRHIKGNNFNEDKAKYLIDLANLTIYSGRAKDARSLMITYNIRTLELLCQEKDEVEIAIQNILDIDIDNKPNSPIDNLKTIPGVSVKTIAAILGECGKLSRFESVKAFIGYLGLYPTLYQSGNSSVTGRLAMRGIPIAKHALYMSAVSSVRHNIEMLKLFRDKVSSGKSKKEALIIIAKKLATIMYSIFKYNTPYNPNRVFIPYRK

SEQ ID NO: 17506 - protein, 402 aa, unidentified
  source 1..402: note = protein_ac34357
  REGION 4..160: note = RuvC_domain
  SITE 7: note = RuvC_P1
  SITE 57: note = RuvC_P2
  SITE 97: note = RuvC_P3
  SITE 99: note = RuvC_P4
  SITE 102: note = RuvC_P5
  REGION 274..361: note = Tnp_domain
  SITE 282: note = Tnp_P1
  SITE 312: note = Tnp_P2
  SITE 320: note = Tnp_P3
  SITE 321: note = Tnp_P4
  SITE 334: note = Tnp_P5
MNCVGIDVSKGKSMIAVMRPFGEVVISPFEVLHTDSELSKLAGLLKSLNGETRVVMESTGNYHAPVAWLLHDAGLYVSVVNAMLVHDYGNNSLRRAKTDKKDAVKLANYGLDHWLTLPRYVPQEETRLMLKTCCRQYRQYSKVQTILKNNLISLLDTAFPDANRLFASPPRTDGSEKWVDFVAAFWHCECVCGLSKKAFTAKYQKWCKKHGYYFSEDKALDIYASACGHFSVMPKTDTTKLLVEQAIFQLRATSTALAALKQKMQSLASSLPEYPVVMRMFGVGPSLGPQLMAEIGDVRRFHSKKALVAFAGIDAPPYQSGQMHIRSRSISKRGSASLRRTLFLVMGVILQCAPMDEPVYQFMNKKRSEGKPYRVYMMAAANKFLRIYYASVKTYLDSLALN

SEQ ID NO: 17507 - protein, 330 aa, unidentified
  source 1..330: note = protein_dec1331
  REGION 4..157: note = RuvC_domain
  SITE 7: note = RuvC_P1
  SITE 60: note = RuvC_P2
  SITE 100: note = RuvC_P3
  SITE 102: note = RuvC_P4
  SITE 105: note = RuvC_P5
  REGION 202..288: note = Tnp_domain
  SITE 210: note = Tnp_P1
  SITE 239: note = Tnp_P2
  SITE 247: note = Tnp_P3
  SITE 248: note = Tnp_P4
  SITE 261: note = Tnp_P5
MFYLGIDVAKAKLDCCLLLSIEDGKRKTKSVANTARGFSDLLRWIDKQGLERSQVRGLMEGTGVYHTPAATALSEAQVSVSILNPARVREYAKSMGMQTKNDKADSIVIALYGAKHPEKLIVWEAPSLQARTLQALLARREALERDLQRERNRQEKADFIDTPERITKSLEESIAFLKEQIKKLSKDIDGHIKRYSELKEQMALLTSIPAVGPKTGAQMLSILHHHRFERPEQLSAYIGLNPVEFTSGSSVFHRPHLSKAGPGRVRAVLYMAAVVATRHNPVIKAQYQRLISRGKSKMSALGAAMRKLVHLCFGVLKNRTPFNPNYAFGD

SEQ ID NO: 17508 - protein, 405 aa, unidentified
  source 1..405: note = protein_58c85a7
  REGION 5..161: note = RuvC_domain
  SITE 8: note = RuvC_P1
  SITE 58: note = RuvC_P2
  SITE 98: note = RuvC_P3
  SITE 100: note = RuvC_P4
  SITE 103: note = RuvC_P5
  REGION 271..366: note = Tnp_domain
  SITE 279: note = Tnp_P1
  SITE 310: note = Tnp_P2
  SITE 318: note = Tnp_P3
  SITE 319: note = Tnp_P4
MGIYVGIDWAEAHHDICVLDETGTLLAKRRIAEGLEGVGQLHALLADHAQEPDQVVVGIETDRGLLVGALLAAGYQVYAINPLAASRYRERHVTSGAKSDPGDAKVLADLVRTDRHNHRPVAGDSELAASLQVLARAQQNLIWSRQRLVNQLRNNLREYYPAALVAFGTELAHPVALGVLDAAPTPARGRTLSRAKLAAILRRGGRERGVDEKAAAIQAQLRAPQLAAPALIGEAYGKSVASTVRILRGMNAELARLETELTPSFEKHPDAEIYRSLPGLGIVLGARVLSEFGDDRTRFTHPKARKNYAGSSPITKTSGKSRVVLARMACNRRLADACHQWAFCALTPSAGARDYYHRLRQRGKTHHQALRALANRLVGILHGCLDHRQIYREEIAWPGSLTVAA

SEQ ID NO: 17509 - protein, 302 aa, unidentified
  source 1..302: note = protein_9b2bb49
  REGION 1..116: note = RuvC_domain
  SITE 25: note = RuvC_P2
  SITE 63: note = RuvC_P3
  SITE 65: note = RuvC_P4
  SITE 68: note = RuvC_P5
  REGION 180..266: note = Tnp_domain
  SITE 188: note = Tnp_P1
  SITE 218: note = Tnp_P2
  SITE 226: note = Tnp_P3
  SITE 227: note = Tnp_P4
  SITE 239: note = Tnp_P5
MRRYENNKEGYEEILKMKPCAIVLEPTGVYAIRPCQYFKEKGIKVLQVSPNVLSREKEFRGKKTDFYDAEKLENMVDKAKEYEYNPLRELVTLYLFLKDIETKYKNRLKRALFLVSDNDKISKDRLERLAKGDFTQEELYQLEYTPIVLEEIKVLAKTLLETQEKLEEVRRMIEEQVPQDHVLLSIPGVGKLAAGIIIGIVGDVKRFPRPESFVAYCGLDPLVERSGKAVISKGISKRGNKYLRSLFYFLTGRNYSRNPTLLKFYESHKDRLQGKKLYTALARKLARTVWSVWYNNKPYEPK

SEQ ID NO: 17510 - protein, 345 aa, unidentified
  source 1..345: note = protein_e219712
  REGION 10..166: note = RuvC_domain
  SITE 13: note = RuvC_P1
  SITE 63: note = RuvC_P2
  SITE 104: note = RuvC_P3
  SITE 106: note = RuvC_P4
  SITE 109: note = RuvC_P5
  REGION 206..292: note = Tnp_domain
  SITE 213: note = Tnp_P1
  SITE 243: note = Tnp_P2
  SITE 251: note = Tnp_P3
  SITE 252: note = Tnp_P4
  SITE 265: note = Tnp_P5
MPVAEVDTFVGIDVSAHELSVALRRGQSHDKAAMAKFPNHPSGHKALVAYLLRGGGRVRVCLEASGNYSLDLALTLQAHRQVEISVINPRRARRFAESLGERSKTDPVDARVLCEYAARMPWVRWQPPSPVALHLRALTRAIADLGVIHTQQNNRAYAAAASQALPVLVVKEMQRHKKYLEQRMTRLRREAVRLIACDPELERRFRLMLTTIGIAETSALQILGELAVLPDMLDARQWVAFSGLDPRLFKSGKSVEKRPRISRSGSRHLRRALYMPALVALRRDPYLRVFYQNLLARGKARLQAVVAVMRKLLHALFAMFRSNQPYDGSKLCAVELAVHAIAACA

SEQ ID NO: 17511 - protein, 375 aa, unidentified
  source 1..375: note = protein_22611ef
  REGION 9..158: note = RuvC_domain
  SITE 12: note = RuvC_P1
  SITE 62: note = RuvC_P2
  SITE 98: note = RuvC_P3
  SITE 100: note = RuvC_P4
  SITE 103: note = RuvC_P5
  REGION 223..311: note = Tnp_domain
  SITE 231: note = Tnp_P1
  SITE 261: note = Tnp_P2
  SITE 269: note = Tnp_P3
  SITE 270: note = Tnp_P4
  SITE 282: note = Tnp_P5
MHQYTSKYVGMDVHKETIAVAIAKEGRGEPDYYGEIPNNAEAIRKLVKRVASNGERVSFCYEAGPCGYEVYRQLIDLGQRCDVVAPSLIPKKSGDRVKTDRRDANTLTRLHRAGELTPVWVPDKEQEAMRDLTRAREDMKAMEGHAKQRLGAFLLRHGKKYPGKSKWTQAYFRWLEGIKFEIPAQQIVFQEYVDTVKQMKERVASLEEEMRHALEGWSLAPVVTGLMALRGVDIITAMTVIAELGDISRFDSPRQLMAHLGLVPSEHSSGSRRQRGGITKTGNGHARRVLIEASWCYRLPARKTAHFRRRAEKASETVQAIAWKAQKRLCKRYWYLINKGKLPVEACTAVARELSGFIWAIVCDVMGKTNACVTR

SEQ ID NO: 17512 - protein, 391 aa, unidentified
  source 1..391: note = protein_18d3806
  REGION 4..161: note = RuvC_domain
  SITE 7: note = RuvC_P1
  SITE 60: note = RuvC_P2
  SITE 100: note = RuvC_P3
  SITE 102: note = RuvC_P4
  SITE 105: note = RuvC_P5
  REGION 266..353: note = Tnp_domain
  SITE 274: note = Tnp_P1
  SITE 304: note = Tnp_P2
  SITE 312: note = Tnp_P3
  SITE 313: note = Tnp_P4
  SITE 326: note = Tnp_P5
MFYIGIDIAKKNHEASIIDSSGKSLSKSISFSNTIKGLEKFRDFLDYFNLDINNCIIGMEATGHYWLSLYSFLLELGFNCIVINPIQSEAFRKMYIRQTKNDAVDSFVIAQIMRFGEYSISNFSDEDTFALRNLSRYRFALVDECSDWKRKLVAILDQVFPEYSTLFSNIYGVTSKELLSNYPLPEDLINISAQELANLLSKCSKGRFGLKKAQEIQSTASNSFGIKFAKKSFSFQIKQIINQISFLEDQIYEIEEEISFMLNELCPVITSIIGVGEVLGAAIYSEIGDISRFEKASQLVAYAGLDVSVKQSGDFSASNAKISKRGSPYLRRAIWLSATVAAFRDPALSKYYQSMRDRGKAHGTAIGAVARKLTNIIFAVLRDNKLYTPNI

SEQ ID NO: 17513 - protein, 403 aa, unidentified
  source 1..403: note = protein_0b6128e
  REGION 6..161: note = RuvC_domain
  SITE 9: note = RuvC_P1
  SITE 59: note = RuvC_P2
  SITE 100: note = RuvC_P3
  SITE 102: note = RuvC_P4
  SITE 105: note = RuvC_P5
  REGION 268..355: note = Tnp_domain
  SITE 276: note = Tnp_P1
  SITE 306: note = Tnp_P2
  SITE 314: note = Tnp_P3
  SITE 315: note = Tnp_P4
  SITE 328: note = Tnp_P5
MYKYFLGIDISKYSFDFSFTDETEKVLYKDHYQMDMTDFTKLKCYLAPFSKNEILIVMEATGIYHLTLLSYLLEQGLNVSVVNPLFIHAFTKSMTIRKTKTDSKDAHIISIFAKRNYATIRLSSASDIETIKPIVREKEKLTNQMSAIKTDIKSIVNQVFPEMLKNTNIFLKSSLNLLLQAPSKRIIRNLKEKKIAQLLSCDTKRGAKPKVDAKEILAMAKNSIGINNKSLEKILVSKIKQLEFLQTQLDEFNETIEQFVDEHHHDDMDLLTSIGGVGKPSAASFLTELGDIDNFATYKQLTAFIGTDPTIYQSGTSVKVKGSISKRGNSHLRRVLWHMARAATVWNETLKAYYDKKRSEGKTFKQSVIAVANKLIRIIFSMLKNNTKFDTNFSSLAIKSVSN

SEQ ID NO: 17514 - protein, 363 aa, unidentified
  source 1..363: note = protein_63e5bf3
  REGION 7..147: note = RuvC_domain
  SITE 10: note = RuvC_P1
  SITE 53: note = RuvC_P2
  SITE 88: note = RuvC_P3
  SITE 90: note = RuvC_P4
  SITE 93: note = RuvC_P5
  REGION 210..295: note = Tnp_domain
  SITE 218: note = Tnp_P1
  SITE 248: note = Tnp_P2
  SITE 256: note = Tnp_P3
  SITE 257: note = Tnp_P4
  SITE 269: note = Tnp_P5
MDKFIRIGVDTSKSVFVLHGVNAAEQPVLRKKLRRRQVLEFFAKLEPTKIGLEACGAAHYWARELAALGHEAVLLPPQYVKPYVKRNKNDAADAEAICEAMSRPTMRFVPVKTPEQQAALMLAGTRDALIRRRTQLTNAIRGYAAEFGLTAAKGLDKIEPLLVRIAATTALPRLAKELFAAYGKEYAQLKVQIQKIEAKLMAWHKDNELSRRLVEVPSIGPIGASLMAMKVTDPHAFRCGRNFSAWIGLTPKDHSTAGKTRLGVITRAGDESLRSVLVVGATSVIQQVRRGKGHPSPWLVELVRRKPPKLAAVALANKTARIVWKLMVSGERYNPARAAAVIARISHQISGDDRDDQRITSSA

SEQ ID NO: 17515 - protein, 349 aa, unidentified
  source 1..349: note = protein_98a0f2b
  REGION 12..153: note = RuvC_domain
  SITE 15: note = RuvC_P1
  SITE 58: note = RuvC_P2
  SITE 93: note = RuvC_P3
  SITE 95: note = RuvC_P4
  SITE 98: note = RuvC_P5
  REGION 217..302: note = Tnp_domain
  SITE 225: note = Tnp_P1
  SITE 255: note = Tnp_P2
  SITE 263: note = Tnp_P3
  SITE 264: note = Tnp_P4
  SITE 276: note = Tnp_P5
MHRNAPRAAAVYGVDLGKNLFHVVGLDERGAVVQRVKFRRDTVLAFFTRALPSLVGMEACPGSQWLARKLQAMGHTVRIAPAQFVKPFVKSQKNDTIDAEAIAEAVTRPTMRFTQVRTTEQIDLQALHRIRDQLVRSRTRLINQARAFCLEYGVAIRQGTGVFRSDLPRVLADDTNDLTPAMRVMLSELFEDVERVDQRIASVTRQIEALADREDKARRLMTIPGIGPLAATALLAAVGDGHQFRRARELAAWLGLTPREHSTGGKTTLLGISKRGNRYVRKLLVHGARSCVTHLNRTRDRIGHWLDALQSRMHVNKVTVALAAKITRMAWAIITRPGVIYERHDPVVA

SEQ ID NO: 17516 - protein, 340 aa, unidentified
  source 1..340: note = protein_7751f1a
  REGION 7..148: note = RuvC_domain
  SITE 10: note = RuvC_P1
  SITE 53: note = RuvC_P2
  SITE 88: note = RuvC_P3
  SITE 90: note = RuvC_P4
  SITE 93: note = RuvC_P5
  REGION 211..295: note = Tnp_domain
  SITE 219: note = Tnp_P1
  SITE 249: note = Tnp_P2
  SITE 257: note = Tnp_P3
  SITE 258: note = Tnp_P4
  SITE 270: note = Tnp_P5
MDEGTIIGVDLAKNVFQLHGATADGSVIFRKKLSRPQFHRFMAGQPASVVVMEACGGAHFWARELEALGHQVKLISPQYVKPFVKRQKNDAADAEAIVEAALRPSMRFVEPKSEVQQASAVLFRFREKLVKQRTELINAIRSYLFEFGHVIPKGPRHLRRVAELISNDTGTLPDDVREICGDLLDEIRRKTERIDEALKQIHAKSRQQETLQQLQTMPGLGPITAVAIETFAPPMETFRRGRDFAAWLGLVPRQNSTGGKQRLGRTSKMGQRDIRRLLIIGAMSVVNWASRGHGVTTGWLASMLARKPRMVVAVALANKMARAIWAMLVKREAYRAPVTA

SEQ ID NO: 17517 - protein, 309 aa, unidentified
  source 1..309: note = protein_91991ed
  REGION 8..151: note = RuvC_domain
  SITE 11: note = RuvC_P1
  SITE 54: note = RuvC_P2
  SITE 94: note = RuvC_P3
  SITE 96: note = RuvC_P4
  SITE 99: note = RuvC_P5
  REGION 190..274: note = Tnp_domain
  SITE 198: note = Tnp_P1
  SITE 227: note = Tnp_P2
  SITE 235: note = Tnp_P3
  SITE 236: note = Tnp_P4
  SITE 247: note = Tnp_P5
MKEEFVYLGVDIAKSYLDAAIGSEKRRFANDAVGHRALIKWIKEIEGLVQVICEPSGGYERALIRALVGTQIRVSLVPANRVRQFARAAGILAKTDRIDAKVLCIFAEAMQPGTISGSQLEQEHLRELESQRRHLTHLLVMEQNRGARVSDVCVRRLNRTLINQIKKQIEQLDLLIKNHIEESAELSVKAAKLTAISGVGERTAALLLAQMPELGRLNRREVAALVGVAPFNRDSGRMRATRTIYGGRRPVRHGLYMAALVAARHNPILRAFYQRLRTAGKPAKVALTATMRKLLIVLNSALKSDLSYA

SEQ ID NO: 17518 - protein, 389 aa, unidentified
  source 1..389: note = protein_925108b
  REGION 4..163: note = RuvC_domain
  SITE 7: note = RuvC_P1
  SITE 60: note = RuvC_P2
  SITE 101: note = RuvC_P3
  SITE 103: note = RuvC_P4
  SITE 106: note = RuvC_P5
  REGION 266..353: note = Tnp_domain
  SITE 274: note = Tnp_P1
  SITE 304: note = Tnp_P2
  SITE 312: note = Tnp_P3
  SITE 313: note = Tnp_P4
  SITE 326: note = Tnp_P5
MIYVGIDVAKDKHDCCILGPDAEKLYPVFTISNNRDGFDELYEKIQDAETDNDQIKVGLEATGHYSLNLLGSLIDKGLTTCVINPLHTNLYRKGLSLRKTKTDKVDASSIAMMLITDKTLKPYSDTSYHNEELKSLTRYRFDKVQERARLKVSIARLVNILFPELEKLVPDIHMASVYALLSEFPGASHIAGCHLTRLKNLLETASKGRYGRDKAIEIRNAAHTSIGSVMPVKSLELKHTIHLINVLTEEIEEVEAVIKKIMDDNASPIMTIPGISYRMGAMILAEVGDFSRFENADQILAFAGLSPSTYQSGQLKSSYAHMEKRGSRYLRYALFNATKFVCKWDETFGAYLAKKIREGKHYNVAVSHAAKKLIRTIYRMELTGEAYRK

SEQ ID NO: 17519 - protein, 350 aa, unidentified
  source 1..350: note = protein_99b2931
  REGION 7..149: note = RuvC_domain
  SITE 10: note = RuvC_P1
  SITE 53: note = RuvC_P2
  SITE 88: note = RuvC_P3
  SITE 90: note = RuvC_P4
  SITE 93: note = RuvC_P5
  REGION 210..298: note = Tnp_domain
  SITE 218: note = Tnp_P1
  SITE 248: note = Tnp_P2
  SITE 256: note = Tnp_P3
  SITE 257: note = Tnp_P4
  SITE 269: note = Tnp_P5
MKETSTIGIDIAKRIFQIHGVDKNGKTVLKKKLMRDQVLIFMANLPKCLVGMEACGGANYWAREISKLGHEVKLMAPQFVKPYVKTNKNDQADAEAICEAASRPSMRFVPIKSVEQQDILSIHRVRSRLVKNRTALANEIRGLLHEFGIIIPKGINKITAKLTEVLDSEKLSPISQQTFSDLKDEFIENDKRIKDLENGLKMLAGELDKYQQIIAIPGIGLITATALIASIGNAGCFENGRQLSAWLGLVPRQASSGGKEKLLGISKRGDIYLRTLLIQGARAILNTKLRTTTESQKAKKDYSKFTQWMFNLRDRSGHNKTVVAVANKLARVVFAVLSSGKDYVENKVCS

SEQ ID NO: 17520 - protein, 418 aa, unidentified
  source 1..418: note = protein_17aeb3f
  REGION 29..171: note = RuvC_domain
  SITE 62: note = RuvC_P2
  SITE 102: note = RuvC_P3
  SITE 104: note = RuvC_P4
  SITE 107: note = RuvC_P5
  REGION 271..356: note = Tnp_domain
  SITE 279: note = Tnp_P1
  SITE 309: note = Tnp_P2
  SITE 317: note = Tnp_P3
  SITE 318: note = Tnp_P4
  SITE 329: note = Tnp_P5
MMNRSCLRKEELRVREKIFRASSQCGCGVTAPQRGAEGFQEFFSRIEKHQKAQGCGVAVAMEGYNGYARPLDSLVRQRGYRLYNINNLKLARFKEIFPGAAKKDRIDARKGLELFQLRDHLPLAKKVLQEVTGTPKENEILKRLTRRRRRLINERVRVVNNLQADLQAVCPGLLEITTEASNQWFLNFLLSASTLPQLARLRKSTLLTIPAVGRKYASLIQDWQKRAHFSSEVEWVGEMIHEDAQRCLELEEKIKTLGTKIEQVAKDSKIAKILLSIPGFGPVCTSELAGEIGTVERFGKEGSLALYLGMSTLDNSSGNYHGTKQPKHVNTRAKAAMMTALDRHRKYVPESQRYYEKKRSEGKKHNQAIRALGRHLCRIIYKMLTEERDYQIRPEKGNTKTKVSSRSCVKTKIRRPKF

SEQ ID NO: 17521 - protein, 342 aa, unidentified
  source 1..342: note = protein_3203e3d
  REGION 6..148: note = RuvC_domain
  SITE 9: note = RuvC_P1
  SITE 52: note = RuvC_P2
  SITE 87: note = RuvC_P3
  SITE 89: note = RuvC_P4
  SITE 92: note = RuvC_P5
  REGION 211..297: note = Tnp_domain
  SITE 219: note = Tnp_P1
  SITE 249: note = Tnp_P2
  SITE 257: note = Tnp_P3
  SITE 258: note = Tnp_P4
  SITE 270: note = Tnp_P5
MSTAFIGLDLAKLVFQVHGVDAQSKVLMTKRLRRDAVLALFANLPVCVVGMEACAGSHFWARELTRLGYTVRLMAPQYVKPYVKRQKNDRADAEAICEAVQRPSMRFVAVKTEEQQSTLAIHQVRKTLVAQKTQLINALRAHLAEFGIIAPQGAGKVAQLSAVVADLEDTRVPALARSVLQSLVDQLRDTERRVEDLDARLAEQAQTDEVCQRLMTVPGIGPITATALTATIGDATVFESGRQLAAWLGLVPRQTSSGGKERLDGISKAGDGYLRRMLVNGARTVMRWHGTTSPWLAGLLKRRPVNVAVVALANKLARITWAVMTRGENYRKPAVTAEPATA

SEQ ID NO: 17522 - protein, 366 aa, unidentified
  source 1..366: note = protein_66c9a92
  REGION 7..148: note = RuvC_domain
  SITE 10: note = RuvC_P1
  SITE 53: note = RuvC_P2
  SITE 88: note = RuvC_P3
  SITE 90: note = RuvC_P4
  SITE 93: note = RuvC_P5
  REGION 210..302: note = Tnp_domain
  SITE 218: note = Tnp_P1
  SITE 248: note = Tnp_P2
  SITE 256: note = Tnp_P3
  SITE 257: note = Tnp_P4
  SITE 269: note = Tnp_P5
MSEIIRIGVDTSKSVFQLHGVDAAEQPVLRKKLRRRDLLVFFERLPATKVGMEACGGTYYWARELTALGHEVKLMPPQHVKPYVRRGKNDRNDADAICEAMSRPRMSFVAIKTAESQAAQMLMTTRERLVAYRTQLINTIRGHAAEFGLTAAKGPAHVEPLLTRIAEDGRVPELAKELFAMHGQELSRLKIELREIEAKLKAWHRQNEMSRRLAEIDGIGPIGGCLLAIKAPDPQAFRCGRDFAAWMGLTPKDHSTAGKMRLGVITRAGDEALRRTLVVGATSVIKQVSKGNPSPWLRDLVARKPPKLAAVALANKVARIAWRLMVSGERYDAARAGIVSPIARIAPCSRRQGRCAPPAAVASGQP

SEQ ID NO: 17523 - protein, 402 aa, unidentified
  source 1..402: note = protein_29254aa
  REGION 4..161: note = RuvC_domain
  SITE 7: note = RuvC_P1
  SITE 60: note = RuvC_P2
  SITE 100: note = RuvC_P3
  SITE 102: note = RuvC_P4
  SITE 105: note = RuvC_P5
  REGION 266..353: note = Tnp_domain
  SITE 274: note = Tnp_P1
  SITE 304: note = Tnp_P2
  SITE 312: note = Tnp_P3
  SITE 313: note = Tnp_P4
  SITE 326: note = Tnp_P5
MYYCGIDIAKYKHEATVIDKTGKALLDSISFSNSAEGCKKLLALFERLSISKDKLLIGMEATGHYWLSVYGYLLENGFEVKVINPIQSEAFRKMYIRQTKNDSKDSFIIAQIMRFGQFSATNLSEETIVAMRQLSRYRLALVDNCGDCKRRIIALLDQVFPEYDSLFSDTFGVTSKEVLAKYPTPEDMLSVSTGKLTNLLKKASHGRFGKQKAEQLQSTAAGSFGVSFAKDAFAFQIRQLIEQLEFLEKQVAELEGQISSLLKQTGSFITTIPGIGDTLGAIILSEIGNIHRFSTPGKLVAFAGLDVRVTQSGEFMGTRQKISKRGSPYLRRAIWLAASRAAFCDPILSEYYQGLRARGKHHLTAIGAVSRKLCNIIFSILSQNCPYQTIPPNDKKPCPSSI

SEQ ID NO: 17524 - protein, 344 aa, unidentified
  source 1..344: note = protein_0225791
  REGION 7..149: note = RuvC_domain
  SITE 10: note = RuvC_P1
  SITE 53: note = RuvC_P2
  SITE 88: note = RuvC_P3
  SITE 90: note = RuvC_P4
  SITE 93: note = RuvC_P5
  REGION 212..298: note = Tnp_domain
  SITE 220: note = Tnp_P1
  SITE 250: note = Tnp_P2
  SITE 258: note = Tnp_P3
  SITE 259: note = Tnp_P4
  SITE 271: note = Tnp_P5
MGEISTVGLDIAKSVFQVHGVDVDGAVVIRKRVSRVKVLEFFAALPPCLVGIEACPTAHHWSRKLQALGHTVRLMPPSYVKAYVKRSKNDANDAAAICEAVTRPSMRFVPTKSEQQQSALMLHRSRQLLVRQRTMLSNAIRGHVAELGIISAKGRNGTAELLEIIANPDDDRIPAVARLSLAILARQYAAVTTEIRAIEKQIYAWHRSCEESRRLEEIPGIGPIVATALVAEVGDWTAFSSGRSLAAWIGLVPRQHSTGGKERLGRISKQGNRHLRWLLVAGAMAVIRYARQHGTKRLWLVRLMGRRPVKVAAVALANKIARMAWAMMVRGERFNEPKLLPVAA

SEQ ID NO: 17525 - protein, 339 aa, unidentified
  source 1..339: note = protein_83bf050
  REGION 6..147: note = RuvC_domain
  SITE 9: note = RuvC_P1
  SITE 52: note = RuvC_P2
  SITE 87: note = RuvC_P3
  SITE 89: note = RuvC_P4
  SITE 92: note = RuvC_P5
  REGION 211..299: note = Tnp_domain
  SITE 219: note = Tnp_P1
  SITE 249: note = Tnp_P2
  SITE 257: note = Tnp_P3
  SITE 258: note = Tnp_P4
  SITE 270: note = Tnp_P5
MKITTFGLDLAKRVFQLHWVETATGEICRRQLSRAQLKEFFANREASEIAMEACGSAHYWGRLFQGLGHEVKLIPGQFVRPFVKSNKTDAADAQAIWEAAQRPGMKFVAVKSEGQQSVLMLHRMREQLVKMRTMQTNQLHGLLYEFGAELPKGRHKVLERIPDELARLENALPAMVIEAIRSQLQRIEALDQDIAELEHKLAVWKREDEAAKRLMAIPGVGLLTATAAVAMIGDAKTFKSGREFAAFLGLVPRQSGTGGRVKLLGISKRGDVYLRTLLIHGARAVATHQKVRDPWLEQLLARRPFNAAVVALANKMARTIWALLAHDRTYQADYVAKAA

SEQ ID NO: 17526 - protein, 343 aa, unidentified
  source 1..343: note = protein_3bae67c
  REGION 8..167: note = RuvC_domain
  SITE 11: note = RuvC_P1
  SITE 68: note = RuvC_P2
  SITE 108: note = RuvC_P3
  SITE 110: note = RuvC_P4
  SITE 113: note = RuvC_P5
  REGION 209..296: note = Tnp_domain
  SITE 217: note = Tnp_P1
  SITE 247: note = Tnp_P2
  SITE 255: note = Tnp_P3
  SITE 256: note = Tnp_P4
  SITE 269: note = Tnp_P5
MKELKHVLGVDVAQKELVVTLGKMYEDFSISLYAYKVFRNSESGILSLINWVQKLLKDEASKVHYVMEATGVYHQKFAYYLNDNGLKVSVVLPNKISNYIRTLELKTITDKTCSEAIARFGLERKLEYWIKPKDAYRELQQLTRERDQIVNERVVVKNQLHAEQSEAIPNLKSIRRLQLRINFLNGQEKEIKLDIAEIVKANAELVAEIERMTSIPGIGALTAVIILAETNGFELIRNKKQLVSYVGLDVKEKQSGTSIKGKPRISKRGNRSIRKAMYFPAMSAVKWDDHYRESYARLVSKQGIKMKALVSIQRKLLEMTYILYKNKTTYEKQYKNSVQTQMA

SEQ ID NO: 17527 - protein, 342 aa, unidentified
  source 1..342: note = protein_d1dca92
  REGION 6..148: note = RuvC_domain
  SITE 9: note = RuvC_P1
  SITE 52: note = RuvC_P2
  SITE 87: note = RuvC_P3
  SITE 89: note = RuvC_P4
  SITE 92: note = RuvC_P5
  REGION 211..297: note = Tnp_domain
  SITE 219: note = Tnp_P1
  SITE 249: note = Tnp_P2
  SITE 257: note = Tnp_P3
  SITE 258: note = Tnp_P4
  SITE 270: note = Tnp_P5
MEITTVGIDLAKSIFQIHAVDEAGKTLIGKALRRAQVLPFFAKLPPCLIGMEACGTSHHWARELTKLGHEVRLMPPAYVKPYVKRGKTDANDAAAICEAVTRPNMRFVPVKSTDQQAALALHRTRDLLVKQRTQLVNMIRGLLAEFGIEMARGLRHALELATRLSAGEAAEVPSVAQRVVTSLADQIGALQVQLVKLEKELLAWHRSSELSQRLATIPGVGVISATALAASVTEPERFRSGRQFAASLGLTPLQNCSGGKERMGRISRMGDRYLRRLLVVGMTSLIRRARSAPASVDPRLPAMLHRKPARVVTVAAANRTARVAWAIMTHGGTYRAPLVAAA

SEQ ID NO: 17528 - protein, 320 aa, unidentified
  source 1..320: note = protein_9a97b46
  REGION 4..123: note = RuvC_domain
  SITE 27: note = RuvC_P2
  SITE 62: note = RuvC_P3
  SITE 64: note = RuvC_P4
  SITE 67: note = RuvC_P5
  REGION 186..272: note = Tnp_domain
  SITE 194: note = Tnp_P1
  SITE 224: note = Tnp_P2
  SITE 232: note = Tnp_P3
  SITE 233: note = Tnp_P4
  SITE 245: note = Tnp_P5
MIAKRQLKRSDVLGFFSKLAPCVVGMEACGGAHFWAREISAFGHQVRLMPPGYVKPYVKRGKTDAGDAEAICEAVSRPTMRFVPSKTAEQQAEAMVLKTRELLVRQRSQAINAIRAHLAELGIVAGIGVAKVSTLIEILRDKDDLRLPGAARRALGELGTQIEALTLRIDALEREVVAKARLDGDMRRFMTIPGVGPISASAIKAFVPDPKGFISERHFAAWLGLTPKSHSSGGKERLGRISKMGNPMLRTLLILGATTVLRHARNGANVPAWITALLARRPFNVVAVARANKMARIVWALLVKGGECRKHGLTDGMVRT

SEQ ID NO: 17529 - protein, 338 aa, unidentified
  source 1..338: note = protein_297c69d
  REGION 7..148: note = RuvC_domain
  SITE 10: note = RuvC_P1
  SITE 53: note = RuvC_P2
  SITE 88: note = RuvC_P3
  SITE 90: note = RuvC_P4
  SITE 93: note = RuvC_P5
  REGION 211..297: note = Tnp_domain
  SITE 219: note = Tnp_P1
  SITE 249: note = Tnp_P2
  SITE 257: note = Tnp_P3
  SITE 258: note = Tnp_P4
  SITE 270: note = Tnp_P5
MAITTTIGIDLGKSSFHVIGHDSSGKETFRKKLSRTKLLQMLSVHEPVNVAMESCGGSHWLARKCKSYGHVVKLIPAQYVKPYVKTNKNDFIDADAIAEASTRPSMRFTSPKAEEAQVASMIRKIRSSFMKERTACMNRVGAMLLEFGLSLPRGHSHLKKIFAWIELQNEVLPNSLICELKTQVEYYQYLSEKIESQEKKLQLINKENIRYHLLQTIPGVGPLTAACCVANVADPKDFSNGRNFAAWIGLVPHQHSTGGKSRLLGISKRGNSDLRELFIHAARSILKRTETAEKHFGEWVVNLKRTKPFNVVVVALANKLARIAWSVMATNKEFSLKI

SEQ ID NO: 17530 - protein, 339 aa, unidentified
  source 1..339: note = protein_121986e
  REGION 7..153: note = RuvC_domain
  SITE 10: note = RuvC_P1
  SITE 54: note = RuvC_P2
  SITE 92: note = RuvC_P3
  SITE 94: note = RuvC_P4
  SITE 97: note = RuvC_P5
  REGION 212..298: note = Tnp_domain
  SITE 220: note = Tnp_P1
  SITE 250: note = Tnp_P2
  SITE 258: note = Tnp_P3
  SITE 259: note = Tnp_P4
  SITE 271: note = Tnp_P5
MSAIVTIGIDLAKNVFAVHGVDDTGKSVLVRPSVARAKLLELIASLPPCLIGMEACSGAHHWAREFQNFGHTVLIMAPKFVIPYRLSGRRGKNDAADAAAICEAVTRPNMRFVPIKSIDQQGQLMVHRARQGFVEQRTATFNRIRGLLSELGIVLALKAAVVRREAMARLEDLPGWANTVIGDLLSEVTHLDERIAQYDRHIALMARHSTEAKRLMQLSGVGPTTATALLSTIGNGHDFKCGRQLCAWLGLVPGQYSSGGKQRLGRITKAGDPYLRSLLVLGARAVLAAAKNKSDPISRWAVSLEQRRGYWKAIVAIAAKNARMCWAVLSRGEAFRLPA

SEQ ID NO: 17531 - protein, 316 aa, unidentified
  source 1..316: note = protein_b2aede4
  REGION 10..154: note = RuvC_domain
  SITE 13: note = RuvC_P1
  SITE 57: note = RuvC_P2
  SITE 97: note = RuvC_P3
  SITE 99: note = RuvC_P4
  SITE 102: note = RuvC_P5
  REGION 193..277: note = Tnp_domain
  SITE 201: note = Tnp_P1
  SITE 230: note = Tnp_P2
  SITE 238: note = Tnp_P3
  SITE 239: note = Tnp_P4
  SITE 250: note = Tnp_P5
MDETTMEKFVGIDVSKSSLDVCIEPVTQTFHVVYDEAGIRRTVSRLEEVKPTLIVIEATGGLEVRIATELAGKGLPVAVINPRQARDFAKATGQLAKTDRVDAAVLAAFARAIRPQARPLQDADTRILNDLVNRRRQLIDMRVQETLRLNTAASKPLEKSLKKHIAWLDKRITEVDNDLTRRLRNSEVWRTKDDLLRGIPGVGAVTALTMLAKCPELGKLNRREIAALTGVAPLANDSGKHRGKRFVWGGRADVRAVLYMATISAIRCNDTIKTFAQRLKQAGKPPKVVIVACMRKLLTIMNAMLKNNTPWNPKTT

SEQ ID NO: 17532 - protein, 320 aa, unidentified
  source 1..320: note = protein_64cca89
  REGION 8..161: note = RuvC_domain
  SITE 11: note = RuvC_P1
  SITE 56: note = RuvC_P2
  SITE 96: note = RuvC_P3
  SITE 98: note = RuvC_P4
  SITE 101: note = RuvC_P5
  REGION 195..279: note = Tnp_domain
  SITE 203: note = Tnp_P1
  SITE 232: note = Tnp_P2
  SITE 240: note = Tnp_P3
  SITE 241: note = Tnp_P4
  SITE 252: note = Tnp_P5
MSEQPVVVGIDVAKLHVDVAVLGAPASAARFSNDEPGHQSLIEALAPVAPALVVMEATGGYEAPLACALQAAGLAVAVVNPRQARDFARSFGQLAKTDRIDAHGLAEFALALLGRADLERYLKPLTTAAQQDLVALVNRRRQLLTMLGMEEQRLAAARPAVRRSIQALIRAIRKQLDDVDGTMAEHVTRHFAELAGLLRSTSGIGPVASATLIADLPELGHLTRRQVSALVGVAPFACDSGSMRGRRRIRGGRFELRRTLYMATLAAITHNPVIRAHYRRLVDGGKLKKVALVACMRKLLTILNAIVRTQTPFQENYRNA

SEQ ID NO: 17533 - protein, 425 aa, unidentified
  source 1..425: note = protein_1592ec7
  REGION 19..179: note = RuvC_domain
  SITE 22: note = RuvC_P1
  SITE 77: note = RuvC_P2
  SITE 118: note = RuvC_P3
  SITE 120: note = RuvC_P4
  SITE 123: note = RuvC_P5
  REGION 286..372: note = Tnp_domain
  SITE 294: note = Tnp_P1
  SITE 324: note = Tnp_P2
  SITE 332: note = Tnp_P3
  SITE 333: note = Tnp_P4
  SITE 345: note = Tnp_P5
MDCIQNSKINQVTETTLVIGMDIAKRTHYASFIDVRGRVLQKAFPVSQSKEGFEAFYQNTLEAMKEYQKTDVIVGIEPTGHYWLNLAYFLTERGIPLVMVNPMHVKRSKELDDNLQTKHDAKDALVIARLVKDGRFSYPRILAGVEAELRVGATLRNQLVEEQSAIRNKLIRWLDRYFPEFTQVFPDFGKTAMAALECTPFPCDVIAKKIEELLNHYRQVEGIKAPQKSKIMKLAQVAYHSIGVTEGQEMARIEIATLVRRYRQIEHEIQELTNQLTDLAKTSVEYEWLSTVPGLGDRTIVELLSEIGSFSYYQHPRQLIKLAGLTLREHSSGQHKGQKRISKRGRRHLRALLFRVMMPMVRCNEAFRQLHVYYTTRAKNPLRKKQSMVILCGKLLKILYALGTKKVAFDAQRMLKDIPSLEGVV

SEQ ID NO: 17534 - protein, 315 aa, unidentified
  source 1..315: note = protein_37e03ae
  REGION 3..122: note = RuvC_domain
  SITE 26: note = RuvC_P2
  SITE 61: note = RuvC_P3
  SITE 63: note = RuvC_P4
  SITE 66: note = RuvC_P5
  REGION 184..268: note = Tnp_domain
  SITE 192: note = Tnp_P1
  SITE 222: note = Tnp_P2
  SITE 230: note = Tnp_P3
  SITE 231: note = Tnp_P4
  SITE 243: note = Tnp_P5
MFRKKINRAKLLEFFASQPPCTVAMEACGGAHHWARAITRLGHEVKLIAPKYVKPFVKRQKNDVADAEAICEAGCRPTMRFVAVQSETVQASALVFRTRDIQVRQRTQITNAVRGHLAEYGIVVAQGAGHFKKLVAYLEDPTSPLPEEVRSILSLLAQTATRLEEKISLLDKEITRRTRTDEVARRLMTIPGIGPITATAIAAPAPPASAFRRGRDFAAWVGLTPPQKSTGGKQKLGATSKMGARTLRRLLIIGAAAAIHHAVRRGVPPTSWLGRMLARKPRMLVTVALANKTARIVWALLVKGEDYKAPEVAAA

SEQ ID NO: 17535 - protein, 340 aa, unidentified
  source 1..340: note = protein_444ec12
  REGION 6..147: note = RuvC_domain
  SITE 9: note = RuvC_P1
  SITE 52: note = RuvC_P2
  SITE 87: note = RuvC_P3
  SITE 89: note = RuvC_P4
  SITE 92: note = RuvC_P5
  REGION 210..297: note = Tnp_domain
  SITE 218: note = Tnp_P1
  SITE 248: note = Tnp_P2
  SITE 256: note = Tnp_P3
  SITE 257: note = Tnp_P4
  SITE 269: note = Tnp_P5
MVITTIGLDLAKSVFQAHGIDATGATVLTKKLHRKQMLPFFSKLPPCLIGVEACGTAHHWARTLSAMGHEVRLIPPSYVKAFVKRGKSDAIDAEAICEAVQRRTMQFVPVKSVDQQSILMTHRARSLLVRQRTSVANALRSHLAELGLVANPGIANLARLAEQALADRDALPSFARVALAIMLRQIVALGQEISALDRQIAAWHVESEASRRLAAIPGLGVITATAVAATVTDPDQFRSGRQFAAWLGLTPQQQSTGGKMRLGGISKQGDRYLRRLLVVGATAVIRHTKDKPTPMAAWIRKLMEKKPFRVVSIALANKLARIAWVLLTRKETYRPYQLAA

SEQ ID NO: 17536 - protein, 344 aa, unidentified
  source 1..344: note = protein_b63caae
  REGION 6..147: note = RuvC_domain
  SITE 9: note = RuvC_P1
  SITE 53: note = RuvC_P2
  SITE 86: note = RuvC_P3
  SITE 88: note = RuvC_P4
  SITE 91: note = RuvC_P5
  REGION 210..302: note = Tnp_domain
  SITE 218: note = Tnp_P1
  SITE 249: note = Tnp_P2
  SITE 257: note = Tnp_P3
  SITE 258: note = Tnp_P4
  SITE 271: note = Tnp_P5
MNNTIVGVDLAKEVIQVCIYTNKRVRSNKEMTTSEFLTFLANQKSAIVVFEACATSNYWKQKACSLGHDARLICPKLVNSVRQNQKTDKNDALAIVQAALLPDVNFISGKNIEQQQLQSIVRFRELAIKQKTALSNQLKSLLLELNIRVSSRHGGLKGVIQSTLEDGENNLSFEFRSALKMAWTQYSTLLKSIAHYEETLAKISTKHSDCKRLLKLEGVSTINAVNLYIALGCQPEMFNKGKDASACIGLTPIQYSSGGKVKLGSIGKYVKNSMLRSNLVVGAMAAINRIITREAKTKKEAWIQALVARRGKRCAAVALANKTVRTAFAMLTQGTEYKAELISA

SEQ ID NO: 17537 - protein, 338 aa, unidentified
  source 1..338: note = protein_506a062
  REGION 7..149: note = RuvC_domain
  SITE 10: note = RuvC_P1
  SITE 53: note = RuvC_P2
  SITE 88: note = RuvC_P3
  SITE 90: note = RuvC_P4
  SITE 93: note = RuvC_P5
  REGION 211..300: note = Tnp_domain
  SITE 219: note = Tnp_P1
  SITE 249: note = Tnp_P2
  SITE 257: note = Tnp_P3
  SITE 258: note = Tnp_P4
  SITE 270: note = Tnp_P5
MQGVTTVGLDLAKNVFQVHAIDSAGKVLARRQLRRAEVLRFFSALPQCLVGMEACASAHHWARELVALGHEVRLMPPAYVKPYVKRGKTDAADAEAICEAVTRPTMRFVAVKTVDQQAVLMLHKTRDLLVRQRTMLVNALRGHLAEYGVVHRQGAVGVAAAIQALHEARDALPELARDALHTLADQLRGLSTEIERMEARIVAWHRGNETSRRLATIPGIGPITASAIAAAVPDASLFRSGRQFAAWLGLTPRAHSSGGKERLGGISKQGDGYLRRLLVVGATAMVRLARKNAERQPWLARLLGRKPAKVAAVALANKMARVAWAVTTRKEVYAAPAA

SEQ ID NO: 17538 - protein, 344 aa, unidentified
  source 1..344: note = protein_7f5e7f5
  REGION 6..147: note = RuvC_domain
  SITE 9: note = RuvC_P1
  SITE 53: note = RuvC_P2
  SITE 86: note = RuvC_P3
  SITE 88: note = RuvC_P4
  SITE 91: note = RuvC_P5
  REGION 210..299: note = Tnp_domain
  SITE 218: note = Tnp_P1
  SITE 250: note = Tnp_P2
  SITE 258: note = Tnp_P3
  SITE 259: note = Tnp_P4
  SITE 271: note = Tnp_P5
MYRTRVGVDLAKKVIQICIHRNKKVQSNSELTPEAFLSWLFNNKPATIIFEACSSSNYWKQKATEAGHDARLISAKLVSVVRQNQKTDKNDALAIVQTTFMPDVTFIGGKTVEQQQLQSIKRLRELAVKQRDASQKQLIALLAELNIKIANRRGGIISSIEAVLEDATNELSTECRRAIYLAKEHLKVLFEAIRHYDDCMEKSVAAHPECKKLMRLEGVGAMNAINLYIALGCSEIGTFSKGKDAAACIGVTPIQHSSGGTVALGSIGKSKNSILRSQLICGATAVVQHAVKRKAKTKKDLWIQGLVERRGKKCAAVALANKTVRTAFSMLTKGTEYKAELLAA

SEQ ID NO: 17539 - protein, 315 aa, unidentified
  source 1..315: note = protein_c61f66d
  REGION 2..75: note = RuvC_domain
  SITE 12: note = RuvC_P3
  SITE 14: note = RuvC_P4
  SITE 17: note = RuvC_P5
  REGION 190..277: note = Tnp_domain
  SITE 198: note = Tnp_P1
  SITE 228: note = Tnp_P2
  SITE 236: note = Tnp_P3
  SITE 237: note = Tnp_P4
  SITE 250: note = Tnp_P5
MTTNTNRVRKVKTDRIDALKIASFALDKWMKLREYTPVETVRKTLQIMNRHCIKLNKILVMQKNSLIALLDCCFPNANTLFTSPRRESDGHEKWVDFVLKFPHVDSVAKLSLSAFKTKYQSWCKKDHYNYSESKSEQIHAYARTLVSTLPMTDAVKKMVSDSAKLLNSTLEALGTLHSEMDSLASQLPEYETVMNLFAVGKVTCSQLIAEIGDVTKLKSGKSLVALAGIDPPPNQSGKEDKKSRSISKRGSPALRKTLFLIMTVYLQRQPADEPVYQFLDKKRTEGKPYKVYMIAAARKFLRIYYARVKEVMPVQ

SEQ ID NO: 17540 - protein, 341 aa, unidentified
  source 1..341: note = protein_cda010f
  REGION 63..153: note = RuvC_domain
  SITE 92: note = RuvC_P3
  SITE 94: note = RuvC_P4
  SITE 97: note = RuvC_P5
  REGION 212..299: note = Tnp_domain
  SITE 220: note = Tnp_P1
  SITE 250: note = Tnp_P2
  SITE 258: note = Tnp_P3
  SITE 259: note = Tnp_P4
  SITE 271: note = Tnp_P5
MTITTVGIDLAKNVFAVHGVDQNGKTVLIKSRVTPHRSSRADCWFATLCYRNGRPVPERITGARLFRQYGHEPRLMAAKFVSPYRMAGKSGKNDPADAQAICEAVRRPHMRFVPVKDESQQAMQCLHRTRQGFIEEKTATYNRLRGLISEFGVIAPQSTDALRHMVSAQKNSLPLQVQQCVDDLLEHVARIEANIAEYDRILSRMAKTDHRSQRLMELKGIGPTTACALVASIGNAHDFKNGRQLAAWLGLTLSQYSSGGKSKLGRITKAGDSYLRTLLVQGARSVLIGVEKRTDSFSRWVCSLVERRGYWRAVVAIAAKNARLCWASLHYGDDFRLYSAS

SEQ ID NO: 17541 - protein, 260 aa, unidentified
  source 1..260: note = protein_98caafc
  REGION 1..77: note = RuvC_domain
  SITE 16: note = RuvC_P3
  SITE 18: note = RuvC_P4
  SITE 21: note = RuvC_P5
  REGION 170..256: note = Tnp_domain
  SITE 178: note = Tnp_P1
  SITE 208: note = Tnp_P2
  SITE 216: note = Tnp_P3
  SITE 217: note = Tnp_P4
  SITE 229: note = Tnp_P5
MLIKEFAKSLSLRKTKTDKKDAHGIALKLLSDPNREQFQHDNRQVELKILARHIHRLKKKQSDWKVQYTRCLDIIFPELDKIVGKHSEYTYQLLTCYPNPQKRLEAGFDKLIEIKRLTASKIQDILSVAPRSIGTTSPAREFEIIENIKHYKRLIDKAEKCVNDLMAEFNSVITTVTGIGNRLGAVMLAEIRNIHAFDNPAQLQAFAGLDSSIYQSGQIDLAGRMVKRGSPHLRWALIQAAKACARFSPAFKAYLKTKLE

SEQ ID NO: 17542 - protein, 294 aa, unidentified
  source 1..294: note = protein_1232619
  REGION 1..77: note = RuvC_domain
  SITE 16: note = RuvC_P3
  SITE 18: note = RuvC_P4
  SITE 21: note = RuvC_P5
  REGION 170..256: note = Tnp_domain
  SITE 178: note = Tnp_P1
  SITE 208: note = Tnp_P2
  SITE 216: note = Tnp_P3
  SITE 217: note = Tnp_P4
  SITE 229: note = Tnp_P5
MLIKEFAKSLSLRKTKTDKKDAHGIALKLLSDPNREQFQHDNRQVELKILARHIHRLKKKQSDWKVQYTRCLDIIFPELDKIVGKHSEYTYQLLTCYPNPQKRLEAGFDKLIEIKRLTASKIQDILSVAPRSIGTTSPAREFEIIENIKHYKRLIDKAETCVNDLMAEFNSIITTVTGIGNRLGAVILAEIRNIHAFDNPAQLQAFAGLDSSIYQSGQIDLAGRMVKRGSPHLRWALIQAAKACARFSPAFKAYLKTKLEQGKHYNVAIIHLAKKLIRTLFYILKKSCHLTNKK

SEQ ID NO: 17543 - protein, 260 aa, unidentified
  source 1..260: note = protein_592b03a
  REGION 1..77: note = RuvC_domain
  SITE 16: note = RuvC_P3
  SITE 18: note = RuvC_P4
  SITE 21: note = RuvC_P5
  REGION 170..256: note = Tnp_domain
  SITE 178: note = Tnp_P1
  SITE 208: note = Tnp_P2
  SITE 216: note = Tnp_P3
  SITE 217: note = Tnp_P4
  SITE 229: note = Tnp_P5
MLIKKFAKSLSLRKTKTDKKDAHGIALKLLSDPNREQFQHDNRLVELKILARHIHRLKKKQSDWKVQYTRCLDIIFPELDKIVGKHSEYTYQLLTCYPNPQKRLEAGFDKLIEIKRLTASKIQDILSVAPRSIGTTSPAREFEIIEIIKHYKRLIDKAETCVNDLMAEFNSVITTVTGIGGRLGAVILAEIRNIHAFDNPAQLQVFAGLDSSIYQSGQIDLAGRMIKRGSPHLRWALIQAAKACARFSPAFKAYLKTKLE

SEQ ID NO: 17544 - protein, 342 aa, unidentified
  source 1..342: note = protein_c65b6fc
  REGION 6..147: note = RuvC_domain
  SITE 9: note = RuvC_P1
  SITE 52: note = RuvC_P2
  SITE 87: note = RuvC_P3
  SITE 89: note = RuvC_P4
  SITE 92: note = RuvC_P5
  REGION 210..296: note = Tnp_domain
  SITE 218: note = Tnp_P1
  SITE 248: note = Tnp_P2
  SITE 256: note = Tnp_P3
  SITE 257: note = Tnp_P4
  SITE 269: note = Tnp_P5
MSDTIIGVDLAKRVFQLHATDLVGNVKFRKKLTREQFQKVMSEMPACTVVFEACGSASYWAREMEGMGHCAKLIAPQYVKPFVKRQKNDAADAEAIAIAARQPEMRFVAPKTAEQHSKAVLFRGRQRLVHQRTELVNALRATFYECGHIFPTGLGALKRMGELVKGPSCDLPLLILSECKDMLAQIDETTKRIKAKNSTIKTLAAEAGTARCLQTMPGVGPMTALAVEAFAPDMGQFKCGRDFSAWLGLVPKQHSSGGKEQLGKMSKAGQNDIRRLLITGAMSRIVGRARHNILPESWIGRMLERKSLMLVAIALANKMARQLWAMLIKNEDYRDPSLAVVV

SEQ ID NO: 17545 - protein, 343 aa, unidentified
  source 1..343: note = protein_17d8d1a
  REGION 7..149: note = RuvC_domain
  SITE 10: note = RuvC_P1
  SITE 53: note = RuvC_P2
  SITE 88: note = RuvC_P3
  SITE 90: note = RuvC_P4
  SITE 93: note = RuvC_P5
  REGION 212..298: note = Tnp_domain
  SITE 220: note = Tnp_P1
  SITE 250: note = Tnp_P2
  SITE 258: note = Tnp_P3
  SITE 259: note = Tnp_P4
  SITE 271: note = Tnp_P5
MNTVAVVGIDLAKQVFQIHFADEFGNKLLNKQVRRSKLLSALNQLPPCLVGMEACGSSHYWAREIRALGHEVKLITPQYVKAYVKTNKNDSADAEAIAEAVTRPGMRFVDIKNADQQSVLLLHREREGLTRERTSLINRIRGTLSEFGVIIPKGPNKLKVWFRDEYSRHEAALPSILQRHTQRLLQRLRSLEGSIAALDEEIDAESQSDEACRRLEEVPGIGRLTASALRASIGNARSFKNGREFAAWLGLVPRQYSSGGKQRLLGISKRGDAYLRRMLIHGARAVLRHMNPKRSVTPWLDSLSRRRHRNVVIVALANKLARIAWALLFHQRRYEEQYLVTAM

SEQ ID NO: 17546 - protein, 338 aa, unidentified
  source 1..338: note = protein_3e7da1f
  REGION 6..148: note = RuvC_domain
  SITE 9: note = RuvC_P1
  SITE 52: note = RuvC_P2
  SITE 87: note = RuvC_P3
  SITE 89: note = RuvC_P4
  SITE 92: note = RuvC_P5
  REGION 211..299: note = Tnp_domain
  SITE 219: note = Tnp_P1
  SITE 249: note = Tnp_P2
  SITE 257: note = Tnp_P3
  SITE 258: note = Tnp_P4
  SITE 270: note = Tnp_P5
MKVTTVGLELAKNVFQLYAVDKKGKCVFNKRLKRKSLLPFFANLDSCLVGMEATGSAHHWARELSRLGHTVRLMGPQFVKPYRKGSKNDSNDAVAICEAVGRPDMHFVAVKTKEQQDIQAIHRIRQRLVAERTAKANQTRGLLAEYGIIVPYGINRLRKALPFILEDAENGFSPLARELFGDLYRQLLELDDKISFYDRKIGQIFMSSPVCQRLAQVEGVGPMTATALVAAIGDAKNFKNGRQLAAWLGLVPRQHSSGDRYKLLSITKRGDRYLRTLLIHGARSVVRRAEGKSDSRSLWLNEIKERRNKNIAAVALANKNARIIWALLARDEDYRAAA

SEQ ID NO: 17547 - protein, 393 aa, unidentified
  source 1..393: note = protein_4f5a43d
  REGION 16..175: note = RuvC_domain
  SITE 19: note = RuvC_P1
  SITE 74: note = RuvC_P2
  SITE 114: note = RuvC_P3
  SITE 116: note = RuvC_P4
  SITE 119: note = RuvC_P5
  REGION 290..381: note = Tnp_domain
  SITE 298: note = Tnp_P1
  SITE 328: note = Tnp_P2
  SITE 336: note = Tnp_P3
  SITE 337: note = Tnp_P4
  SITE 350: note = Tnp_P5
MSNKVIFNLDELFISVGIDVGADFSWMSIALPNQQFVGKPYKILHISIDSLTTAVSKIKEAEELYSLESRIFLESTGIYHYPLFCYLRDKGFNCSVINPIITKNSTNINIRKVHNDRFDSKKAALVGLKPDLKVSLMPSDLALNCRNLCREYYDLMDNRSAYVNKLQGELRMAFPQYLGIFSKVTINTSLTLLETYTSPSAFLEADKQEIIDIIKSTAHFGLTYAQNKYNAIIQAATDANQFGYIIDSNIKRIRLYISFIRKYDEEINNILESLHELVDANDDADFVKQIHLIETFKGAGFLSAVSIMGEIGDFSAFSKPKQLFAYFGLDPAVKQSGKFEGTKVQMSKRDSAIARRVIHTLTLQSISISHNGEAKIQSFVNTISRSVIQNQNS

SEQ ID NO: 17548 - protein, 322 aa, unidentified
  source 1..322: note = protein_73ca8ca
  REGION 8..150: note = RuvC_domain
  SITE 11: note = RuvC_P1
  SITE 52: note = RuvC_P2
  SITE 92: note = RuvC_P3
  SITE 94: note = RuvC_P4
  SITE 97: note = RuvC_P5
  REGION 191..278: note = Tnp_domain
  SITE 199: note = Tnp_P1
  SITE 229: note = Tnp_P2
  SITE 237: note = Tnp_P3
  SITE 238: note = Tnp_P4
  SITE 251: note = Tnp_P5
MNKYKETFGVDIGKDVFDVHGSNKGHNRYKNDETGFKKYLKELPPGSLVVMEATGYYHYRLAQFLYKNQVLVSVVNPLSIKRFIQMRLAKVKTDKSDAKAICEYALINEVPIYDALTDIQSECLQLFRLLDTYLKQRTATKNKIHGEVVLGVPSKFVYRSLIRNRKQLDKEISAIELKILSLVKKDQQEQLTLLTSIPGIGQKTALFLIVVTDGFSKFETAAQLCSYVGITPTIRESGSSVRGRSRISKVGNGKLRNLLFLCSFNACKHNKACTAVYDRIVNKGKSKKLALIAVANKLLKQCFAIAKSGRPYDETYVSILPR

SEQ ID NO: 17549 - protein, 356 aa, unidentified
  source 1..356: note = protein_f6ee3d5
  REGION 15..163: note = RuvC_domain
  SITE 18: note = RuvC_P1
  SITE 67: note = RuvC_P2
  SITE 103: note = RuvC_P3
  SITE 105: note = RuvC_P4
  SITE 108: note = RuvC_P5
  REGION 235..319: note = Tnp_domain
  SITE 241: note = Tnp_P1
  SITE 272: note = Tnp_P2
  SITE 280: note = Tnp_P3
  SITE 281: note = Tnp_P4
  SITE 292: note = Tnp_P5
MPSITPDDAAIDVFGGVDTHQDTHTAAVIDLVGRVLGTQQFPATAAGYCALLAWMRALGRLGGVGVEGTGAYGAGLTRLLRDQDVTVIEVDRPDRKTRRFQGKSDPIDAIQAAKAALAGERTGVPQQRDGRVEALRNLRVSRRSAIDQRADTQRQIKTLIVTAADDLRTQLRGLSVSNLVATCANLRPERADAGSPVTATKIALRSLARRHQQLTIEIADLDELLEPLTAAINPGLRAANGVGADVAGQLLVTAGENHDRLGSEPAFAMLCGVAPIPASSGKTTRHRLNRGGDRQANKALYRVVLCRLRWDPDTRAYAERRTKEGLSKKEIIRCLKRYVARELYQLITSNDLELAA

SEQ ID NO: 17550 - protein, 324 aa, unidentified
  source 1..324: note = protein_146f219
  REGION 8..156: note = RuvC_domain
  SITE 11: note = RuvC_P1
  SITE 60: note = RuvC_P2
  SITE 96: note = RuvC_P3
  SITE 98: note = RuvC_P4
  SITE 101: note = RuvC_P5
  REGION 224..310: note = Tnp_domain
  SITE 232: note = Tnp_P1
  SITE 263: note = Tnp_P2
  SITE 271: note = Tnp_P3
  SITE 272: note = Tnp_P4
  SITE 283: note = Tnp_P5
MEQNEVILGVDTHLDTHVGAVISDMGRLLGTLSVSTDTAGYFELLTWANSFGQLQRAGVEGTGTYGAGLARVLRDHEIEVFEVNRPDRATRRSKGKSDPTDAENAARAVLSGKATDVPKEQSGAAEAMRAVSVVRRSAVKARTQAINQLRALLVSAPQEIRDRLLKTKTAECVEGCARLRSLGKTPMLQTLTATQRLLAKRWLTLAEELKALDTMLDDLTNQHARRIRERFGVGPQTAAVLVAVAGDNPERLKSEAALAALCGTSPLQASSGKTIRHRLNRGGDRTANNALWTIAMVRMRSDPRTQAYVDRRTKACRTRKSTAA

SEQ ID NO: 17551 - protein, 341 aa, unidentified
  source 1..341: note = protein_4e819fc
  REGION 7..149: note = RuvC_domain
  SITE 10: note = RuvC_P1
  SITE 53: note = RuvC_P2
  SITE 88: note = RuvC_P3
  SITE 90: note = RuvC_P4
  SITE 93: note = RuvC_P5
  REGION 211..296: note = Tnp_domain
  SITE 219: note = Tnp_P1
  SITE 249: note = Tnp_P2
  SITE 257: note = Tnp_P3
  SITE 258: note = Tnp_P4
  SITE 270: note = Tnp_P5
MKNVSTIGLDLAKHVFQAHGADKSGAVVFRKKLRRQQVLPFLATLPPCTVAMEACAGSHYWGREIGKLGHSIKLIAPAYVKPFVKRQKNDASDAEAISEAAQRPTMRFVSVKSEEAQAAAIVFRTRDLLVRQRTQTINALRGHLAEFGMIIAKGPQHLSKLIAMVGDPTSHLPEAARSILALLVEQLRALEERVTRLDREIAGRAKEDKVARRLMTIPGIGVVTAVALAALAPSPETFKRGRDFAAWLGLTPLQRSTGGKERLGRTSRMGERTLRRLLIIGASSVAAWTARKGALAGSWLDRMLRRKPPMLVRVALANKMARVAWALLANGGVYRTPIVAA

SEQ ID NO: 17552 - protein, 394 aa, unidentified
  source 1..394: note = protein_fb0518a
  REGION 4..164: note = RuvC_domain
  SITE 7: note = RuvC_P1
  SITE 59: note = RuvC_P2
  SITE 99: note = RuvC_P3
  SITE 101: note = RuvC_P4
  SITE 104: note = RuvC_P5
  REGION 267..354: note = Tnp_domain
  SITE 275: note = Tnp_P1
  SITE 305: note = Tnp_P2
  SITE 313: note = Tnp_P3
  SITE 314: note = Tnp_P4
  SITE 327: note = Tnp_P5
MFLVGIDIGKHKHSFCIIEKETGESIVKPKFFDNNKVGFEELLSSFKGLPKKDILIGMEDTGHYHFALLKFLLDKKYQVALINPVTTDLTRKLSGSHTKTDKLDTLTICDVLTSNQRTKPYRISKVDRFDLYEQKQLTREHHNLKEQSNVLKNRLQKSIDIVFPEFNSLFKSMYGVVYMNILKEFGSADALAHSDIRTIRKCFDFKGRGKRIELTAKELKNAAINSIGFPSIAEVVQIKHLVNQIELVEEQIEELDKKIEEFSIANNSPILSIPGISHFSGTSILAELGDIHNYSKPSQIIKFAGVAPLTYESSQFMAKHTAITKKGSTYLRKTLYQIILPVINNNKVFKDYYNLKISQGKGYRCAQGHCVRKLLRVIFQLLSTNTQFDPALLV

SEQ ID NO: 17553 - protein, 407 aa, unidentified
  source 1..407: note = protein_19fb58f
  REGION 4..160: note = RuvC_domain
  SITE 7: note = RuvC_P1
  SITE 59: note = RuvC_P2
  SITE 97: note = RuvC_P3
  SITE 99: note = RuvC_P4
  SITE 102: note = RuvC_P5
  REGION 271..355: note = Tnp_domain
  SITE 277: note = Tnp_P1
  SITE 308: note = Tnp_P2
  SITE 316: note = Tnp_P3
  SITE 317: note = Tnp_P4
MIFVGDDWAEDHHDVHIMNADGERLASRRLPEGLAGIRTFHDLVAAHVTNPGEVVIGIETDRGLWVDALVTSDYQVYAINPLAAARYRDRHHVSGAKSDAGDAKLLADLVRTDRHNHRPIAGDSPEAEAIKVLARGHQNLIWARNRHTNALRSALREYYPAALDAFDDLACRDALAVLGRAPSPAEGARLSLSAIGATLKRAGRQRNIEQRAAQIQVALRAEHLHATDAVTTAFAATTRAAAGIISEINTQISELETVLATHFDKHPDTGIYRSLPGLGVILGARVLGEFGDDPNRYTTAKSRKNYAGTSPLTVASGRKRAVLARHVRNRRLYDAIDAWAFCALQNSPGARTYYDQHRAAGDLHHQALRALGNRLIGILHGCLRHHTPYNEQTAWAHRQTNQNTTAA

SEQ ID NO: 17554 - protein, 339 aa, unidentified
  source 1..339: note = protein_858c18b
  REGION 6..147: note = RuvC_domain
  SITE 9: note = RuvC_P1
  SITE 52: note = RuvC_P2
  SITE 87: note = RuvC_P3
  SITE 89: note = RuvC_P4
  SITE 92: note = RuvC_P5
  REGION 210..296: note = Tnp_domain
  SITE 218: note = Tnp_P1
  SITE 248: note = Tnp_P2
  SITE 256: note = Tnp_P3
  SITE 257: note = Tnp_P4
  SITE 269: note = Tnp_P5
MNHTAVGVDIAKSVFQVHWVDPHTGEVIKKAVRRDRFLDYFANREPCLIGMEACGGAQHWARQFTKMGHQVKLMPPKFVKAFNIGNKNDPADARAIWMATQIPSKPVAVKTETQQAVLALHRMRQQLVKFRTMQINSLRGLLAEYGEVMGKSREALDKAIPGILAKLSDRLPTMLIDTMREQWSGLTGLDRQIAGIEQRLQAWMKDDVACQAIAAIPGVGLLSATAAVVTMGDAKAFRSGREFAAWLGLVPKQTGSGGKVQLLGISKRGDTYVRTLLIHGARSVLRHPDKAGAWVEQLGKRRPFNVVIVALANKIARTIWALLAHDRQYGREYTSSKPL

SEQ ID NO: 17555 - protein, 344 aa, unidentified
  source 1..344: note = protein_8abf701
  REGION 7..148: note = RuvC_domain
  SITE 10: note = RuvC_P1
  SITE 53: note = RuvC_P2
  SITE 88: note = RuvC_P3
  SITE 90: note = RuvC_P4
  SITE 93: note = RuvC_P5
  REGION 213..298: note = Tnp_domain
  SITE 221: note = Tnp_P1
  SITE 251: note = Tnp_P2
  SITE 259: note = Tnp_P3
  SITE 260: note = Tnp_P4
  SITE 272: note = Tnp_P5
MSQVITIGLDIAKNVFHAHGADERGAMVFSRKLTRGKLLDFFASQPRCTVALEACGGAHHWARELQAMGHHVRLIPPAYVKPFVKRNKNDAIDAEAICEAAQRPGMRFVAVKSEAQQAAGLVFRTRDLVVRQRTQLINAIRGHLAEYGWVAPRGMAHMTMLADLLEDEAMASTLPAVARPMFKLMVDLLGELDKQISVLDREIARRAKEDEAARRLMTIPGIGPIAATAIIALAPPIETFAKSRDFAAWLGLAPRQHSTGGKQRLGSISKMGERTIRRLLIIGGSSMVRSACRHGAPAGSWLERMLARKPRLLVSVALANKMARIAWALLTKKEDYRAPAAVAA

SEQ ID NO: 17556 - protein, 282 aa, unidentified
  source 1..282: note = protein_5d5189f
  REGION 10..123: note = RuvC_domain
  SITE 63: note = RuvC_P3
  SITE 65: note = RuvC_P4
  SITE 68: note = RuvC_P5
  REGION 159..243: note = Tnp_domain
  SITE 167: note = Tnp_P1
  SITE 196: note = Tnp_P2
  SITE 204: note = Tnp_P3
  SITE 205: note = Tnp_P4
  SITE 216: note = Tnp_P5
MTRPGSRSSRCAGRADAGACGAGGDRGYETLAAAALSAAGLAVAVVNPAQVRSFADALGKRAKTDPIDAEVIARFAAASGVRPKPLPDEQSRLLADLVTRRRQIMAMIVAEEARLKRAANRQLKKSIGRLLAALRRELETLDADLDKQIRSSPAWRIKEQLLSSVPGVGKGISRTLIAELPEIGSLDRRQIASLAGLAPFTRQSGKWRGKSFISGGRASVRAALFMGALVASRHNPVLKAFRDKLVAQGKPRIVAIVATARKLLTILNAIIRENQPWRQQNA

SEQ ID NO: 17557 - protein, 400 aa, unidentified
  source 1..400: note = protein_2d7c6aa
  REGION 11..166: note = RuvC_domain
  SITE 14: note = RuvC_P1
  SITE 63: note = RuvC_P2
  SITE 103: note = RuvC_P3
  SITE 105: note = RuvC_P4
  SITE 108: note = RuvC_P5
  REGION 273..358: note = Tnp_domain
  SITE 281: note = Tnp_P1
  SITE 311: note = Tnp_P2
  SITE 319: note = Tnp_P3
  SITE 320: note = Tnp_P4
  SITE 332: note = Tnp_P5
MGGEDKIDVYLGLDVGKGEYHGTALTPAGKKVLDKPLPNSEPRLRELFETLQARHGTVLVVVDQPASIGALPLAVARNAGCRVAYLPGLTMRRIADLYPGEAKTDARDAAIIADAARTMPHTLRDLAPDDETVAELHMLVGFDDDLAGEVTRTKNRLRGLLTQIHPSLERVLGPRLDHPAVLFLLERYGSPAQIRKAGRRRLISMLRPKAPRVAERLVEDIFDALDAQTVLVPGTDAAALIVPSLATSLTAVLDQRKLLAARIEQLLEAHPLSRVLTSMPGIRVRTAARILIDVGDGRGFATAGHLAAYAGLAPATRRSGSSIRGEHPARRGNKQLKRAFYLAAFASLSQPDSRAYYDKKRREGKHHVAALVCLARRRIDVLFAMLRDGTFYEPPKIATA

SEQ ID NO: 17558 - protein, 252 aa, unidentified
  source 1..252: note = protein_eb790af
  REGION 1..58: note = RuvC_domain
  SITE 2: note = RuvC_P5
  REGION 121..206: note = Tnp_domain
  SITE 129: note = Tnp_P1
  SITE 159: note = Tnp_P2
  SITE 167: note = Tnp_P3
  SITE 168: note = Tnp_P4
  SITE 180: note = Tnp_P5
MDAEAICEAAQRPTMRFVAVKSEEQQASALVFRTRDLLVRQRTQLVNAIRGHLTEYGWVAPKGVSYVSMLGDMLEEEMAASLPAAAVAMFRVMLDLLAELDERIAYLDREIARRAREDETARRLMTIPGIGPITATALTALAPAAETFAKGRDFAAWLGLTPLQRSTGGKQKLGATSKMGERTLRRLLIIGASAVVKQASRRGAPKGSWLERMLSCKPRMLVTVALANKMARIVWALLAKGGSYRAPAAVAA

SEQ ID NO: 17559 - protein, 336 aa, unidentified
  source 1..336: note = protein_2eac8f4
  REGION 6..147: note = RuvC_domain
  SITE 9: note = RuvC_P1
  SITE 52: note = RuvC_P2
  SITE 87: note = RuvC_P3
  SITE 89: note = RuvC_P4
  SITE 92: note = RuvC_P5
  REGION 209..299: note = Tnp_domain
  SITE 217: note = Tnp_P1
  SITE 247: note = Tnp_P2
  SITE 255: note = Tnp_P3
  SITE 256: note = Tnp_P4
  SITE 268: note = Tnp_P5
MQITTIGLDLAKHIFQVHGIDANEGVVEKRRLRRGQVLSYFAKLAPCRVGMEACATAHFWARELRRLGHDVLLIPPQYVKAYLKRGKNDAADAAAICEAVTRPSMRFVPIKNEEQQAVLVMHRSRDLLVRQRTQLINALRGHLSEFGLIEAQGPSHVRRLLESMQADSTVPQLARDTLALLASTLDAVSVQIDAIEAKIAAWHKVNPTSQRLATIPGIGPLIASAITATVTDPAAFRGGREFAAWLGLTPRQKSTGGKQRLGRISRKGDQYLRRLLIIGAQTVLLRSKAARANPWIQGLLARCARLKVAVALANKTARIAWAVMMREESYQPVAAD

SEQ ID NO: 17560 - protein, 416 aa, unidentified
  source 1..416: note = protein_184fe4a
  REGION 4..160: note = RuvC_domain
  SITE 7: note = RuvC_P1
  SITE 57: note = RuvC_P2
  SITE 97: note = RuvC_P3
  SITE 99: note = RuvC_P4
  SITE 102: note = RuvC_P5
  REGION 274..361: note = Tnp_domain
  SITE 282: note = Tnp_P1
  SITE 312: note = Tnp_P2
  SITE 320: note = Tnp_P3
  SITE 321: note = Tnp_P4
  SITE 334: note = Tnp_P5
MNAAGIDVSSRKSTVAVLRPFGEVVRVPFEVNHSAEGLASLVQQLKGIEGETRVVMEHTGRYYEAVANVLHEAGFFVSAVNPLLIKEYGGNSLRRVKTDKADAVKIARYALDNWADLRDYTPMDRIRYDLKTLNRQFHLASKHKTATANNLIALLEQSFSGVRKCFDSPVRRDGTQKWVDFAHDFWHADCVRKHSLAAFTERYRKWCKRHGYNFKQSTARQVYDLAKSVVVLVPKSNLTKVLVQEAANQLTIISKSLETYRAEMDHLASQLPEHPVVMGMYGVGDSLGPQLMAEIGDVRRFERKQSLVAFAGVDPMPNQSGEKNVRSNKSSKRGSPYLRKALFNVMTCYLQKAPADEPVFQFLDRKRAEGKPYYVYMTAGANKFLRRYYGKVMEYLSTLEDLLPVDMDSTGLPKHP

SEQ ID NO: 17561 - protein, 309 aa, unidentified
  source 1..309: note = protein_4dd2b63
  REGION 1..138: note = RuvC_domain
  SITE 35: note = RuvC_P2
  SITE 76: note = RuvC_P3
  SITE 78: note = RuvC_P4
  SITE 81: note = RuvC_P5
  REGION 241..309: note = Tnp_domain
  SITE 249: note = Tnp_P1
  SITE 279: note = Tnp_P2
  SITE 287: note = Tnp_P3
  SITE 288: note = Tnp_P4
  SITE 301: note = Tnp_P5
MNEFTIPNNADGFHNLYQKISSLTEDFSNVKVGLEATGHYNYNLLGFLMDKGLPTFVINPLHTNLFRKSLSLRQTKTDKVDAHTIALMMMSGVNLQSYSDTSYHNEELKSLTRYRFDKVKERAKLKTSVSRLVNILFPELEKLVPTLHLVSVYALLSELPSSSQIASCHLTHLTKLLESASKGRYSKEKAIEIRDAVRTSIGSNMPAKSLELKHTIKLIQELTSEINEIEDSIKSIMDSIHSPITSIPGINYRMGAMIIAEIGDFNRFSSPDKILAYAGLSPSTYQSGQLDSSYSHMEKRGSRYLRCAV

SEQ ID NO: 17562 - protein, 341 aa, unidentified
  source 1..341: note = protein_1e7257c
  REGION 6..148: note = RuvC_domain
  SITE 9: note = RuvC_P1
  SITE 52: note = RuvC_P2
  SITE 87: note = RuvC_P3
  SITE 89: note = RuvC_P4
  SITE 92: note = RuvC_P5
  REGION 211..298: note = Tnp_domain
  SITE 219: note = Tnp_P1
  SITE 249: note = Tnp_P2
  SITE 257: note = Tnp_P3
  SITE 258: note = Tnp_P4
  SITE 270: note = Tnp_P5
MSTITIGLDIAKSVFHLVWMNATGKVLKRKQLSRKKVAEYFANLEGCTVVMEACGSTHYWSRVITRCGHEVKAIAPQFVTPYRKGNKNDYNDAEAIAEAAQRENMRFVPLKSLEQQDIQMLHRIRERLIKNRTALSNQIRGLLAEYGLVIPKGIHHLKAQLPGFLEDATNELSTSARRYFQGLYEELDELSIQIKSVDSEVLGISKQNEVCQRLSTMTGIGPIIATALYAGIGNGKAFTSGRHVSAWLGLVPKQHSTGGKPTLLGISKRGNTYLRTQLINGARAALRHCENKNDQVSLWAKKLKERSNYNNATVALANKMARMAWAMLHHQEDYRLKVASK

SEQ ID NO: 17563 - protein, 420 aa, unidentified
  source 1..420: note = protein_ca5c52a
  REGION 33..192: note = RuvC_domain
  SITE 36: note = RuvC_P1
  SITE 89: note = RuvC_P2
  SITE 130: note = RuvC_P3
  SITE 132: note = RuvC_P4
  SITE 135: note = RuvC_P5
  REGION 295..382: note = Tnp_domain
  SITE 303: note = Tnp_P1
  SITE 333: note = Tnp_P2
  SITE 341: note = Tnp_P3
  SITE 342: note = Tnp_P4
  SITE 355: note = Tnp_P5
MTVDLERGYKRRELCGPKQYLNLLLRSVLMIYVGIDVAKDKHDCFITNSDGKVLFPVFTIQNNRDGFDVLFSRIQSSSSDVSNIKVGLEATGHYSYNLLGYLIDKGLHTFVINPLHTNLYRKSLSLRKTKTDKVDARTIALMLMSDVNLKSYSDTSYHNEELKSLTRYRFRKVQERAQLRQSVSRLVTILFPELEKLVPSLHIASIYALLSEFPSAGTIASCHLTHLTKRLENASKGRYSREKAIEIRNAARASIGSNMPAKSLELKHTLRLIGELDSEISEIESEIKRIMDEIHSPILTIPGIGYRMGAMILAEIGDFSRFDSPDKILADAGASPSTYQSGKMESSYSHMEKRGSRYLRFALINATKYVCQWDETFGAYLQKKISEGKHYNVAITHAAKKLVRLIYAMEKSGKPYIKTA

SEQ ID NO: 17564 - protein, 353 aa, unidentified
  source 1..353: note = protein_0b2b237
  REGION 5..163: note = RuvC_domain
  SITE 8: note = RuvC_P1
  SITE 58: note = RuvC_P2
  SITE 100: note = RuvC_P3
  SITE 102: note = RuvC_P4
  SITE 105: note = RuvC_P5
  REGION 277..353: note = Tnp_domain
  SITE 285: note = Tnp_P1
  SITE 315: note = Tnp_P2
  SITE 323: note = Tnp_P3
  SITE 324: note = Tnp_P4
  SITE 337: note = Tnp_P5
MLNAVGIDVSKGKSTVTVLRPAGETVRRPFTVVHSVKGLSELVSYVGSLDGETRVVMETTGHYHEPVLKAFLDAGIFVSAVNPTLVKHHDSDKNPLRKVKSDPADARKIAKYTLDKWEHLRQHSAMDTIRTQLKTLNTQFHFFMQQKVSLKNNLISLLDLTYPGANNLFDSPVRTDGSEKWIDYVHSFWNADCVRKIGLKTFTERYQNFCKHHGYNFQSDKPEELFNASKELVAVVPKDPIYKQLILSNIEQLDTISGQIEEFRRKMNELAFTLPEYDTVMSMYGVGPTYGPQLMAEIGDISRFDHRSAITAFAGVDPGVNQSGTVNYESNRASKHGAPRLRKTLFQIMTTLL

SEQ ID NO: 17565 - protein, 387 aa, unidentified
  source 1..387: note = protein_dec4eee
  REGION 6..159: note = RuvC_domain
  SITE 9: note = RuvC_P1
  SITE 57: note = RuvC_P2
  SITE 98: note = RuvC_P3
  SITE 100: note = RuvC_P4
  SITE 103: note = RuvC_P5
  REGION 221..306: note = Tnp_domain
  SITE 229: note = Tnp_P1
  SITE 259: note = Tnp_P2
  SITE 267: note = Tnp_P3
  SITE 268: note = Tnp_P4
  SITE 279: note = Tnp_P5
MGHVVIGMDPHKRSATIEIIDDRQKVLSGGRFGTDRDGYRAMLAAGRKFGDRIWAVEGCNGIGRHIAQRLVADGEPVVDVPAKLSARARVFSTGQGRKTDPVDAHSVALAGLHSPGLRVITADDAMVALRLLADRRDELGVARSQTVNRLHRLLLELLPGGAKKFLSAAQAKDLLATVRPRDIAGKTRRRLAAEMVTELTRIDKRIKTADTELKELVTATGSSLLQLHGIGPSGAARLLGDVGDIARFADKGRFASWNGTAPLDASSGDQVRHRLSRAGNRRINRTLHIMAIVALRNDTEGRAYYRRKLAAGKTTMEALRCLKRRLSDVVCQQMRTDAKRLAAGPGGHTGASSQSSAADSHPGIGTSDKSLPGPATSKLRTRLPTAS

SEQ ID NO: 17566 - protein, 406 aa, unidentified
  source 1..406: note = protein_72da1de
  REGION 4..163: note = RuvC_domain
  SITE 7: note = RuvC_P1
  SITE 60: note = RuvC_P2
  SITE 100: note = RuvC_P3
  SITE 102: note = RuvC_P4
  SITE 105: note = RuvC_P5
  REGION 271..357: note = Tnp_domain
  SITE 279: note = Tnp_P1
  SITE 310: note = Tnp_P2
  SITE 318: note = Tnp_P3
  SITE 319: note = Tnp_P4
MLLVGDDWAEDHHDIEAQDETGRVLKRARLAEGMAGIARFHDLLGRFVADDAEASEVLVCIEVDRGPWVRALVAAGYRVFGVDPKQAARHREILGSSGAKSDKGGAHALADMIRTRRHQLREVAGDSGIAEAVKVVTRAHQTLIWERTRHMLRLRVALREYFPAALAAYKSLDLTSDAVLRLLVKAPTPEAAAKLTISQITACLKGRRGIPDKAAAIQDVLRAEHLGQAPLVTTAYAATVKSLVAIITVLNSEIKTLQGEVEAHFGRHPDAEIILSQPGLGVILGARVLAEFGDAPGRYASAKARKNYAGTSPITRQSGKTKTVQARFVHNDRLIDALHNQASCAILHDPHVRAYYDQLKARDISHNAALRQVGNRLVGILHGCLKTGSIYDQATAWSHHDHDLAA

SEQ ID NO: 17567 - protein, 341 aa, unidentified
  source 1..341: note = protein_1f30a9b
  REGION 7..149: note = RuvC_domain
  SITE 10: note = RuvC_P1
  SITE 53: note = RuvC_P2
  SITE 88: note = RuvC_P3
  SITE 90: note = RuvC_P4
  SITE 93: note = RuvC_P5
  REGION 211..296: note = Tnp_domain
  SITE 219: note = Tnp_P1
  SITE 249: note = Tnp_P2
  SITE 257: note = Tnp_P3
  SITE 258: note = Tnp_P4
  SITE 270: note = Tnp_P5
MSEASTIGLDLAKRVFQAHGADASGRVVFRKRLRRDQVLTFFAGLPACVVAMEACSSAHYWARAIGELGHTVRLIPPAYVKPFVKRQKNDTTDAEAICEAAQRPTMRFVSVKSEAAQANAVVFRARDLLVRQRTQTINALRGHLGEYGLVVAKGPSHVAQLIAHVEDPVADLPEAARTVLRVLTASLQFLAERVALLDREIARRAREDKEVRRLTTIPGVGPVIATALAALAPPAGAFRRGRDFAAWVGLTPSQRSSGGKQKLGATSKMGERTLRRLLIIGASSVVRKAIKYGTPSGSWLARMLARKPRMLVIVALANKTARIVWALRATGEIYRAPVVVS

SEQ ID NO: 17568 - protein, 392 aa, unidentified
  source 1..392: note = protein_56ce748
  REGION 4..158: note = RuvC_domain
  SITE 7: note = RuvC_P1
  SITE 57: note = RuvC_P2
  SITE 97: note = RuvC_P3
  SITE 99: note = RuvC_P4
  SITE 102: note = RuvC_P5
  REGION 263..351: note = Tnp_domain
  SITE 271: note = Tnp_P1
  SITE 302: note = Tnp_P2
  SITE 310: note = Tnp_P3
  SITE 311: note = Tnp_P4
  SITE 324: note = Tnp_P5
MFIVGIDIAKRFHEASVIAQDGSLVRKALRFANSQAGYNKLMNMVRGLNEPVVFGMEATGHYWLTLFTHLRNDGFTVHVINPIQSDALRGMYIRKTKNDAIDSMIIADVIRFGRYCETSVQPGDLQAMRELCRQRFYVIDMVSDLKRKVLALLDQVFPEYEKLFSDTFGASSMELLSQYTTPEEMLSVSTEKLAELLETASRGRLGLAKAEEIQEAAKNSFGIVLASGSFALIIRQYIEQIRSLESSIAVFDTEIARLLAGFDTQLTTITGIGTTLAAVILSEIGGDIKRFSSPAKLAAYAGVDPTVKQSGDFTGTRMKMSKRGSPYLRRAIWLASTVAAFKDPAIHALYERKRSEGKDHMTVIGHVCRKMVSIIFAVLRDNTPYSPAVISD

SEQ ID NO: 17569 - protein, 407 aa, unidentified
  source 1..407: note = protein_7c8ac24
  REGION 5..164: note = RuvC_domain
  SITE 8: note = RuvC_P1
  SITE 61: note = RuvC_P2
  SITE 101: note = RuvC_P3
  SITE 103: note = RuvC_P4
  SITE 106: note = RuvC_P5
  REGION 272..358: note = Tnp_domain
  SITE 280: note = Tnp_P1
  SITE 311: note = Tnp_P2
  SITE 319: note = Tnp_P3
  SITE 320: note = Tnp_P4
MRLFVGDDWAEDHHDVELMDAAGRVLARKRLPEGVAGMARLHELIGQQLGEDGEDTEVLIGIETDRGPWVAALVAAGYTVYAVNPLQASRYRERHGVSGAKSDRGDAHMLTDMVRTDSHQLRAVAGDSADAGAIKVVARTHETLIWERTRNGQRLRHQLREYFPAALEAFDDLDAPDALELLAKAPDPARAAKLTRAQISAALKRARRRDITGKATAIITALRSGQLGQPPAVTAAYAVTVRSLIAVISTLNEQVKALEGQVEAYFGRHPDAEIYLSQPGLGYVLGARVLGEFGDDPDRYVSGKTRKNYAATSPITRASGKKKVVAARFIHNDRLIDALMAQAFAAMNASPGARALYDAERASGTDHNPALRKLANRLVGILHGCLKTRTLYDEATAWSHHENKLAA

SEQ ID NO: 17570 - protein, 345 aa, unidentified
  source 1..345: note = protein_a4199d0
  REGION 6..148: note = RuvC_domain
  SITE 9: note = RuvC_P1
  SITE 52: note = RuvC_P2
  SITE 87: note = RuvC_P3
  SITE 89: note = RuvC_P4
  SITE 92: note = RuvC_P5
  REGION 211..303: note = Tnp_domain
  SITE 219: note = Tnp_P1
  SITE 249: note = Tnp_P2
  SITE 257: note = Tnp_P3
  SITE 258: note = Tnp_P4
  SITE 270: note = Tnp_P5
MKVSTVGLDLAKNVFQVHAIDEAGAVIVGKALRRRQVMPFFSRLAPCLIGMEACGTSHFWAREIAALGHEVKLMPPAYVKPYVKRGKTDAGDAAAICEAVGRPTMRFVAMKSPEQQSMLALHRSRDLLIRQRTQLVNMIRGQLAEFGIVLAKGIQHALKLVERLLDGEALYIPALAAKVVIILAEQVRDLQVRTSILERDLKTWSRDNQVVKRLQTIPGIGIITASALAASVTDPQQFTSGRQFAAWLGLTPRPRSSGGKERSGRISKMGDQYLRRLLVNGMTSRLRWVRHHPEAQPWAAELLQRKPAKLVAVALANKVARIAWAVMTRGETYRAPQPSTREVTT

SEQ ID NO: 17571 - protein, 339 aa, unidentified
  source 1..339: note = protein_114f071
  REGION 5..151: note = RuvC_domain
  SITE 8: note = RuvC_P1
  SITE 91: note = RuvC_P3
  SITE 93: note = RuvC_P4
  SITE 96: note = RuvC_P5
  REGION 211..297: note = Tnp_domain
  SITE 219: note = Tnp_P1
  SITE 249: note = Tnp_P2
  SITE 257: note = Tnp_P3
  SITE 258: note = Tnp_P4
  SITE 270: note = Tnp_P5
MDEYIGLDVSLKETAVSIRRDGKRVWRGKCASDPQALATLIRKHAPSAKRVVFETGPLSVWFFHALTAEGVPAICIDARHAKAALDMAPNKTDANDADGLAQLAEVGFYREVRVKGYDSMLSRTLISSRTRLVRIGTELSNQIRGMMKTFGLLVPSTKGGRFDDQVRRLLADNEALARIILPVLEAWRSVRLRAAELGRQILANARQSTDCQLLMSIPGVGAITASSYVAAIEDPANFKKSRSVGAWFGLTTRRYQSGEVDYDGHISRRGDAHMRGLLYEAATVLLTRTRGDSDLRTWGLKLREKLGFKRAAITVARKLAVIMHAMLKSREMFARTAAV

SEQ ID NO: 17572 - protein, 390 aa, unidentified
  source 1..390: note = protein_4cf20ec
  REGION 45..189: note = RuvC_domain
  SITE 48: note = RuvC_P1
  SITE 93: note = RuvC_P2
  SITE 128: note = RuvC_P3
  SITE 130: note = RuvC_P4
  SITE 133: note = RuvC_P5
  REGION 252..338: note = Tnp_domain
  SITE 260: note = Tnp_P1
  SITE 290: note = Tnp_P2
  SITE 298: note = Tnp_P3
  SITE 299: note = Tnp_P4
  SITE 311: note = Tnp_P5
MAFLRSQRQRGRAHEKAYDQNPSVSSRCVCVSVCLCVCVSVCSTVAVDLAKNVFQVAGEDTLGQVIYEARIKSREAFLLLLHKLPTGVTVLMETGPGAQAWARLLQTQGKLARILPAQHVADHRSGAKNDRNDVLAILRAGRDQNIAAVPIKSTAQLAMQALHRARQGYGRRHTAMGNQIRGLLLEHGIAMAQGATILGRNVPLILEDATQPLPQLLRELIAEMLGEWSHLGGRIEVLTGRLEAAAREDETAKRLMTVRGIGPIIATALLAKQTEPERFANARMFAAYFGTVPEQHSSGQTVRLGKMCKRGDAYLRSLAIQGAHAVLRQVRPDSEHPDDHRLRRWLSRHGQKGAAVRLANRNLRIVWVLLQNDQTYRRQPAGCQEATMNH

SEQ ID NO: 17573 - protein, 322 aa, unidentified
  source 1..322: note = protein_e620a9f
  REGION 1..143: note = RuvC_domain
  SITE 39: note = RuvC_P2
  SITE 79: note = RuvC_P3
  SITE 81: note = RuvC_P4
  SITE 84: note = RuvC_P5
  REGION 186..273: note = Tnp_domain
  SITE 194: note = Tnp_P1
  SITE 224: note = Tnp_P2
  SITE 232: note = Tnp_P3
  SITE 233: note = Tnp_P4
  SITE 246: note = Tnp_P5
MVRKDGKPFDPQKFGNTHSDRGRLVKKLAKLPNLTVCLEATGVYHFDLAIALHDAGVALMVVNPKASHNFAKVLMKNSKTDAVDANNLAEYAARMDFVPWTRPSGDKIALRSFDRRTCAPEGIDALTRQKAAAKNHLHALSTTSETPKAVLKDARLAISQLEKRIVRLSAEAMALIGQTPGLTRVFTLLTGIKGIAETSAIALMGELLLLPPGLSHREWVKLAGLDPKAFDSGKSVHKKARVSKAGNRHIRSALYMPALSAKQHDPHVKAYFEHLPANGKLPLQAVCAVMRKLLHAIHGMLKNDKPFDNSRFYVIPAVMIPP

SEQ ID NO: 17574 - protein, 403 aa, unidentified
  source 1..403: note = protein_180b40e
  REGION 4..160: note = RuvC_domain
  SITE 7: note = RuvC_P1
  SITE 57: note = RuvC_P2
  SITE 97: note = RuvC_P3
  SITE 99: note = RuvC_P4
  SITE 102: note = RuvC_P5
  REGION 269..355: note = Tnp_domain
  SITE 277: note = Tnp_P1
  SITE 308: note = Tnp_P2
  SITE 316: note = Tnp_P3
  SITE 317: note = Tnp_P4
MVFVGIDWAEAHHDACLVDEIGRVLAKRRVAEGLEGVGKLHALIAEHSQDPASVVVGIETDRGLLVGSLLAAGYQVYAINPLAASRYRDRHATSRAKSDPGDARVLADLVRTDRHHHRPVSGDTELAEAVKVLARAHQGLIWSRQRQVNQLRNTLREFYPGALVAFEDLDSADALAILERAPTPSQGRGLARAKIVSALRRGGRERNLETKGAEIQNRLRLPQLEAPPLVAQAYGRSVSASVAVIQQLNLQIAALEKELAANFEMHPDAEIYLSLPGLGRVLGARALAEFGDDRTRFAHPKARKNYAGTAPITKASGTRKVVLARVARNRRLADTCYQWAFSALSTSVGARHRYDVLRGRGQTHHQALRALGNRLVGILHGCLVNRKIYDEDFAWRRAVEVAA

SEQ ID NO: 17575 - protein, 407 aa, unidentified
  source 1..407: note = protein_e422c4d
  REGION 5..164: note = RuvC_domain
  SITE 8: note = RuvC_P1
  SITE 61: note = RuvC_P2
  SITE 101: note = RuvC_P3
  SITE 103: note = RuvC_P4
  SITE 106: note = RuvC_P5
  REGION 272..358: note = Tnp_domain
  SITE 280: note = Tnp_P1
  SITE 311: note = Tnp_P2
  SITE 319: note = Tnp_P3
  SITE 320: note = Tnp_P4
MRLFVGDDWAEAHHDVEVMDGAGRRLAKARLPEGVTGMARLHAMIGELVGDEADEAEVLVGIETDRGPWVAALVAAGYTVLAVNPLQAARFRDRLGVSGAKSDPGDAHVLADMVRTHGHELRPVAGDSARAEAIKVVARTHKTLIWERTRHTQRLRHALRDYFPAALAAFEDLDAADTLELLGKAPTPAQAARLTIAQISAALTRARRKNVAEKAAVIQAALRAEHLGQPDVVAAAYAASVQALLAVLTVLDTQVKTLQGQVEAYFGQHPAAEVILSQPGLGPVLGARVLAEFGDDPHRYTTAKARKNYAGTSPITRASGKKKVALARFVHNDRLIDALLTQAFSALNRSPGARAYYDRQRARGASHNAALRQLANRLVGILHGCLKTSTLYNEQTAWSHHVENIAA

SEQ ID NO: 17576 - protein, 338 aa, unidentified
  source 1..338: note = protein_052bc59
  REGION 6..148: note = RuvC_domain
  SITE 9: note = RuvC_P1
  SITE 52: note = RuvC_P2
  SITE 87: note = RuvC_P3
  SITE 89: note = RuvC_P4
  SITE 92: note = RuvC_P5
  REGION 211..297: note = Tnp_domain
  SITE 219: note = Tnp_P1
  SITE 249: note = Tnp_P2
  SITE 257: note = Tnp_P3
  SITE 258: note = Tnp_P4
  SITE 270: note = Tnp_P5
MKITTVGLDIAKSAFHLYAVNKMGRYMKKKQLKRKQVLPYLARLEPCVIAMEACGGANYWAREMKDLGHEVRLIAPQYVKPYVKGNKNDYNDAEAIAEAAQRPTMRFVPIKSVEQQDIQNLHRQRERIKKARTALVNQVRGLLAEYGIVINKGVAAVRKGLPGILEDAENGLTMRGRELFADLLEELRVLDERFKQSEKQIEISNRGNEVCQRLDEILGVGPITASAAYAAAGDGKDFVNGRHFSAWIGLVPGQHSTGGKSTLLGISKRGNAYLRTLFIHGARAVLRHSANKTDRFSLWAQALLERRGHNKACVAVANKMARMAWVIMAKGEPYRAAT

SEQ ID NO: 17577 - protein, 341 aa, unidentified
  source 1..341: note = protein_0b2d1b2
  REGION 7..148: note = RuvC_domain
  SITE 10: note = RuvC_P1
  SITE 53: note = RuvC_P2
  SITE 88: note = RuvC_P3
  SITE 90: note = RuvC_P4
  SITE 93: note = RuvC_P5
  REGION 209..294: note = Tnp_domain
  SITE 217: note = Tnp_P1
  SITE 247: note = Tnp_P2
  SITE 255: note = Tnp_P3
  SITE 256: note = Tnp_P4
  SITE 268: note = Tnp_P5
MSDLALVGIDLGKHTFHLHGQDKYGRELFRKKLSRQQMMRFFANLSACTVVMEACAGAHFVARELTAMGHQAKLISPQFVKPFVKGNKNDFVDAEAICEAASRPSMRFVSPKTEAQQTLSVLHRLRESLVGERTKAVNQMHGFLLEFGVSLPQGLAMMKRLASVLAEHELPVRLTVLLQRLHDHFVYLDEQIKALDKELVCQLADDDLGRRLLGIPCVGPITASLLAVEMGDGQQYGCSRDFAASVGLVPRQYSTGGKANLMGISKRGDKNLRRLLVQCSRVYMQRLEHQKGPLADWVRSLLTRRHSNVVACALANKLARIAWAIAANHTEYEAGPSTIAA

SEQ ID NO: 17578 - protein, 347 aa, unidentified
  source 1..347: note = protein_ec42693
  REGION 6..147: note = RuvC_domain
  SITE 9: note = RuvC_P1
  SITE 52: note = RuvC_P2
  SITE 87: note = RuvC_P3
  SITE 89: note = RuvC_P4
  SITE 92: note = RuvC_P5
  REGION 214..298: note = Tnp_domain
  SITE 222: note = Tnp_P1
  SITE 252: note = Tnp_P2
  SITE 260: note = Tnp_P3
  SITE 261: note = Tnp_P4
  SITE 273: note = Tnp_P5
MQIAVLGIDLGKNSCSVAGLDASGRVVLRRRLHRDSVVKLASRLPACVIAIEACCGAHHLGRILQMSGHEIRLMSPEYVQPYVKAQKNDERDAEAIAEAATRPTMRFVELKSEQQLDMQSLHRARSRLVGERTALINQLRAVLLERGITVAQGRHRLQRYLALALDSDYTPPVPLSPRLRLLIDDMQAQWSELDRRIAAFDAEFVAEARSNTAARRLSTIPGIGVLNATALIAAVGDARSFARARDLAAWLGLVPRQATTGGRPRLLGITKRGNKYLRTLLIHGARAALPSLATNEGRLGDWLRGLSARAHRNIVVVALASKLARIAWAVLRSTTIYSAATGEPSVA

SEQ ID NO: 17579 - protein, 418 aa, unidentified
  source 1..418: note = protein_b97b07f
  REGION 5..172: note = RuvC_domain
  SITE 8: note = RuvC_P1
  SITE 69: note = RuvC_P2
  SITE 109: note = RuvC_P3
  SITE 111: note = RuvC_P4
  SITE 114: note = RuvC_P5
  REGION 280..366: note = Tnp_domain
  SITE 288: note = Tnp_P1
  SITE 319: note = Tnp_P2
  SITE 327: note = Tnp_P3
  SITE 328: note = Tnp_P4
MRLFVGDDWAEEHHDVELMDASGRRLAKARLPEGVAGITRLHAMIGEQLVELVGENAGGNAGEVEVVVGIETDRGPWVQALVAAGYTVFAVNPLSVKDYRRRHRVSGAKSDAADAHTLADMVRTDSHQLRPVAGDTPEAEAVKVVTRAHKTLIWERIRHTQRLRHALRDYFPTALEAFDDLDATDTLELLGRAPDPQSAARLSFNQIRAALKRARRRAVDDKAAAIQKVLRSEHLEQPPVVAAAYAATTRTAVAVLTTLREQIRALEGEVEAHFGRHPDAEIILSQPGMGMILGARVLAEFGDDPDRYASAKCRKNYAATSPITIASGKKKTVLARYVHNDRLLDALMAQAFSALRASPGARAYYDHLRARGLEHNPALRQLANRLVGILHGCLKTRTLYDETTAWAHHTQKTSKTAA

SEQ ID NO: 17580 - protein, 388 aa, unidentified
  source 1..388: note = protein_3717739
  REGION 4..159: note = RuvC_domain
  SITE 7: note = RuvC_P1
  SITE 57: note = RuvC_P2
  SITE 98: note = RuvC_P3
  SITE 100: note = RuvC_P4
  SITE 103: note = RuvC_P5
  REGION 264..351: note = Tnp_domain
  SITE 272: note = Tnp_P1
  SITE 302: note = Tnp_P2
  SITE 310: note = Tnp_P3
  SITE 311: note = Tnp_P4
  SITE 324: note = Tnp_P5
MFFLGIDIGKNTHVASLLDEKAKVIFKAYSFANTLDAAEALLVKLEPYKDSLEIGMEATGHYWLSLYSFLAEHNFIVHVINPIQTDGWRKGIEIRKRKTDVIDSVLIADLIRYGDFLETSLADEDILSLRNLTRFRAYLVNSVSDLKRKAIAVLDQIFPEYASVFSNVFGQTSKELLKSLSLPSDYENLSATKIEEVLSNITHKKKASETISTLSDKASRSFGISFCKDSFAFQLKLIIEQICFIEEQIASVELEIEQLMSKLGTNIKTIPEIGNVIGAVILGEIGDIERFDNPSKLVAYAGLDASISQSGEYEASSGKLSKRGSPYLRKALYMAAQRAEFCDPVFHAYYEKKRNEGKHHLVATNAVARKLCHTIYAILKKDIPYEIQ
